United States Patent Application Publication US 2015/0052636 A1 - sequence listing, part 26

SEQ ID NO: 91399 - DNA, 868 bp, Eucalyptus grandis
  Intron number 2 from transcript Egrandis_v1_0.011375m (loc us Egrandis_v1_0.011375m.g) derived from phytozome v7.0 (c hr-ID scaffold_11; pos 8420968 to 8421835 reverse strand)
aggagctgtggcttaattccaaagtaaataatctgtttcctcgtgactgttggtactttgctttacatgtgttttccttctgtttgatgatgtacctttatatgcgcattcatcccctgatgggaattcctgcccgagagtactgtgtagatagatggcagattgcgtaaatttgaattcccactagttgccttgctgtgcaacgaagatgatgcacgatgggtgattggaggaattggaagagagcgagggcgagttttttcatttaaatttgcttactgagactgcaaagcagtcgtgctgcatgcttattcaatgtgccaatttcgagcaaatgttatacatgcgaccttgacattttgaaagctacttatggctctgcttaaaattcttgagcttgtaactatctaatgattttgcgatgggctgtaatgaacacatgggacatttgtattaatctccaatgcgatggcaagttctgtgacttcttttaacacggttggcattggcaggtctggcttgactttatgtctgatttaactgctgtggtaataaatgaatttaattgtgacagggagatactgaaatttactagttagtaacccgatacagttggaggcactgtctggagtttgctcatgattttatagtccgtgggaaagtgatatcaatatactttactatgcttgatcactccattttccatcggtatgaggaacttctgtgatataacaaatcagtcccatcatctgctgatgcaataggctgttaattccaaaagaagtcattcatacatgctgcataatgaatttgatcccttctcaattttctgtttaggagcatcgttcgattgcaagattcataggct

SEQ ID NO: 91400 - DNA, 737 bp, Eucalyptus grandis
  Intron number 3 from transcript Egrandis_v1_0.049327m (loc us Egrandis_v1_0.049327m.g) derived from phytozome v7.0 (c hr-ID scaffold_2; pos 2804156 to 2804892 reverse strand)
ctcttggtgccggtagcatcaaagcactcgtcttggtaagctccctcttttctcccccaactatctattgcactcaaatttttttcctatcaaattaggtagtcttgagctcctctcatcccaaagactcaaaggacgaagcttttcctcacacttataaactgaccactaacctcttccacagccgacttagaataaaccccaacaacaatgttgtccacccatattttttgaagaaaactttctccaacagttgtttatagaagaattacaaatataaacattacttacatttaattaaagttatttaatcatgggtgatgttatgtttctaccctacaaatcatataacactaaatgaatatgtttcctaattaggaataaaagatataaccatttgttcttttgtgcctaccaagattagtcgggtaaccgagttgatgacttaattaaaagaattctaaagattcaaattacaaatttatgtaataagttctcattaattcgaaaatattcacaaatttggacagtaattttttaagatatagtagaagttataagtctctctctatatatatttcgcctcattcagttgtgactcatacgtttcaaagaatacttgtgagtcataactgaatgaagcgataagcatcattagttgtccctgatggttgattattaagtacgcatgtgcttgtgcaggatatatttgccgctggaactgatacaacgtacac

SEQ ID NO: 91401 - DNA, 775 bp, Eucalyptus grandis
  Intron number 2 from transcript Egrandis_v1_0.007824m (loc us Egrandis_v1_0.007824m.g) derived from phytozome v7.0 (c hr-ID scaffold_7; pos 50211271 to 50212045)
gaatctcgtgtctgctctgtcggggtcagattcaggtgtgcaattccttcgcgatgggttgggggggtgcagaatctctcttttgcgacctttggatggatctgatttgtagaaagccgttaaagtttgcttgaattgtcgtctgttgagattgtttagtcttgttaagaaagaccctgttatatctagtaatgtcttgattgaagtttgtgcagttttgttgtgtaataattgttgggaatcctctgcagtagatggcgttgtgcttctaaggttggtgagctaaatgaattctgctttaagtgtatctcaaagcactggactgggtttatttatacttccatgcttttgccttgctttattgatatgccaagttggatgagactcttttgaacatagtgattattaaatcctcattaccccaatcttctcgttggacttcggtctcagaagatgacttgtctaataacatatgtttaattagcattttatgaaagcttgattctaccttttctttataattgttttttctgtaagatgtttatacgctttggtttttgggcattctccaattttgattggcatctcttctctttgtgggcttttatatcttgttttgccaagaggggaacttttaaatattgtcatcagtttgaatggttttcttggaagattgagaatgtctccctagctaccgtgttgcatctaacatgctctgtcgcaaattcgttttctggcagttagattgtcactgccctgttgcacttctggaaag

SEQ ID NO: 91402 - DNA, 731 bp, Eucalyptus grandis
  Intron number 1 from transcript Egrandis_v1_0.023223m (loc us Egrandis_v1_0.023223m.g) derived from phytozome v7.0 (c hr-ID scaffold_7; pos 22999599 to 23000329)
ggttccagggcacgccctactcgcaccgcctgaaggtaatttgaatcgaaatcggaatctgtcttctctctctctcttgatttccccccggaagggttttggattttgtcggtgaaaggaagggccttttgtgcgtgaaatttgcggttttgaggcaggctttggggagttgaaaggattttgatggcttgtgaattgagttgcagaaagtgtacatagcatcaacaaacaacgctgtttggtttgaataatttaagattttgtagcttcgatctctctcttgttctatggagaattcatgagttttactctgttgccattgcatcttgacaagttcgtagagctttatgcaacagattgttcaagctataccagtaagactagtttttttgtcttgcaaaaaggtctaaacgaattttgcacattgggcacagatgatgaatttgtgttcttcaccctaaaaatcacgcaacatgggtattaattgaattgcgaattgctcgagttgcgaaaattatacggttgtcctgtttttatcagtttctgaggatgtatatcacttctcttgattgcatgcttgttttgccttgttgggcggtggaaattggaaggctgctctttgatttctttgtgttcctttaaagatcattgtaatttttctctgaaaaggctgttggggatgatcgaagtttctctctcgaaatttccatgtacacaggttatccagggcg

SEQ ID NO: 91403 - DNA, 910 bp, Eucalyptus grandis
  Intron number 1 from transcript Egrandis_v1_0.011094m (loc us Egrandis_v1_0.009674m.g) derived from phytozome v7.0 (c hr-ID scaffold_11; pos 37233197 to 37234106)
ccgccgctgccgccggtttccagattctggtccaggtcctctgtctctctgtttttctccttaaagcgtttttccagcccgggaacatgtgaaattaggtcaaaggttgtcctaaatcaatagctgtcgaagggaattcgagggaggacgagctcggtcaaagcgccgtcgtccgtcgccgtcggcggtcgcccctcgtcgcctcgtcgtcgccgattgggttgcttcccttcgcgtcccccatcgctttcccttgcaccgttttggtcgtcgtctccttagcctcctctctgttcgagttcgtcgtccactcgcgtcctccttgcttcactcgttttccgtccgtctccttcaacaccgccctttccgcaagtttatatttttccgaagagggcgcggagtatgtacccataagaatggaggatctagattgacgtgtcatttgtggagcttatcaatgttgtgttctcgcgcttctctgagtcgtagagatgcggtggtttttaatctcgacgagaacggatgtttgtttaattattaacaaggaattcatttgctggtcttagtgatatcttttctctgaaccttatgataggatgtcattttatcgttgaatggaatatgtggggggcgctattgaactatatttgcggttcttaagagtattatgcatgtagttgcgtaaaacaaaggcttcaaagaacagttaggctttgatttatgaaatttgtgggatcttaggatcctcaatccgatcatctgggaccccaaaatgaccctacttaggatcccaatcctgacaaccttgcatttatcttcgtgcgtgagagcaaaacatctagtgttttggacatccatttttttggcgttaatcttggtctgtggcctatacttcagtttgtcaggtacc

SEQ ID NO: 91404 - DNA, 621 bp, Eucalyptus grandis
  Intron number 2 from transcript Egrandis_v1_0.052752m (loc us Egrandis_v1_0.052752m.g) derived from phytozome v7.0 (c hr-ID scaffold_7; pos 2548303 to 2548923)
gtgctgctaagcaacagcatttttcaccgtgagtttctgcataccagacgtgatatataacttcagcaaactcgagcttttccacttcacttttgagcaaggttaatcacatcagtgtagactggtaaaaaggatattaagtacctagtatgttatgatattttgatcctagtgcaatgggattttgccattaggtttaactccataacgccaccagagttgaatcagaaagctgaagacttgcttaagacgtcaacagatcaaaggacgttagaaagttctcatctcactccagattcaatatagactcgtggtctgtatagcgaatctatttgtctccactgagcatctcgtcttgtctagagaattattctttaatgtgaaatcattggctgtgtatttattgcgtcagtttatctttcatttcatccattcaactaatcatcttgtgggctgtaggcttgtgttgaaggtttttttattctttccattagttatttatatgttgaagtatgagattactttctgtctctttcctttcctttttggattgtttaaaagctttgaactcattgaccagatagagattcgttctctggaacaaaggagagaaaccactcc

SEQ ID NO: 91405 - DNA, 709 bp, Eucalyptus grandis
  Intron number 5 from transcript Egrandis_v1_0.005655m (loc us Egrandis_v1_0.004105m.g) derived from phytozome v7.0 (c hr-ID scaffold_11; pos 5226552 to 5227260)
ggtcacgtgaacaagtgcagatacttgaaaagagggtgaagttatcctgccatttttgtgctattcacttaatcataattttaccttcgattagaaagcttcccttcgatgtttcaaggactgtgatgcttgaacatgtttatgcactcagattggcttatcaactgtatttgctgagggcagctataagatgttggcctcttccacaccagattacggaaaagttgacacaaagcttcttatatctcttgcatcaatatccatctgtacaggctatgttatcacggagggcagcaattgcctcttctgcctctatacaacataactttttgttgttattatattagatagtccgataattcattcaacaggcaccaaggggatgtcaatgtgatttgcaaaatcatatacgttcttttttattagtaacccttattgttgttattggtgtaattgtcttggacttagaggaagcatttcgtcacatgagttgattgccaacttcttagtcaatttttattgataaactaatgaaagtttgctacctttaatcaaaggactccgtgtaaaaagaagttccatctgtggatcctcatcacacttctcagccagtttcttattcgaacctttgaattactgagttgtctccttatttgatgctaaatattgattctagttcttttacattttctctgttcagctacacgag

SEQ ID NO: 91406 - DNA, 991 bp, Eucalyptus grandis
  Intron number 1 from transcript Egrandis_v1_0.027847m (loc us Egrandis_v1_0.027814m.g) derived from phytozome v7.0 (c hr-ID scaffold_11; pos 29318225 to 29319215 reverse strand )
accgccgaccctcgacgacacgttactctccctacgtaggtttctctaagttttattttgttaagtccactaattggttaatcccaactttagattctctagttgtgtaggaagtgaagtacacccatatatctcattggtttttagccagcctcaataggttagtagtaattcatttttgagaaaattttcatactcttaatttgagcactcaatgtcgtgcgaggtatggacctaggagagctcgtgcctaatcattcgccataggcccgtcctttaggtaatagcccttaacctattccctcctccaagagataggttgcaacaactgttcaacgtcgtcaattagattccgtcaaatctattaaggagcaatgccttcttggtattacttctaccatccaataacgttgattaaatttcatttcgacgttgtgtcctcgaatttatctaggagcaattcctacctttcactgtccagcactatcgaattaattccaacattgtgtcctctaacccatctagaagcagtactttcctagtgtcatttctatcgttgacgttgttgtgtaatccatttgatcttgtggttttttattaatatattgaagggtgtttgaaccaggctattgattagattccgaaatttgtcatcatcggttttgagcttgtattgaatgatttcattagactcaatactctattatatttatatttgtttgcttttgaccctctctatctaatactagtatagaatctgagtctccttaaataaaaataaaaaacatagtatttaatgaaaaatacttcattaagggatctgaaatcggcgaaacggaatccttgctcctttatataagctaccaaagttggtggaggcctcctcatttatggcactaacttgcctcctgccagctttccagcttgttggttgtcaagtttgacttttcttctaggcaagttgcggcttctatagaagaggagtgagatc

SEQ ID NO: 91407 - DNA, 736 bp, Eucalyptus grandis
  Intron number 5 from transcript Egrandis_v1_0.023031m (loc us Egrandis_v1_0.016529m.g) derived from phytozome v7.0 (c hr-ID scaffold_2; pos 1668832 to 1669567 reverse strand)
ccacgaaagctgatcttttcaggcaacaggtgagagtcactttgcagttttggcaaatttaatttgagtggtgaccatttatctttgtggcatgttgtgatcatgtttttacaacgaccaacaccaaagtgatcactttttaacctgccgcatgatgtcatttaaggattatatgctgactgggcacgtcgatgagccatctaggagtgaaaaattaataaaatattggctacgtcagatttctggggacctaaatcagagttggcttaagtgattgttttttcaaaaaaagcggcacttaaataatacgaaaaaaacttttggcattaaactgagcgccatacataatttttggcacttctagtttcattttcccttattttattggagagtagattcctaggtcctgcaggagaaaatttcttcatgtgtggataatgcatataggcatccttatgtatctaacgcttgttttactaaaacaatagatacccaaggcttgaggcctttagagtagtgttctgtgattttactttgaactgtcaacttttatatctgtgaacagtaacgatacgctgttactccttgatgcttatggcttttgccacaatctgaaatgcttcctgccatataactgtttgaagttgggattcattagggactgaaaatatcatattataaatagacaaaatggtgtgattgtttgggaacttaattattgcagattgaaggtgga

SEQ ID NO: 91408 - DNA, 841 bp, Eucalyptus grandis
  Intron number 3 from transcript Egrandis_v1_0.014972m (loc us Egrandis_v1_0.014972m.g) derived from phytozome v7.0 (c hr-ID scaffold_7; pos 22981185 to 22982025)
gttcctgctgaggtatcaagaactttttctacaacttggctgtttggcatctcttggtctacttctaactttttatcctccaatctgtttcctctcaatcttcaatatctgtgctctcagtatttgacatatcttatcatggcttgggctctgatgcataattgttgtgatggaacttgcttgatgtgtgatttggaggagaatgactatggatgctctctagaagtttgatctttttttggcaaagatttgttctgaggcaatcaattgcaattttctgatatgtgtacaattgtttaatttcattgatgtttggctttggcccaaatccagcttcctctttgtatgagatgaatagaggaagtgagattttgaggaccgtaaaatatgctggcccaattgtttgatatgtaccgtggaggagaatgattatcagtgctcagtagaagtttgatcttttctggcaaacattttttactgaggtgattgattggaatcatccgatatgtattcaattgtttaatttcgttgatgtttggctttggcccaaatccagcttcctctcagtacaagatgagcagaggaagtgagcttttgaagactgtaagagatgcttccccttggtcgattcctttaggaagtgggtcaataatgtggtgtgatagacaagtaactctggatgactgtaatgacgattttgatgcctgaggatgctttgtttaagatccagaaggcagaacttggttcaagatatgcttgagtaacataaatcttgagttctttatacatttcctttttggctgcaggttcttacagagctgaaaccatttgttgtacttgc

SEQ ID NO: 91409 - DNA, 786 bp, Eucalyptus grandis
  Intron number 1 from transcript Egrandis_v1_0.005638m (loc us Egrandis_v1_0.005638m.g) derived from phytozome v7.0 (c hr-ID scaffold_7; pos 45162657 to 45163442 reverse strand)
cgaagcatttgcttcgttcgcatccccgccagctcgtaggtttctgcttcggcagcagttcttgttcttgagttagccacgcgagagcgtgtgaagttgtcatcttttttggccgattgcgagtacccattacggtgattgtttgttttgctcctgtttgatctctgcccgagctggttacggcttcatttctgcatgctctgtcatcgagagttgtccttgtggcttctgatcgcttcggatgggcttgtttagcttgaattcacccgagttttttgcgctgtttgatgttcttgtgggatgtatggggagaaaaaatacgggagaaaaaatacgggtatagattctttttttttttgttctgacagatgtgaaaggctgttgacttggccatttgtgattttacatagtatgaaagagaggttgatgttgtttttggtttaaaacatgaacagaatttaacctgaatcgagccaggtgagtctcttggaagttattcggtgaaataattctttacccttttgtgccctgaagattggttgcgctgcttaagcttactcttaactggggggtgggtttatacttgcaagtcaaagactgttagttggataaattttgcaggttaacgtctgtcctgcattttctgcaatatgctcttcaaccgtgcattctggcttctttctacttgttctcttgatcttcaagttgtgaagtagtggtaatgactgcttcaattgcatctctttttcaggtcaatttccttctgttagatttgtaggaggtttg

SEQ ID NO: 91410 - DNA, 897 bp, Eucalyptus grandis
  Intron number 1 from transcript Egrandis_v1_0.009703m (loc us Egrandis_v1_0.009703m.g) derived from phytozome v7.0 (c hr-ID scaffold_7; pos 46981691 to 46982587 reverse strand)
acgcgaggtaattctcatggattctctctctttctcttctttttttcttttttacctttgaaggattcctttgtttccggtttgatgggggttcggcgtgatgtctcgcttaactgtcctcgatcatagatttttgtctgatttttgggtctatcaagtcagaaggccaagtcttgttgttttcggtatcggaggttatgagtttcattttgggattgctagtgatgtgatggcttatctattgcatgtcgtgtatgagaaaaggtgtagaaatttggtggatgcttagccgtctgtgtaccgtgtagttgcgtgttgttctgtctgtgcgaaattttgctttgattcaatgcttgatataacgtcatggcttggagccttgttgcaaattgtaacctgtatcctctgaaggagttttttttgtgagatgaaattattgcattttcatgtacagtatattctcggtgtaatgttacttgtggtccttgtacttttacttgaaaatcaaaacttttgtgggattagagaaaattaatttaaattaggatttatgagagttatgtagacttttttaccttatcaatttgttaaatatttagtaatatactactattattggaaagcttgtataaaagtttctgagtgagggatattttggatttgctttatactttagagaggtgatggattgaacttactgaatgatgtgaaggagatttagtaatggtttgtggttacacttagctagtaaatatcctatgagcatgtgaaaatttgctacccagtagatttgtcaatgattcgcatattgcttcccacatcaaactaacttggcttttggtgtctcaagtctagctgcaaaacttgtttttaatcttgttgcttgtttttggtagg

SEQ ID NO: 91411 - DNA, 496 bp, Eucalyptus grandis
  Intron number 2 from transcript Egrandis_v1_0.009826m (loc us Egrandis_v1_0.007509m.g) derived from phytozome v7.0 (c hr-ID scaffold_7; pos 24810052 to 24810547 reverse strand)
ttgaccccggctcttctttccttgagctctcgcaggttcggagactcttgattttgtctttttttttcctcgggctgtcagttcgtgtttgagtaaattcatgtcattgcgaagtgttgattggtctgttgcttatcctcagtctttagttttgaattagtatcgaggtgaggaaagtttatgacggagttgacacgttgtcggtgcgcattctgttagatactctagtccaagccgagccgcttcttgaacaaaattaaattagcggcaattgatcgacccctgatcgagattatatcagatgcacattaggctactgcataattatgggccgttgttgtaacagcagttagctctgtggtttggaaagaaaagaaattctgggaattagaagtttctattatcttgtacttctcttgagttaagtttgtgcaatgaacttttgtcttatttctctacttcttatcctgcatcttatgggaaaagcttgcaggcc

SEQ ID NO: 91412 - DNA, 876 bp, Eucalyptus grandis
  Intron number 1 from transcript Egrandis_v1_0.013816m (loc us Egrandis_v1_0.013816m.g) derived from phytozome v7.0 (c hr-ID scaffold_2; pos 58946993 to 58947868 reverse strand)
agtagaagctacccagagctcccgttccactttgggtaatggaaatagtgtcctagatcatgcgtacctactactactgctgctgctgctgttattatagaatgccctctctgtttcttatttatcttgtctttttcagggtatggataaactccttcttcgaaattttttcatgagctgaggcttttgggggattttcgaggagtcgggtctttgtgttgattcgtctctctctctctttttttttttttgaattttgaattttgatccaacagctttagtgtgatcgctgtgtcggggcattgtggttgagagtcgtggcttattcgttcttgagctggttttgggattagcttgtcggtcttgatttggtcttgaattcggtttgtatggggtcctgtgaagtaattattttgttctttgacggcgatcatggagttcacaaagagtgtttcttgcacgcaagtatcgcagagagttagcttccatgactgcggatatcttacttgagtgttcggacgttcgagatgagagcttaggatccaatgcgatggctattcccacattgaaccaggaaacatgactctgtgagactgaatttgctaggagagactcatctttttttggttgttgggctttgtaagtgggcttctctttctctctttctgatctcatgcgtgttaacagaaaaagggaagatcgtcatttctgttcgagttttgtgatttttgtggtcgactagacattcttgctgtcctgatgaaatttgggcagaaaacgaatgagttctttgagattgaatttgagcaataactatggtttttttttctccttgaatcaggaggagtctcgaaaaactccagcaaaaccagccgt

SEQ ID NO: 91413 - DNA, 952 bp, Eucalyptus grandis
  Intron number 1 from transcript Egrandis_v1_0.019460m (loc us Egrandis_v1_0.014007m.g) derived from phytozome v7.0 (c hr-ID scaffold_7; pos 40030786 to 40031737)
ctcggcgctgaagctcctcgactccatccctcccggtaacttttctcgactcgatggtcgggaagcttcgtcgatgatccctttcgtgatcttcggatggatcggatcgtgttgagagctcgtcgtttggttgagccggtagttcgtggaaacttcgggagaggtggaattcggcgatgttgaagtctcgcgcggcgatagttgtcgccgagggttttgttttgagggggcgaacgcgaatattgcgttgtgcattgcgggatatctgggagcatgcgtttttttttttttttttttttttttttttgggggggggggagatttgatccgtgtttgctcttgtgcatttcgtgtgatccagttaaaaggagctttcttgtgcttctgtgccctggtgtagtcggtagtagaaagatacgtcagtttcatgcttctgcgtcttcgtctgtgtatctttttttgttgaaagttttgaaaagtacgctctttgactgctttacttatcttctttgaaacggcaattgttccattgtggctggagctagtggaaagcggagtgtgggtttgttaagaaaatgagagcaatgaaaagaatggcggttctcgtccatctcattgaattatggctagtggtgggatgggagtaaagatgcttcaaatagctgatattaagtcgttacagacattcgcatttggttatcttagtgatgctcaggaatgagtatgtttggtctgagtagcattggtaaatgactttggtaaaaggggtggcgccccttcgttgctattatgatgattcttcgtgttataaccagtagtaaactgaaaataatacagttgggcttttctctttagacagtgtgaaaataattttctggtttattaatgctgcgttcgcttctctctgtgttgggcagaaaagaggaaattgcctctacaacgagcaacatat

SEQ ID NO: 91414 - DNA, 602 bp, Eucalyptus grandis
  Intron number 1 from transcript Egrandis_v1_0.019977m (loc us Egrandis_v1_0.019977m.g) derived from phytozome v7.0 (c hr-ID scaffold_2; pos 2330978 to 2331579)
aaggtttcaagagcctcggcgtcactttagttcacgtgagtagttcttcccgtgccgtgcgatcctgttcgcttcgcacgtttggttctgcttcgagaaaaatcgaagcgtcgcctgccgttatgtctcgttccgcatttccgagaaatgtttttagcagtagaatcggagtcgatttttcatctccatctttcgtgagatcgcggttgatggagtcacgttacgatttggtgtttctcttacgaaccgagtacatttgtagacaaatcttacgaaattttccatatgttatgtactgtatagatgcaatttttttacggtaagatgccttgttatagcattttgaagatcggtaggcaatgtgtggacgagcgttatactacggatagtagcttcgtctttttatttctcatcatactttgtctcgtctggtgaaggtattgaagttttatctgcatcggattatgtttcctcattttcttagtcttcctgctggtcaaaaataggattttttttatgattgctaactttattgattgtttgtccatgctcttggttatttgattctcagggagacatatacgatcaagagagtctattga

SEQ ID NO: 91415 - DNA, 819 bp, Eucalyptus grandis
  Intron number 1 from transcript Egrandis_v1_0.013949m (loc us Egrandis_v1_0.013949m.g) derived from phytozome v7.0 (c hr-ID scaffold_2; pos 10939815 to 10940633 reverse strand)
ggaagcgtcccgcgagctcaagatcacagagcgaggtccgatgagtttgcaatatctcgattttcgacacccttacgtcatcttttgtggccgattggtgtgaatgaatccgcattttcgtctgcattttttgatttgagattctccacacctcgcttctctagtgatgctgacatgacttgctagtttggaatgttgtcccgccgtccttctcgatttcgatcattcgcgagctgccgcgagtccgcaaggacgcgccttttcatcattttctggacgaagtatttatagaatgcgaaagtggaatgaatttactttcttgtaacggtctgtgttccatcttgagagaagaaagaaggagaaagagaaggacgtgcaaccgagcgggctcggtttagtcgggtgtctcgacaaattaagcgggtcgggtttgggaattcacatctagaaacttatggggtttgggatgagttcgagattgtagcagggcggggcgtgctgtcctgccgcgatttctcaatgccatttcggtgttcccgtcggaaactatgttgttagggactagctttggctactggtagcagttggaacatttaaactgtggacacatcctagtaccgcttgggtatgtcattggtaatttcttttactttttattaggctaaggaaattttgggcactataatccacttgtctcggcttttgaaatttaatgatgcgtctgccttttgctctctataaattccctttattcatcatcttgtattatctggtatgttattagggtggggtgcttggagggctgccataagaagacat

SEQ ID NO: 91416 - DNA, 669 bp, Eucalyptus grandis
  Intron number 1 from transcript Egrandis_v1_0.050222m (loc us Egrandis_v1_0.050222m.g) derived from phytozome v7.0 (c hr-ID scaffold_2; pos 3421241 to 3421909)
aaagagatgttaatggaacggagtgcttgccgctacctcagattgttcttagtaatatggggaaatggtgccagtacttagcaaaactagacctccaccttcgttttagcaccacctaaccacattccataatatcaaaaatcactgccaattctgactaattagtatcgagaagatggacttttgtgctcaaactcactccttgacatccttggccttccacaatatgcctggaaagaacttaaactaaagggtatgtcccgtcttcagaactttctttaaacacatgtagcagtttgttctattgctaataagagagaacatgcacctgtcgcgtacagatttaataagatcagaaagatactgacccggtggaaaagacaaggatctggctaaaggcgcagctgaatattcttttatatatatttcaacaggtttaaaaggattggtcataattacagtaccctatgttctcgtcagtcatcatcagagcaacaagatgcaaagcaaaagacagctctaggctcaaaggtgcattttgcttatttgccgattggttcttcatcaaagaaggctcgttttatcagcaaattcttcctgtctcttgtctcgctgatttttatctccagaagtgctctctcccttagtgtgttcagcaggacaagtctc

SEQ ID NO: 91417 - DNA, 854 bp, Eucalyptus grandis
  Intron number 1 from transcript Egrandis_v1_0.047649m (loc us Egrandis_v1_0.047649m.g) derived from phytozome v7.0 (c hr-ID scaffold_11; pos 11270435 to 11271288)
ttgttgagcagccacctttgccatttacagcacatgtagatgttggtactataaaacaagaacgacaaaaagaagaaaggagaagagagtaattgtacttgagctgttgcaggaagatttttcatctgagaatccacttcagcaagggctaacttaaacagttcaatatccagctggagagtttgtgtttggcagtcagcatgcttgagtggatcaaaaaagttcctcatgtttttcttcttcaagtatagctgcacttgtggataccgttcgcagatgtccgcaacaacttcttttgcatcttgtatactcagcttacctgtcttagacttagcttgttaacttggataatgaagaataacagaaggcaggactgtttgatgtgttctctccctttttccatcctatcattacagtgaaaggtctgtccagtattgtggtgatctcagctcaaattgtgttttctccttaaatatgcttttcatatggtacaaaaatttagttaagatgcttgtgtaggagccatatgcagattgaaatttattaatgggaacataaattttgagagctacggaatatggactcctgccacttcagaggtatggagaattgtgtcaggatgatatatcaaaaaagtttaatttgtgaatttggagtatatgcgccataagtttggaaggtgatactttgtggtggacagtcagagtcccaatgtttgaagaggccgaaattttttgccttttatacatgtggtaattggggttgcatctataagtaatttgtaagaaaggcaatttttatttatgaaagttgaaatgtttgtttgttttttttttttcaaattctcaggtttg

SEQ ID NO: 91418 - DNA, 499 bp, Eucalyptus grandis
  Intron number 1 from transcript Egrandis_v1_0.019189m (loc us Egrandis_v1_0.019189m.g) derived from phytozome v7.0 (c hr-ID scaffold_7; pos 51882006 to 51882504 reverse strand)
ctcattgtccatttgcacaacattctcggcaacaggttctctctctctcacagagaataaacaagttgatgcatcttaaaaatcagtgacgggagcggtatatctttcatgatgttacttgatcgacttttattaatattggcgcagatttgtttttcttgctaaataattagcattatctgagccaaaagaatgtagttgcatagcatgccacccttttttttcgtgtcacaatctcaaattaatgctgaaatattctcataccccttttcattcccgggattggattttggagtaaccaactttgcttaggaactaatatttgaatgatgatatgtttccagcattgttaataccatctccagcaattatattgttgttaactaaaccatccttttttttttatcatatatatggcgaagaaaatttctgcaacttgtaatttattgccttatttctcttgactatttcattgatgcacatgtcactgtaaattcag

SEQ ID NO: 91419 - DNA, 1035 bp, Eucalyptus grandis
  Intron number 4 from transcript Egrandis_v1_0.016286m (loc us Egrandis_v1_0.011097m.g) derived from phytozome v7.0 (c hr-ID scaffold_7; pos 10661941 to 10662975)
tcgttccttataggtaatggtgaaaaatacagtaattatactctatcttgaaattttagtctcacttttatagctctctgtggttgtcgttgctgacattgccatttccatatgatttgtttaagtcaaccttgtgcttaattctttcccgacttgtgagaattttcaatctcaacacagctacttaagctataaggggttgtgtgaatgtgtcattcaacttttaataatgcgggtagtgtgtcaaaccttttcattttccttgagatattgcctttccatttccgcttaagaaaatttcttatgcatcctggttattattgtgaagggtccttaaatttatagcttcatctttctttcttcatgatgtcttgcttcacagaacctattacatcctctataaacttaaaaggcatcaacttggccggtattgtcatgccacacttttgcatcaaaaaaattgcgtatagtatttctggatgtctgttcagtatttgatattataaatatgtgtttgactttatttattcttccctgcatattgctgtcctctatgataggtgattaaacatctaagtttgaccatagaaaggttcaactcaaagttgttactctactcttgaatgttgctgctacccgaacttatggctaattgatcaagttactcttgatctcagaagacctaaagcaagtagtatggctttctttatgagacatgagtgtagaacttggattttccaccataaatctaattggtttcagcatactgggattgtgggagattttacatcaggacagggacctctaagtagcgttttcccattgttctatgagaatcagcatcagattttttagggatataaaatgtagtggtcctgtttctcacttttctttcagcatcccttttcaggaagtattttgaagtagttttaattccatattctactggtacctatccgagagtgaatattcatctgccaatttgtcatctgttgtatagtgctccttcatcattcgagcgtcacttcaggaagg

SEQ ID NO: 91420 - DNA, 788 bp, Eucalyptus grandis
  Intron number 1 from transcript Egrandis_v1_0.026103m (loc us Egrandis_v1_0.025349m.g) derived from phytozome v7.0 (c hr-ID scaffold_11; pos 30653372 to 30654159)
gctccttcactgtcaaggctatccaatccgagaaggtgagtcttctcgcgtccatcctgccttgtgtatcacgagtcacgattcgatcgaacgtgcttgtgccgcgtaaaatcaaggaattggtctttcagacatctttatgttattctctagtcatctgacttgtttagctagtcttggaagaagaaaatgagacttgaagataatgagtggaagtgccttctcttccaccattcagtctagtttctcattcttggttcacccttcttagtcctttggatctgtgtatatagaagaataatttcacatggcatagggttgcaagaagctggtctttttgtatttgaactgattgagctaatccgagagtaaaggtcaccgtgattggatttctgctgtgtgattttttctgtagtgataattttttgtagcttgctaaaagagtcaactaagagattatagcttccaatatggaagaggggtgaggggttcgaatctcacttctttatcgagaaggtgagatgggaacgatttagtttcaaatataagttttgatctcatgcccttgcaagaaagcgagacaaaagtctgagagtgaattagagtaggagtagagtaggatcgacaaaaaacaaaaagaaaaactaagagattatagcatgctatcattcatttgcaaatacatattctctgagtgacttcattcactcattacattagttgatgggtttcaattcctgcatctaccttttgcatgcagccaaccttccaagtggttcaacccctca

SEQ ID NO: 91421 - DNA, 756 bp, Eucalyptus grandis
  Intron number 1 from transcript Egrandis_v1_0.022385m (loc us Egrandis_v1_0.022385m.g) derived from phytozome v7.0 (c hr-ID scaffold_11; pos 23466404 to 23467159 reverse strand )
tttgaacaccttgtgctgctcagtggatctccaaggtaggctctctaggtaggctctctctctctctctctctctctctctctctctctcgctctcgctctctctgtgtagaaacatctgttgtaagttgttgatttaatgaacggagttaagaaggaagaacattttttgcctttcttgacaacctttttccatgcatttatgttgattgcatatactgcagtcaggtatactgtctgtagattcacatgcacatagaaataaacactgtatcccaaatgtcatgttagggttaaaaagaattaccatttgagaaatacttatttaactattcttaagttttttgccacaaaaaaacaaacaacgaataattagacattattgtaaagtctattccttcaagaatttacaattcataatatgttgttaaaaaattaccatttgagaaatgcttacatgactattcttatagtttgggccacaaaaaaaaaattaattaaaaactattatattagtaaaactcttattattttgcatcacacttatttttttcaaaaaagaaaaaaaaaaaaggaaaaatcgatgtagattgtgttaaatttacgacacgtgtcaccttgagttatccgtatacatgttcctcggcaactagcttgagcgctacagaaaagctgattgatcttgtaaaatcattttattaacaaatatttttgaatcacaggtacctcaacgccgaaggatacgtcggaggcctcg

SEQ ID NO: 91422 - DNA, 725 bp, Eucalyptus grandis
  Intron number 1 from transcript Egrandis_v1_0.021785m (loc us Egrandis_v1_0.021785m.g) derived from phytozome v7.0 (c hr-ID scaffold_7; pos 48055695 to 48056419)
catcgacctatccacattttcccctggtcagatgacaaaagcttgaaaagcggcacaggatatcgaattcccaagtttgactttgcatctactggttgagggtttcgaggtctatagattactacatatgatattagtttatcagccattaagatctagcgctaatgtcggaacacccacccaatgcaacaggaattacatttaaatgaatgacggacattgaataaagaccgatgaagcatgcttggtttgttaatgtcatttgaccggtgattattcacgcgtactatatatgtgatattttatagaagtttatgaagagtttaccaagacctttaaaagaaaaaaaaaaaaaaaaaactgatgtgattccaaacacgctgtccgaatacagctctgcgcaagtgacggtgatgttgccggctcgggaatgcgaataattggtgagattctgcgaataaactcgcgagtttgcggtgacgacagcgttgactttttgaagcggtgaccaaatcgtaatccggtaggcgggcctaaaaaaagtcaattcccatgatcgggcaaaagcccaaggaaaagccagcccggcccgcccggccccgatttgaaggatataaatatgggcccaacgcgaggaaccggcccgacccgggcccgcccattgattgctaaggagaagcaggggtggaggtgggttgcggctcgtcggcgcggcgcgactgctt

SEQ ID NO: 91423 - DNA, 675 bp, Eucalyptus grandis
  Intron number 2 from transcript Egrandis_v1_0.024169m (loc us Egrandis_v1_0.024169m.g) derived from phytozome v7.0 (c hr-ID scaffold_11; pos 13683597 to 13684271 reverse strand )
gacaatcaggtatcatgcttgaaataacaaattgcttaaggggactctatatttacattttctttttttgtttagtcggtgtttttttccttggtcttgtaaccttttagttggataagtgtgctgttcttttaattgttatttggaagttggtctgatcatataaataaatgctgtcagtttcacttaaaaagatgacatacatatttgaatttactagatgcatcgagtattcaactgctgaggagtgttattactaaatcacaattgtcaagcttatgagctcaagcttgtgcatgacttgatgaaaatggaatcgagttgagttgagcttggttcattcagttacctagcaaagttgtgctgggatacacacaaaagatactcataagtttggtatgagttgagtggagcttatgttgaactgtatagacttggttgggagttagaatcatagtctggtttaagtgctctatattgtatggaattaatggacgggtgaccagggcccttagagatttttgggacttttcttttcctagtttatgtcatttaatgcttgtatggtgcagaggatgggtagtttctcaacacttacccagcttttgttaatgtttagcttgccctatcattagtaatgcatcttgactatggaattgtctgatggtgaatagg

SEQ ID NO: 91424 - DNA, 933 bp, Eucalyptus grandis
  Intron number 2 from transcript Egrandis_v1_0.040676m (loc us Egrandis_v1_0.040676m.g) derived from phytozome v7.0 (c hr-ID scaffold_7; pos 2777563 to 2778495 reverse strand)
gttgcgcgtctgtaatgtgcacgttggttttggttggttttgtttatgcctctcccttatattttccaaaccaaacagttcatgtgggttggttttacttatggctctttctcgtatttccctaaccaaacagttcattaaccaaacagttcactcgtatgaattaattttctgtatgttagattcctttgactcaatatatcttgatgcatacctatgcccgtgcgcatcttgcttagtgcttgctaaattaaagagtctgagattttacgtaaccaatgcattcaatcttcttatgaactcacttcgctatttgtgacctcttgatgaatgattgttggttccttattctttggctttccccttgtaccttttacgtttttggtttgtgttgcttggtgtattttacttgtcccttccattggttggcataactatgcacatccatcttaattatgtttgatcaacttggttttatttgccatggtcgctcatcgcatgtatgtatttttttttttcacccaaatcgcttttgccctttgcatctgttgattgcctagtggaaaatctttttatgaggagatgaggtttctcgaaggaaagttcacctaagaactactactaggtatggtaagttcaccaaggcgttatcttctgtttatggtgtctaacacctaagtgcaggctcttattttcctcgtcaatgatattcgttttgctccatttgcccatcggattatttagtctgttcatttcggtagtgcaatgatttttaagttttcaagagctgttgtcttgtgatctccttaccatttttttattcaataccgaaaattgtaaacatatcgtatcctaaaattggacccatgcgaactcaatgtctttgttatgatcttggaattgtaacaggtgtggagttgaattctgctaccg

SEQ ID NO: 91425 - DNA, 542 bp, Eucalyptus grandis
  Intron number 2 from transcript Egrandis_v1_0.011411m (loc us Egrandis_v1_0.011411m.g) derived from phytozome v7.0 (c hr-ID scaffold_7; pos 20090594 to 20091135)
ttgctctgctctctccggactgatttacgagatcggtgagtcctccttcgaacctttgcctttgccaaaacacgggtcaagagaaaccgagccaagcttgtcggatgtggtggacaaccgccgagagtgaaatctaacattcccaattttcatggtcactatcttactgtcttaatcgactgatacccttttctttgcaaatcaaaactccatactcgtgagaggttgatttcgaggcttcatgccaaacaagattgtagctgacaaccaagcgttagaaatcaattactcctttcctaggtgaatagttactatattacgtctcttaaacaaatggaattaagagacaatgacatttcttctcgattcaaaaagtaagttcatgtggcacttgaattttgcaagccgtcgcatgcaataagctgattacaggatgataaatggacatgtcattaaattttgaaattttacgtattctaatgcggatgttcattacatgtaatgcaggtccatttacattcaattacgagaaatcttctaga

SEQ ID NO: 91426 - DNA, 924 bp, Eucalyptus grandis
  Intron number 1 from transcript Egrandis_v1_0.009463m (loc us Egrandis_v1_0.006109m.g) derived from phytozome v7.0 (c hr-ID scaffold_7; pos 19844948 to 19845871)
ttcactccacttcgctcgctgctccctccggccaggtactctcctgtccttccacttcccttctgcagccacttttctctccctctttctctctctcttctgttctgtcgagggtattgctcggttttgttgatgattgtccccagaattcgttctcgagcgaggcaagatttggggttccagggctctgatgatgggttttgagtcctgtgcttgatcgtggtttgaatttatcttcttgggttcgctcctttaccctcctctccctttttttttccccctttttgggtcgtaatcttgttgggttttggttcggcgtccctgtagtttgcagggtattcaagaaagactgtagatggttgaggtcagtgtgagatgagggcaccttggaatcgctgagaaacgaaaatggtcgcagttgttcttttttttttgctttattgtatgtgagtttaagacgaaggggagtctcgaataggtcgattcgtgccgaattactgcaaatagtagctcctctgaggttcttgttaatggctgggtgtttcttggagatgattgttcaggaattcaattaactacctaataatcttatttatcgtggccaactttggatcagaacttagtaggaagatggatgggtaatcgttcctatagactggtttctgaatgtccgtgcgaagctatctgaagtgatctgtgaaacatgcctagggttagcaattggaactttatgtggagttgttatatcgactttgtgagggaacaacctgtaggtcgttgtgataggctgatggagtgtcatattgtattactcttaccttttctcatttatcttgttgttcatcttgttctgttttggtaaattgacccactgtgaattctggtcaggctttgctaaacttactgtatgttgtgaaaggtatc

SEQ ID NO: 91427 - DNA, 845 bp, Eucalyptus grandis
  Intron number 1 from transcript Egrandis_v1_0.005943m (loc us Egrandis_v1_0.005694m.g) derived from phytozome v7.0 (c hr-ID scaffold_7; pos 38739896 to 38740740 reverse strand)
agatatcataggttcggatcaaagcagcttggcaggtaaaatccatgcatctttggctgaactgaagcatttgaagtatctagacctcagcctcaacaaattttccaagaaaaaaatccccctattctttggtactctccagagactagagtatcttaatctatcattcgcaggttttgacggaaacatacctcatcacctcggtaacctgtccaacttgcagtatctggatcttgcttgttttggcaagggttggggttatttaacaattgataacctccaatgggtgtcgaaattatcttccttgaaataccttcgcctctctggcaatgaccttgggaatgccacagattggttgagttccattaatatgctttcttcactgcaatctttgcagttgaggggttgttctctcgaaaaacttcctcactctctatccgtcaacttcacttctttaagattcctggatctatcaggcaattccataaattctactattcctccctggttctacaactttagcaagctcgagtacctaagtctgtcaggaaactcattgtcgggacctattccagtaagtctgggggagctatcatttctaagagagttacgtctcagagacaacaaattgagtgggaacatcccgggaagtattgggcgactatctaatctagaagtgttggtcataacaaataattctttgaacggagttgttagtgaatcgcactttgcaaatctcacgagcctcactcgtttgggcttttcgtctaatgaacttgatttaagctttgatcctgcctgggttcctccattccaacttcagtacattggcgtgacagattgtt

SEQ ID NO: 91428 - DNA, 549 bp, Eucalyptus grandis
  Intron number 3 from transcript Egrandis_v1_0.042800m (loc us Egrandis_v1_0.042800m.g) derived from phytozome v7.0 (c hr-ID scaffold_11; pos 30387987 to 30388535 reverse strand )
acttccactttacactctgtgactacttttgtgttgtaagctggcctttgcttcgatgtcatgcactttaataagcaaagctattagctgactctcttacatggataacgtgaaggttttactttgatttctccgcaacatatgttggagttgggatgatttgcccatacattataaatatctcagtgctactacgaggaactctatcctggggtttaatgtggcctctaatagaaaccagaaagggacattggtatcctgcagaggcaagcccaaacagcatgcgcggacttcaaggttataaggcaagtcaatatatacatgcaaatgtgcaagtttgtttgtcttttctttatcctctaatcttacaataccaatttgtcaggttttcattgccattgccacgatattgggtgatgggctctacaacttcttcttaaggtgtttggccgaacgctctctaacttgtacatcatctccaagacagagaaatgacccatgtcctcccctttgcgaatggttcctctcttcataaccctcaagtgtctt

SEQ ID NO: 91429 - DNA, 1022 bp, Eucalyptus grandis
  Intron number 1 from transcript Egrandis_v1_0.012210m (loc us Egrandis_v1_0.012210m.g) derived from phytozome v7.0 (c hr-ID scaffold_2; pos 48207433 to 48208454 reverse strand)
gccagaccgccgataccgctcgccagttcctgcaggtgcccccaccgtctcttcctctctctctctctctctctctctctagcgtgcattgatcgcgcggagaccttacttacattgcgaaaatggctgagctaacttgtgtaggcgtggcctctgacctcgctcgatgcgcgtggaaagatacggggggaaaagttatcgtttttcggtttctttttcttggttttcagttgggactgtcggtaggatggttgattaattgttgatggttatagggattatgacggatacggacgcttgatctgtagctggtttacgtgggtgtttggtgttgtttggtgcttgttatgatagtgcgtcgtttgtccatcgatttgtgtattcgtgagaaaaaaagtcaacctttatactgggttttgtggtttcaatgccttgtattgatgaagctagggaagaagtcaggatcttcatgtggatgcgtaattcccttgattgaagctatcgtgttggtccaacctttgttcttcggttggttctcgtgcataagcaggctgattgcatcaggagtctactgtcttctgcatgctagatcttgtctataaccgatgttagagatgagcattttaagttatctaaagcttttgggtggaattgcattcaaattttgatattcagtagccgaccaccggccctaagacttccgcttaattttgtctgtccttttcccctctttatttcagtggttgtatcgttggtttcacatgtccattccataaaatttaagggtctaacacaaaaagggctgtccttatctctatggtcatttgccttccaattgtctggtgatatatgtatcagcagtgaatttcacttttatcgctgttattttggatattttatttattaattttttattttttttgtgtacaatgctttatctgtgcaaaatcgagattgttggaattctcataaggtacatttcatcaggcaacaagttggaagcttgaggaagcccttcaact

SEQ ID NO: 91430 - DNA, 732 bp, Eucalyptus grandis
  Intron number 1 from transcript Egrandis_v1_0.020031m (loc us Egrandis_v1_0.020031m.g) derived from phytozome v7.0 (c hr-ID scaffold_7; pos 22331451 to 22332182 reverse strand)
ccggagaggacggccggtcggccgattcgcctcaggttggtgctcgattccgtcgattggccgggggtgattcacctcggaagcatgtgattttcggttatgatgctgtttgcgaaagcgctgtggctttggtgttcttctttaggaactaggaaaaattgctctttcttaggagccgccgggggaattttatctttttcctagttttcgtggagattcttcgcatcgtttccagtaaatagcaagtttcgatatcttgttcatttttgcgtgtggcgcggatagattacggaagaagatgcaatttcgctcggcgtgggtgtttgtggcatgagatgtgaagattgagttggaggctacaagggattgcttttgaatttgagtgtgtaatggatggaactgaaccacatgaattattagaaacgaatctgttctatctcaggaaccattaagggagcgacagaaaaagttttgattgatgaaggatgaattttgtctagttactagcaagttctagttctgagcattcaagaatggaagcttttgccttagcgagattcatttggcagcttgggacgtccattatctgaagacgtttctattttgattgttaaatgtggcttttagaattgcatgttttggctctcgtcttgctcccccaaagctgacactgagctgttgaaattgtgcttttcagaaatcggttctcttcgctttgatacaagagataga

SEQ ID NO: 91431 - DNA, 530 bp, Eucalyptus grandis
  Intron number 1 from transcript Egrandis_v1_0.052249m (loc us Egrandis_v1_0.052249m.g) derived from phytozome v7.0 (c hr-ID scaffold_2; pos 39330013 to 39330542 reverse strand)
ttacgaggttagtgaaaatgttaacattatttcatttgtgtaatgatttaatgtagaagtatgtgcggagacaatgcttagagaacaagccctatgcacttcgcttaatggttccaccaactaaatactagacaggtagacatgaatgtcgaaatttaagctttaaaatgatcttctatatctgctttgttaccactattgagaagtctgtgcttaaacttatggaaggaaatgttttccaaagggaaattaagtgataggaagtgatttagtacataaccatgggttccaatgcatgggaacagaaagaaatacaagacattctctttctggcttcgctcatcatctattttggagtttctagaatttgaggtttgtgctatgcttctaggaccttctaattacttactggaaatttatcttgtttttgcttctaggacattctctttcttcatattctcttctgatgattttacccttcgtttcagctgccagcaactcttaaaccaggtgccagttgttatatctcc

SEQ ID NO: 91432 - DNA, 503 bp, Eucalyptus grandis
  Intron number 1 from transcript Egrandis_v1_0.001395m (loc us Egrandis_v1_0.001395m.g) derived from phytozome v7.0 (c hr-ID scaffold_2; pos 63902641 to 63903143 reverse strand)
tcctcgggaagttccccaattctccttacgtcctcgtaagatcccatcgctatgtcccccattcgctcctcttccttcttctcttttgagccttcgtctttgcttgtcgagccgtccgggattcatttccccttcctctcgccctgatcgctcctttcgcaccgcgggaatcgcgctttccgatatttcggatatcgattctcgttctgccctcgtcctgtttccagactttgattcttttctttttttagccgatctcaatcatcggcgtaaggttttcgaacttagagaatgcgcagtccatcagggctttccgctcgcaaatagagttcgttacgcggtgaagcaatgtgggagctccggcagctcggacgacagtgtcgtgactgccttatggattctcttttccttgtttcttctctgtatctgccggagttgctctcggtttttagtgaataacacatggcgttgtgcagtctcttaaagctctcgttctggagagg

SEQ ID NO: 91433 - DNA, 696 bp, Eucalyptus grandis
  Intron number 1 from transcript Egrandis_v1_0.020277m (loc us Egrandis_v1_0.020277m.g) derived from phytozome v7.0 (c hr-ID scaffold_7; pos 41910118 to 41910813 reverse strand)
gtgcctggaattgatccgaagtcgaagcagaggtgcgttaccttcgtttttctcttcaattcgatggtagcaacggttggtttggagattagggtagctgattgttctgttcccttttgggcgagcgattagggtttcggccgatttcgctgattcgatcactggggtttcggtgcgattcgtgttggtatgttagtccatacgcattgcgtgaagttcttttcgtggtcgttgctcgattctccccgtcacgaggcggtcgtccgtctcgtttcgatgcgtacatggaggagggtccgtaggatgaatcgcggactcgtgaagttcgtgttttttattttattcaagattggattttggagctattttgagatggtaattttagatccttggtaatgatctgctgtgcctgtgatgcggcagagcagggccttgatctatttgctccaattgtcttgtcttttatcagagtctcctctgttgggttgcctttggtctactttagatagcatggcagagttattgtagatattgtggcagctacgagtgatgtgttgctgcaatcgaccattacatatggaggcggaatgatgttttggtgtttctacataaattgctgatttctttcgggctaaacttcccttccttttgaattttgcagtcttcgctagcagctgcgagagcagacaatttcta

SEQ ID NO: 91434 - DNA, 786 bp, Eucalyptus grandis
  Intron number 2 from transcript Egrandis_v1_0.030385m (loc us Egrandis_v1_0.030385m.g) derived from phytozome v7.0 (c hr-ID scaffold_11; pos 15865354 to 15866139)
aagccggaacctcctcgccaaatcggttacctgtacgttcacgggcctgcatgagaatacagttttctttttttcctggatagagaaggattctgctttatgcaactaaattagaactctggaacactccccttcccctcgtgagctttctcgagatcatgcacatgagccatgcataagggtttatccatttgatttttacgaggttatatagttcaagatatatgaatcaaatttaaatcaacatttttccttcccctgtctaatgtaatgaacaagatcaactccaatccactagacgaatataatttcatctttcaagggacgtgtgaaggactatccaagtttttagtagtcttttcttgtggtaaattgtctatgagattacacacctattacaaagaagaaattgaaggacagggacgatatattcttgcatcattcaataggagttgcgtagggatgagtcatgcaaggcagagaccaaagttgctcctgttttttccttcttatttttagtctggatagggaaaaaccaggtattgatagatagatatatataagggacaatccgagtggaagcaaagtctagcacagttccgctgggaccattgttgtttttccgagttggaaaagaaagaagtatgatctctcactatagaaaattagctgaaatgactttttcgcttgtgcttttctattgatcttcattaatattgggtttgtcttgtataaatcttccatatttcaggaggtgactgtggataccctagatagagggttccg

SEQ ID NO: 91435 - DNA, 584 bp, Eucalyptus grandis
  Intron number 2 from transcript Egrandis_v1_0.017132m (loc us Egrandis_v1_0.017132m.g) derived from phytozome v7.0 (c hr-ID scaffold_7; pos 44899082 to 44899665)
acgcgatccggaaggccgggcctcagaagctccaggtcctttttttataagaaaaatctttttttcttttgtaattattcctgctcgtcgtttgaggtgcggaatttgtcgacctaaactcctcgagaagttgtagtcaattattgtggtgatactgcgaaaaaactgatgaagattttgcactcggtaaagtccgtactatgataccttgccggcaatgtcgaattacgcacttctgctgataaagtagtaccagttgtccgcaattcgtcgacgcatgacatacaagtaaacaggttttgagccaagtttttttgaagatggtcaatgtagattaaatggtagggcgtgcatctgtattttggcacaaccttatctaggaatgtgggtacgtgggaattgtgatatctatcttgtaatgcgtttgactttgacacactgctggtggaattcatatctagtttttttaaattcctttttcggcacataaaagtttcccctgcactcgtgtcatcgatttatgcagcatcagacgtggattttgggtcataacgggtattagtggcaggtgattgcagattttg

SEQ ID NO: 91436 - DNA, 674 bp, Eucalyptus grandis
  Intron number 2 from transcript Egrandis_v1_0.053339m (loc us Egrandis_v1_0.053339m.g) derived from phytozome v7.0 (c hr-ID scaffold_2; pos 4348887 to 4349560 reverse strand)
gcataaccatctaagacccgatattaaggttttctttcactgtcatttttttattatgtacttttgctttccctcaccagctattataactccttattcattctttcaatcaaagaaagctgagcttatagatagatcaatgcagctcctgataacatatattcgtatataatttcagtgcagtcttttttataaataaatgcattgtgtgtcattgcttgctcgtctgtgaagagaaattgtattaataataagtttgacattaagaacaaatccatattttatgaactttcgatcttctcggcatgtcaatataagctcaaattttatggatttttggtttcctttttgaagattaggatgacttcaatttgtgattatatatattgtggcatactatgagggagggagtatcatccatcgaagtccctatgcaaactcgcttttgacattctgtcaaataaatggaaattataagccaacgtctagtttcacaaacctcccaccagaccatataaaagatcaaatattttgaaaacaaaagaaaaacaaaaattttaatgatataatttgatgttctctgcatttctaatagaaagattcataaatgaaaccatgcatgagttattatgttccattacacccaaaaaacttgcgattctacagaaggacac

SEQ ID NO: 91437 - DNA, 612 bp, Eucalyptus grandis
  Intron number 2 from transcript Egrandis_v1_0.026686m (loc us Egrandis_v1_0.024007m.g) derived from phytozome v7.0 (c hr-ID scaffold_7; pos 40908576 to 40909187)
acgtcgctcacaacccagctggagattttcgtaaggtactgcttttacacttgcctcaagatgttccatgacatttcccaatgctgatgattgttcttctcagcaacttatgttcatacatttcgcaataagtatgctgtacaaagaaatctatgtagccatatgatactcagaacaatttcttaatgctgactgggaaatattctttggggttgatgaaggcaagtaaaatcaaatgtgtctgattcagaaagtttcggaatataagttggaggtattcaatttttaagacagttttggagttatgcagagaatgcttgttggaatggtggagtggcttagagcagttccccatattttgatttgtcaatttatttaaggtgttttcatgaaactctatacgctacttcattggaccccttcctattgtgtcaaatgaagaaccgagtccatcatcaaaagattagtcctatgacaacctgtgaaataattctcatctatcctaaatcgtttcatttttcattaggcattgatgcaagtaatttccttgcctgttgtgaatcaactttaatttgatatggtttctttgtctcctagttgctggttcctctc

SEQ ID NO: 91438 - DNA, 849 bp, Eucalyptus grandis
  Intron number 1 from transcript Egrandis_v1_0.000810m (loc us Egrandis_v1_0.000559m.g) derived from phytozome v7.0 (c hr-ID scaffold_11; pos 15643609 to 15644457)
aggcttctaatcggtcggcctcgagtttcgtgctcgtgggtacttttcccctttgtctgacctctgctcttttcttttcttttttctcttttatggccaatcagatccattgcggctggtttcttgattgttctttgatattgggtagttttttttcctgggtttctggggtgcttgagtgaagtctttttgatttcttgcgaattggggagggtgggtttccttcgctggggttgaatgatccattcgggttgcttggttttgattcgagctctgttcttcgcttcttctgtggggttctggagatctgggggtgttcttgttttggagggtcggatttgatgctttgacttgtgccgttggagctctcgcgagtgtagatagataaaagtgggcttcttgcctttttctttttcctcccctcctgttgtactttctgattttagcgtgtgaatgattgcgctggcgcgaaatgtgtttcgttagatcatgatgatggcaccctttttccgttttgatggtccagttgactttctattggtgaatgaaccagtcagagcgatgagttccaatttcattaatatagggttttgggagttctgcctcgaggttccgagattatgtctgtctgtctctttaaaatcagcagctgatgaaaggatgaaggaaaattgatagtttagcgttgatgttgcgtttattggtggttggcaaaccgaatactttactgcttagaatatgtccatatccttgatgtgttggtgccaaattatcatccccttttcactgattaatttgttacctctgtgctatgacatcattagattttggagttgtgggttgacacgg

SEQ ID NO: 91439 - DNA, 847 bp, Eucalyptus grandis
  Intron number 4 from transcript Egrandis_v1_0.002459m (loc us Egrandis_v1_0.002459m.g) derived from phytozome v7.0 (c hr-ID scaffold_2; pos 25532272 to 25533118)
tttgacaggtattgtgttcacgcacgaaaatctgatcaggttctggttacttcttcaatgtggtttaagggcctgtttatttttacattttgaatgcaccaaaatataaaatattatccaaatttcaaaaagttatgaaaggattacatgtgaacctacgtgccaacatttgtatattctgaattttgtggttcagcaactggattttaatgctttgcagctcacttataatgctctatttgttgattcatgtctgctggttctagcttggaatcaaccatttagctatttttaaatggttgaagctgtaatctgatcatcttattttcaccatctcactatctttggacaatgtgcagttttcttcttttgttgcaagattgctgtcttccactttttatttgccagcgagttttatattaccttttgttgctagttgctattagtgctttaagagcaagataatctacttatatgaatatcttgggctggactatttttgagttggataaccatgttactcttcttatgtcattcatatgcaaagaatgctttcttgcatagatcaaggtgttatgattaagtggaattcttaagcatgtagtagagctgtctttttgtagttctttttttgggtattactgtagccctttgttcgcatcaggtggggtggattctggtgctacttggttatttcataattgcgtagttggacaatggaataattgctttactccatgacattgtggagcaatgtcagctgcctgctgccagacttgtgatcttctgagatgaatgtcttttttatgcagaaacttttgtgttaaaagggactttgtctctaccc

SEQ ID NO: 91440 - DNA, 853 bp, Eucalyptus grandis
  Intron number 1 from transcript Egrandis_v1_0.004861m (loc us Egrandis_v1_0.004853m.g) derived from phytozome v7.0 (c hr-ID scaffold_7; pos 18099978 to 18100830)
ccgccgccgccaccgccgccgccgcttgcaaatcggtgcgtgcgtctctctctctcgagttgtgttcctgctggcttctcgtttctcgtgctctgttttttctcggattccttctgccggtttcgtcgaatccgatgtgatgagtgcttgaactctgagcggaattgcggttttccggcggtgttcatgatgtaccggttgtgatttcggtggtagagtggaattcttcttcttcttcttcttctttcgttgatgagtatctggtggtattcgaggtgattgcttctaaagctgtttgagcctacttcgctttttttttttggcgggaatgggagttgaaaattcgcgatggaagagaagtgatggattttaaggagaccgctttagctggtttccgactgaaatgtggtgttgatatgcggaaaaaagatcatttccacagtttgtggtcgggtgaagctgaatagattttccgacatctgaagctctaagtctgtttttgtacattttcttcttcgccattgcaaatcttggcggtggtagcttgtgaagttttgattagttaaggataaatataggcatgtagaatcggttaattacactctgttcctttcttcgctgccggttcgtttatctttattgaacatttctgctttcattactttgtggtgaatgatcttgacatgctaaatgcggaattcggtaacttttgagggagctggaagatggatatgataattgtggacttggttctagcagcagtgcgcaatgttggaccttacatagatcttctcttagcttttgctaaaaaatccaactttgatatctgatttttttttgcagctgactggca

SEQ ID NO: 91441 - DNA, 963 bp, Eucalyptus grandis
  Intron number 1 from transcript Egrandis_v1_0.012037m (loc us Egrandis_v1_0.012037m.g) derived from phytozome v7.0 (c hr-ID scaffold_7; pos 44293802 to 44294764)
tcggtcgtcccctcccctctctgcccttcgttcaggtgcgttcggttcttggtttctcggagcctttttgggttcgttccgtgtttccgcccatttccaatttgccgaagcttcctctcgcctcccctttggagcgggggtgctcgcatcggtttcttcgcctgttaaaaatcgaatcttgacgagcttcggttcgtgggcaatggccattttgaaccaaaaatgaaacttttttcttcgcttagatgaatgcaatgataatttcgagctccccgtacaatttcaagcaatgggttttgcgagacaaaggccttgaaagctgcaatgcggtttcttgatttcggcctcgcagtcgagttcgaattgcttgcgatgggggagttttcggttctagaatttcgggcggtgaaagaaaatttgatcgggaagggagtaaggaattgcgtgccttgcgatctgaggagtacttgcgcgtcttgggcgactcgtttggactccggtgggggcagggaggtaatttggacgcgcctgctcgcttcctcttcgcccgtcaaatctagcggtcgacgtgacgtactttcgtcacgcgtcaccgacccgtccatcgccctttcccctccggttttttacaccctttcgacctttcacggggtcccgaattgtctttttcattacgccccgtcggttccgatgcggatgggctcctggattatcggaacgtgattactgactcaatctctttcttgtccttcctgactcgttggtaattactcgcgtggcaaaatttgatcttttttaggccacgcttttttattggtgagcctaatttagatggcgactctaattcttctttaatcttgtgtgggctgaatcaaatttgacctcctcttctgtttggttgacctttccgtgttcttgttcgtggcagctacccttctcttatcgggagagaggctttgaccg

SEQ ID NO: 91442 - DNA, 928 bp, Eucalyptus grandis
  Intron number 1 from transcript Egrandis_v1_0.002636m (loc us Egrandis_v1_0.002062m.g) derived from phytozome v7.0 (c hr-ID scaffold_2; pos 61971671 to 61972598 reverse strand)
gtgtttttggctttgctctagggggggtactgtcgttgttttgcttcgtttctcgtgcggtgcttgtttgctctcgagtcgaatcggcgcttttcgttttgttatttgctcgtgttcacgtttgctgttctggggttcgtcccgtgttttttttggggttttgttcttcttgattctttagctctgttttccggggctcctctgtcagaatcagtttctgagtgacgtggattgcgaaatattgtcatcagtgtccgaaatattcgctgcatgttgggtagccagagtaaattttgcagaaattgctcagcgcatgggggattttcttgttcttgcgttcctttacgcttgatcttgtttgatggttccttgtggtgttctgattctgtcacattgctgacatcatgggttcttttatttttttcatgtgatggcttggcccttctgttcgacttttgagttataatggagtagggaaatttggcaactcggtggaatttacttgatagagaaagataattgatggttgtgttgttgtagtagccagttgatcattctgtaccgccgacattactttgttctgggaaatatttccagtaaaaagatttggttgcattaattacttgtatagcgttttacccaaatcatgtgacctgtgtccactgacctgatatatgtgtttcgcatcgattaagcaacattaagtagtcctctcgagtcacatgtgcttcatctatgcagattttcgctgggatttatttgatagagaaagatgattgacagttgtgttgtttagtagccagttgatctttctgcactgccgacattactctgttctgggaaatatttccagtaaaaagatttggttgcattaattgcttgtatagtgttttacccaaatcacgtgacctgtatccactgaccagat

SEQ ID NO: 91443 - DNA, 887 bp, Eucalyptus grandis
  Intron number 3 from transcript Egrandis_v1_0.007800m (loc us Egrandis_v1_0.007800m.g) derived from phytozome v7.0 (c hr-ID scaffold_2; pos 48334037 to 48334923)
gacgagtaccccgtcaccaccgagttgcaggcacgtcgatccttcctcattttgatctactgttctttctttatctcggatattaattaacccagactatattgatcaaatgactcagtgatctcttagaagacgatggctaaaacgcaaatcgaatatgtcaacttcctcactagtctatttgctgaattgatcgagcaatggtggatcgttctaattaaattatgccgttgagagagtcattggtttcagtagccttttaatcccaggcccaaatccatgggtaacccaagttttgagaaattaggtgtcgcgatctgctggtaatgctccatgtgaaacgtgtcgacatgtactttaaatattgaaagagcgaaggaaagacctagcagaaatatataaatattacatgttgaaaaagcgtttgggatttggtcataaaagtctattcaccgtcgccgtgcccctctctctctactcggtcaaaagtcaaacgtgttcggtcaatgcggtcgtgcacagagatctactgtgtccaaaacaagagtgctaattgacttattaccacgtaacgtataagttctccgtatgagccacggtacatatgacgtcaaaacttatgatagttccttatcctttcataaatatacgatcgcatcggatacagaatttgattaacccgatatcagttcttgaggcttataacctagcacatgtacttttaagaataatgatcggttcctagatcaagtgtatttcactaccgacaagtttctgatatatctaatgcatattagaaatcctcctttgattttctgtctgtttggttcatatcgtggtgcttgggaatgactaggattcttgaattactctctgcaacagaaccg

SEQ ID NO: 91444 - DNA, 1060 bp, Eucalyptus grandis
  Intron number 1 from transcript Egrandis_v1_0.018370m (loc us Egrandis_v1_0.018370m.g) derived from phytozome v7.0 (c hr-ID scaffold_11; pos 2637806 to 2638865)
gacgccagcgccggcgacgccgatccgatttacaggtggcttttcttcttctccggccagttgggttgtcttcatttcgctcgattgttctgctcgggatggttgtggatctgctggataatggggtctgctgattggtgattcttggtctcgtggatggtcttggatttgttttgggtggggggggggggggtggtgcgggttcggtcttcgtttgagaagctggattttttcgatacagtgctgctcgtctgtgtttgagtttagagagaaatgggttctagatcgatgcgtctaactaggaaagaagatagaaaagttgaaagctttatttttgaattatgtgttgttagccatctggtggtttatggaggttcaagagaggcaagtcgaggtgtgatatttaagaagccatggattttgacgcgttgacgactagaaagttccgctaattagatgcaacaatttgccgatggtgtccattcttttggttatttatgtctattctaagtttcttatgtgcgtctgtgtatgcatttcgttatctgcttgtccatgtgagttgctttcccctccgtatttgttgttaagggatgagcaggttgtgtttgtaagtacattgattgatgtgcaaaggtagggagtctgaggacgtagttaaaaagttcaaaatgaaacgagatgcatctttgcttgctttgtatttagttccccgttgcttggcttttcttttgtttcatgtcctattatcactagaataaaggtcccattttgctgaatgcaattattccaggaagtgcttactaaacctttgcgttgcttctgctcttcgcttgttttctttttaggatttgaactgaatgcccttttcctgaaagatatttctttcttctttgaatggctgtagatttgttcttgtcagttggcctatcaacttgctggtttgaaataagttcagtccagaaggttgctctttgattggaatactttccatttcatcatggcttgtcttgatgttttgccaggtcttgcgtagaaaagtgtgaaagttctgggtgtg

SEQ ID NO: 91445 - DNA, 627 bp, Eucalyptus grandis
  Intron number 4 from transcript Egrandis_v1_0.023535m (loc us Egrandis_v1_0.019360m.g) derived from phytozome v7.0 (c hr-ID scaffold_11; pos 1457186 to 1457812)
tcttataaagttgttcttcctaacccaaagttctggtatgttattaggatttccactgataatgtcattgtctacaaagtggtttcgcccacgttttctggacttttacattctcaaatatcagaggcgtgtcgcattttgaaataactgctgatttgcatatgtttttgttgcatggggtaattatttttgattaagagaattctcatgactgcggcatggcagctattcaaaagcaaatagttgattggaacaggccctttataataacctaatgcaccactatttgtcttgatctcgatcgactgtctttcattctttgactgttggtgagtgcaattgccggtgaacgagaaggaaactttaacaaggtgcatctcacgcaaatgcaagtccaacagtcaattgatgtactaagagaagagactctcatccaccatagagtctgcttgggggttgacgacgaaagtgattggagggattgtgacttagtctgacaattggatctatacattgattttaagccaccatcatatgtaggattatgggacaacatgccagagattgcttatgtctctgtttcttttctcagttcccataatttggtgcccttggactattttccac

SEQ ID NO: 91446 - DNA, 488 bp, Eucalyptus grandis
  Intron number 1 from transcript Egrandis_v1_0.014481m (loc us Egrandis_v1_0.014481m.g) derived from phytozome v7.0 (c hr-ID scaffold_11; pos 8467873 to 8468360 reverse strand)
tctccttttccggttcgtttcgccggcgtcggagggtaatgatatgtcgccgcttatttctggcatgctgtatgttcttttagttctttacttttgtttttggtcggaatttagtcctttactttagtggctgaacttttgggtgcatttgaagttgggtcagtgtttgattgacgctaagtgctttctgtacatgtattgctgctcttacagttcagcattgtgctcacgtggtcagagaaaagctcccgtttgaattagagtgggaaaagaaactgcttgctgaaatttgtgtgaatgatgatgcacttctggtgataaacatgtgttcggtcaactttgtttcctggattaggctaaaaaaggtcattttcaagaaaattgttcttgcgttaggctgaaatgtttatgcatacattgaagggtaagtgcatagcatgttgctttttcatctccaaaagggcttgtctccatgctatctcaggtca

SEQ ID NO: 91447 - DNA, 860 bp, Eucalyptus grandis
  Intron number 1 from transcript Egrandis_v1_0.013236m (loc us Egrandis_v1_0.013236m.g) derived from phytozome v7.0 (c hr-ID scaffold_2; pos 37387029 to 37387888 reverse strand)
cccctggccggcctcaccttcgccgtcaaggacatgtgagtgattcctgcttcgtccgtcgtcgctcgactgcgacccggtttcattgcagcgcctctgtttctctctcgatagccccagctttcgtttctgggtgttcagttttccttgttttattcaagtgggaagatgattcgggctgtgggctttccccccttttgcgtgttttgcgaagatgtgcctgcttggtcaagtaggtagttgttagcttcggattactcggtgaagtatcgacctttgtcatgaaaaagcgaagacccaatgagaagatattcgcataccaggtgatcagctgacgcggggttcattttcagcgaatgtgatgggacaccatgttccgagcggcaaagaaggagttgggggtggtcgtcttcagtaccgtgttgtcgatagatgtcacccgccatgttaattgatgacgaggtgtttgtgctcgccgcattttcttcctaaaagttttcggaaaagttacagagcatcgaggatagacatctcgggttaagcttgctgcattgcccggttgacttgtacctggaagattattttttattgatatggttttgttttgtaagtgtcgggttttgatcttggtctagtgagagtattagtagtttacctttatcactgaattaatgggagagatctagttataaccgtgtgttcctcacaatggttgggctacttgtgctgcatcttctgttaaaaggcatgaaattttacattgattcctgatgccatgcgtagttggaatttttctgagactgaagtttgtgtcggttttttcatacggaattgttcatgtagtttcgacgttgaaggac

SEQ ID NO: 91448 - DNA, 416 bp, Eucalyptus grandis
  Intron number 1 from transcript Egrandis_v1_0.047406m (loc us Egrandis_v1_0.047406m.g) derived from phytozome v7.0 (c hr-ID scaffold_2; pos 29834748 to 29835163 reverse strand)
atacgaaggtcatacacttgtgctctacctcatccagaaatgtcctttaaatattttgtaatatttgtttagaatgcctcactaaaagaaaagaatgatgaaaccctaatttagatgcaaaataagtatcccaagtagcaccttgcctcgcatcattaaactaaacacgaatgcctagagggttctaaaccttaaaagttttttaataatcttgccaaatcacttgagtagatgagttcagtaatcaaaatctaatccatagccttgcttaactgagaaggcactagtcaacataagtctaaccattaataaaaaaaacctaattgctccatgatctcttgttgacgttaagatttagctagacaagcaattgaagtttttattttccttctgttgcgtctcacaggcattccaag

SEQ ID NO: 91449 - DNA, 387 bp, Eucalyptus grandis
  Intron number 1 from transcript Egrandis_v1_0.053126m (loc us Egrandis_v1_0.053126m.g) derived from phytozome v7.0 (c hr-ID scaffold_11; pos 31990659 to 31991045)
ctctctcttatccttcccaacaagcacggtaagtattattcactcactactgaaacactgaatagtgaaaatattttgagtcacatcattagtcatagcaggaagaaagagaacaggaagaaaatttcccccatgattttacttctccgatacgcatcttgcgttgttcaaatcaaagaatgggaaaaattaacaaacactgaacttgcgtttcctgtacatgcagatggactattcaggaacctgaactaagcaatctcatggaaatgatagccaaacatgaatttgattggagatggagattaaatagcttgaccctctgtttaatttggttttctgccttttgacttcctttttaacttctatgcaattcaggtgacttagctg

SEQ ID NO: 91450 - DNA, 765 bp, Eucalyptus grandis
  Intron number 2 from transcript Egrandis_v1_0.053126m (loc us Egrandis_v1_0.053126m.g) derived from phytozome v7.0 (c hr-ID scaffold_11; pos 31991064 to 31991828)
ataccattgataagtacaaggtcagggtcaatctttacttcccttctgccccatcctctgccaaaacttatttagctatgatgcaactgtgggagctataaccgaaaacaaactccctgatgaacatgtagattctaaagcaaactccactcttttcataattcttcgggtgaatctgtcatagcagagctaccttttgttcataaaactgatggtgaattgcagaatgattcgacctattttggagccattgtcggaatggtgcaaatagaatcggtggggctcaattcaccctaaatggaactcgctacaggctagttgctaatgaaggaaacaacactctgcatagtactcacgagttcctgatcctcatacaacacccatcaccattcatcagcaatatcgaatttaaccaaatgaattacttcaggtggcctgataggattcagcgatgtcatatggacaatgaacagttacagtgaagagagtcatgtaacttctggttacgagagctatgacggagaacaaggtatctagacttaatttcaactcccaaagcctcagtatatacttcgaaatcttggtctagtttgcttgctgggcatacacgatccttttgatcaattaaacatgaaaaagatgaataattagttcccttcaacaaacaaaaaaatcctgcaacacgctgttgaaagtggaaagtgggaagtgcttatgattgctattgcctctcttcgtccacctatatacaggctttccaggtct

SEQ ID NO: 91451 - DNA, 667 bp, Eucalyptus grandis
  Intron number 1 from transcript Egrandis_v1_0.036480m (loc us Egrandis_v1_0.036480m.g) derived from phytozome v7.0 (c hr-ID scaffold_7; pos 32358168 to 32358834)
tcaaagcttgagccgctttgatataaatcttgaaggtattcatgatatataaatctgtttagctagatattctgtgtcatcgcttgtacttggtttggagttttgacttgcgaatcttttttgcaaaggtttggttgagcatattacttgtcaacatactccgcgcagacatggtggttttattcatttgcccatcaatgcattcaactaatggtgcctcagatctgataaaagcttgcaatatgatattaatctatgcatgaattagtacatctcctaatacatacaaacgcagtttaccatttacagaatcgagacattcctaagtaaactttcaatactggtttcgttcttttcttgtgttctccaaactgatattcattcagagtcattgaaattcctaagtaaactttcaatactggtattgttctttttttgtgttctccaaactgatattcattcagagtcattgaaagccttcaatttttgacattgtgctaggaaggtcctttctccttcatctgtttctatgtacttaaaccatctgaaacaattgaaacaacctggaaaagtgttgattgttttgctacttctccatgtattcttagttctgatggagagttttctggcagcttccgttcaggaggccctcgctaatttggcatta

SEQ ID NO: 91452 - DNA, 500 bp, Eucalyptus grandis
  Intron number 1 from transcript Egrandis_v1_0.045421m (loc us Egrandis_v1_0.045421m.g) derived from phytozome v7.0 (c hr-ID scaffold_7; pos 52121843 to 52122342)
gtcaataagctcctcaataacgtaagatttgaatttgatcttcgagtttgcttgcgctgatgtactgttgccaatgtatgggtgagcataggcctggaattttaagcgggagtgggcgtgtttctcactcaagtttggtcatgcggttcttgttgagaagtgtacacctttttcttaatttacttttgttttctcctgatgtgaacatgtttttaactgaaaacactgacttcccaatttatagattgttgttttattgccgaagccctctatttgtcaatgcttaagttttttttttttttttgaaaattccatgtttgatttgcatatttttgtaattgtttactaaatttcattgatggccaggatagtttttctttttctccctcctcctctaatggatttcgtacttttgggataattagagacaaattgccgtaaactttttacatatgggaccacgagctcattgtccctcttgaatcttacttacagaaaaa

SEQ ID NO: 91453 - DNA, 876 bp, Eucalyptus grandis
  Intron number 2 from transcript Egrandis_v1_0.014878m (loc us Egrandis_v1_0.014878m.g) derived from phytozome v7.0 (c hr-ID scaffold_7; pos 16373162 to 16374037 reverse strand)
ggaagacaaggtgccctttcctcttcattttggctatacaccccgtgtggctgttgaattatacttttgaagaaagtcaatgtgttttgcttcccatgggacgtagaactatttaatgttgtctatggattatcatgtgaggaattggacattccttagtttttggatgtgagtgacggtctgatgaccaaccatcctcatcataaaggaaacaatttggtgctaaccttatgcggagggatgctggatgctactcctttggccgatccaagtgttattatcatgtaaaagtgtaatgctccatgacccgtcagaggtagagtactatatactctcatatttaagtattatctctattgcaggagggtagtactttcacagggggaaatagaatgaccttccatgactggaatcttccatattgattatatgaaaggacaaaagcaaccaaatcagaagcttcatttttactgtttgaatgaactaataatgtatcaatgagttttgatctatatccacattgaccaagaaacttccatggcgaatagacattgaccattctatatttgagtaaagcttatgtgatctacaacttactaaataaatgtttctttgatatgttgaaaaactgtgctcctctgttgtgattgcgttgttctttcacttggttacttcactacagcaggttctacatccactgctgtaaagataagagatacttgccctgcattatcagttatatcttcgcatcctttcatacgtgtctgttggggagcaaggatgttctgattccacctgatatgtgtggaaaaaaaaggtggaagagcagatactagtcaatttcatgatgtcacatatgctctttctgtaggtctc

SEQ ID NO: 91454 - DNA, 721 bp, Eucalyptus grandis
  Intron number 1 from transcript Egrandis_v1_0.003493m (loc us Egrandis_v1_0.003467m.g) derived from phytozome v7.0 (c hr-ID scaffold_7; pos 44434422 to 44435142 reverse strand)
gccggtgagtcggcttttttcgctgtgctgattgtccgtgtaaatgtcacgctaaggctgcagtccccgttcgtgtgaaaggttcgagtctgtcgattgagggagtcgggctggacatggggttttggtcacttgctagtgagaacttgatttgatgtacttaatggtttgtgaggcgagcgtgtttttttttctttgcctgatgttcatttctgtgtttctctggtattgaaaatgtggtttaggtgtgggaatatgtaggttcgagatttgaatttagcgtgaatttatgtgtcaaggaatgattcaaacggagagaaaaaagccactttggatgagattatggaagtttggctcaagacttgagaatatggttataggcatgggcaattttaagaggtaccaagtgcctgagaagaattgtttggctaagtggcaaaattctcttctttctgtctcgaataaatagtcaggaagctagagtctggagtctttatctgaagatttacatgggtggtaaggacaataggcttctaatatcccagtcatcctatttctttccgaaagcatgctccacagtctaatcttttgtactgagtgctgatatactctactccaatcaaaagtgacaacttaatcagaaaagaaatatgtgatgagcttactatctctgataaatgacacagggaccaaacaacttgaagacaatctttttgctgag

SEQ ID NO: 91455 - DNA, 574 bp, Eucalyptus grandis
  Intron number 1 from transcript Egrandis_v1_0.036600m (loc us Egrandis_v1_0.036600m.g) derived from phytozome v7.0 (c hr-ID scaffold_11; pos 26698306 to 26698879 reverse strand )
ccttcatcgtcgccggagctttcctcggagaacgggtaagaggcgacgacctcagtgccgagattcaaatcggaagtgttcctttgctttggatcgattccggtcctctttctcgagttccattttctgtgcggttcatctaggtcttggaggatttaagctggagaatgagatcattgtatctggcgttgcttaggttttggatttgcagttttggtttctggttttgagttttgggttattgaagcaaagttaaattagtcgatcatatctcggtatggctcggagtattttatcttttccttcgattgagatgttttatggactttgagcgatctgcggtgattttcttgagaaggtcttatcagcttggtcattattatcaaattactttgttgcgtgatgggcattttgagttggatgaaaagaaaaggatgggctgcgtttgagaaagaaatgtgtgttgggattgttgcatttaccatccaggttatggcgaactttctatgctaattatgtggctgacacaattgatgcaggctgtggactacggagttcataagctctgggagta

SEQ ID NO: 91456 - DNA, 823 bp, Eucalyptus grandis
  Intron number 1 from transcript Egrandis_v1_0.015305m (loc us Egrandis_v1_0.015305m.g) derived from phytozome v7.0 (c hr-ID scaffold_2; pos 7554715 to 7555537 reverse strand)
ggttctgcctgtaagttggaatgttgaagctctgatcgattcttgttttctgtctccttgtttcgttcttgccgttgctctctgtccttctttagtctcgagcgtatcgttgcgcactggcatcgggtcggttttatttattcgtgtgaggaatgggttctgtttcgtttcgcttgggatgctgatttctctctgccgggggatgatggtcacgtgtctgttttcttgttttatcgcattggcttgggtgagctgtgctggaatcgtggaaaattatgattatgatgatttgagaattcggatcgataacggtatgcatttgttgacggttgagtcaaatgattcgtgaactcgggggggcactgaatggaggaatgtgctagtgttaatgccagaggaatctttggttttcgaaagaggaggagaaggcaagaacacaacttgaagagctaatggaatgaatttaaatccgcattccatgctcaagcaaattggcatccctgttctaatgtgttcaatcctcttgactcgaggattttttttttttttttttgggggggctgctgttgctgctttttattaagctttccctgttctattctacaacctctgatatggggaactcagccatagtcagataacactcagatgaactattttaattgtatgtatgctcgagtattgcatgactctgatcaaaaaataaatgaaacgcacacgagcatttgttgtctgtcatgttgattttgtctttgggtaatatctctatttgctgtcagtgatgctggaaaatatttgcaggtctcattctctttgccctttc

SEQ ID NO: 91457 - DNA, 845 bp, Eucalyptus grandis
  Intron number 2 from transcript Egrandis_v1_0.024294m (loc us Egrandis_v1_0.024279m.g) derived from phytozome v7.0 (c hr-ID scaffold_7; pos 50277034 to 50277878 reverse strand)
ctgcctgtgctgcgcttggagctggcattacggtcgtgagttctcttcccgtcacctttcctgaagcttgaacggaggagttgttacttgttagagtctctcgtatgcttgctcgcgttacttttaagccttttgttatgagttttccgtacgttgttcttttttcttctgttgctgatagacagaggtttcctctgctacgacttgtgaactgaatccctctaaattgcatcatgactcgcgtgaatcgcgtggttcggtcgactaggcattcccacatttttatggactcttatatacggatgcatgggtagagtaagagagagcggtccatgcctcgtgtatggacagaatgattattcttaatttgagatatgctgaagtgattactgtcaatagagaggaatgggtatgttttttcctgctccatttgctagtttttgcataatattggcaaagaattgctcattggagagttgagtttttgtataggcttgatgctgtctgggaggagttgagtggggttgaatcctcccaaatttgaaattttgagctataaaattaacacctcatgaaaaaaatgaagtgctagttaaagaacagggtagacattgtctgcttgtagtcatggcacatgactcatgcttgtggtttttattgtgctttcgttgtatttttcagctggaaatagtcagatccaccccaggcgtgtttgaggtcgtctggattctcttctcaatttttcgcaagatctcagttttcctggatgactttctggagagctaaaattctattttgcatggtgcgcaggttttgcatcagctgatcaaagatcacccgacggc

SEQ ID NO: 91458 - DNA, 641 bp, Eucalyptus grandis
  Intron number 1 from transcript Egrandis_v1_0.034730m (loc us Egrandis_v1_0.034730m.g) derived from phytozome v7.0 (c hr-ID scaffold_7; pos 21970806 to 21971446 reverse strand)
cttctccaaaatttggagagtcgccggctatcaaagtaagtataaattttccaaaataaacccacttgaggtaggagaattttttgcacacattggccatcacactaccattacattctctaaagcaattttgaattgagtatcaaaaggtccgtgaaaggttattaggggggtcaatagttcggtttggattttaagaaatttgaatcaaaccgatagtttgagcagttgaacgaaatcgaattgtgctccaaactaagtatgaactaatatgaaaacccgattcggataggtttggattgaattagtttttggttttccttcgtgccccgaaatgagcatgaaccgaactaagaagagagacttttaagttgaggcttcagtttttgttgagattttggttgcagttcggctttgttaaccgaaccaaatcaaaataatccaaaccagaaaaagaagcacatttattttttcaattatttcaactgaaccaaacttgcacgaaatattgattaggtttggcttgatttcaattccgttttccgattggattctgacaccccataaagttcacctcgagggcacttgcttgtttgtggtacgtagagtgcacggagctaggagtcgtttgaacgaggaat

SEQ ID NO: 91459 - DNA, 874 bp, Eucalyptus grandis
  Intron number 1 from transcript Egrandis_v1_0.046313m (loc us Egrandis_v1_0.046313m.g) derived from phytozome v7.0 (c hr-ID scaffold_11; pos 16751066 to 16751939 reverse strand )
caggcgatccgatcttatccatcgctcgcggtcgcgtgagtgatcctctgccttccatctcttcttcttggtcctcgtttgaaacggtcaaatttcgtttttttttcctttgtcctttggcgggttaatctgttggagctcgtgtcttgtgatcgagtgaattggagcttttttctgttgtaaattcagctgatgatcaaagtagcagacgggcacacgtatttttggcggtgctcatttttgggtagtgtttatgttgatggattcctaggttgtatttcagtattgtgctgatcgtttgtgacgaaccgatttgtatttcagtaatgtggaagatttcgagtcggacattcggtttctgtgtgattgaatagggatcaatgcccgatcggttaccttccatggcactgttttgaattcgaaaaagttcgggagccagtgaaaactgacatttcatcttgcaagtgaagtatatcaatgttcttggtaataatctgaccctttggtaggaccagcgcgtgcttgctttctggtaatgcaagagcatcaaaattacggagaaaaattgagtcgcttttgatgggagctgaaggggaaaaaggtactcttctaaagagctaaaatgggtcacacattgtttagaaatgtaggatacatgggcgtcgatctcattgtcagttaggcaccatttttcccaatgtatcatgtaaaatatacagctcagcttatgtacttgatctcaagttgcttcgaaacggcaattgactaatgtcatgcttctttttcatggccccattgtatccctacttgtcatttgttcatgttcctttttgttgagtgtagaaagggtcgtggcaaatcttcaaagttgatc

SEQ ID NO: 91460 - DNA, 576 bp, Eucalyptus grandis
  Intron number 3 from transcript Egrandis_v1_0.023783m (loc us Egrandis_v1_0.014400m.g) derived from phytozome v7.0 (c hr-ID scaffold_2; pos 46947993 to 46948568)
cctgggtacttttgttgaagcatatcagttgaatcatattttaagaagtgccgaaggcacaaaattataatgtggaagttcttagggaatctggaaatgaaaagagcataatgtcatcattcaacataatatggtttttcatgtggaactttgctaattgatcaatttattgtctgagaattccagcttgtacaacatttcttgcagatgccattaggagtaatgacaaaacaatatgcatcagtacttcacctttggatgcatgcatcatagaacattaagtgcatggtccaattgcgtgatggtttggtttggctgcttgcgtatggtaggaaggatgtttaatgcaactaagccagtgaaaaatcattcaatgcgactaagccagtgaaaaatcattcagtttgttatatagcattcttttaaacagaaaaaggtacctaaattagctgttcactttgaggaatggtaggtgctggagaaataggttcagaagacctgtgatcatcattctttaagaagcttttatctaatgctgcaggtttagcacagcccagaaattggacaagcttggga

SEQ ID NO: 91461 - DNA, 1008 bp, Eucalyptus grandis
  Intron number 3 from transcript Egrandis_v1_0.009341m (loc us Egrandis_v1_0.009191m.g) derived from phytozome v7.0 (c hr-ID scaffold_11; pos 15571206 to 15572213)
aggtacatcgatctccgaattgattttcctttatcccaagtaaatgaagtgctcggtgtgcatctataaacaatgtcagacatatttcgtatagaggtatgagtatactctcctgaataaagacacggcctctttgtaatttggcaaatattttggggatgcattcttattttccctgtatcttagagatgaatgcgagcctaagtcatttgttgctgtcggtgcaattgaaattttgccacctatacactctagaggcatcatatgagaagaagataaatttctattttgtttctgagttactaatttctggttgggctatatatttctccatcctcggcaggggaggtttcctccaatcatgcctctgattggtgggttacaagtgggctacgtctatgatttgtaacccaccaatcagagtatggtcggagaaaactggatggaggaaaatatggccctaatattaacattattatgaagtgactgtacggtttgactgaatcgtgtgctttgaggaattttctgctcgtactcttatagttaagactcaaaaggaaaccaaggatgaaggctctctgttttacataagttaaaacttatttaatgatacttttataggctttaaagcacttctggtaatcctggagaacctctcagtccctttctttttcctcccaatttgtcaattcctgttcttgatattggccaaagcctcaagatgccaatgtcttctattctaaatgatataaactgtctgtcatatgtacattctattagtttagaggatagaaggctaaattatcatggcaaattctctgcttagaggtcacactcaatgaggagttttgagtaaggtagtttatgcttttagatttcattgtcacgaatgtagatttctactttattgttgttggctacttctggtccatccatttcattgacttcctactaactcagatttatctaacaggctaagttccttaaagcttgtggaaccatacctga

SEQ ID NO: 91462 - DNA, 922 bp, Eucalyptus grandis
  Intron number 1 from transcript Egrandis_v1_0.043411m (loc us Egrandis_v1_0.043411m.g) derived from phytozome v7.0 (c hr-ID scaffold_2; pos 61397773 to 61398694 reverse strand)
cgatctctaccagtttgaccccagagagctcatcggtacgtacgtatacgcggccgccgtatagactcaggctccggtcggtttgtagtgtacgcgcattcatgcttgaagattggacttcttgttctgtcgttcctccgtttgaatttcttggctttctctgggcttgtttggttttctctttctttgactttcttggcgtttctttgatctttttaccattattatttttatcttatctctagaggaaaatacttagaatggaaactatttgttgttttacatacacgcttggcgaaaataggtaagagtagtttattacatgggataattatcaaaaatatactaaacttattataattgtgttaatccaattataaatctttttcttcggccattcagtcttaaacttatcattccagccaatttttgccgattaatgctgactttgataatttttaataattctttatttttttcaaagtttttaaatatttttaatatttaattttccgcttcttccttcttagaactaggcaaggccaatgccacaggtgaaagtggcctcgcctagtggtcaggcaacctcgctgaaacctcatcagccattgttggaaaggaagcaaaagaaggaagaaggggaaaaagaaaaagaaaagaaaagaaaaaatattttcaaaatctgtctacgtcaacattcgccaaacggctcagatgaactgaattggcacaattatattttaaaaaaagctaaaatctgaattggtataattataataagtttaagaactttttggtaatatttcccttatttcgtggtatagtcagaatctaagtttaaaggcagtagaaattactcttatgcaactcatttcatgattctccagagagccacaaggcagcgggcaaaggtgaggacgag

SEQ ID NO: 91463 - DNA, 718 bp, Eucalyptus grandis
  Intron number 1 from transcript Egrandis_v1_0.044759m (loc us Egrandis_v1_0.044759m.g) derived from phytozome v7.0 (c hr-ID scaffold_11; pos 20089870 to 20090587 reverse strand )
actcttttgactttctcccctggtttttgttttttcgtgtgttgtttttgcaatttgctgatggcaattggcaaggtgactttatttcctccatattctgagacaagaatatggaggagaaacatattaaggtaaaggcacggcgttggagtgccatatttgcttttcttgaaccccccagattccatctatggatacacagcacatatcaaagctaaatgccagctcctgaatggcaaactatggcagaattgatacggaatatggatcgagctctttggaatcggttttcttgcttatatatgctggacaacggaaaatgcaatattacaaatttttctccatgagaaggttttctgatgccgtgtctgcaactgagaaaattgcattgaaaagaacgagcccttaaattaaatcgatgtagaaaatcaaccatagtgctagctttgccaaggggatgcttacccatgtactcaaagagttaatgttattaaatcctcttagtaactcttctagtatgtcttatcggttagattttcttctggcacccaaatatataattcacatccttcagaaacagactttatattatgcatgtttttggctacagcagaataaatgcccatcgaatcaaataattcttcttgatgacaagcttgcttgttctctttttcccatgtcactgagaacagtgtgtctttggaacttggggagcagc

SEQ ID NO: 91464 - DNA, 1005 bp, Eucalyptus grandis
  Intron number 1 from transcript Egrandis_v1_0.014273m (loc us Egrandis_v1_0.014273m.g) derived from phytozome v7.0 (c hr-ID scaffold_7; pos 21987430 to 21988434 reverse strand)
ctctgcctcacctcagcgtcaaggacactcctatcgtgagcccctctctctctctctctctctctctcttcaagatgctgcgtgaatgcgatgctgtgcatttccaatgcagagaagggggtagtgttcttctttgcgagaatcactccagcgttttcgaattacatttcttgcttctgatcacgaaacggaatgtcacggctcttcatggttggtgggttgatgggtactttggtacccgaagagcgcccgagaatctctctcaataatggtgaaatcgagctggttcatgtctttcttgcctctggggaaattatgctgttttcgtactgcactgtccgggaatttggcagtttctgcgtgattctttggtttaaatcgagctgtctgttttcattacgttctggcattctttattgatggctgggcaggtgtggttcttgagctgagacaatgagttggttctggcttgattcactgtaatcagaaaagctgctaaattagtacatatgtactgccagttgggcaagatttgaatccgagataccagtcggtctggatctcgtgggtgatatttggtttcttgttttgtttatgctaactaaggtaactggagattcaggatactattttaatactgtttggatttgcctttaatgtaggtgaggagatcagtttagattttattttattggtgtagttgactattttagtagcaggaaacaaacaagctgctacctcacttttttttcggttggacagaacaactcgaaatagtaattcgggatcaattctggggttttcattttcatgatctcgtgggatgtcaattgacagcagtgcaccgtgtttgatcccccaggatttatggcagagtcttgttttcttcttgcctcttttgctgtttctttttcgggaaatatactgaggaaattgcaaatttcatatggtgaatttcattgtatttcaggaaacgtcatctgctcaatacatactgcaacagta

SEQ ID NO: 91465 - DNA, 1027 bp, Eucalyptus grandis
  Intron number 1 from transcript Egrandis_v1_0.018138m (loc us Egrandis_v1_0.018138m.g) derived from phytozome v7.0 (c hr-ID scaffold_2; pos 10671296 to 10672322 reverse strand)
gcgggtgctccaagtgcctgaagggtctccaccaggtcagtcatttcagcagagtctcaaattcttgctaatttagcgcacgattctgcggttttcttgctgctgcaatttcgatttcgattggtgggtatgtctggaatgcgactggggttggtaaagttcccttcttttctctttatcttctgcaatttaggtgctgagagcctgagaggggcaccatgcaagaatgtatagagcttgctgagttagtacttgagtctggttggactctaggcatgttacaataggctaattgctcaaaatcgttttccgggattgtccgaaaatgtgatcttgaatatgctttaagacgttacttctcaagcctcatttgaagaaatgagtagtaaagaaactagagaaggtcgagtagtgatagcattttgtctcaatgaccatgaccaagaaatgaatcaaaatagcgtgttgccgaagacttctatgctttttggtctgttttgatctcaatctgtgctggtatggtatagaaagcacatcgatgactctgcttcagaacattgttgctcatgaattgctaattctgacattgataggcgttttgggaacctcatgcttaagatcttattaatcttgcatctctcgcaaagttggatcgacaatgcaatttctgttcaggcgtgattgtgaaggggaaaggactaaaagagcaaacaaaagtagggcttcaaatgcgtctctgtcatagcttgaagcctaagtgttgtctccttaatagcttctttttctatcagcttcagtcgattggtcaagatttgtttattttaagcgaccggtttcggcaaatgtttcttttgtctgttagagaggcctcaagtgaggcatggaattgactctgatttcgatgtcgcacctacttagttggagtatttaatcctcgattcaccaaacaattctcctttggagtccaatcagtggccatctcctgtttgcagctcaacaggaacacttcagactcaagcaaactgga

SEQ ID NO: 91466 - DNA, 725 bp, Eucalyptus grandis
  Intron number 1 from transcript Egrandis_v1_0.005942m (loc us Egrandis_v1_0.005942m.g) derived from phytozome v7.0 (c hr-ID scaffold_7; pos 46930050 to 46930774)
tgaggtcggtcaatcaagggagtaagctgtaccaggtaagggtgcccgttgttcccgagtggtgtggtcgaggggattgttccggatgattgaattgtgcttcgagtcgtgatggttttggttggcgaaatttcgagttttgatgaatttggaaggggtgggatgtgaattctagctttatcgcgcttggcgagcggctttgcaatgattagttgagttttgatcatttaggcctggttttgcgatgcttgattgcagtttgtgtgcttcgagggtgtgtggagatgcttatttttgtggatgagaatgcgaaaaaattcgaattttgttaacccccattaaacttttgaaccctaaaattcctttgcctctgaggctaaggaagaaagtaggggcgcaacttcatgatcattagttgcttgccataaatttagattttattctctgattgaacataggggcatcattttctagcagctgcaatgttcacgacacgagaaaactgagaatgtcatatcatatatattgtttttttcacttcttttgctccattggttcatatctaactcgagtattttactataataagcaacagtagatcattttttggttaccaaaacgaaatcttcagttgatgtaggttgttctttctcgctaagcattttttcttttttatgtatcgtgctccaggcttttcaaattgacaagagcgctgtgaaattcca

SEQ ID NO: 91467 - DNA, 673 bp, Eucalyptus grandis
  Intron number 1 from transcript Egrandis_v1_0.027058m (loc us Egrandis_v1_0.027058m.g) derived from phytozome v7.0 (c hr-ID scaffold_7; pos 755660 to 756332)
aaactgccgacaaagccgaagaacccatctacaccgtaagctctgagatcctcgtgcggttccttgatgtcgcggttcttttgggggtgattcggggtaggtcgagaatgcatgtcgcgtggcgttttctgtgcctgtcgagctcaaagtgactcattcgatcgggaagattgatttttgatgctgggtcttgtgtcatcgcgacaaaatgactcgacccaatgagggatgattcctgttttattggaacttggaagtacgggcgttgtcgcccacatgctcgatgaaatgtctatgcgaaaattcggttctgattttcctgttagttgcacgggaatcttcagcagcggtggtctgtactgatcatcgactgttgaaacatgtaattcgttcttcatgactttggagaaaactcttgtttatcagctgtcggaggtgggcattttatatgcccattgagacaatgagttgcattggagcgagcgagacgcaaagggtgcggactgcaatgtgtcgaaataacttaatgaggacaagctttgtgtgtttgtgcattaacatcatatgctcaagttgtttgattgataacgctagattgccatgtctgtgctggctaatgttctcttcttgatgggcagcgttctccgaaggtggctggaacagtcaactgggg

SEQ ID NO: 91468 - DNA, 714 bp, Eucalyptus grandis
  Intron number 2 from transcript Egrandis_v1_0.027058m (loc us Egrandis_v1_0.027058m.g) derived from phytozome v7.0 (c hr-ID scaffold_7; pos 756374 to 757087)
gaggtggcaaggaggcagctgcttctgttgtaagttttccttagcaagagatgtccttctcgagtcaatctagcactgtctttaacagttccatctgtctggccttactgattacgtggtaataatgatatacccgttatgctgtgcaaaatcatattttcttcagtggttgagattattattcttgaaaggcatttggtgggacatgttttcctctttgttttagagctatgatgaggtgatgaacgaaacagtaatgaagtgaagccataaaatcaccattaattcagcaagaaatatgtgttgtctgataattcctaagtgctgtatcaaaagttcattccagaaccatcagtaccccttaggtaaaagaacagggaaataaagggactttgttgtgggccttttttccaattgcacatacattccttcattttttggctgataagaaagatgaccacatttagtttcaattgtgtccttatctagtcaccaaatgatgcagagtgtattcttttactggaattttagtgctccaacctgtgtttgtacttcctgtttaacatgctttttcatacttcgtggccaaccattttgaatttaggtaaccgagacccttctacagataattcatgaagtatggcatgtggttcagtgtaattctatcacacactgatggtggtaaaagactttgctatgttttgcagagcaagg

SEQ ID NO: 91469 - DNA, 464 bp, Eucalyptus grandis
  Intron number 2 from transcript Egrandis_v1_0.006501m (loc us Egrandis_v1_0.006501m.g) derived from phytozome v7.0 (c hr-ID scaffold_7; pos 830927 to 831390 reverse strand)
ctcatcttcggcttcgtcgagctctctgtaagcatttgctgatgaatccagtcgctgtgcatttcgtatactggtatctagtgatattgagatatcaagaagaggtcttgaaagttatgtacatcatcatatatgcacagtatattcaaacatttcgaatgtgtccacactttttgtctctatctctcaaacttcattattggtttctttttctttcaagactttatgttttgatactgtttttttatggccaccttctaatcttgcttggtcacttgcggatacacatgttcagtatagtctctgtctgctgcatcatgattcgccaaataaaaaaatctgcatcagctgagaaagggtgattggttcagcacttgtttaatgagcataattatttgctaatcccccggaaaaattgatcatttgcagggtttcatattgttgtcggtccaagcacatctgcc

SEQ ID NO: 91470 - DNA, 642 bp, Eucalyptus grandis
  Intron number 1 from transcript Egrandis_v1_0.006501m (loc us Egrandis_v1_0.006501m.g) derived from phytozome v7.0 (c hr-ID scaffold_7; pos 831562 to 832203 reverse strand)
agagccgcaaccttcgtccttggtctgtatctctctctctctctctctctctctctctctctctctctctctctctctcatgtgcgcgtgcatgtgtgcgtgtatatcttcgaactttatccagattattctggtgcatcttcggagagatactatcgtaagtacctctcgatgaggataggaaaattgtagatcatattcactttttagttttgatatagtacaaacaatagtttgtacatcctttgatacttacatgtaaaaattagtaatgtcacgcctgtttttgtgttcgattggttttccgtctccatcacacacccttttgagatcgctttcttctcttgccatgaatccatttcagtggttatagcgtatagctagccatcagtgtgtttctgcttttggttcttcttttagggtaatatctggcctcactcctatgcatccaccatactccataggttcaccttgatgacaacaagagcaataatgatagaaaggatattgatgaacttttccctttttcttttatttgatcatttgtttctgtatatctgatgcagtgcagtatactgatacataaagagatactaatatcgtaacatgtacgcatgaacaggactacaaacgtttgagata

SEQ ID NO: 91471 - DNA, 987 bp, Eucalyptus grandis
  Intron number 1 from transcript Egrandis_v1_0.045482m (loc us Egrandis_v1_0.045482m.g) derived from phytozome v7.0 (c hr-ID scaffold_2; pos 9424120 to 9425106 reverse strand)
ttcttttggtagcatacccaggatatcattcttaacttcatttggtgggttcctgtttataccagcgcatgagattctactattgactgtgtagattatgcacgaaatcattaaaccttgagcttctgtggagttagtttcacttagtactgcgaagatcctatggccaatggaccccgagaatatgtccagagaaaacttgatttgtttgaatgtgatccacttgtttcttttgttggaaattcaatggcgctatacttgttttgtcttcctccatccgagaatatcatgtgacaagaatgacttttctatgacttctcttttgggggaaccaagcaagttcaagttagctactgcttggccatcaagtcttcattagagagacttgttttcactgactagtcgtgaaaattgtataatgggaggtttgctcctaattgtaatttagaggtccctttgacttgtttttgctgcctcgcttggtatatgcttcaaggttgaagaactagcacatgaccgtgataggagttaggactaattcaaaccaactccatttgatgtttccgcaaatgttttccagtctctgctacttgtttctcctatcctctgaaatcctctgcctccttccggtccaaatgaatcaccaaaacttcgtttgtgtagcaaattgtcgccaattggtccttatcatggtcaccaacttagtctatctggctctatcggacggtgcacaatacaaggtttgcatgcctcagaactgcatatatgcgccgaaaatcagctaaccgttaaggatttatggcgaacaagagtcctactggggctatccaaatttcaagattacctgcaaagagacataccctgtcctgatttctcggatgaggaattcgttatcaagtatattttctatgcaaaaaattcgttcctcctggttaatggccctgtgtagcaggaatcctgtgattctccgcagcgtaatatcagcct

SEQ ID NO: 91472 - DNA, 714 bp, Eucalyptus grandis
  Intron number 1 from transcript Egrandis_v1_0.022507m (loc us Egrandis_v1_0.022507m.g) derived from phytozome v7.0 (c hr-ID scaffold_11; pos 36944443 to 36945156)
atctggttcgttactctgtttttcttttgcttcttacatgaaggttctgtcttgtgcgtgcgtgtttccttttccttctttgaaactgggaattctctgtttcgttggcgagaaaatggaaggcagaaaaaaaggacattttgtctagagtttgtggtgtgttaaattggatgtatgaccttctgagctgccgctttgctcatctggccaaaaaaaaaaaaaaaaaactggaaattcgatagtccgggtgttattttcttcactggtttagttgctggaaatgaagaactctgttagctttgaattgtgttccttttggttccatgaattggatcatagatgtgaatttacttaaagctagcaaattataaagtcgatgatgtggccagttcattgagattcggctgctgcaaaagcacaaattgtcttactcttgtgatcttggggagcaaattcaaaattcagtgtcattgatcagtaatatcatattctttgctgggaatttcagttgtgacaccgcaatatcactgtcaaaattcatatttttcagccagttagaaaatattgaagaggatcaacttatagacggaagtgttcaaggccccatcttcatccaaagtgtgttcaaagaattacggagtaatttaacacatcgcagttgatctttgggttatatttctgggaatgatggtttgtgctttatttctatagaac

SEQ ID NO: 91473 - DNA, 1001 bp, Eucalyptus grandis
  Intron number 1 from transcript Egrandis_v1_0.053447m (loc us Egrandis_v1_0.053447m.g) derived from phytozome v7.0 (c hr-ID scaffold_2; pos 57071590 to 57072590)
gcgttgattgtcgctttggttagtggggaatttcgaaaatgcgttcggcttcttttgtggggtcggttcgcttcggcctccggggatagtttttgggtagccatttactgaattcgttatcaagttctaatttttttttccctttcggtaacttcttggtgagggtgactcatgcagaaatgctgttacagcactgcggacttcagctgtttggacacctgggggggctttagattctttcgtcatctcgggatttgtctggtgatagatgatgggaaatgtttttttgccgtaaatttcggtttttttttttttttgttaactcttgcagaaatttgtcttgtggtggaagggttggtcttcccttgtgtatttcccggtccgctgggaaattccggggaactgctctgctcgaggtcatggctgtgtaaacccgaaattgcaagttattcgagaatgttggttcttgttgttaattatgacgacgatggtgttaccttgcagccatgatctgcgttcctagcaatggcattcttgtagagattctcaggaacttattctctttttcgtctgtagcctccctgtgacgtcgtttttccattttcctttatgtaccagaattttcctttgtgattccttaagagtttcttattgaaatctggttactgtaggcacagcggcacattcttcaggatggatttgtgttcttcctggacagtgatatcaaaggagacataattaccctgaccaggagtgtaagtcgttagtttgccagtaagaatttggtgtcctacttggccgcaatactgccttgtacttaaagcaccaatggcagacattatgtagttgatgaacctaattccttgacagaatcatgagctgacatgggagaagctatcggattgatttcagttgatcattgtccagttttaaaagtttaagatattagcttctggagttatacagaaaatagctaaaacggggtcgctctgttgtgtggc

SEQ ID NO: 91474 - DNA, 953 bp, Eucalyptus grandis
  Intron number 1 from transcript Egrandis_v1_0.005359m (loc us Egrandis_v1_0.005359m.g) derived from phytozome v7.0 (c hr-ID scaffold_2; pos 36171483 to 36172435)
tggacttgaagttccttgacttgtcctatcttaaggttcgaccttctttcgattcttcgctctcgtttcaaatttagaaagtcaaaaaaatgctgttcctggatatggctgggtgggttgttccttgaatttataggcggcctaactgtcctttgtgattaaatttgaaggcatcgcgagcttttcctcggttgtctttcgtctttaatttgcaagtgaagggttaacggcggcccttccttcatttcttggtgcatttgtcaaagatgatgtttggaatgctcaatttcttgaaatgtgtctaattttattggattgtattaactctaaatctttgcatgtagaaggtttctatttttagaagtgcttaaagagatgctttttcgtactgtgtgtcgtgcaatttccgaaggttcccatgtgggttggttgaatttgggaagatttaatgttgtgctctctctcgctaatcttttttttttctatgctatgaatgcttgtgaataagtgatgcaggttggacctggttcatggaaaagattgtgctttaagatataattttgaatccgaatggccggcttttcttatttctagaacagtggatgcctttgtgagttagggattttaagaaatgaaatatcatgaagtgcaacgcattgatgctatatgagcagatgcttgtgaacaagagatgcaggttggacccggttcatggaaaaaaatgtgctttaagatatataatttttgaatctgaatggcaggcttttcttatttctagaacagtggatgcctttgtattttagggattttaagaatgatatatcatgaagtgcaacgcaatgttgctcaaggattttctgttttctgtgtttctgattgtgttctttttcgaatactttcacctctgagctatcttaggttacaaacgactccctgcgatcaattggttctct

SEQ ID NO: 91475 - DNA, 573 bp, Eucalyptus grandis
  Intron number 2 from transcript Egrandis_v1_0.013631m (loc us Egrandis_v1_0.013644m.g) derived from phytozome v7.0 (c hr-ID scaffold_11; pos 1582836 to 1583408 reverse strand)
ttactggctatctgaaacctgcatcaccagaggaggtgaaagtctggtcattatttgctacgtcctcgatttatctcgctaaccttaggtcctaagtttttggacttcccatattatgatcgcgtcgttgcatcattcagacttctcgtctgttcttactctatgatgaactgttgaccattcattcgaagcatctatctctacttgtttctgttgagtgcctgagtgttaagacgtgcatgtggtactgcatggcctaagtaaagagtcctcactaggcagaccaagaaggaccaacttagttaaaatgggcctgtttacctatccctcgtgtgggcttatggtgctgctaaactatgtggcgttgcgtgacatactcgagattaaaagaaaaatggcttcatatgtcagtctacctttgtttagcatacatatgaatgcttgtgtgtcattggatagtgccacaactctttttcccttctgtgctaaagttttcagttattaaaggtttttcttccttaagtccagagtaacttggaaatgacttgacgttttatttgaatttttaggcct

SEQ ID NO: 91476 - DNA, 629 bp, Eucalyptus grandis
  Intron number 1 from transcript Egrandis_v1_0.012987m (loc us Egrandis_v1_0.012987m.g) derived from phytozome v7.0 (c hr-ID scaffold_2; pos 7995359 to 7995987)
attgccgttctgtgggtaagtcgtcctttttgaccgctttccaggtttgagttatcatacatagcttgcttttgctccatttttctaccaggaagaaccgtatgtttccatattagtgttaaaactatttcatggtctggaagtacatgcgattggaaaactttgtggtcgggatatttttggcgtcagatgcgtttcctaggttgttttcttctcttttctttttcatgcgggaatgctttgtagtttgtcctggcgagagcctccttttgtttgttcagggttcattgtgggtggatgctttgcatattgcatttcgctctggttttttttgttggttttattttgtttttgggttgttgtcggggacgtcccaaggtgttgggaatctgaatatttttgccccccatcaccacctttttatcttattctcattccttatccatctcggtttatctgctggggcatgttccttttgctttgctttgttacttccctgctggcgatctcgtatgggggcagcattgcgaggacggatttggacaaatttggagagccattctttgctcgatgaaagcgaaaagttgaaatctttttccttttgttgtggtgttattttcgatcaggag

SEQ ID NO: 91477 - DNA, 987 bp, Eucalyptus grandis
  Intron number 1 from transcript Egrandis_v1_0.001897m (loc us Egrandis_v1_0.001897m.g) derived from phytozome v7.0 (c hr-ID scaffold_11; pos 31964503 to 31965489)
ctttgcttcgcaagaacttgaccttccaggttcgctatcatcatctctgcgcgtcttttctttttctttatgccggttcttttccggtgttgagttgctgtagcgagcgggtgattaggatcttgactgcatcattttaagccttcttggtagtacttggattagttcagttgggactgtggttgggtgtatttattgtcgtcttgattgatggatgatgcgcgcagaactgattcttgccatgtcaagttttggtttcgggtttgcatctcgatatactcggttattttccttgttgatggttgctcctccgttaattttactactatttttgttccgtatctctcgtatctgattatgcagatggtattgcactattacgaatctttgagtctcttcctttgtggtacatgaattgactttctcgtgtgagtagtaacgatgtgcttgccatgtttcttctcgcttttactttaatgggctactaattatattaggatctagtgctgtattgaatagatggtgcttgttctttgacattttctatttatcaattttaatctatataaattctttcggtataattgatgtgtggcatatagaatcatttgcgagcacgagtcggcccagattccacaagcatgctttaagcaaggataaagtaaaaaatacaatgcacaaccaatgtctgaccttcttatgttcagtttagcccccgggaatttaatctttgttagttaacccttttaggagtccagaggccaagtcctcttttacatagaaagtatagagttaatttgaagccaatatgacattcacagctatcagtataacttctttacaggccctagtaagactaaacaaacacataccatgctttctgttacagtaaggtcccacagtttctactaaggattcgtctgctgacattgtttatactatccatttgcagaaacggaatatcaagaccaatatccggctcatttc

SEQ ID NO: 91478 - DNA, 455 bp, Eucalyptus grandis
  Intron number 2 from transcript Egrandis_v1_0.031192m (loc us Egrandis_v1_0.031192m.g) derived from phytozome v7.0 (c hr-ID scaffold_2; pos 14420695 to 14421149)
ctcaaatcatcaaatctgacgtggctttgaaactggtaatgggcttttggtatatcgtggttgatgaaacagtgttgttaattctatactagatcattgcgagtctcagtttactatatagttgaattcctaatttcctacagccattaattcatgaaattttttgtgattgctattatgaagttcaaaattaatcataaaaatgtggtcatttcattgtggccaacttagacctgagaagataatgtattatacctcttttattacagtggaccattaggattcagttaacaatcatcattgcatcaataggcttgtgaatatcatttaacaattatggttttgtttttgattgttggttacctctttttcactttcgactcattctaaagctcatgtttgttgtttaatttctactgccactgattgaaacatgcttttgattaggctgaacg

SEQ ID NO: 91479 - DNA, 825 bp, Eucalyptus grandis
  Intron number 2 from transcript Egrandis_v1_0.031809m (loc us Egrandis_v1_0.031809m.g) derived from phytozome v7.0 (c hr-ID scaffold_7; pos 46561374 to 46562198)
attccgagaaatcggtgccttcgtcccaggaggaggtcggatatgatttacctaactcctttgcgtgctcgaattctcgtggattgaccttgagctgcgctcgttttactgttgtagttcggttttgacgagaacgattgtgcttcggagctcatcgagtttgtttctggatttacacatgtctgcctgctttgattgtgttagccggtggaaccgatgtgaacttgagattcgtgctttggctggacgttttcttataaacatgcttatttatatgtgtatacgatgtgcatttacttgtctatttagctgaaaatgttgctgacttgttgcggaaagtccttggcgttcggagtaattgtttatttgctatttgcttgtagatatctaagaaggatgttatctattgattacttataggattatttgctgattgcttaatgcatcaataattctactgaagtttttgaggaagcaacagaatagaaacaggtgcacttgtgcaagtatataaatgaatctctctttctgatcatgttattactgatgatacggttctaaaataaagtttctgaagtttgtaagttattatgactacgtcaagtgatgggcttataggacaatcaatttggacatccattccaatcgtacaagaaaaaaaaattcttttactttaacacgtgaaattattagttgtttcttcacttctttagaaaatgcctaagcatcgccaaatccagtaacttacctctgctctagtttctaaatatgtgtgatcagtgcatatttgttttacacttcaggaagcagttattaagaaaaagt

SEQ ID NO: 91480 - DNA, 780 bp, Eucalyptus grandis
  Intron number 1 from transcript Egrandis_v1_0.003385m (loc us Egrandis_v1_0.003385m.g) derived from phytozome v7.0 (c hr-ID scaffold_11; pos 24254689 to 24255468)
tccatccctgggaagtcgctttcaccgtcttcaacgtgagccgccttctttttccgatcacttttcactgaatttttttctgggttactcccttttccgctccttcagcaaatgctggtgcttttcttgatcgagccttcgatgctttcggagatacatgtctttgcatctcttcaccggatgccaaaatcggtcgtccgacgattccggtggccgattgaatcgatttcgtagttactaaggttgccggaaagtcaaaaagttttctcctttctcgaaagtcaaaagatttctgacagccggaaagtctgaaagtggtcgctgatgatctttcttgcttgagattggaaagtgaaggtagtcaagatgatgatggatcataaaattggtgaacttttttatcggtgtaaataattaaattacagcttaaattggctgatatggtccttttccatggaaatggcagttttttcctttcgagtgtttgctaccgtgtggcgttattcagcttgtttctctctctttgactaaaatttctttttattagaatttcataaatgaggttgaccgggcaaagttaatgtggggggaagattttgaataaactgttttgtccaatttgaatattgggtgtgacttctgaattggcttgtggcaatgcctcgactctttttgcattttcgtcttgcgatattcatagtaaatttgagaaattcagttgtgtcggaacttaactgtcgtgcaggtaattgatcagcccacgaagaacaaagatcgggt

SEQ ID NO: 91481 - DNA, 577 bp, Eucalyptus grandis
  Intron number 3 from transcript Egrandis_v1_0.005497m (loc us Egrandis_v1_0.005497m.g) derived from phytozome v7.0 (c hr-ID scaffold_2; pos 43796470 to 43797046 reverse strand)
tgacggaacggaagtcatcgatttcagctacagaagttagtctctaagtctgatctcccaccctactctctggatactatagaaatttgacgggtgcagatgaaaacccaaaatggacataggattaaaaatataagacgctttaattagttatgcataaaacttccaaataatcagatttctagatgtatctcccatttggattaaaaaaataagactctttaattagttacacgtaaaacttccagataatcagatttctagatgtatatcccattaggattaaaaatataagactctttaaaattagttatgcttaaaacttccagataatcagatttctggatgtatctcccattccttcatagcaatctaattcattgcaccattgatcagctgaattatttaatcaatttaaaagtaaaattcctttagccagccagtgctgttcttcagacaaaaaatgattgctcttttgattggggaactacttaaagatgcttgctcacaattatccccatgttttttgtactgaggcaactcatctgtgaatgcgtattacaggattttctccgaa

SEQ ID NO: 91482 - DNA, 562 bp, Eucalyptus grandis
  Intron number 2 from transcript Egrandis_v1_0.005497m (loc us Egrandis_v1_0.005497m.g) derived from phytozome v7.0 (c hr-ID scaffold_2; pos 43797174 to 43797735 reverse strand)
aagcaggaaattgttcaatctgtaaaattgttcaggtgactagtctaatgattttattaattttttgccattactgatttctgctgttgcacatgtggttcaaataatagctcaacatctgtaactgagagcaatagtataagaatcatctgaagttactagctaagtgtgcaaacaatatctgttaggcatgtagtaattttgagcttttagtcttcatgaagaatgggatgaattaatttgaacaaaatggaggtcgtgtgcaggttgtgtcatcactacaaaattggtagcatgagcatgctaagaaggagatatccttatccacacgaccataaaatccactgaaaaaaagcctacatgtaaggtgttgtaatttgaagctgattgctctaatgggaatgtcttctttgaattatgagaaagtatgaaaagaaacataaaggcatacatatgtgggcaaaaagcattttgctgtgtcacctttaataaattgtgagtgattgtctttcttgtcatttttaactccctaattggtgctcatgcatcctagtgcaggata

SEQ ID NO: 91483 - DNA, 1038 bp, Eucalyptus grandis
  Intron number 2 from transcript Egrandis_v1_0.032701m (loc us Egrandis_v1_0.032701m.g) derived from phytozome v7.0 (c hr-ID scaffold_2; pos 62432216 to 62433253 reverse strand)
aggaggaaaaggctgcggagactgtctacatcaaggtaactgtagaggccctattttgcgtttgttatgttgtatacatggaaggtagtagaaaaacattagaattaaaatattccatagtaatctgaaattggaatgcctaattgtagtgcctgtcattatctacattaggattgacgactctaattactttgtgatttacaagtttatgtgcctaggcctgatgcgggtggtgtagtttcggtaggtgtcttttgtattttgctggttatcttggtggactgccaactatgtcaggattgatcttctactcttctttggaggattataaatagcttttgtgtagaatcatgcttggatgttcacatatatttttggaattacccaagccagatatgcatatagtgatatgaaatgaaataagaaaaacaaagttcgtagaactgttatgcctgatgcttcctgaggcaaatgggttttctgtgcacaccatttctttccaagcgccggattttagagaattgccttttgatgctagtgttgaggcctgtgtagcagggtttatgggctctgagcagaaccttatgtattatacttgttgcccttgttcttacgaggtgcttggcttctttaagtcaaccaccatcgatgaggtgggtgaagctgtgaccccttgtttacattttgaatttctgaatctgctcctcggagtgaacagagagttagctttcttggttcagttctgaatatgttagtgatctgagtttcccttgcgttctttattctcattggggtcattagagcagagctttaaagagaattcacatcagttcatgctttgccggtgttttgtcacgcaaactgatgcatattcgcttcctccaatgtcctctagtgtttccagcattctagttttgaattggataacatttcttctccatcttcccgtcttaaatatctgcaagatttccattattgtctctgttttgctaaatcattgctgcactaattctttcacgaaatttgtctccacagaaa

SEQ ID NO: 91484 - DNA, 635 bp, Eucalyptus grandis
  Intron number 1 from transcript Egrandis_v1_0.032701m (loc us Egrandis_v1_0.032701m.g) derived from phytozome v7.0 (c hr-ID scaffold_2; pos 62433321 to 62433955 reverse strand)
caagaagtcttccggacgctcccctcatctctccggtaagccgcgctccgattcgtgcataagcattacgcggcggcgggtgtgccggcgacggtgctcgcgtgttacgattttcggcttagtttgtgccgtgcttgttcgacatagtagagagttgcgccggtagagtttttggatttcggcgttctgcgcgctccggaattagcggatttttctttctatccgatgagtgaggtttcctagggtttcggtggctccgcgtgagctattccagctgaacgtccgttaaaaaaaaaaagatgtttcgaatcggtcgacgcggtcgggcttgcggcgtcctcgcgtggagcttggtcttggttgctgaatcgctgaatcgctgaatcgcagaatcgtttttacgttcgcttagattgttgaatagattttgtaggtcatgaatctactgatatttcgtttgactgagcatctgctcaggaaaaatggttctccatttcttcggcgagtcgtttccaatctgtatttcgtgttccatttcctggcaatgccgaaatgatgtgcactctctttgatccgtggaatttgtcttggattttgacgttcttaatcattaggaacttggttcttttgtcccg

SEQ ID NO: 91485 - DNA, 1043 bp, Eucalyptus grandis
  Intron number 2 from transcript Egrandis_v1_0.024775m (loc us Egrandis_v1_0.024775m.g) derived from phytozome v7.0 (c hr-ID scaffold_7; pos 52052120 to 52053162)
gagaggacgcagcggccgtcgttcgagatagaaaagtaagccgtttcccttatccttcatccccatccgtatatgcaagtttactttagtgggggaccaattagttttgccctgtgataccaaggcatgacgtcaactctcatcgtgtatgttgaatcgtgttacgccctgtggtctcccatcttattgtgtcttatattgacttaatgtagcgattatgttccttaattcctgtctaattttacttaccatgtaagctaagtagctatcacgatgtagggtgcgcgcacgtgcatgcaagctgtgtgttgggcttttcttgagcgtgccttcaagtcgatgatgctggatgatatggtgataggaagagaggcatcataagtacttggtttaggtttgatttgtcgacagcaattgttaggggcatagatatcggccctgccacagggggtttctccaacgtaagtgcatcataagtattggagtcttctctactccttgaaattggcattgatggaggttcataggatagtatggagcaatcttgagcgcgcataagagtgtcgagatgttacattggaatgaaagatctggcatctaggacttttggcaatacgggagcattcccttacctcaagttggtatttagaggctgtatggttgctatagctgccttggctgccgacacatatcaaattctcactaggtgggatcaccttcagtaaccaaaaggcaaaacaaatgaataatatccagcatcataggatgtggaacttttgtgtcggaaagtggaacgagcacttgtaagttgattccactttggatggccagtgtgctgtggttattagcgcatgttctttatctatgtaagtgtgatattggtaactacaattctttttggattgtctactttttttttccattgggtcgagaatccttgttagccatggctcaatttcagtttctggagtgttggcatcctggtgctcatagccattacccttacttgattataactctgtatctgtaggtccgattgtcag

SEQ ID NO: 91486 - DNA, 481 bp, Eucalyptus grandis
  Intron number 2 from transcript Egrandis_v1_0.009517m (loc us Egrandis_v1_0.009517m.g) derived from phytozome v7.0 (c hr-ID scaffold_11; pos 2923234 to 2923714)
tgaattccagaaactactgtgggcaggtaccgtccttgcttccgttgctccgttttttttttttgaaaaaattctttacgtagctgccgagttatcgttcggcctttctttttcccctggataattggaactgcatttggatgatgtcacgtgtttggattgcgggacttcaacgggctccaatcttgaaagctgaagctgggatggggtttgattaattgtagtaggctactttgcgtgagctctggggctcccgcacgcgcatacatctgcaaattcatttctttttcagattattggagaatggatgaatttgtcttcggctttttcttggaaagaaaaaaaatttgtgtatgccgtgcgtctcgacataacgagaggaggcaattgttaagaagttgttgatgcatcggcaattgattcgatatggcttgatttctgattttttgtttctcctcgtttgtgtgcacagacggcactt

SEQ ID NO: 91487 - DNA, 759 bp, Eucalyptus grandis
  Intron number 3 from transcript Egrandis_v1_0.035302m (loc us Egrandis_v1_0.035302m.g) derived from phytozome v7.0 (c hr-ID scaffold_2; pos 35393328 to 35394086 reverse strand)
acagcttaaaaaactgagtctggattgcagtcctggtaataatttatgaccctttgcccatttttatcttagtgacagattcgtttgttgtgcccctggaagtttgacacggaagtgctttttattttgcgctaatattaactttcattttcttcttttttgtccttttttaaaccctaaactcttgaaacttttgcacaaatgcacaatgttgacatatgaattcacatatttattttccatatttttttaaaaatttggataaggttgttaactttgacatgaaaagaaaagtttcttttacttgaacttaattctacacaaccgagtcctttgatttgccggagcaacctaggggataattcttttatcatgtgctacatattatgttcttttgttcttttaactttcattttcttcttttttgtccttttttaaaccctaaactcttgaaacttttgcacaaatgcacaatgttgacatatgaattcacatatttattttccatatttttttaaaaatttggataaggttgttaactttgacatgaaaagaaaagtttcttttacttgaacttaattctacacaaccgagtcctttgatttgccggagcaacctaggggataattcttttatcatgtgctacatattatgttcttttgttcttttacaacatcccacctctgtatgtctttgcattatcccagcatctttttccttgtgcccttgctcattcgctgcagttgttttgtagatatt

SEQ ID NO: 91488 - DNA, 547 bp, Eucalyptus grandis
  Intron number 1 from transcript Egrandis_v1_0.044130m (loc us Egrandis_v1_0.044130m.g) derived from phytozome v7.0 (c hr-ID scaffold_2; pos 46286909 to 46287455)
tctctatctcgcctagaatttttggtattgttgctgcttttggctcatttgggaagaatatattgctttgagttgctacttttggctcatttgggaagactatattacttttgagttgttgcctttggtttagattgacaaagtttgttaggtatatggagttcctaatatacttctcgctcatattttccaaagctcgtttagatcacctaaatctcattgcaattgcagcaattttggcctgcctatgttgtggattttatattatacttggagggattttgtatatatcatccatgagcacagatgtcatatgatctgatcatgttttgaattcaatctgcattagctccttccagacccagatgtcatatgatctgatcatgttttgaattcctgatattgatgcagtcattcttataagaagattgagagcacaattattcttttattgttggtatctgactatgctttttgttgtgctgatcatgtccgctgactgatgttttcagttggttggccggctcgacaacagtgctgtctcatc

SEQ ID NO: 91489 - DNA, 749 bp, Eucalyptus grandis
  Intron number 2 from transcript Egrandis_v1_0.012829m (loc us Egrandis_v1_0.012829m.g) derived from phytozome v7.0 (c hr-ID scaffold_11; pos 22802882 to 22803630)
tccccggtaaaatttccctgcttttcagggtctttttcgtcttaaagactgtagctttgcttcgtttccgcgtcattttgagctgccagtctttcgatccggttggtgcattttggggtttgactactcgcctggaaggtggattgcttggggaactatcgagtgctttgtagttctcttagcctttgactttgcatttttggtaacgtgatgaatattccgcgtgtgggatcgaggagcttttgtaattcttctggtgacgattttatctttcgaagatgtttgggggtagactttctttgttttttcttttccatggttttgttggaacactcatcctgttttggcaaatggggtaatgctaaagtcttacaaattccgagtaatctgtttaaattaatatgtgatggattgttaatggttttcactagcttaaaaatttgttgagatagaagaagtttagccctgtgctgaacctttcgttatgtttatagagttgttttcttgcttgtttcagttgcattgttcttgcttatattggttgcattgtgggtctctgtcgggatgcttgtgaacatttcccctgtttttcgtaaactgttgaaaagcctttatgaagctctactagtagaagcctcatctttttcactaataccacaggcttgacattccatagtgcagtattattcataatcaccacatgatgtcttgtagtttgcactgtactgggattagaaggtggcaaggaa

SEQ ID NO: 91490 - DNA, 569 bp, Eucalyptus grandis
  Intron number 1 from transcript Egrandis_v1_0.047101m (loc us Egrandis_v1_0.047101m.g) derived from phytozome v7.0 (c hr-ID scaffold_2; pos 31592365 to 31592933)
ctaccgttcacgcagaagacacgtcagtaagagaggttaggctttgaatatcatcaaatttagtgatattgaaacctgacattttgtttccttttatcattggagttgtgcctcccaatctctttattaataggttaatttgctcaaattctactgatttatgaatttactatctgccattcttgctgatggcttcgaacccttgtactcttgttggttatcacactcagaaaagttttatcaattgtttgatgatttcgctaagctcatgtcttcttgagtagcaaaccaattctcttcaccccatggcttcgctatttacagtgttcatagggcatgcatagttgagtaaagtcaccttaatttcttgaattagaggatcagacacttattacacgacgctagctgtccattttgaagttcatgtgtgcattcatgttcttccttcttccctttacccctactttttttatttttcccctcaaaatcgttttccattgctttcatgaaatcatcttgaatattttgaatcaggcctgcaaaaagctaaaccaaattgaactctcaaa

SEQ ID NO: 91491 - DNA, 729 bp, Eucalyptus grandis
  Intron number 1 from transcript Egrandis_v1_0.010353m (loc us Egrandis_v1_0.010353m.g) derived from phytozome v7.0 (c hr-ID scaffold_7; pos 29559887 to 29560615 reverse strand)
agattggcacttcgtgctgggttcgatcccaccaggtgaaatagattttttttttttttgcccttgctgttcttgaagcttaaagtccggtcctttgtgtttgcggttgggtaattgaaatgtggtttattagatgagtggagagtggatttgcatgtgcttagagtggtagtatagttggttttttcttgttttgagtgtaatggctggagggatatttgattttgggtcatagtgaagtgactaatgtggcagaggattaggtatctgctgatagtggagctgaaaatgtctacccggtggaaacatctaatgcttaaacaaaatggatgtctggacagtcatggtgtttcgttgcagattcaacaggaatggttgaatacctttctatcgaaatttagtgcagttatattgcattgacattcctaaaaggtggattgataagaaaggtataaaaggtgttcaggttgctctttcatatttgtcaaattttctgctggattacctcttaagggtaagtggtttcatccattagttttgaactacgtataattaatgtgcaagtgtgttctgcctttgtatctgaatgcttgccttttcacttatcagtgatgatcatgtaaagaaaattatgggatagtttcgcttaaattctgtttctgtaaaattgtttgcaatttttggatgacaaagtgaattaatatatttgttttttggaaatgatgatag

SEQ ID NO: 91492 - DNA, 836 bp, Eucalyptus grandis
  Intron number 1 from transcript Egrandis_v1_0.025836m (loc us Egrandis_v1_0.025836m.g) derived from phytozome v7.0 (c hr-ID scaffold_7; pos 50345378 to 50346213)
tggaagagtgtgctcccgacaaggaggcaagtgtccccttggtttctctggctctctgttattcttgtgcttgatttggagggagcgaaaggaaaaaggaacggcttttggtgttttacggcatgggttttgggtgtttatgttcgtgtatatttgtgtacgcgatgatttcgtgtctgaacgtgaaatttctttgtttatgccacacgggtcttgcatttgggcttgaattggttacattgtatgctagtattggtcggtgttctgggtttgatgtagctgaagaactatttctcaactttgagtatgtgaatttcgatgaagatggggagtggacttcttggtgtagtccagttccttttgagatggggcacctcctgtggacatttcatgctcagaaaacacagctttctttggtattagttccatagcttgatttgtggacatgagaagcttgtttgtttatggttattaaagctgaactgcctaattttaagccaaagagatgagctttgatgttcatggcatggtttcttttcttttatacttgattcttttggatataaggtgctttttttgcttttcatggtcatgtaaagctgaataaggaaatttcttgttaatgaaatgattatcgatgtacataaatgcttttggctttttatgattgtgtcaagctgaagaatatgagttcgctttaagatactttgatgtctgtggcatatgggtctcgctgtaattcatataaggggaagtttcgactgtttatggttttatatagatggagaatgggaataagtctactggttggaaatgaacaggtaggaaaagtgagc

SEQ ID NO: 91493 - DNA, 937 bp, Eucalyptus grandis
  Intron number 1 from transcript Egrandis_v1_0.012233m (loc us Egrandis_v1_0.012233m.g) derived from phytozome v7.0 (c hr-ID scaffold_11; pos 14473426 to 14474362)
atttggccgaggcgatccagcttatcaaggttagttttgattgatgctgttcttgataaattgggaatgtcctctgttggagtaaaagaaagtttcctttgtagaggccctatgcaagtgcagtagttgtggaaatctcctccatttgataggaatgaatatgtcactttgggcatgttttggaaatatagagctgcttaagaggtttgacttgcaactacacatgtttccatatcaaattgacataggaaggcttaacgtttgtcagtgttggaatccttcttgcctttttctactcatcctgtgctgcactttgagaggaaatgttagttttgtggggagatgatccctctatatagtttaagacttctaatgttaagttctccgtttgtttgcccttttgccaccaataccctggtttcttcgtttcttattcaaaaccctcctgttagtgcattggtgcacatcttcttaattatcaataaaaaactttacttggagaggttttgccaaatcttcaaaagtttgaacttagggggtggtctcttgaagaactagcatatcaaggcatatatacgaagggggtaatggttgaacagaactggtttaataccagttatgatggtttatttacttatatgaatcagtgttcatattttgttttgcatcagtaccttctgctaggccggaaattgatctttatttgtagaaaatgtgggacagatctttgacatttgtcctttatggcccaagctgacagtaatattatcttttgcatggtggcttgttcctaatgcataattgccaaagttccggtttgatatgacagaggtccttagagtttttctattctgagagttaaaacgttatttgtcttgtgacttgtttttaagtaaaattaactgttaattgtgagtgtttgcactttttcaggcta

SEQ ID NO: 91494 - DNA, 921 bp, Eucalyptus grandis
  Intron number 1 from transcript Egrandis_v1_0.006010m (loc us Egrandis_v1_0.006010m.g) derived from phytozome v7.0 (c hr-ID scaffold_2; pos 56972539 to 56973459 reverse strand)
tcgtatagccacttctcgtcggaaggaggcgccaggtttgatgcttcccatcagtttgcctgcttgctgtttggttcggtgaatacgcgactgttctgtatgcagttcgtcgttctgttgttagattgtcagacagttttagcgtaagacgcgaagtgggtttggtttccttaactctgcatgttccggcgatcctagcctggagtttaagcggcaaagttcgttctcgaactgagttggttaatcgaggcatacttaaagtgccgcgggctttttttcagatgcagcttcatgttaatgttttttttttttttttcactgcgatataccgcgatttcgaatttgaaccactaaggatgtgaataagttgtggacttttcagttcattccgctagatgtcttaaaaatgattgcttcactggctgatcgcacctttgtgccttgtttgattgctgcttattgtttctccccctcctcttatggaagcaaagtttgtggtttgatcttatgcgtatctagatttgcttgtagtgtagagattctatttatcggaatctaatttccaaattttgacgatggtgttccagtgattccgtgtgcttagcactacgttcttgcagctttaaaccctgacaaacaaaatcacgtctctttctttcgcgtgcttccttttcatgtcttttcaatgcttttactttttaacttgcaggaattagcggtttatcccttctttctttgaagttgttggcatatcaagaaagaaatgctcgtatctgctcttttgacctccgttggaataaatacgggcctttgctttttattcttcatattatactcggtcctgagaaggcaaccgagtaactatgaagtttatataccacgacaggtagccgaggggaaatctaataaaagaagctattt

SEQ ID NO: 91495 - DNA, 689 bp, Eucalyptus grandis
  Intron number 1 from transcript Egrandis_v1_0.022760m (loc us Egrandis_v1_0.018365m.g) derived from phytozome v7.0 (c hr-ID scaffold_2; pos 33255540 to 33256228 reverse strand)
cgttctcacggacatcttgttcgagtcagacacaggcaggtctctctctctttctctctctcagttccctcgctttcttgttcgattgttcttgaagctctttggctgtctctgctaagccagaacccataaagaaagcaagaaaaaagagagaatgaatccgtcttgggctttcatcgttgagagcaagcttcttgtttttctactgtctcgtgatcttatatgatgggtgttcgaaatcgtgtccaggagctctgaagagagcttgggacagcctgcacatgcttttggtgcgtacttcagtttgttgattaaggaagtgggaatttcgttttgttggtgatcagcaacatggacgattcttggagacggaaatgctaaaaacgaggatagatcacgcgagagtctctctccgtgctgtgattttttggctcgagttggcacctggtccttgtcactgtataatttcgtgtcatctttccagcttcgtggaagcaactggaatttaattcacactcaactaccgttcacgttcacatgcaacctgcggagagagagagagagagagaagctttatatatctctgctattttttaatctttgcatggtcaaactcaaactaatcacatgccaatctatacccacgctgtgcagcacccaacacccgagaggaggaggaggaggaggat

SEQ ID NO: 91496 - DNA, 1016 bp, Eucalyptus grandis
  Intron number 1 from transcript Egrandis_v1_0.004029m (loc us Egrandis_v1_0.004029m.g) derived from phytozome v7.0 (c hr-ID scaffold_11; pos 44593595 to 44594610 reverse strand )
tcggtgctcgcgcggtccttcgccggaggtaagagaaatcgctccgattccttagtttcgccccgtcgctttgattctgatgagaccgcggtctgttcgagtggcttgattcgatgctgagtgtttcggcgattggagttcgcttaggagagggaatggaccgtgttggttttggtttccgatgccagcatttcattttgctctagttcttcagaggaacgagggcggaagcaggctggcgagttgctagtttcagtaggaagataagtttcgcaccattttcgattgtgtacgtgttctcagacggaatccttctgttctattagaagaagctttattaggtaacgcgatttagattgctaggtaacttgtgtttgtgcgagagtcgagttgaactaatttctgaattttccggttgatatgagacctctaatccgcgtctgcgtgcaccaggagtctcgagtagcgacccgaaggaagaaatccgttcctaccacacttgttctcgtcagcctctttgccttttaattgagagtttggtccttgagcaatctcgatccatcgcttactcaatttcgtcgtgaacataaacagacaaatgcgtcttttcacatcatcccacttctgtcaacttggattggaagtgttgttatcagaaacattcacttgttgcatgggccgaaacttactaaaaaagtttagaaggcgacagccgtttcgactggtcccagcggccttcgtcatcgaaaaataatcctacaagttgcctaatgaacaagagacatgtggttgtagtatcactttgttagtcacttcttggcaaaatacaatctgatgcatggcggagcgaggttttctataatttgttccagaaaaagaaaagagttaacacaattctgtagcgaattagccacaggttatttccatgattattgtgttggattttgttaagttcaacttcttgtggttctaaaattgcaggaaaaaggatttatatccaacagtcattgctgaaa

SEQ ID NO: 91497 - DNA, 561 bp, Eucalyptus grandis
  Intron number 2 from transcript Egrandis_v1_0.013059m (loc us Egrandis_v1_0.013059m.g) derived from phytozome v7.0 (c hr-ID scaffold_7; pos 20048897 to 20049457)
ttgctctgctctctccggactgatttacgagatcggtgagtcctcctctgaacctttgcctttgccaaaacacgggtcaagagaaaccgagccgagcttgtcggatgtggtggtcacctgccgagagtgaaatctaacattcccaattttcatggtcaccatctcactgtcttaatcaactaatacccttttctttgcaaatcgaactccatactcatgagaggttgattttgaggcttcatgccgaacaagattgtagctgacaaccaagtgttagaaatcaattactactttcctaggtgaatagttactatattacgtctcttatgtcaatgacacaaaggggatattaaataaatgttcattaagagacaatgacatttcttcttggttcaaaaagtaagttcatgtggcacttgaattttgcatgccgtcgcatgcaaaagctgatttcagcatgataaatggacatgtcattttgaaattttatgtattctaatgcggatgttcattacatgtaatgtaggtccatttacgttcaattacgagaattcttctaga

SEQ ID NO: 91498 - DNA, 486 bp, Eucalyptus grandis
  Intron number 3 from transcript Egrandis_v1_0.023481m (loc us Egrandis_v1_0.023481m.g) derived from phytozome v7.0 (c hr-ID scaffold_2; pos 58445728 to 58446213)
cctgctttcactttcattcttgctctcatctccaggtatgctcctacctaatgctcctcctctttctagtcatcacaatcattcaagcaaaagcttatcctttttctctgggtagaaagttagatatataccaaatgttaagaccgttttagtgatttacgatgtaggcgaacaaaaacaacatggcaaactcttattgagtgtcagatatggttaatttgtttaaaggttcactcgcagtttgtcacttcagttgatatattttgtaaaccaatcttagcacagaaatggagcgcatggtcttaaacactacggctgatgtatagtgctctagattcccatttctttgttaactttgagtatcttttacatgggtgattggtcactgccatagtaattcaaacaagagagtggattgtgattccaagaagaaatgaatttaactcgcccttaccaagacatgaaacaaatggttaatgatgcagg

SEQ ID NO: 91499 - DNA, 640 bp, Eucalyptus grandis
  Intron number 1 from transcript Egrandis_v1_0.008312m (loc us Egrandis_v1_0.008284m.g) derived from phytozome v7.0 (c hr-ID scaffold_7; pos 50733822 to 50734461 reverse strand)
agtaattccaaggtgcgtttgatttttgctggggtcttgattgcggggggagtgtgggtgtgatgattgacgtgaaaaaggagggggctttctgagttttttcctgggtctggggagttgggtatttttccttgtttgtgggtttctggaaaattttgtcttttcgattgctgcttgttgttccaagttgtgggtatgtttcggtcgatttcgagtgggttcgatgacggatgaagatgcgtggcttttgaggttgtggggctggattttgatgattagacgcaattagtgtgaggaccccggatcgaattcccgtgcgtagtaattttgttttcttgttttgtacccataccgataggagacagtattttgatgcgtaatgtattatttgagacgctttcttccgacagagtctgtttcttggaaagaatgatactgggaaaaaatgtcactcccttgaaaaatcatatatttttggtgtatattcacatgatcctagcaaaaaaatatgtatgaagaaccattataatttactttgtgaactttctagctggcttattttaatctggatatggtgttttcttctcttcttaatgcttgagcaggtagttctctttggttcattcactgaagacgagac

SEQ ID NO: 91500 - DNA, 780 bp, Eucalyptus grandis
  Intron number 1 from transcript Egrandis_v1_0.030070m (loc us Egrandis_v1_0.030070m.g) derived from phytozome v7.0 (c hr-ID scaffold_2; pos 31079326 to 31080105 reverse strand)
ctgcttaaggtttgtttggaaactctgttggttctggggaatgtgggattctattttcttccattggcttatagtcaaactttgtgaagttttctcaaaacaaaaatatatacaactataagtaaattttaggatttgaaacctctaaaactcacaagatcaagcatttgaccctattagaactaaattttcttagatttgagagttcctcccttttcaagaggagccatgaccaagtgtcttcaaatatatgcttaaatgcccttaaattacttaatctgagtctttggaaactgtaggctagatgtcctggggaaaaagttatatgattatttcatgaactagagagagacccgatcttaatccctgttaagtgagaggcccaattatgctttcttaatatccctaaaatcaccagaaatcttactgttgttgtcaattgccgattatgtgcggaaaggaaggttgcttgagaagagaaaacacgaattgactcatccgtggggttttgcccatatgtattttatttcttctcaaacggtggatcagtaggttagacctttgattagcactcatccttcttctgatgtttcctcctggccaacatatttgggatgaacaaagcagccaatagcagtttgttctcgcctatcgacagatggcaagtcgctttcaagctcagataattcaaatctgaattcctactttcttcttgttattgagagggtattctctgcccttgtgaaatcaggtagagggagagaactcgaacggagaggg

SEQ ID NO: 91501 - DNA, 682 bp, Eucalyptus grandis
  Intron number 4 from transcript Egrandis_v1_0.046694m (loc us Egrandis_v1_0.046694m.g) derived from phytozome v7.0 (c hr-ID scaffold_2; pos 17743043 to 17743724 reverse strand)
gtgattggaggacatcaattggaggacgttgggagcaacccaacatgtacgggagtcgatttgaaatatttgatattactcatcaaaaatgcctaataggaaggagtcctataatggtgggacactgaaaaagaagaaatctaagtaatgagtcttatttaggaagaatatcaagatcgaatctatccttgtgattgcccaaatcagaggaattctaatcatttagggaggattcctaacttgggtggaggtctgccactataaacaaaagggtttgggtagaggtttcttggtgtgcaagaaaatactctagagagatcataagagtcttcaacaatgtgcgtaaacacgagaaatcttaagagtttatcaagtgagaatatgttttatgacaactatgaggacttattgtgagagaatcaccattaaagtgttaattgtaatcctttgattatagtggagcgattctttgatcagcattccgtgattttttctattttgggttttccacataaaaacttatggtatattgttctccttctctcttgtttgctgtgatatttaggttcttctacaaagagaatatacaaccgcatattacgcaattctgatagttataattatgccgtgatcagttgtgatccaacttaattgataatacagggcaacttgttgcaatttg

SEQ ID NO: 91502 - DNA, 929 bp, Eucalyptus grandis
  Intron number 1 from transcript Egrandis_v1_0.005417m (loc us Egrandis_v1_0.005417m.g) derived from phytozome v7.0 (c hr-ID scaffold_7; pos 37403201 to 37404129)
gactcgccttttggattcgaatccgtgcgtttctggtaatacccgtttctgttttttaattcatcttctctgaattctggtgacacttcaatgctctgtttggaatggtgttgggttgtcttagtatgagagtagtagttgaaagagtgcatgttgtatgtgtaaaagtttcatctggataggttcgttccttgtaacgttgcttatgatcaatgagcggtaggccgtaggtttcctgacatgaaagtatagccacgaggatgagagtctcatattgaagtgacatttgcgaaatgaaacgcctcagaagatatgaacttgtggttaggttatatgtccaagactgaaagtggtagtctgtttggagctttctatggactatatcactatttgacattgttggacttggatccattggggtggtagtccatcggagccgcttacccagtagtttggactcccgaggtgatggaaatgacacaatggagttacggaaggaggcatgtttcgcttagtcaaaaatcattggcatgcatcaaagtgcacattatgaaacccaaaattgattgacttgtagaaggtcgcatgttcagctcagctggtattcaagatggttttccaatttaattcctactgcatttagcaatcatatgtcaccacacatgttttgctggacttgatagatttttggtaaatgccaggatctttgatcggggaactaccattgtagtaacttaggaagggaactttgattttatttaacacagaaagtggcaactcccggatcagaggatttttctggtgattgaatgcattaattgttgttctttattgagaggtgccgattagctagaacattcccaattttttcatgttatattccagtacatcatctagaaagctactattttgcaggaatattataagga

SEQ ID NO: 91503 - DNA, 359 bp, Eucalyptus grandis
  Intron number 3 from transcript Egrandis_v1_0.026908m (loc us Egrandis_v1_0.025163m.g) derived from phytozome v7.0 (c hr-ID scaffold_11; pos 1484343 to 1484701 reverse strand)
tttgtgaagggcagtcgatctccttgctcaccactgtaagtttcctacagctacgtggatctatgatgctttatttgccagctgctcttttcataaaacggaaaatacatattcttcttcttcttctccttttttagattcagtttgatggcaatttcttttgcagaactttggcaatgatccatttcctactatgctcttgttttttgactaccagcatagcattgatgatcttgggttcttatttctatcaaaaagactgaataaattagttgtctgaggtgtcatcatgctgaaaattgagacttgaagttgtctaaaacccaaaaaccaaatacttgtcttgtagggagcttgtc

SEQ ID NO: 91504 - DNA, 825 bp, Eucalyptus grandis
  Intron number 1 from transcript Egrandis_v1_0.001250m (loc us Egrandis_v1_0.001241m.g) derived from phytozome v7.0 (c hr-ID scaffold_2; pos 44163292 to 44164116 reverse strand)
ggaataagaaaaagagccttgctgaaatttttcaggtgatctctctttaattgcgcgtctcattaagttcttcagtctcgataagtgaatctaaattatgtattcggtctcttgtgacatttatatcacagtcattctttgagagccacgcgtttgtcacattaaatgctcctacatttgaggggtctttaaacgaaccttttgtattggcgatactttatttctttttagtatcgtgcatcattttgtcttaatgtgaattagattgtttcagattgatggaaagctcttaacctctcgcgtgggataaactgaggaaatctttaagtaggattaaatctccaagtgatccaatttttccaaagaaatcattaatctcatttatggatcatcgtaaatcgagttaaaacacgatcttacagtccttcgcctttgaacacacacacacacacacacacatacatatatatgcatgtatgtatatacttgcattttctgctttttaacaaatatcaaaactgataatgcagtgctctcgatattcatatttcggagcactgcatctatatgctgctggttgctagcgggggagaagagtgattcgatgtaatggcaaaggaagatagcaatttaagctggcaatacattggtccaatctctagcctgaagataaaagcaatttcagtgatttaaaaaaaaattaaattacaaaatctatataatgttgtatttgttgttatgatcatttctctttcctgatttggctggtttttgcttattacttctacaggacgatttgggacaggcaacaccgatcacggggca

SEQ ID NO: 91505 - DNA, 660 bp, Eucalyptus grandis
  Intron number 1 from transcript Egrandis_v1_0.019958m (loc us Egrandis_v1_0.019735m.g) derived from phytozome v7.0 (c hr-ID scaffold_2; pos 26266168 to 26266827)
tgcagattccaggttcaggggtctttcttgttttgttgttgtgttgttttcttttcctgttgttgcttgcatcttgggttttctctggccgattggatgcactcgtggaacgtctcagcaatgaatttcgaattgcagagctcaaaatgctgctgcttaccatgtctagaaggatgagtaatcttaacaagtgtctctctttaacagattctgctttctatacccatggttttcctatatgttgtagcgttgcttggcttaaaggtcatatctccagatgctggacttgcaaatcatgtcttgcagatttataggaagtttaatctggtgttaataagtttggactttctccggtatgcctggttgccacatgacttctttaaacacctaaccgggttgtcatatggagtttttgcactgcgtatgatttcaggaacatgggacggggtttgttttaggtactgatcatctcgagctgagttagaatcaagtgaacataacgatcttgaacttatttgatttttgtgtagagatctattgtgacagcagtaaaatcaaatcgagtacattttagattgcatagagagccaccataattgttatagcataatttcgttaaatgcaggaacctggagagatcgaggcccagtttgcagagat

SEQ ID NO: 91506 - DNA, 1013 bp, Eucalyptus grandis
  Intron number 2 from transcript Egrandis_v1_0.018369m (loc us Egrandis_v1_0.018369m.g) derived from phytozome v7.0 (c hr-ID scaffold_2; pos 24354077 to 24355089 reverse strand)
actgactacgcagaccgatacatttcggcaggaaggtgactgactttatcttatgtttttgtgcttcataatgggtaacttaagtttaatagccacttctgcttgtagctgtgaagatgaggtaatatttgagtcaattgcaaaatgagatgcttcatcatttaacaaatgttcacacgataggaattgaacctgcctttaaattaacgacgatgtgcatctctaccgagtgattctgtatgttctgccgaatggtctacacattcatttttggtaagcgtttcacatatatcaaagaattgatgacctatacttgtgtagttttatcgtgataacagtagtattgacatttcattatcaactttgtcagtgatgagcatctagatacaatgatcatgtgatcccttagtgtcgcttttggattataatttacagctttgaaacattcgtacattgacctatttgaacattctttgaaaagcctccattcatctggataatgtcatgatgcagcggattttagtgatggtaaacctaggtagtctcttggcatgatatgcaaagaagtgagaattgtgtctatgcatgcggtgtgagcagtgtctgaaagtgtgacacctgacagatgattgtcaattgaattgcataatttctgatgtagtgaggcaaacgaatgaaataaagaattgagctgattgttatataaattttaaacgctattctgcacattggcaaaaaaataatagcgatattttcactgctggttttcttgaaatggatttatcaagcctaagatcgtgggaaataatttagcaagtaaaacgtaggtaaaggcattttatgatggagaagccggagaagctatgtctttgtattaggcatggggttgtggcttgtgtatgaggtagtttctgttgtaagaaaggagatgtaatttctggaagtgtcactgatggtctcacataatatcattttcagtattgagtattggccagatccccagcgtggtatta

SEQ ID NO: 91507 - DNA, 795 bp, Eucalyptus grandis
  Intron number 2 from transcript Egrandis_v1_0.009273m (loc us Egrandis_v1_0.009273m.g) derived from phytozome v7.0 (c hr-ID scaffold_2; pos 3216842 to 3217636)
cgcgcctcggctgggacgtgcctgaggctcccgaggtatcgatccgttttccctcagatcggacatctgtcgctgttttttcttttttcttgttttttttagcgttttctcgacctgtgtttgactggatctgagagatctgtttgcctcggttgttgtgattgtccgatctgtgtcgatctggttgggccaattccttttacggtgtttctggtacgagaatgatgtggcgattgtgttctttgtgttttgagaagcggatcgggaacgtatctcggtctgtgttggtcttagcgtttcgtaatcgtcatgggaatgaatttttggaagaatttcttgtgtatctgtgcagatagatgtagatttgatagcacatatggaagtttatctttttttcgttgttcatgtcgaccaatcttttgccggttatttttctccccctgttgatgttaagcatcgaggaaggtagagctcaagatctgtctgaaacatggtttgacttaagagaatttcatacggtcaaagtttgttttttgatatctggatgttattgagatctgggttttgcctggttagatgtctgtattctcgggctaaatgcttatgttcttatcggtacaagggtgtgtgctaattcacttgcgttgtttatttctcagtgatgtttccgattttcgaatgtcttgactagttctgacagaattatattggtggtgtgaggtatgatgatggagattttgatttatattattgagtggtacatggatggatggctgtgtgtaggctcaggtagga

SEQ ID NO: 91508 - DNA, 529 bp, Eucalyptus grandis
  Intron number 1 from transcript Egrandis_v1_0.051776m (loc us Egrandis_v1_0.051776m.g) derived from phytozome v7.0 (c hr-ID scaffold_11; pos 36671294 to 36671822 reverse strand )
tgttctgcaattcgtttgaagagttggaggctgaggtgagcatatacctttttgtccgtggaaccttttaggattttgagaagtaattacctatttcttccatgaaccttacctggttgtctaacactgatcgaacggaattgagacttagtgcttctgcaagggcagaagtcaatcaaaataatgtacgctgtttgggtgctccgtcgtcgatattgttgagataatcagacaagaagagagctgatatagaagaattataacaattggtcctgattgtgatgttatttggaaatccctaggcaagtctattaggagctaggcgtgcgtcacaccttttcaggtctgagattaggattgtctgaaatcccatcttgcgcttggacaaattgttttggtggtcttatttatctagattggagttgcagatgcaagattgctttttgcaggtcccttttctccagttaattttgttactctgtttcatttatcagctcgtgaaggccttgtttggagtttggccgttgtt

SEQ ID NO: 91509 - DNA, 596 bp, Eucalyptus grandis
  Intron number 3 from transcript Egrandis_v1_0.030471m (loc us Egrandis_v1_0.030449m.g) derived from phytozome v7.0 (c hr-ID scaffold_7; pos 39776242 to 39776837 reverse strand)
aaaggtttcctctctctctctctctctcccctcatgtatacaccaattacatgtcgcacttatgatttgcgtctcaaacacgacctccgtccacaatgaaagaattagtaagaaatattgcaacatcatattgagatgttgtgccgtagctgatttatcttggacaaaatttcataccgttagatgtcatgatcactcagaagaaattatattatcagttcaataaatctgtgataaacaaaacttattgtacattatacgaactagggtcaatttttctttttatccttttgtgactaaccctactacctatatactcacatagagtaaggttaacaactttttgaatatactcaattggatctagctgctcactatcgagattcaaggtcttcttttccatcgcatccaagtccacttctatgtcttcgtatcacctccatttctctcttacatatcatccacgccaggaaaaagaaaaacaaacctaagcacgccaggaaaaagaaaaacaaacctaagctttcactgatcaattaagctgattttcctcttctataggtgcgaaatcagtggaagtgaacagaaagcaaagc

SEQ ID NO: 91510 - DNA, 396 bp, Eucalyptus grandis
  Intron number 2 from transcript Egrandis_v1_0.020154m (loc us Egrandis_v1_0.018181m.g) derived from phytozome v7.0 (c hr-ID scaffold_2; pos 61573819 to 61574214)
atcacgagtaagctccttgatttaatttccatcgtttgtttttctggctcaataattagtgacgatagctcgctaaatcgattctaaccactgaaatcgaaattatctaatgaactcggagtatgtgcattgctttttcggcttcaatagttagtttaaaaatggcttattttgcttcatgttgcattcttttttataggaaacagagtgataatcataatatagaagaagccaagaaattgacccattaacttcatgcttcagtttctgggcacccttaaccaagtagttagtagtactgacctgtttcatcagctgaaattctgcagaatttgtttctgttttcttttttctgatgtagtgattgttggagaggttgcgaatttcatagcttac

SEQ ID NO: 91511 - DNA, 708 bp, Eucalyptus grandis
  Intron number 1 from transcript Egrandis_v1_0.032357m (loc us Egrandis_v1_0.031549m.g) derived from phytozome v7.0 (c hr-ID scaffold_7; pos 47679997 to 47680704 reverse strand)
ctgcagcgcgcgctctccgccgtctgggatctcaggtgcgtctctgtacaagaaagctaaacgcccccatactttttccgagtcctcgtccctctcgcaatcgcatcttgtttgtgggttcgtgccgagtcgaggaaatcgagtttcgactagtttagcagatatctttgcctcatttgcattcgcctgcgtttatattcttgatcttgttgctgaatgcttcgtgggtgctctcgttagtgctgtataagccctgctgcttgttgggttctttgtttcttgtcgtgggatttttgcttcgagcgtttacttcggcgtgtactgctttgagtgctgggattcaagcctcgatgctttcgagggtgtctgggggtggatgcaggagaaacgaattcgtgcccagtctttgttctcgtgctgttttcttgtttgggtgttttgggtatgccaagatgaaaacggagagccttgcgttgtatctcgggcagctttgctacccatgattttgatctctggatccgtgtatagtctctgcgtctgatatgacttgatcatatggatttgtgacgtcgagttgcttaataatttttcttcttttgcgaggttgtcttgagagtgtctctccccgtttatgctgatgatgagttttctctgcgttgcaggctgcagtttattgattttttgcgatggtgaaggttagcgttttga

SEQ ID NO: 91512 - DNA, 913 bp, Eucalyptus grandis
  Intron number 1 from transcript Egrandis_v1_0.027077m (loc us Egrandis_v1_0.027077m.g) derived from phytozome v7.0 (c hr-ID scaffold_2; pos 5798060 to 5798972)
aattgaagttcttgcacataatagagaactcgcctgtgttccctgttatctatgattcaaagaggtatcttggtttcttcatacactcttctttgtaatgtgagttccatgtataaatatgaagtgtgtatattgatgttaagggaaaataataaataaccacttaaatgtagtgacatgttgacttagttttgattcaaccattgccacttaagtcattaatattgcaaccttgagttatttgggggttgatcgatgcattgggttcaatttgcaaagagaaaataatctaggccttcaagcatcttctaccacgttaagccactaagtgcttggtcttgtttatgagttgaagtgagatcaactgttttgtttaggtgtcactagtgttctcaaaagcattggagttgcttgggcaggcacccaatgtggcgacttcaaaagcacctcaagtaaggctggtcattctctgaggcattccctcaaggaaaaagatgaaattaggtcatgttctttgaccctttttgttcctttctctaaacaaaactgagaaaggaggtatattattttagtaaaagggcgaagtttttagaaaagcagctgtcgactctacattagcacagtcggagacttccagagcctagtcttatgcctataacattacttttaagagagccagggaaaaaggtgaaaatttgtagtcttctatacatctttgcttttcttcgaacattgtctttcctatgtagacctttacactgaacttagcagtccattcttatttcatctctctctccactggttgctaggtaccaatctaccttttaagaccaggattgtcagtattctcagagactcctattatattgctagtgacttactaattaatttccttcaggtgttagaagttgct

SEQ ID NO: 91513 - DNA, 996 bp, Eucalyptus grandis
  Intron number 1 from transcript Egrandis_v1_0.024527m (loc us Egrandis_v1_0.024527m.g) derived from phytozome v7.0 (c hr-ID scaffold_2; pos 58990054 to 58991049 reverse strand)
tcgagatcgtcaggttcgtttctcgcccccccgattccttgctcgtccgggatcgtggcatctttgttttgacgtcgactgtcgtgtttggtaaccgttccgtgagcattttcgcacaaggtgtttgttttttgttgggttctcggaagggttgagcttgaggctggagtcttcctttccagctcacggtttgtttatgcctggattgatgaattttgatctcggctatcttgcacctcgactgcgattgcagcgggatcggatcaccgtcctctggatttttctgatgataaacgttgattactaatggtttgattaggtggaggttatttttgctgatggtggtccagtattgttgttcgtgagaattggtggattaccatcgattattttaaaaacttaagtagctagataaatgtgtggtataatatatgactattttaacgcttctactcacgtttagtcggttcttttttgtacccagtgtggaaatttaattggagagacaatgggcttggaaagatttgaatttaggacctccagctctgataccacgtgagaatttgtggaaccattgtcaattattataaaagtaaacggttaggtgaaggcgtggtttagtatttaattattccaacactcttccttatgcttagtctgttatttttagtactaagcgtggagatttaattaaggagacaagtggggtctacaaagatctgaacttaggacctccagctttgatatcatgtgagaatttatgggaccattgccgactaatctaaaagtttaaactgttagatgaaggcgtagtttagtatttaattattatgatattgttgaagattgttctttttggtaggtcttctcattgattgtgctattagtgcattcactttttgcccctgcaagatgatataatgcattcccttgtgtttctttttttcctgatatttgcattatgtctgtgtccgttgataggtctggagattgtgc

SEQ ID NO: 91514 - DNA, 609 bp, Eucalyptus grandis
  Intron number 1 from transcript Egrandis_v1_0.013364m (loc us Egrandis_v1_0.013364m.g) derived from phytozome v7.0 (c hr-ID scaffold_11; pos 35483122 to 35483730 reverse strand )
cctccatcgacaaggtacttactttcagcctcgcttcgtccgcgtgcgtccgcgatctccgcttttcccactcgcgcgcccaaccgcgcctgcgttatgcgagccgggctcgttttttccgttactcgtgtcctgtcgtcggatgttgattgtgattttcatcgcgatctgcggcgtcgggtttggcagagatatggcaggatgagatgtctgataagcttccgtcgtcgttgttctcttgaaagcgttctccggcgttagaaacgcacgggaggtgttggatcccgatagcgtagatttgagcgttggagggtttatttatttgtttgtttttggattggatttggagggtttatatgaatttcctgaaaaactatgcgtggacatggaagagagttcttgattgtttcggctttctattgccccatgacttttaataattctgaaaactgaggaggatcaaagaggaaaactttagttcaaggaagcttgcgtacttgaaatgaagctgttttttcctgtaataaatgagcgaggcgctgaatatgtttgccttcgttggtgtggtttgtagctgaggtcgcgggtgaagcatctatccgagcttgc

SEQ ID NO: 91515 - DNA, 947 bp, Eucalyptus grandis
  Intron number 1 from transcript Egrandis_v1_0.029916m (loc us Egrandis_v1_0.029876m.g) derived from phytozome v7.0 (c hr-ID scaffold_11; pos 17034867 to 17035813)
catttgttgatccggagcttctcgcttggctttctgtaagtggctcccagtctctttgctgtttccatctgaatttggttgcttcttgatttgtggctctttgcttggggggtcttctcttcttgttcttgttgttcttgttgtttgatgggggtaactgatgtaaagggtggttctgctgttgtttgtgtggataaggaagttgatttcgtattgggtaatgggttcttcccgttcttgtggccgggatagatttagaaaccttgattggttttttttattgcatttcatggtttttgggatcttttcatctttaagcggtggaaatcttgtttcattttattttattttatcatgaattccccgttctcacatgcaccagggttgtattatgaatgagcttgtcctgtgatgatatgaagggatttcctacaggaaatatagatgagtggagatccatcttcgattaagaatccttgtttaggcagaaatttgtttaaagcgtcgttttcttttttttcggttgaatctggtgatctagtgtctgtatgttttgggacaattatcaatttagattttttgaaagatggtaggttttcattccgtgaaaaaattgtttgtcacagctttattgtgctctgagtactgagtcttccttttgatgttttgtctttatgatgattatagaccctcttcccttcaagccaaaaatcgagtcctttttccaggataacctttgatagatggcatttttgctggatatgaaatcggttgtattgaagagtagattgtccaaaatgattgaggtagctttagggctattcttgctgattagaactaacccattattcagtattatctcctttcataatttgtttgattagttttctaatattcctattcaatgttaagcagattgatcaagcgtcaagatcaacctgacaact

SEQ ID NO: 91516 - DNA, 626 bp, Eucalyptus grandis
  Intron number 2 from transcript Egrandis_v1_0.045211m (loc us Egrandis_v1_0.045211m.g) derived from phytozome v7.0 (c hr-ID scaffold_2; pos 18340813 to 18341438)
aacagtttgaagaggcgctcgctacgaagtccgaggtaagcccattgcttttgatctttgtatgattattccttccgatgaatgtgcttattgttccggatcccaaactattcgaaaagttgatggtgctttgcatgttcgacaaatgaaaaatttgtcttaaaaagataaaattctttcttgtaagctgatacttgacgaggagcgagtaggagagtcccgtttctccattgtccaacatgaaagccgaacgtgtccgactctgcttgccatttaaagacaagacaagacagcacaaagttcttgatcacatgcaaatatcctcaatcccattattgttcctggggcagtgcaattgttactaaactgtcagtttccaacaacatcatgaatgaattatcttgtctgttaatgaggtttttgccttgttcactgtatagtcttttccttctcaaaacggtgttcgatataatttaatcactgtgatttgtggggactcaatgactcttccataccaggattttcagattcttgaattgaatacgactctctctgtgttatagtctctcgtatgagaagtttgggaatgaatctgcttcaatcttgtcgtgcagcttgacagattc

SEQ ID NO: 91517 - DNA, 652 bp, Eucalyptus grandis
  Intron number 1 from transcript Egrandis_v1_0.049650m (loc us Egrandis_v1_0.049650m.g) derived from phytozome v7.0 (c hr-ID scaffold_7; pos 51066219 to 51066870 reverse strand)
aggcttcaggtacgatcattaaaaaatccaagacttcccttctcttttcttgatttccttatgaaaatgaagaccctgcctttggggcagaaagccgaagaatgagatgttggcttgaaagattgcaccattaactactttacaacaagtccaagctcatatcttaacactgtcggctctaccctgagaactgggcacacgaagaaagcataaccaggcaaaagccaataagggagactttttcatgagatagttaaccgtgacttcattcattgacatatataaccagatgtgagatgagcctaaggaacttgttctcgtaccttaacgacatagattcaaatcgcgcttcttgatatcagggtaatgatagagtcatgagtcgcaagtaagtcgggagcaatatatttgaggactgttggtgtcattaccttttaatatttgacaccttgatgcactcatacctatggtcttttctttccaaaggctttttgtttgagagtgattagtcacaagaataaaaggacaaccaatcctgtcctgaagaagatctaaattactaaagagaaaaacaaaataaaattggtgcgatggatggttctgattgatgattacagttggcgaaagagaagtcaagagtggaagagataga

SEQ ID NO: 91518 - DNA, 521 bp, Eucalyptus grandis
  Intron number 1 from transcript Egrandis_v1_0.008381m (loc us Egrandis_v1_0.008381m.g) derived from phytozome v7.0 (c hr-ID scaffold_2; pos 7274579 to 7275099)
cttttcaccgttactgggaattcactctgtttgaggttggcatttatctgggtttccttgctcttctttgattgatgtgcttttcttgaggtctggtccaaagaatgttcgtggaagcatcttctctctgtacagtgtagtcagtagtgtaaacaccctcttgagaaaacagacggggaactatatctagctgctcactggggtctgctctgttcagcttctgattcttcttgcttgtgtaatttctctgaagtgccatcgaatttgttatcgtcttatattttaatgctttgcatgccctgttcttgaggcgctaccttttcatgtcatggaaatgctggaacttttaaacttgatttgagcacccttttaagttttgggttgtttgaaggagaaataagcctcggtgttcttttgtcctatcaattcgacttctgatttatgaatttcaaagtaacagcattgagacttagtgcgttggcttttcacgggtgaactcctttctcctgcagctcatctcg

SEQ ID NO: 91519 - DNA, 733 bp, Eucalyptus grandis
  Intron number 2 from transcript Egrandis_v1_0.015560m (loc us Egrandis_v1_0.015584m.g) derived from phytozome v7.0 (c hr-ID scaffold_7; pos 45956713 to 45957445)
ttaaaagtatgttttcttgccgttgctgcatctggacttttacacactagcaaagatatttagccattgcagttattttcacatggaaaagaaaaaagccagacggtattttcagtgtcataatttatcagtctagtaaataaacctgttaggttttggaatcatgactaaaatataggataactatgtaaatggctgtgaaccatcattttgatgtgtagggccgttcttttacctatgcttcacttctgtttgattgtagtcgcattttcaagtagatgaaactgagaagagctaagtgagatttgagtgaattgaagtgtggcgtgaattcagaagcaagctctttctccatttctgctgcaatccctgtagtatataatgcaaactatgagaagatctgtgaatagttgctggcaaactagaaactacagatggattataacctttgcattgttcttcatttgaacatcgagatatttgcaattttttagctcgtttgagcttctactttacaaatatatgcagcaagttgcagttagatcatcttaggaaagataggtgtgtttcagggagtaatagagggtttccaggaactgcaaaccaattcatccatgttagtgagcacgaaaacttcctgcaatattgtgtatgctgttttttgtttgtttcaatatcctcctcctcaattgacagctgtttatttgcagaatacacgtcagagaaccaggga

SEQ ID NO: 91520 - DNA, 804 bp, Eucalyptus grandis
  Intron number 2 from transcript Egrandis_v1_0.012684m (loc us Egrandis_v1_0.012684m.g) derived from phytozome v7.0 (c hr-ID scaffold_7; pos 48852883 to 48853686)
cgagatcccggaaactgcgcatctcattagcagaggtacggtaggaacgtgatcattctcgttcctgttttcttttttcctcggcctttatctacaggtttggattgggttggctagcatgtaatttctgtaggggggaaaaagtgggattttttctggcgtttttcctttggcttgctctttgaagaggacctttgccaatgtttgcaatcgggttcctttgattttttagctgtgtttgtgcatgtttctcctttggaaggtaaacaaaggtctttctgagggatccgcacgttgtactttctagtcagcacttcatggaaaaagggcaccttccgaaaacattgaacttaatatcttgtcgaatgttgcgctgttcttaatttcttgtggaatgttgggctgctttcatgagttagaagaggaggattggaggtaaaaagggtgacgtttcaatctgtggagtagatgtaagttgtctctgggcgttctgttgttctgcaggagaaatgctattctttcgtgattttttttgtacatggctgcacccgcgtggtattctgtttggatttgagggaagagctgaggaggaaggaatcatgaattggccacttcctgaatttaaaccaatcaacggtattggaagaagcgagggcatgcttggccttatgcctagtatattgattactatatgaaagctcaacatttatcttttcttccatgtttggtcatgttgataattgtagcttattttgattaatatttcacgtttccgattagctttccctggcatgctgcagattc

SEQ ID NO: 91521 - DNA, 328 bp, Eucalyptus grandis
  Intron number 2 from transcript Egrandis_v1_0.048754m (loc us Egrandis_v1_0.048754m.g) derived from phytozome v7.0 (c hr-ID scaffold_11; pos 3839801 to 3840128 reverse strand)
attgtttacacagtaagtgtgtgcagtttttgtctgttagcttctcctgtttaacgaatcagtatagccctgtgctataggcgtgtgtataccgaatggacgctgcaggcttcgggccggatactttggcttttgggtttggacttatattctgataacaagtgttcccaaaatcaaatctttgatgattttgcccacccctattgtttttttcactttacttatcatgtgggtctagatgaaactgaaaataatctttttctttgctcattttactcgggtgttttactcaggtgagaaggccgaaatccgtgcaggactatctgtg

SEQ ID NO: 91522 - DNA, 1033 bp, Eucalyptus grandis
  Intron number 4 from transcript Egrandis_v1_0.015182m (loc us Egrandis_v1_0.006964m.g) derived from phytozome v7.0 (c hr-ID scaffold_2; pos 18417077 to 18418109 reverse strand)
gaggtcagtaattaattgtatcatttcgcttttgtgtttagagatgataattcatgaatggaaagtaaagcactcgataagcatgagcagttcgtgtaaaatatgcaatcctagtgcccatcgtcctgagtagtccatgaaaggtcacctacccttgttcctgtcaccccatatgaaaacaatttgtatcaaaatccaactttatattattacaatgttgctgcagtgtaatcgaaatcaccatgacgcctgactgaccacaattcacttgcatcattcctagtttggtctatttatattctatacataatttggcaatgcagtcagcccaatgtagttgaaagatattgaccaaaattagatggagcgagcttaatgcaaaacattttctacagctttaacctaatgtaggtccttggaatcactgatgttgaggtatatctagtggtgttagtagttagtaggtgagtcttaattaaggtaattagggtttttggggtctcttatgctctataaataaagcctatcttatgtactctttcattaagccattcagtgaagatttagcctcctaatcttttctctcttcctctctcttgaagatcctagaatgttacctggtatgagagccacctagagagaggtccccaaagtaaaacctagcttttgtttcttcttgccgttgctacaaaagaaagagtaacatgaccctagcagccaactgaccaactgtaaccatatttatttaggacaagtagctcgctgcatatccatctgcatgttacaacctgtattaaaccctgatcctgatccatattactgtatcaactgtccagttggaccaggacatttgcttctaaggttgcgtaagtcccgaaagtttgattggatctgtagcatgagcggaatgcatttctagcatgagttaacagtatctatgtctgaaaaaaaatatatcagtatctatgttttgccttataatccttttttgtgctcaggttccttctgatatcccagaagcggaccaccattc

SEQ ID NO: 91523 - DNA, 982 bp, Eucalyptus grandis
  Intron number 2 from transcript Egrandis_v1_0.013769m (loc us Egrandis_v1_0.013769m.g) derived from phytozome v7.0 (c hr-ID scaffold_2; pos 57699238 to 57700219 reverse strand)
acccaggtaagttttgagctgtgtgctggaacgatttagtttaggcagtttcttgcatcacgagaacgaattcctcagctttgacctggtcggtctagcggtcgacattaatgcctgtttaatgaagtctgaatatggggagtagtgaattgcggagtagatgatattgtggatgagaatagttagcttctttagatctacctaattctcgttctcgacagatgttcggcttccacgaactttctcgagaacttgagtgctttatcttctagcattgcttctatgcctcaatccatttgggagaacctgtgataaaactgaagtgcatttcataaaggtgattgcttctttttgttacgcgtaacttggtgggggaggtaaaacagatgatgtatgtcatgattaatggccgccaggatttggattttagatagcctgtatggagatttcgcgagagccaaagttcgaattttcttggatgagtagtttttgttgaagagcccctcagatagaattatcagtaatctccttatttgtttctggcaaatcgagtgtggcgtgactggtataacaaaaatgcagtacactcatgcattctcgttctttactctatttaccctgtcctgtcaaacttgctacttacagtctctagattacagcaagtagcaaattttatcctaatatacccacttgagttcaatggttcattttcgtttttatcctcatcaccgccattttcatctaactcattcttcgctagtcaagatggacttttcatccattcttcaaaacctctatatgcatgtatctggccaagatttacatcatattgaataggtcaagactgaacagagagtatgccaagcacatatgcttgttataacattcgacttgctatactcctttcaaatgcagtacctgaccagcccattaattactttttgcagggtttaagcagcggtgcctgctgcgtcacggcctt

SEQ ID NO: 91524 - DNA, 641 bp, Eucalyptus grandis
  Intron number 2 from transcript Egrandis_v1_0.024092m (loc us Egrandis_v1_0.024092m.g) derived from phytozome v7.0 (c hr-ID scaffold_11; pos 36078391 to 36079031 reverse strand )
ccgaggaaggtctgggcgggcggccattgctgcaagtactgccactgaaacgggaacgggaacgggaaagaccgagaagaatctatgcaaggccccaaaaaaagggcaaaaaaaaaaaaaaaaaacagaaaaacgacgacgataaaattagagaggattgcaccgtttttacaaaaatttacaatcgggaatgataagagtgtgatttgatgagtctgtacagtattcgttcccaaagaattttattttctttggctcacccccccaattttctcacgcgccatggatgaaaaaaacacccccaagttctctgcatacgcagaccaaattctctgtgtccagccacttcgagcgttgcgttgcgtgacgcgtgaatccttccttgatttggcagttcatgcgtacttattcccgtcattaatttcgtgattgcgatttttatttacttcgatttgactgcgtgtcattggtagcttgcttgcttgtttatttttttcctttttaagtgatttctgtatcgtaattgattcgcttgcttgtttattttgtccaattttgggtgattcttctgaatcgtaattgatttgggttgccctgtttttgatgtttgtgttgcaggcccttgaaggaagagaagaata

SEQ ID NO: 91525 - DNA, 656 bp, Eucalyptus grandis
  Intron number 1 from transcript Egrandis_v1_0.013121m (loc us Egrandis_v1_0.013121m.g) derived from phytozome v7.0 (c hr-ID scaffold_7; pos 10827675 to 10828330)
aaggcttctgccagtaagattcctttgcttttctcttttataatcagtgatttactcgctgtacgcattttgtggggaaaattgcagttgctgttctcccattgtgatgtcatttgaagctttttatggcacttctgagcactgctgtggttagaattaggaacaattgagctagtcgtaacatgttatcatttggttgacgtaacgctcatttaaacagacatcacaaatgtttacccaactgcttaaagtgtttgatcttcatatttggaattggagttctagcatgattggtatgacacttgttaaagaccattcttgattattgaatgtattgatgaagtaaagatctaatatttcaaaaattgggtatatttagttctccattgtttttctgcaactttactagcttgaatagcatgcgattcttttttctttttttccttttgacgaatggatagtgtgataaatcagcatgtatgggaaatatgcttcagaaaccatttgatgattctaaattcaaatgctgaaagctaaggaactattttagtgatattgatgagaatagctcttttttttttctcctctctttttctttataagaattggtatttatgttatattcgtctctctcgtgcttctctgtttccacagtg

SEQ ID NO: 91526 - DNA, 965 bp, Eucalyptus grandis
  Intron number 1 from transcript Egrandis_v1_0.054976m (loc us Egrandis_v1_0.054976m.g) derived from phytozome v7.0 (c hr-ID scaffold_11; pos 27901131 to 27902095 reverse strand )
agtttcacagccccagaaacctccttttggctctggtagtcttctttccttattgtttgcaatcttatatgttgggtgataaaccgatccaattgtttgagaagattacgttgccatcactcttttttctgtttggtcttcgtcttttccctgtcgtttttaggtctttgctttgtcttcgtgattttgccatttggggtgattaattgttggctaaaaactcaaaaaataattcttttatggccgatcttctttgctccataaaagatcaaagttatctgataaatccgttggcatatatttacagttttttcataagcgtgtgaatcagttctgtaaacttggagcccaaactcaatagcatttctttcgtgtcgcttgatcaatggatctcgtatgcacagacccatcacttggtgtgtgacataattgataaatacatattgtaatccatgggaattactgggtttttgcttccgtcaccattcgtatgtcactagacaaaatgcaagggaatgcacacttggctttggctcaatgatatttactatttatcttgatatctgtttgtccttacttatttctcagtactagattggaccgtcaagtttactcgtttgggtgtctgataatgatgataagctcggccttctcccacttatctttcgcactctctttcaggactcttatgtgaaacccacactgggtaacttttgccctttcttaagtgggatttatcattcctcgatcatctttcacttgttcacagtttcagctgtgaaaagaggcgttgcatttttgttaaagtatggggcaaacacctgccagcttttcatagcacaactagaatacatcagagtcaataaggcaaaaccgtaccaaatgggttcttaaattagtgtttccttcggtctttgattcttcacacaggtgggtgaggtcggggagctgtcggagatattcca

SEQ ID NO: 91527 - DNA, 845 bp, Eucalyptus grandis
  Intron number 1 from transcript Egrandis_v1_0.011147m (loc us Egrandis_v1_0.011147m.g) derived from phytozome v7.0 (c hr-ID scaffold_2; pos 59099246 to 59100090)
aacgccagtggccttaacttcgaggagctctacaggttctatatcgcagtggattttgtctaaggatttcccagttcagacgtgctttttcaaatcttccatgttctatatcgcagtggatattgactttgcaccatttattttgcaaagagtgaatcatctaaaaaatattttcttaaaaataattatttatttttcttataaaaacaaataaatgaaaattacttatattatccacgagttgtcaaatattttttattgtctaattatttcgagctatacaaacaattgcttttgataaaaaaaattctaaattatttatttttcgtgaaacaaatgaagctttccattttgttatgttacgcacgataatttcactctttaatgttaggtatttcacctcgtgtatatgacctttggtcgttcttcatggtgcttctttccttggttagaaatctttaacaattatgcgtcttagaacagagctatgcccttcgtttgtttcagctgctctgttggggaagtacttctttgttttatactgagtggctctttgtatggaggtatagatctggtcgcgttatcttttattgagtacgattagcaatgatgtttccagtcgaggctgcggccatctgattggattacgaaactcccttttgtatgggtctaattccaccaattggtttttgtgtcgtttcgcaaaaagcatcgaggccataatgcacctgcactcgtcctcttttatgcgtcggcattgagttgcattgtctgtgggcgacggttgtagggtcgtgggatcataatgtttttgatgcgccttcatatataggagcgcctacaac

SEQ ID NO: 91528 - DNA, 870 bp, Eucalyptus grandis
  Intron number 3 from transcript Egrandis_v1_0.007814m (loc us Egrandis_v1_0.007813m.g) derived from phytozome v7.0 (c hr-ID scaffold_11; pos 40009496 to 40010365 reverse strand )
gcaagagttggaagaaaataggtatctttctttcttctcacgcactttcttaaagttctgccagtgcttttaagttacagtcatgccatccttgagccccagaatttgctaaatatcagttgcttttgggagtctgatttaagtagccaagaattatctgtggtctatcgttttctgatacagccaagtcttgttccgtttatatatatatattctttgttaaacaattgaacgctacgtggctattcatttgagaagaaaatatattttttgtcattacatgtgaggaagaacacttcaaattgctataaacacaccaataattctcaaatccttaatttgagtgtttttcctggcttcatttatatatatataatcggtttttcaaaggaagagatggttcagttcattaccttttcatggggttttacaacacaaagttggagtttcgaaatgctttctttcatgggacaattgttctttttgaaaagtaacaggggaagtgcgatgtccaacggttaaagcaatataaatcatcatcactacgtaatattttcccctgtggtgttgctatttatgatcaacttgctttctacatttttctgagcgctattatccattgcacgtgcttcattctgtcattggctctctctcctaaatttattgaaaatgctaaaactctcagtttgttttttgggtaatggggggaaataggggaaaaatttgtcagttgctcgaattatttagatataaacttgtataaagtatctttatacattctgtttctttgagaggatgaactggtctttgacttatttgttgatcttgtttggttgcagctgaacactttcctgataggtctgaagtcca

SEQ ID NO: 91529 - DNA, 721 bp, Eucalyptus grandis
  Intron number 3 from transcript Egrandis_v1_0.021279m (loc us Egrandis_v1_0.014965m.g) derived from phytozome v7.0 (c hr-ID scaffold_7; pos 50638431 to 50639151 reverse strand)
acatcttgtcaacaatatcttcacccttccgaaaggtaaatgcttatataacacttctttagaatggtgttaaacatctatatgcaggttttgcagtcgaaaggaacttttttctttcatgcacgattcgtttgccagaagaaatttgtattaattggccattttcaggaaaagtataaacctgctgcagtttggcatgctattttgaaattgccattgagtaaccatatgaaatgctataatcctaaaataatatcagatcactgtattcataatgctcgagtacaactgaagaggataaggtaaattgctattcagttgctagctgttctttctaacttgattacagatattaaaagttgttatctggtcccaaaataattctaacttctattctagaaaatataacttagaacatatcaaattctagttctgtttgctctagtgaatgcttcatttctggcgcacgtccatggccttcagctgatgtttgagtcaaactttgaattgttctactaaggcttacttaggagcaagggtccagtacatactcaacggttaagtaaaagtgggaagttcttcgcattgagtaccctctacatttcagtatgactccgtacatgttcacctccatctagcagctccaatttcagagtttcctcataatttgcaatgtctctgctcctgcagacccttgtaggattggtgagcccctatagat

SEQ ID NO: 91530 - DNA, 405 bp, Eucalyptus grandis
  Intron number 2 from transcript Egrandis_v1_0.026114m (loc us Egrandis_v1_0.026114m.g) derived from phytozome v7.0 (c hr-ID scaffold_7; pos 48154876 to 48155280)
ccctgttctttgctgatcctgcgctcgcattcaaggtacccgaatttcgagctgcctctttatgtatatgaatcttgagtttcatttgattctgctcaagattgaaatttgaatcaagtgagccttttcttggcaaaaatttggtcaaattacacgtttggttgccactgcgcggggaaagacttatgcccctcctgtcaaataggcagtcttttgagtgaagattcagcccagtgagattaaagaatacaaagtggagcgatgaaagtagtgttatgtttgattttcacatcattcttagttcttttgtcatgtttgggcgttcagtgtttttgtttgtgaattgagattatggggttgtttatgcaagggaggaggtccgtacggtgcgggagttacgagggg

SEQ ID NO: 91531 - DNA, 673 bp, Eucalyptus grandis
  Intron number 1 from transcript Egrandis_v1_0.001416m (loc us Egrandis_v1_0.000724m.g) derived from phytozome v7.0 (c hr-ID scaffold_2; pos 55691563 to 55692235)
aggaaggtatagaagattggcggcggaaacagcaggtagtactattttccttactccccttaattctgtccatcaaacttattgttatcatacttctgaattctctctcttggttagtgtaatcgagcgaatttggttggttctgggtcactctggaattcctggaaaaccgattaaaatgaactttgttttggacttgaaaataacgaatttttggaaccttactaagtacacttgtgtggaagtacattcagatgtgaagtagattgatcttctgggaccttatgcttgcaattggttgtatcaaatagcttccgctcttgcttaactaatagtgcagttcatactctaaatctctatgctgcttttctcctttttttgaaatcaatcagaaaatagaaaaggccgtacatttgtttgtgtgattgtgtaattttgaatgcattaggaattaaatagaaaatattgttacttgctgatgtagatttccacttctgcaacatctttgtttcatgcctgtgatttcattaaacttccaaacctccaatctattcacatcaccaatacagtctgtatcagttcttttggttttggttgtatctgtgggtattttgtttaacccttcacatatcatccaggatactgagattaacaatagaaaagtcaaagttca

SEQ ID NO: 91532 - DNA, 211 bp, Eucalyptus grandis
  Intron number 3 from transcript Egrandis_v1_0.046884m (loc us Egrandis_v1_0.046884m.g) derived from phytozome v7.0 (c hr-ID scaffold_327; pos 3591 to 3801 reverse strand)
acacgaaggaggggtttaaacgtaagaaaataaaatatggaaagctgggatttatgttctgtttctttctttctaaataattcaaaaaggaaattttcagacgaaagaagagtagtacaaatccattattgcttataagatactctgtgataacaaataacggctattttctggtttttagcccagctgtagagaagcttgaagttgtgga

SEQ ID NO: 91533 - DNA, 1036 bp, Eucalyptus grandis
  Intron number 4 from transcript Egrandis_v1_0.004448m (loc us Egrandis_v1_0.004448m.g) derived from phytozome v7.0 (c hr-ID scaffold_11; pos 17403516 to 17404551)
aaactcctattgcagctatacttccaggtcaatgtttacttaacaatttgtttgtttgactggggttgtagttttcttgactcatctgcatagtgactaaagtttgtcaatttctttggggtgagggaagggaatgattacttgtgcttgtaggtgacttagatcattgttgaggatgaggagaacagaaactacattctccgactttttatatcctttgcctgctccccatctctttctccccttcattctttttctctttattccttgttccctcactcaatttgttgttttctctctcattttcttgagcagaaggaaatgcctccagtgatgtctatgcatgttcaatgataatataatcctcttcttatttggttaagtaggctttagcagcttgatatctttcaattaattttttgatgtactaactactaaacaaagacaaacatttatgtatgtaatgtttctgaattttcattcacttggtgcaattggttctcctttttcaagggaaatatattttcttttttaacaacgtcgagtggctaggcctctcagaactccctaataaattcaacttagtcatcatagtcttccttcatacttctattgggaagttatcgagctaagaggcaaggtggtgcccaacgtccattcttaaactgtctgcagatcaaagtatggatctatatgacaaaagcatttgaaatatgctgctctgaaagccaaaagcttaaattttcaaactttctagcctttaatagggaagtagttgacttcatttactgttgttctatatttcccatcaatgccaaggagaaaaagaagatgatttgagtagggcaatccttgtctgctcagttgggttttttttggaagggaaaactctcaaattgactgactgcattttattattattagggctgtcatattaaatatctgattgtaattttggggtctagtggtgtttgttgatgttgttgggttaacacatgtagatccaatcaataaaggagatttggcccttaggaag

SEQ ID NO: 91534 - DNA, 540 bp, Eucalyptus grandis
  Intron number 1 from transcript Egrandis_v1_0.003740m (loc us Egrandis_v1_0.003740m.g) derived from phytozome v7.0 (c hr-ID scaffold_11; pos 8895298 to 8895837 reverse strand)
agctacaaaacttaccctcaccgtatcttgaaaaggtatctcgatagagcaagagctatctttttcacatggcttgctttaactttgaatcttcaactcgtcatgcgctctcaatcccaaaactccttagcgctacagctactgatacagctcgatttttctttctttccatcaccacgaatactcaggatggttttcttttccgagtttctagtgacgctacaatcatggcgaggaacttattttctgataacattggtcctctttcctttcatttccaacttttgcactttcataggacataataattctaccaaactggctgatatgaattttgagaagtaacaattccattcagtttttccgacatctttcaactgaagtacctgtatcgtacaatattcacgcatgttcttcattgatttcgggttatgaacgggttctgacccactgagttatattttttagtttagttccttattgctgttcttgtttttcacaattccttcatatagggtgagcgagcttcctcccgtggac

SEQ ID NO: 91535 - DNA, 827 bp, Eucalyptus grandis
  Intron number 1 from transcript Egrandis_v1_0.028866m (loc us Egrandis_v1_0.026436m.g) derived from phytozome v7.0 (c hr-ID scaffold_7; pos 50232045 to 50232871)
cctccttcctctgcctcagccatcccaaacctcaggtactttctctctcctccccccctctctgcatcgccggaatcatcctccgtcgccggccgtaactcgatgatgatgatggtgatatctcgctcagttaatcttctcgagcgctccgagggctcccgcaagcgctcgctcggatagcgtgaagattctcctccccgccgatcgctgccggtacggacggctctgctcggtcggcggcgacggcaatgtgagttcctgctttgcttttgtttttcggtccggcgagtggagatgagcgtgagtcgtgacagacgctgtggttcgccgacggaacgatgattagcgaggatttgttttggctgtctttgaggtcattttcagttaggacatccgttggcactaggaggatggaggagaggattgtgtttctgcagtctgtacatttttcattgactttgcacagaaatgttaaatcatctgttgcgcccgcacgatattatggcatggaaaggtgagaggacatgcgtcgatagaggagcaggtgaaagatgtgcaggataaaggagactgctggatttccctgttaaggcataggtttgaaggagtagagaacagtctctgagtggaaaagctgcacctgtcattatcgaaacactgtttgttgttaactgatgagatgtaatctattagcttttagctgatgttgttttttgcccttctttgagtggttatctggaaaaagatttcttatcgcacaccacacagtctctctattcttctgtttctcagattttctacttcgtttcaggcttacagtccatcag

SEQ ID NO: 91536 - DNA, 738 bp, Eucalyptus grandis
  Intron number 1 from transcript Egrandis_v1_0.044399m (loc us Egrandis_v1_0.044399m.g) derived from phytozome v7.0 (c hr-ID scaffold_2; pos 6691939 to 6692676 reverse strand)
catctcattggtaagtggaaatataacaaattgcttgctgttataactgatgatgctgaagtttttgcttttgtgatatataattttcttgttggtgagtttagttcccacttctttgtttgtcttccttctttttgacgatttgattgcattattgtatatatcggcattaatgtgctgtaaaaccactgtcagcgatgatgatcatcaaatttagtacattgaagtgatttgtgaagaacttgggacaaatgttgaaactgttgataagcatcagcgttgttggcttttggcaatgaagtgctgcaaggcaagatgactctcgagcactattgttttcatgcttatgcgttagtagaagtcctaacacggcccgtgatttgacttggatgcctgtaatataattttttcaactatggtggtcccaaaaagttggtgattagtagtctttgttgggcaacttgcatgttgatgcagctatgatgagatagctgttattggacaaatattacagtttgtttgcatctaatgctatgcaagtaccaatttgctcctttccacactgtttattgtccagtcttgtccattcataactcaagagcacttatagcatgatgtatgcgcttgcataatagttttttttatttttggttcattacttacatatatgacggtcttcacttaaattcttgtggtttttcaggtgatacgtggttccggttcagttaaaatcttaca

SEQ ID NO: 91537 - DNA, 839 bp, Eucalyptus grandis
  Intron number 2 from transcript Egrandis_v1_0.054481m (loc us Egrandis_v1_0.054481m.g) derived from phytozome v7.0 (c hr-ID scaffold_2; pos 63563216 to 63564054 reverse strand)
aacaagaagcttcctctgcaagagcttctttacaggttattttactttttagctatcttactctttacatgcaaacgacatatacctaaaaggtggttaagcttcacatgcttaatctactataattctggcctatggagtctacatgttgcaacattttggagaatttacttccagtcttctgaatcagtaatgcttgaggttcatgtttgattatccaacctaggatgagtgttggttcatggttaagatatacttgctgaaggaatattctaaagacacaggcagtgagtgactcctactttctttcaaaagtttgtttatgcgacgtatttgttttttttttttggtgaaaataagagatgcgacgtatttgttagggaagccttaatcttaaaagtttaggcaactagggatatgaagacaatgtatgttgagatctactgtttcccctcacagaaaagctatagcttgcgagtgagacagtggatgtaatcatgaaatcaaactattgtagagctggagtactgtaacaggagaaataggaaacaataagcaaaagagggagcaacaggagagtataagcaaaagcagaatttgatcagatttcaaatcttgcagtgaactccaatgttgtgtcaggagacctttatctgaattttttgtccagtctagtggtcagggtattgtgttaagcatgttctttagctatagcttcaggacgaaaattcaaaaactgaatactcaaaatttatttggctcttcaacgcatcatttgattagattcttgtcttttgatcataggaactgtcttcaaataagtccagcctccaacagga

SEQ ID NO: 91538 - DNA, 828 bp, Eucalyptus grandis; identical to SEQ ID NO: 91335
  Intron number 1 from transcript Egrandis_v1_0.018023m (loc us Egrandis_v1_0.018023m.g) derived from phytozome v7.0 (c hr-ID scaffold_2; pos 47217818 to 47218645 reverse strand)

SEQ ID NO: 91539 - DNA, 716 bp, Eucalyptus grandis
  Intron number 1 from transcript Egrandis_v1_0.000757m (loc us Egrandis_v1_0.000757m.g) derived from phytozome v7.0 (c hr-ID scaffold_2; pos 43409582 to 43410297)
gaatcgccgccaatctccattgctcgggctcgagggttagtgttcgtcgaaaaatctttcgagttcgtgtccgcgccgcgggtcgatgcttttcgcaaccccacgctgaatcggcgaaccgggttttcggttcttgaaatggcgtgtcgcggcggcggaacgtgtcgcgggctgccgtctcgtcgtgtttcttcttttgccctcctggtctagcgcgattttgatcgggaattgcttggaaaggtgcttgctttgttgctcgcgcgagtgcgttcgttgtgcgggcgtttgttctgtgacttttgaaggaggtagatcgatctttcgtggtgatatgtggtcggtgaattcgttcctttcgttgtcccccttaatcgtggaattcggacatgggattgggcgcttgttataaatttgatgtcctgtcattaatgaagtcctcttcttggtgcgaagctcgagggagaaatatggagtttctgggcgaaacgaagcttctttggtgaatcattagccgtttagggatgttgggttgtccgtgattgtcaaattaggtcttgtcattgactgaatgggaacatatgattttggatgactacgatgtctgtgatatattgtttatctgaatgggaaagattagacatgttcttccttgatatttctttgatgttctattccatcttttttgtgtactgctgtagataacatagcgggtt

SEQ ID NO: 91540 - DNA, 714 bp, Eucalyptus grandis
  Intron number 1 from transcript Egrandis_v1_0.020003m (loc us Egrandis_v1_0.019898m.g) derived from phytozome v7.0 (c hr-ID scaffold_2; pos 42423375 to 42424088)
cttttgtttaaatcggaccgtctcaagctggttaggtataagctatgtctgaattctagccgtgtcagccgttttaagctgatttgcgttctgttgtacatgtttcaaaattacagcactcctagactgaacgaggcagcttcctaaaagtcgtgtgtggggcactatgcacaagccgccatattcagcactaagagaatttacattttcacaggataagcaaatggcatgtatctggagttattctcgatcaaaaaaatgttagtcaaaagttcagccttgaacgagtaaaaataaaattagggagacaaaagtcataaaatggatgcgattccgtccattagagtgactttccttttgaggttggtctccaaatgtaattggatttcatgtttgatgaggaagtagaattaaataaaattttgccacatataaattaacgttgaattttcataacccactttgtaagttaccgaacaaaaaatgaatgtcgcatttttctgctagcatcacttggatctaatcaatatttaatttacaaacattaaatgtcgtcttttttttttttttggttctttttttggcaaaaggagggggggagagagagagagagagagaacgaaatcttcacttcaagctgatccgaggtttctgtgtttgtctgtcaaaatccaagcagagcccgtccctgcgcttcctcgtcagtctgcgata

SEQ ID NO: 91541 - DNA, 583 bp, Eucalyptus grandis
  Intron number 1 from transcript Egrandis_v1_0.050916m (loc us Egrandis_v1_0.050916m.g) derived from phytozome v7.0 (c hr-ID scaffold_7; pos 16522319 to 16522901)
cgggcgtgggaggaaaccatcggggaagaagccacgtgaagaagaagaccaaaggggaaaagaaaagtaaaagaaaagtaaaagaaaaagaaagaaaaagaattaattaaaatattaatgttaatataaaaacaaaaaaagaataagaatagctttttaattggttcgggtacggtcattgggtcccgggccggatctagtttaccggtccgaaccctttttccaaatacaataataataaatattaaaaaatttcaaaattcataaaaatgaaaaaaataaaaatttattaacttcccgaaaattcaaaaggtttcagagaacattaaaaaattcaaaaaaattagaaaatattaaaaacttcgaaattttacaaaaaaataataacaataataatagaaatttccaaatttcggaggcaatgagagtgaagcgtgtacaaagagagtggtgggaacattgtgagttctcttagcaaatgatctccactgattttggtctatttgcttcaagaactaatcattcctttcaatggctttttcgcatagcggttacatatcctcaaagtataccatcaacggtt

SEQ ID NO: 91542 - DNA, 781 bp, Eucalyptus grandis
  Intron number 2 from transcript Egrandis_v1_0.028636m (loc us Egrandis_v1_0.028655m.g) derived from phytozome v7.0 (c hr-ID scaffold_2; pos 43572243 to 43573023)
catcgcgtgaggataatacatcgcctgacgcccaggtaattgtcttttgctttttgacgggcaaatgtgatgcatacaattatctgcactaaagaatcatgtggtgcgcgatgaaggggcgaagggtgtggttgaaatacatgaagtttgtttggatttgtctgttcctgaggcagaaaaccgcctttgtcgtttgcttgtactatttagtaccttttgattctcgctaaagctggaagtttgcaaagaagttaatcttttgaaatgaagggtcgtattgtttagattgcgttgatgctttgcggtggatttccgtttagggtgctcgttagaagtaactcttgatgtggttttgtttcttctttccatttcactgccgacaactcgagtgttcggattattctgagtggtttcagttcctgcaacaatttctcactgtggatggaatattgcctttctgtatctgtactcaaattaactgttctgcttcccctgttgcttgatttctatagtagcgttgtctctatcatgttctctatggaatggctaaatcctctcattcttcaagcttcagcaagattgcctagaaatagttttttttaaatgaatcttgaggaagcacccaattttcaggaattagtcaattatgtgatggtgttgactcctgtagaaactattttattagctagattattaattgtttgctctctcatcgcatttttctgctctttcctctttcgcaccagctttcatctcatttttttggagatctcctcgattc

SEQ ID NO: 91543 - DNA, 882 bp, Eucalyptus grandis
  Intron number 1 from transcript Egrandis_v1_0.019474m (loc us Egrandis_v1_0.019474m.g) derived from phytozome v7.0 (c hr-ID scaffold_2; pos 43405192 to 43406073 reverse strand)
ttggccctcgccgacaccgacatcaactgggacaggtcgtctttttctggcccttttgaagttgtcgaaactgcttgcctcgccttttttttttcccatctttttttgctttttgggcaattatattctgtcgatggttttcagcgtgatgtgaggactctgcggcctgcgaacggcttgctatattaatgatggtttttagtattgaatcatcgttttttcgtgatccggggattcttggtttcgagtctaggagaaattcttcagtgggtcgcttgtttcttggtcgctgccgtgctggaaagtatttgtttcttcgaattttagtgtttcatggggactaagttcatgctagttgtcgcataagttccagtagaatgaaggcaaatcgtttcgcgttggaaagaaagtgcataaattgtagaaattccgttcgatcatctttgcactggttttcgattcaatgctgcagggcatgagatgttttgaaagctatgtttgatgacagattgtagaaatttaaggaactatgcatacaccttcaagtgacaaattgaggtggcagagtgaagagtgcaacctgatttttgaactcgtcgctctgtttttgcaactttttatcccattacaatctctcttgtcagcgattgaggagtttaatcagctgatcatgtccagcacgggaatgcggatcctgcatgaattcctcttttctgatacctgccatcatttatcagacttggttattccaaattcatattcatccattcaatggattagacaattttcattatagattttcttagctaaataaatgggcttatattagtttctgaaactgcaatttgcaaccctttgtttgcatcaatcaggttggacaag

SEQ ID NO: 91544 - DNA, 926 bp, Eucalyptus grandis
  Intron number 1 from transcript Egrandis_v1_0.047253m (loc us Egrandis_v1_0.047253m.g) derived from phytozome v7.0 (c hr-ID scaffold_2; pos 9989891 to 9990816 reverse strand)
ttgcggccattcttcctggacacgacttcgcttctgtgagttctttcgatcgagcttctgggctcaatttgtcctagtttggtgatctgcgtgatgcttactctgttagaaaacgtagacatgaatggtgtctgcaaatctcatatttgcgagtcgaaagaatacgtgaagttcacccataaacgagtgaggaggagtgcttgaggaagacctttgcatctggataattgtctccttttaacttcgccctctttctgacttttgcagtgtttgattgtgattttcatttacttactgtggtttgctaccgggtgattttgcattcgccgtgccgggaattttcatcagtgtgaattgaaatttatttggttttgtggatgtgatagattcatggaggggtcattttaaagataggttgattaactcatgaataactctttcaagaaagagaaaaaaaaacccaatgtcgacagttttgaatttgattatacattattttgaatatctcagaatgttttgtgtggttatcaattgagcattttgtgctttattcagctttaatgtggatcataggcattgtgtatgttaatttaagtttgtttcaaacctgtagtgacatggtccagtgaagttgaggctaaaaagcagcttgcttgtggaagaatctagcattggcatagaatgaaatggttaatctatcttgcctttatgatcaatcaggcctgttataacgtcagaagatatatttgtttttctgaaaatgtaatggactaggtggctatgcggtgtctgcctatgagactaacttttctaccaactggggtatcctggtcactccctaaaattttcatgattattatcgttattattactagtattatcatgacatcatatatctccaactgaaggttcgggcaggagttgag

SEQ ID NO: 91545 - DNA, 483 bp, Eucalyptus grandis
  Intron number 1 from transcript Egrandis_v1_0.050066m (loc us Egrandis_v1_0.050066m.g) derived from phytozome v7.0 (c hr-ID scaffold_2; pos 61790144 to 61790626)
gaaggaagggattgtagctcatcaaacagttgcaggtattcttttgaattgctgaagatgaccaacaagcttaagctgtcttctctgtttcttctgataggatttaacccggaatttattaatggacttaggaaatgacatgcttgtatttgaagggtttgtaacatcttttccttttcctttggtgacggcttaacaaaaattagatcatgagcaatgggcgacccacaagtcctcttttctgtagttaagagtgagaagtgcattcctgtattttaggtaacatctaaggtgcctaaaatagttcatgctagattatgggagcttgattctaatggcttgggagtatcaatcatgaaggaagaaaaaacaccttctatttgggaaatttgggaagaaaatcctatcgaaatttgggatagtcattctttataaaataggtagctgatattgaaagctgacttcttattcttccattcagca

SEQ ID NO: 91546 - DNA, 584 bp, Eucalyptus grandis
  Intron number 1 from transcript Egrandis_v1_0.027842m (loc us Egrandis_v1_0.027842m.g) derived from phytozome v7.0 (c hr-ID scaffold_2; pos 52938549 to 52939132)
aagaggtgaataatcaactttccttaccacatcagacaataaaattgtaattaactaatatctaatcttacgttcttatgtagtgattagaagatactgaaataaaaacatgcggcatgagctacttgctttgctgttcatctttcccggcaggagaatgaatgattcttaatgaagcagatccaagccacgtgaacagttatgcttaactaatatcaaatcaaatcttacctgcttacgtagggattagtagatactgaaataaaaataagtggcgtgatctccttgctttgctgttcgtctccctcatcaggagatttgagtgattctcaatgaagcaaatccaaaccacgtgaatcacgaattacgtatacacaactccaaccccttttctaattttttcatcaattctatggagcggggccatcttaattggtacgaccaataatgcaaagatgtccctggggaattaataacatcttgtcgctaaggatgaggtcctttcttttttctatataaagagggcacaaactaactatcgccatccagcagatacattcaaaatttggaaagttacatattgt

SEQ ID NO: 91547 - DNA, 667 bp, Eucalyptus grandis
  Intron number 2 from transcript Egrandis_v1_0.019344m (loc us Egrandis_v1_0.011706m.g) derived from phytozome v7.0 (c hr-ID scaffold_2; pos 46967731 to 46968397 reverse strand)
gctttgggaagagctaaggtaccacagtcacgattccataatacctttctttttttttctttttttttactatttacatcaagattttgagaagcatccatatctattttatcaaagaccgcagagcgttcttttttcatgggtcaaaatgtgtgcaaaaagtggatggagtaaagcaaggatatgcaaagaaaaagacaacctgtctatccggaatttcttccaaataacaagaataataggttaaaccatgcgcggtctttcgttattcgcttgcacttaattttggtttttaataagcaaacatatgttgacctctcggcaagaattgcgaccatattcagacctggtccccactcctcaacaccctcatcaatccattgtccgattcgttgtgcgcgtttgtcatttttcaagtgcacgttactgaaatttccgcttcaaaaacagaagagggtcgagagaattaaatcggtcagagtccatacagttggggaacgtaggaccattgccatacccacttgcttcgcttgattatggcactcttgaccgcacgcatctgctgcgctcgtgtttttgtcgtcgaggaaacttctgttttttcgataagcaaagtcagattttatcactgatcaaatgaaactgtttctgcgtactgtcttggcag

SEQ ID NO: 91548 - DNA, 1008 bp, Eucalyptus grandis
  Intron number 1 from transcript Egrandis_v1_0.006688m (loc us Egrandis_v1_0.006688m.g) derived from phytozome v7.0 (c hr-ID scaffold_7; pos 49182985 to 49183992 reverse strand)
gcgagatcaatcctcccctgtcgccgaatcttggggtacggccgcgatctcttcaatgctgcgtgtttaattgaatttcgattatatcttttccattaagtcttgacgatcgggatgagctttgcgattctgcaccagctgaggtatggggagtggatggagaggcgcgagacgacatcctggaacatagtaaataaaatttcgttccgatgcctaggttctatctcgttgcatcatcgagtatctcctagttagacagagtgatgttatcgattctttttcgtaaattcatttcgtcgtttcttctagaaaacgtggtcttgacattagcagctgtggcagaagcgacttgatgtagaagtttgtctaaagtagaattggctgaatatttcctcacaagacacagaagaaagatctaactttttgccttttgtactgagtccatcattcaattcatttaatatccgagtacttttttcttgtttggtgtcagttctgatcagcggatggacaatggcattctataggaaagattactaatttctttacttgacatttgttagattatttgagtcattggactgcactactagtgtaatcttgacaatatagggacgcttagaataattgatatccttgtgatttgatatggtccagctgttcgtgtatatattttctcgtgttcctgtattaagctttgcctttaattgttcctaggcctattccctcttacatgcacggaaaccatatcctaagaactgcatcaaagccgcaatacgagaaccaataaaacgctaggaattcctgcaatgggaacagaagttcttttcttcaagtgttgtgtcagaattgcagagcctggtgttgctattctttaagcctttgactacatgaaaaagagggaaacacttataggaaggatgaacattgtgtttgtagattaaactatcactttataattgattcttataaccttttttttttcaatctctcttgttcaggtgcatc

SEQ ID NO: 91549 - DNA, 699 bp, Eucalyptus grandis
  Intron number 1 from transcript Egrandis_v1_0.018639m (loc us Egrandis_v1_0.018616m.g) derived from phytozome v7.0 (c hr-ID scaffold_7; pos 43194586 to 43195284)
agctcaagctcgccagagctgctcctggcttcctggtgagtgctcctgttatcaaaagtttttctttgaattgatgcgatttttgcccccttgcgttccgtacgaattctgggttttgcttcccattccgttcggtttaatcacggttccgtttgtttcccggaggaaaaagaaatgggtttggtgtagaatgttaagttaccgtcgctggtgatctttccttaggttcttgattccgtttctttcatttcttgggttgatttttaaggttccttgattcacccagaatgtaaccggagttttatagtctttcgcctctgtttgttagaatccgaggatgggtgtcgtagcatttgtgtaggtttggcatgtgtcaggtggtgttctcggcaattgagtgcgctcgagtcggtgattaatggaggaaagtagtcgaattgtgatggattgaggctttgtggctgcgtcagtatcagtttcagctgcctgtgcgaccaggatatggcgatgattcacttttagtttgaaaattagttgaattgcaaatgaagaatgatagaattctctgcgcaaacccggctgggctgtaaggttgatactggaatgagctgagaggtgaggtgattttcgcacggtatctcacgtggtttcttttagactgcaggtacagaaaattctgtgtgacggaccggattaggt

SEQ ID NO: 91550 - DNA, 979 bp, Eucalyptus grandis
  Intron number 2 from transcript Egrandis_v1_0.023292m (loc us Egrandis_v1_0.023292m.g) derived from phytozome v7.0 (c hr-ID scaffold_7; pos 44258558 to 44259536)
ttcagaacctgaacagtctcaagctttctgctctggtacagttcttagttcttactttgttttttatttttattttttttctttggtgttggtcctagggttttgttcttttcttccatcatagtggaatcgagcatatagaacattgtcaagactggttggtttagcgttgttgtgcgccctggattctagagagaaattagagagactcataaaaagaagttctaaagttgagataatacaattgagggagtggactttatttatacaagaacccctttgatcacaatcgtacattcctcttgatctatggatggagattccatcttaccatctaccaagaacactccggaacagtttacatttcctatattgtcctcaagaatattctagagtactcaagaaaaatcctaggcttcagggctcaagggtaagagattttgagattgggtttagggcaattcaagcgataacaggcatatctctaggtgcatatgcagtatttgaagagagtctctgttagttctaggttgcgaaactgacatttcttgtgcttttggagtttctggatctaatattatttgcttcgctttacttgtgagctgtgctttgagcataaatatgaaaaatctgttcaagtttgattaaatttttatcaccgataagcttcttctgatcacctgtgacaatactttagaagtgcgatacatgggagacatgttatgccaaagtgacaagaaaggtccgtttacgtcttgtgatgcacgaataggatagacatcatcattcaaatgattcagttcaggagaagatgtttatttatccatttttcaccaattccgttgtcagttgtgttactgttctacattaatttctaccagtgttctccatatgctttctcatttaatggctcacatctcagtcaaattgttgttttaaagcagcagagaagacccaattttcactcacgcaaagcttc

SEQ ID NO: 91551 - DNA, 977 bp, Eucalyptus grandis
  Intron number 1 from transcript Egrandis_v1_0.026816m (loc us Egrandis_v1_0.022644m.g) derived from phytozome v7.0 (c hr-ID scaffold_11; pos 44204951 to 44205927)
gccaactcccgtaagtcgcgccgtctccctctctttctctctctctctctcttcgtaagtagcttcgctcgtctatttgctctcctcctcgtcgctcgtcgatgtcgggtcggagctggtttctcggacctttctatcggccgcaaatgatgggtaggggagaaaaaagagattggacgacggttttgagtatttgtgttgatgggtgagcttcactacttggaggtcgagtttctggtgatgctattatggaggatgaggatgggtagacatctttttggatgtctgcgatgtgaattcgtttgtggttgttgctttcttgggcgtggggttcgatttcttgtgctttgtgttttgtttgcttgctgaggcgggatcgattggtcttccgttgctgttgatgtgaagaattggtgttgtgggtctgagaattattgacaagcagttgttttggtttccgcgtctggccttgggttctgtgtccttcgtaggaaggaagggaaaatatggaggacttgcaattgttgatcttcttttcagcttcagtgacaggggctgagtggaatcttggctagaattaagactctttacgttgggttctgtctgtgaaacttgcttgttgagtcgccgctaacttcctctcttttactctatctggcttcgcatcgcatcgcaatcgaaatagtcaacatctccactgtggcttgcttgttatttgagttcttctaattgattctgcatagagtatgacacgcattttggaactgatgatgtggtttcatgagtattttctctagcgctgcacccacctgcttcaccatgacccctcatgaagtggtggcacttcttcctttgaatactggttgcattcttcttgtcagccacaagtggctcggtagttaaccttctcttgccttcatcgattgatatcaatttgggtgtttacacaggccagaacatcaggaagttggttaaag

SEQ ID NO: 91552 - DNA, 662 bp, Eucalyptus grandis
  Intron number 2 from transcript Egrandis_v1_0.041264m (loc us Egrandis_v1_0.041264m.g) derived from phytozome v7.0 (c hr-ID scaffold_2; pos 4317104 to 4317765)
ctgccggcctattcattatattgcctcttcgaaaggtaagcatacattctcaaattgctgattaaaacgcttcaaacattttcatcaaatacaaagtttgagcccatccatactgcattttacattttctatcgagaatcaagtggatgccttgatcagagtgtctgcttcactcttgcttgataaaaatgggatgggcgttgctgttatatactagtgttaagtcggtggaggaaatctccacactcttctgatataaatatctcctaaaatagacattacactgcaacttgctttggctgatttttctttagagaatcctggaggtggcatagaagtcttcacacaagttggcaattagcttaacagcttgttggttgatttttctttagaaaaatctggaaatggcaactactaacagagaaaaatctgggattaggggagagagagagagagaggcggtgcttctcagtttgagattactcattaagaaggaattagtgtgtaagatgtttctccgatttaataaagagagaaactattatgccaatttcataaaagactcatcacgtgttgattcgttgtcagtatgaaaatatgtttactttttgagtttccggtacccagttctttatcattgacaagaagttgccattcccaac

SEQ ID NO: 91553 - DNA, 386 bp, Eucalyptus grandis
  Intron number 1 from transcript Egrandis_v1_0.041531m (loc us Egrandis_v1_0.041531m.g) derived from phytozome v7.0 (c hr-ID scaffold_109; pos 97690 to 98075 reverse strand)
gcaacaggggcacttctctcccaagctgcaagaaggtatccacgttttatgaattggattttgtttgggcagcaaaatacacaactttttatctgagtttttttgtaatcaacttttcccacacgaatccttaataagcatgattaaacatcatggaaactgcaagacagtagtttgattttgctccattaagtgagacttcttagctcagtttccttgtaatcataacgttgttctcaatcgatcttccaaaagaaaaacaatatggagttttgcttccacaacttagacatccacatattcacataggcacatatagatgaagtttgagatgattatttttcttttcagactagagggaaaggtggcagtgatcactggtgggg

SEQ ID NO: 91554 - DNA, 491 bp, Eucalyptus grandis
  Intron number 2 from transcript Egrandis_v1_0.004996m (loc us Egrandis_v1_0.004996m.g) derived from phytozome v7.0 (c hr-ID scaffold_2; pos 23901302 to 23901792 reverse strand)
aagacgatactccttcctctctctggtgttgggaggtcctcgcttccttcccccttttgcttattcattgatttccttatctggtttttctaagctcgttagataggttaggtcttcgattggatctccctctctcttgatgtaatatcccaatgtttgtgcaaatttagttccaacatctgctatggtagttatgtttcatgatcttgcgcatgacccagttgcgtcgactgggtttgaatggtgtaaaagcacaaacatggtgcgacgcaaagtccctcattggaatgacgtccacacgatctttgttagtcaattcaatgggtattggcatggtttgagacgcaatcatgtcacgctaatgcgaaccaccacgacttttatccttttacacccttccaattatccagccctttcttcgactgacgatcttacttctttttttgatctttacagactagagagctgaagttgttgcccaagtccgtgca

SEQ ID NO: 91555 - DNA, 979 bp, Eucalyptus grandis
  Intron number 3 from transcript Egrandis_v1_0.020917m (loc us Egrandis_v1_0.018444m.g) derived from phytozome v7.0 (c hr-ID scaffold_2; pos 14474854 to 14475832)
cttgcccatcaacaagccccctaacagtcttcgtatgaattgttaatgatcagtaattgcggtgtggatgttgctcgagctggcgagatcatactaaatgacgccctcgtgcgaattggttatcgttgtgattgtgtcagccttctggttgtgtttgactattgatctgcttgcgtgaatgccttctatattgtccctttggcataggtggtgccgggaatcgaattgtgtgagagagttgttggatcatgaattaatcacattttgacccttgctgcacagcctgcctctgtggaagcttgaggatttgtagcacttcagtttgaattttatgcttggctgatcgagtatggaggatatttaaagtccttttcccctgaactgaaaattacactggggaaagtgttcttatattatggtttgatcacctcagctatctttgtattgtaactcatgtgaactgcttctgagaaaagaaaaggaccaagttttgcttttttccaaccatcagaagcagagcgcacacacaagcacattaagcagaagaaacattttgaggaaaataagtactgctcaataatcatgagatccatgaagaattttgccttttccagtcagtgttggtgacaagaggttcactttgttagaactaaaagtatgtatatgtggagcaacctaattcttcaaaacgtcaatctgataatggccttctgaattttctgtgttacttaggtgggcacaagggttttgataaggtgatatgggaggtagctgattataagaaaggcgagaatccttccattacctttaaatatcacagtcatgatggggaagaaggtctctctctctctctctctctctctctctcatgcatgtgcacacattggcacacatgctcatcgacacacccagtcgtttgcaccaacatggctttaatgccttgggttgcatgttcatatgattataggttacccaggag

SEQ ID NO: 91556 - DNA, 248 bp, Eucalyptus grandis
  Intron number 2 from transcript Egrandis_v1_0.044127m (loc us Egrandis_v1_0.044127m.g) derived from phytozome v7.0 (c hr-ID scaffold_2; pos 47338960 to 47339207 reverse strand)
acatcacggtaggactagactcactgtcaccattttcggtttctgtcatgactttgattaaagagcaagaaaggcttcgatgcctcttttgatctgtaactataaatgttaaagttatgacgacattcttcaaaagacaagttttatagaagggacactcgacggtttcatcggatgtaactatgatgagcatggtttgttctgtgagtttatgcagttgaggtgggaaggaggtgcaggatccattt

SEQ ID NO: 91557 - DNA, 618 bp, Eucalyptus grandis
  Intron number 1 from transcript Egrandis_v1_0.034217m (loc us Egrandis_v1_0.034217m.g) derived from phytozome v7.0 (c hr-ID scaffold_2; pos 11538406 to 11539023)
tgctgcttcttcattgttgaagctgctcgttgaaggtgagttcccttcactcacaggtagcgtcattgccggctgatctaggtgacggtttgcatattcctcaccgtcgttcgtcgtctgcaacggttggcaggagcgccaccgagctccagtcggcgggcgctcgcgccgatctggccgtggagtcgctcgccgagcgacccccaggcccgaatcgacgggcgccagcgccgatctggccgaggggtcgctcgccgagcgacccccaggcccgaatcggcgagcgcgagcgccgatttggccgggaggtcgctcgccgagcgacccccaggctcgaatcggcgctcgcaactccgccgatcttgtcttttgcagtgcacgatttcatttttcacatatatcatatattttattgccatacttgtcctttggttttcacttcgtccccgttttcgagtaatttgtcaatgaaattgaattgtgttttgtttgtcttttcctaatgcaatgtcctgtctgacagttttgggggtatttttcttatctaattgaattctttttttcatgaaagaagtttgattaagcttttttttggggaacaggtaaggcgccttcttg

SEQ ID NO: 91558 - DNA, 627 bp, Eucalyptus grandis
  Intron number 1 from transcript Egrandis_v1_0.017639m (loc us Egrandis_v1_0.017639m.g) derived from phytozome v7.0 (c hr-ID scaffold_166; pos 14302 to 14928)
attttcttttgggtcatcaccctgtgattggtccggttagtatcgtcagtttcgctcaaacctgatcacgaaattgatagttggcccggcttatctagattcgaaatgcaaactatctgagtctggtgacaaataatgttgggtccgacctcgagcttagtgaggtttggtctccttaacgaaaatttcttccttatacttgatccattggattgggttaacctcaaccattaatttagtggatcccatgtaagccacataaggagtttattacttcttataattgtccgtggatatgggagcaaccatggattcctacgtagagactgccatggctgatctgtatagtatagtcaaaatggaagtaaaatcgtcgggatgccacgtgatagagctaactttgtcgccctagcttgaggccagattgggtcaggcgcaaattgaatcaagtgagggaagatagaatagtactaaccaaactcaatttgatttaaaacataacttggcaatcctagaaaaacttgagatatcagtagccaaaaggtcaagcgatatttaagtacatggtagatctcactgtttcaaagtgcaggtaccggttgcttctttagttggtaaaacactggg

SEQ ID NO: 91559 - DNA, 807 bp, Eucalyptus grandis
  Intron number 1 from transcript Egrandis_v1_0.003406m (loc us Egrandis_v1_0.003406m.g) derived from phytozome v7.0 (c hr-ID scaffold_7; pos 35285132 to 35285938)
caaaacttgacgtcaagaactgcttctattattaggtaaacacgaattcttgttgcatagcattgggctaatttgctttgtgtgttcacttgtggctgtttctatggttttctattgatgcgagcaatttgagtgagttttctgaaaaatgggttctatctcgttaagttgatttagaaatgtatttgtatcaggcatgattagtagtctggctattgcggttttgtttacattgctatggtccatgtttgcttagttttcgtgtgaagtaagcattagctaagttgcctttacgagattcaatgtaaatcagttccttcctagttaaggtaagccatagactcctccattgatatgcatgctatcatgtcgtgacttttgccttgtcattaatgttcttgccgttgccttggctctgggtcctgctctaatagctccaatgtttcattaaagtgttgtagactttctattggtagtttgatccacaagtgtgagttttgcaaaattctgagtattctttttgtgttttgtgctttttaaggtagattttgacctgatacgtgtcggtaagtcctcctgctagtgtgccgattagttgacttaacgttgcggggtcgcttgaatctgttaaattaattggctggctttgttgagatatttgggaattgcgaaagatgtttcattagtttactagacaattatgtaaattcttctttatcccccttccctctctcccctgactaaattgtaagaagatgcaaaaaaattgatcactttttttacaggctttgtgtaggtacaggggga

SEQ ID NO: 91560 - DNA, 1001 bp, Eucalyptus grandis
  Intron number 2 from transcript Egrandis_v1_0.017382m (loc us Egrandis_v1_0.011993m.g) derived from phytozome v7.0 (c hr-ID scaffold_2; pos 7601598 to 7602598 reverse strand)
caagtatgcccacaaatgactgaaacttttgttttttcctgctgcttgtttaccaaaatcaactgttcattgacagtcattgctgcgcatcctgtttttgttgatcagatttttgtaagtcattgatatagaaaagtttagtcttgtgaaatgctgtgtgaaaccattgcacctaagtttctgttgttatctgctagttgcttgttattttcaccagggttgtaaatcagtaacatgtacaggctgtatgaaactactacctctaagttcctggtgttattctaaatttgtatgttaatttcactcagggttgtatataagtggcgtttttaattgcttgtataagtatgctcttttggggttgatctctttttgtttaaaattccagcttccactgtgtgagaaactaattgctgttagttaggattggagtgtgaacttacctcacttttttctgccaaatgcatggtctacattgtcccttgacatgttagctcatttggattatgagttattttgaatgctgatatattctattttctgcataagttataggcacggagttaacatacatacaatgctactattcctgctgcatgaccaagctcttttcaaaattgaagaaggtgtaaacaatttacaagtgcattcaagtaatttaaaatgaaaaggttctaggtgatagtgaaagagacagtaaacccaagtagtttaagcgttcttgaatgcaatagtttcatttttttcttaaccatcggtttggacccaaatggatgttttaattactcaaattcttcatcactcatgaaccaccgaatatgggtaggtggatgttattcgtcaatattcttttgggtaaaggcaccaggagttcctgagcttttgcaaaatgttcattctagtcattacttgaacataaactttagttagtactggcagtttataaaggagttaacatgtggattaatagactgcaatgttctttatggagcaggctatca

SEQ ID NO: 91561 - DNA, 985 bp, Eucalyptus grandis
  Intron number 1 from transcript Egrandis_v1_0.047496m (loc us Egrandis_v1_0.047496m.g) derived from phytozome v7.0 (c hr-ID scaffold_7; pos 31146295 to 31147279 reverse strand)
gtatttccagtggtacgtattgctttgattctcaatgatcaattggttggcaacattctattacatacactagtttatagtccatttgattgattagcaacaaaaaatattgctagcatgtttaatttagatttgatatatttgtttatttgtcaacctttcgctctttacaattctcatatctggagtttttgaaaattttctcactttgaaaggtgaaaagtcctttcttctttttccttggtttagtatatcatttttccatcgttaccaattgatctagatattgaacatgatgtttttcatagcatctcttgatagcatcttttccctcattttgtttggctatacagaaatctttaacgaattcaagcataatgaagggggatttagccaatcacttatcacggacatgcaagggctactaagtctatttgaagcttgccatatcaggtttcatggcaacgttattttggacgatgcactggcttttactataactcatcttgaatcaattgataaaagaaaagcaagccctaatcttgaaaaggcattgcccaaaaccagccaatccacaagggactgccaagggtcgaggcgaggcattacattccactctattaggaggagcctttgcaggatgaagtcctgctctccttggctaagctcgatttcaacttattgcaagagcgacaccaaatggaactcggcaaacttacaaggttaaattcgtgatagcatgttcaaagtagctagatgtaccatgaacacccaattgccatagattgatttcaatttatcatcaactaaaaatcatctgcatgtgacaagaaatgttaatccctttgctggacacaaagtatgttaaacctatcccagtgaacaaacatgaatttgatagaaatttgtccatagattttatcaacaggaaaaaagaattaatttctataagaaatttgattacagtttgagcaagagagaggtc

SEQ ID NO: 91562 - DNA, 906 bp, Eucalyptus grandis
  Intron number 1 from transcript Egrandis_v1_0.000960m (loc us Egrandis_v1_0.000960m.g) derived from phytozome v7.0 (c hr-ID scaffold_7; pos 641327 to 642232)
ccagatcgaggagatcgtcctcgaccagtaccaaggtaaagctctcgtctcttctcgtcgtctcgtgttcggagccgccggtgcggcgcggtgttggaagcctccgatgagggagctttctcggaatgcgatgaatgaatcgtaatcggaatcggcgaatcgcgctgaatcgatcgaaatgtcgctttcgtcgatcggagcttttttttttttgattttttgtgcgaatgtgaagaggaaagaaccgatgagctgcgacggcatcgccccaaagttgatctttttcttccttttttatttttgatttcttgtgcgaatgtgaagtggaaagacggatgagctgcgacggcatcgctccaaagttaatttttttttttggtcgccttttatgttgaggttcgattcggagggagacgatgcggagagatgaagtcagctttgaaatactatgtgtggcgcccggattagttgcctgttgttttcacgagaaaaaaaaaaggtgaagtaggattgaagacaggacaaaaagatgctattcgtcttggacaaaaacagttcaaactgctagatcattagatatggtgtcttgtttctggccaaggcggaagcagaaatttttatgaatatagtcgatttaggagaggatgccattttcttggctagtgaacatgagcaccctttcgattcgtcctgaaatatactaaaccattgatagctagctgtaagcatgaaaagaagtggagccaatttcgtggtggtccgcgagctaattttgatgtgtgaattgggcgaaatccccatccaggcgtgggtgagagaccatatggtacttcaacgggctaatagctttttacccatgtgtcttttgtagctacccacggtggaaacggaacagatcagggtaag

SEQ ID NO: 91563 - DNA, 395 bp, Eucalyptus grandis
  Intron number 1 from transcript Egrandis_v1_0.018633m (loc us Egrandis_v1_0.018622m.g) derived from phytozome v7.0 (c hr-ID scaffold_2; pos 2308371 to 2308765 reverse strand)
ccgtcaacgaccccttcatttccaccgactatgtgctacttatctccacttctcatggattttgtttctcttcttttgcttgtgtcggcggtagttaccgttatctgttctctacttggttttcgtttaacatataaaacgtgtttatggtgttggtctctgacttgttaaagcttttgggtcctcatcgagatgcctttttggtgttgtaacttgctctctgtggttgttgatcagttccctgttgggtttgaagtgcttttgatttgttagcttttaatagtcttctcggtttatctacgatcggatctaaattacttggtactgaagtgagtttgaatttatgattgtcatgttattcgacttatttgtattcttttatgctgcagacgtat

SEQ ID NO: 91564 - DNA, 511 bp, Eucalyptus grandis
  Intron number 3 from transcript Egrandis_v1_0.018832m (loc us Egrandis_v1_0.018832m.g) derived from phytozome v7.0 (c hr-ID scaffold_2; pos 25495782 to 25496292 reverse strand)
ctggcccgagaagcctgctcgttataggtatcttttgcttgagtttccatgtattatagacacacatgcgttccagaccagctgaatagctgcgtttatcgacagcagatcgactcaacactcttcttgaggcacttactatccatttagcacttagtatctgcggtccatgcctttttcctagtttctttcccttactagactcaactccgtcctgtcattaggacaggacatgttggttccaaccaatttgattgcaacatgtttgataaaacaaatcacaattcctaataagggaaccaacaatgaacgaattgctatttcagcacgtatcagtaaggattaggcatcacagacttgtcgaattgcacatgttgaacttcactagagacccgtagtaattttaaaagcccatgcaagcaaaggggctctcgggatcaccttccactcacttttaatctgcttatgcattgcagagagctcttgggaaagtactcagtcgaagtgagaa

SEQ ID NO: 91565 - DNA, 322 bp, Eucalyptus grandis
  Intron number 1 from transcript Egrandis_v1_0.053768m (loc us Egrandis_v1_0.053768m.g) derived from phytozome v7.0 (c hr-ID scaffold_2; pos 7195861 to 7196182 reverse strand)
ccttccattaaaggtaacttagggtttctttttacctataaaggtttacaaaagaataatctctctctttcctctttttgttcttttgcgttaccttgagagagaacatgctcatcgtagatcttctttcccgctcatgtcatgtcaagtcaaggatcgtgaaagaaagttctcgactttgcaccacgagtccaggtcacgatgatatacacgtttgccttattttgactgataataaacatgatcacgacattaatttacacagtttgcccccatcttttctcgctgtttcaatctttgtttttctgtggaaatgaaagga

SEQ ID NO: 91566 - DNA, 850 bp, Eucalyptus grandis
  Intron number 1 from transcript Egrandis_v1_0.019953m (loc us Egrandis_v1_0.019953m.g) derived from phytozome v7.0 (c hr-ID scaffold_2; pos 44930007 to 44930856)
agttgggttccttgtggagttgtcaagaggtttgtgcttcctccacagtccttgctttcaggcattcaaagacttgtatttgattcatgcgtgcattccatcgccatgtcaaactgctttcttttggttccccggatgagtgaaagccgttgatttaaaactgggataatctgaattctcggcctttaattgaattttgtcttcaattgctttccaaggtcgctttcagacagctcgtggggatgattagcgttctttcttcttgggttttccatgaacacaaaatgcttgcgcttgcatatgtttccctgtgtagtgagcttggaattggaagtgattcgttctcctgaagatctgccggtgcccctttttggttgcaaattgaacaagtgtttaatagctattaataagagccatgttggctttgatgtctacctgagattttttcaggctctagcctagtaaagcccaccccacatttttcccccttcaaagatcgatgcttttctattttctgtatttcctgcgaatgcatgaagcctcgatagatagaatccaaaatatattatggcgggcccatttcatgatttttaatgtatctgccaacgaagacttttgaacagtttttctggtgcaaatccaaaaaaatttcatgagttcggtataactacctttgtttaaaatggttttgatttaccgcaattattgatgtatagcttcgtagtctttcattcaaagtctagatgcatctttcttctcttcgttctattccctggatcagctggtttctgcttcttttttctgtactttcggtttcatgttaaaagaactcatttcgaatcaacagaac

SEQ ID NO: 91567 - DNA, 598 bp, Eucalyptus grandis
  Intron number 1 from transcript Egrandis_v1_0.016577m (loc us Egrandis_v1_0.016577m.g) derived from phytozome v7.0 (c hr-ID scaffold_2; pos 10803455 to 10804052)
tccgcctcgccgtcaacggctccgtcatcacgcaggtactctctttctctctctgccgtcggattgctgtgagaaatcggtgatcggcgatgctcatagttccgtcgacctcctcgtttttttcaggttcgcggaggagctgcggggctcgtcgagtcgatcgtgggcgctgtcaagcctgtcgtgatcgtgtacgtgcgcttcccctttccatttctattttccggtgtttgtttcacggaaaatgcatttctgctattgaaaaaaacaccttcaaaagtggggaaatcgcgggcaaatcgcgggcaaatcgctgcatgttttttctgtttctgtttttatgtgtttgctcgcatttgaatcttgagcattagaaattgcttctctttggatgttttagattatttaaagagtaaaatcccctttctttgcgtttgattcctgtagaatgtaactttcttttgggtaaaaatgcttttcctgactgtccaattgcagtacggaggatgaacactgtccacattaccttctttttttgctgttgtatgtggtcttttgaacaggaataggataattgaagtgcaaccgcctggaagga

SEQ ID NO: 91568 - DNA, 960 bp, Eucalyptus grandis
  Intron number 1 from transcript Egrandis_v1_0.000732m (loc us Egrandis_v1_0.000732m.g) derived from phytozome v7.0 (c hr-ID scaffold_2; pos 23987366 to 23988325)
actgcttcccccattaagtccaaaggtatgcaagcttcctaattttagttttctggccttgtaaaccaatctgtgccaatgatgctcgaccaactttcctaaaacctaggtgggaactctgaaattcgatattggcaaaagattaatgaactcgagacactcatgaactcaaaggtacttccttgtgttgttggatccatgtgtcttcattcgttataccaaataatagatgatggcgctttctctctctagtatgaagttacttttgctgctgtggtttgagtttttgatttattgcagttttaaaggctttgtatggtgttattctttgcgttggacatgtccatgcttatgcagtgttcatatacatgagattattgcttgtgttaaaataatttacgttatgcacagttttgggtttctgaaatgaagtgcgacttttacctttggcttttgtatttgagatctgattttggtataatcttggataccttagattgctgaaaccaactccacattggtattaacggtcaaacctatataggacaaaatgaaattattttcactttccattttggtggggagtcaacatttcaaaagctgcccccccagcatgacccaagatttgtgattaacacatcaacggacgtcattgttctctgggcctcgtgctggttcgtactagtcacccgagtctgtttccttctcaaagcatgagacattgcgttgttaatccctctaggcttttgaatgtttagtgcttagtgattttctctgttatgcttctttgtcgtatgataagccatgggaattctgttttagcgctggtttgtgaatttctaagttcttctcatgctcattttttccttcatctgttatctaaggtctacacatgcgccagtgaatctgttcttgccagattcattccatttcccacagcaaagttcaagatttacgaag

SEQ ID NO: 91569 - DNA, 682 bp, Eucalyptus grandis
  Intron number 2 from transcript Egrandis_v1_0.026783m (loc us Egrandis_v1_0.026783m.g) derived from phytozome v7.0 (c hr-ID scaffold_7; pos 1403359 to 1404040 reverse strand)
actgtatcgacactcgagtacccatcgaagtcactgtatggatcccttatcaaactttcacctctcttgagactttctccgagccatatgattagttgctaaattagattggtgttgatgatgcattgtcatgttgttacaagtttgttgaattttgttaaatgacacttaagttcagctgatagcagagttcaagatgtggcacggtgttgttcaaggggttgtggaatttagtagtttagtggcttgagttttcgttttgtgggcatcttttacaagttaagggtcaacaagcatgaaaattatttgaaatctttctttgagatgaaagtgctccggggttcatcctgaatttatatatgggaatcacatataaagttgttcctggactttatgcgtagacatttgattcttgacatattgtgaaatatgacaagtacttggaatacttcttttatttgctctcttctgtgagagattcaagaaatctacctccattaactcaataccttgtggcttttttgtcgcattgagatgcatgataattgcgggatctagacacataaaaagctaatgacatgcataattttctggatcttaacatgtaagatcttgatgttgttgttttgtcatgtgaatatgcacagatcggagagataaagaagctcgttgaagagggtaa

SEQ ID NO: 91570 - DNA, 718 bp, Eucalyptus grandis
  Intron number 1 from transcript Egrandis_v1_0.042858m (loc us Egrandis_v1_0.042858m.g) derived from phytozome v7.0 (c hr-ID scaffold_7; pos 30416492 to 30417209)
tgttttcaagcacgctttagaggtacgtcccaaagcgaacttttcgaagatcatgcacaaaaacctttgctctatctagaggttcttagtccgttatctaaataatcgatcgattctccattatcagcttttaaattttcattatgttaatgatatgaatgaaatgcatttgtcaattatgtgtgattgaaactaccaaatcaaactaaaattatcaattcactgattagttgtcgatttattacatagctaatcggaattcatcatttttacttttcaaattatatcgtttatccatatctagcacgagtatcctattttgattgttttagaacaatttaacgtaatttttgttctttacaatccgatgacatataaatattcgttattttcaaaaaaatgctcttaacaaaatgaggaaagttgcaggcgtggctttcttcgaaatttcgatagcttttgtctctgtttttcccctttagactttcacaagctatataggacgagccaaggtggttgagaatttcaacagttatatgttttcatttctaactcggaaaatgcattctcttaaatttatgtaggaccaagcactagaattgatggatggtggttgacaatatcaaccgattacacaaatttttgcttttctcatgacaaattcatggcaattttgattctagtgtacttttcgaagcaacctttacacttctagcct

SEQ ID NO: 91571 - DNA, 652 bp, Eucalyptus grandis
  Intron number 2 from transcript Egrandis_v1_0.023201m (loc us Egrandis_v1_0.019740m.g) derived from phytozome v7.0 (c hr-ID scaffold_7; pos 49028440 to 49029091 reverse strand)
tgaaggaagtcagtgaagaggttgccaagtacaaggtgcggctctctgatgctcttgatctcgttaatctacttaaattagaatgtcgcttcatggttatatgctactggataatctatcgaaagagtacgtactttcctgccgtgttagtttctatgccgtagctatttcatggtgatggggcgtttctattggaatcaatggattgattaagatttcctgtagggagagtagctgcaaaatgttccactttatctgtttggcgactgcccatgtcgtgtttaatagaagccaaatcgataagcctcagttgcattatgggtatagtagatttacggtggtgcccgactgagaatgactataattgagggtttctcttccctgtctaatgatagactggagctgatggcccgaaaacaaaattataatgtagttgatttcgccaggattgttagggcgacatctgactgggaatggataaattcaagttttcctattaaatatcttgacaatctgttcaagtttaccattttctcatatactgggtccctgtcaattcgtggactaaactcgagttttttctctttaatatcttacaatcaactcttctttgacaggttggagctcctgctcgtgtgggtttggttgctcc

SEQ ID NO: 91572 - DNA, 453 bp, Eucalyptus grandis
  Intron number 2 from transcript Egrandis_v1_0.049071m (loc us Egrandis_v1_0.049071m.g) derived from phytozome v7.0 (c hr-ID scaffold_2; pos 17000275 to 17000727 reverse strand)
tctgggtatggggaatggactgccctcttaaagccatttgaagcaggggttaagggaagcaagatcatcatcccaactcgcaatagttcggttgtttccttaacatgagcttggccccatcctttgaaggagttgtctattgataattgtacaagcttattagcctttcatgctcttagagcaacaaattttgagaggcaccttgatcttgaaactataggcaagaaaatagctgaaaaatgtaaagtttcaccttggtggtgaaggtgttaggtggtctcctgcataataaaggggatctcgatgaatggaaagttatcttaaataatagaatgtgggatattttgatgggaaaaaatgatgaggttctcctagttttgaatttgagccatgtccatcttccttcttatttgaagagatgttttgtttattgtgcggtgtttcccaaggatt

SEQ ID NO: 91573 - DNA, 986 bp, Eucalyptus grandis
  Intron number 1 from transcript Egrandis_v1_0.004195m (loc us Egrandis_v1_0.004195m.g) derived from phytozome v7.0 (c hr-ID scaffold_7; pos 50587792 to 50588777 reverse strand)
cccgcctcccccgcaccaacctcatccttacgacggtacagcgtctgcgccatatgtaccttcgtggcattggatgataatcattagagatgtcttgtcctagggattggcagggttatgctttattcgtttcttatcggatttggctacgaacgcaatgccttcggcatccttgctcgtaagtccgaattagggcgcggttccttggccgtaagccgtagggatgagtaactcggcttttcgtatggcatctaagttaggataccagtgcatgaaatgacttatgtgtagagggagtcggtggtgcagagcaaagaactgatggtgtcgggaggcgacaattcaaatttctttcttttgatatccgtttttactgggtatagtatagtcttcccatacaccgattggcaatctgtgtttgcagtttatcaaataacgaccaagcatacttaactacttgcctaccgtctcattttagaaacgtaaagtgtaaattcaattcagcttcctctccattcctgtacatctcgtagcttccctattgcaggaattatcgaaatcacgatttttatcacatctttcattagaagcttctattttacctgcccagcagcatgtgcctgtgtgtgcttgtgcgtgtttgaaattttggagggcttgacctatggctaaatggttgccttgcctcttcctcatactggcacggacaatatagaagttcttctgcattattataagaaacagatcgagatattggtcgctgatattttcgtcaagctatgcattgtaggcaagtacaataccatgaatgataaattttgggaagaaatggctaggttaatatttgttaattttggaacgatctattgggtcctcggactgttatgaattatgttgtatgctcaggagaatgataggagaatccctgctcattttcgtctttgtctttatatgcagctcataacgataactttgctgcgaaaaga

SEQ ID NO: 91574 - DNA, 795 bp, Eucalyptus grandis
  Intron number 2 from transcript Egrandis_v1_0.012554m (loc us Egrandis_v1_0.012554m.g) derived from phytozome v7.0 (c hr-ID scaffold_11; pos 30052342 to 30053136)
ggccattcttgtgactgtggaagagttttttccaggttggatctttaacttgactcaagccatgggattaaaagtcattatgctgttgcaaatgagagttttttttaatttagatgcttttgatgtgtgaagacattttcctttgctcaacccttttcattccctttttctgattgattctaaaaggctaaagtcgaaagtgggaaagggtatatacctcgctctaggtgttgaccgaccatggaaaaccttaattctgatggcgtgtcgataaccgctgttttcttgagcacagcggaaacacggttccctaaaatcagattttgttggctgtgttgtgttattttgctaaaaatctcctttttaggaacccaagaaccgactcttatgttcatataaataatttcaagtgactgtcttcctcgtaatagcatgtgcatacgttatacggtcgctacactctctttcataatttgcactctcgccttaaagggtgcaaatttttaaattaatttaatgacttgtacatatgaattatgttgttaatgatacatttgtacgaggttgacgacttcatctccttctatcgccttggttctcggcatatctccattgacaagacaggccaaataaacaaaagagataggaaaagagaagaaccctctcttgctgcccttcctgtgacagccagagcaactgcttattctttcttttggcatatgaaccctttattcatatggttccatgtacctttctacagggtcgaaagcttcattgagcaccaagattcttgca

SEQ ID NO: 91575 - DNA, 602 bp, Eucalyptus grandis
  Intron number 1 from transcript Egrandis_v1_0.020035m (loc us Egrandis_v1_0.020035m.g) derived from phytozome v7.0 (c hr-ID scaffold_11; pos 24297583 to 24298184)
tgaagctgttcctgcttccttccacttgtgcctgagtacgtctattttcgtttctgtttctatttctttttgacctcatcccgtaagaacagtttaatgggtctcaccgcaatcttcaagctgtgttatcaagcttgtgtttccataattccatgctctgtgagatttctgccgtttctttcatacagttatctagagacgatgttctttatttttatttttactttttcatcttcgttcaaatttctttctgggtttcctctattttgtttgattttctcagtgattttgagttctattgcagagaacagatttattagtgaactgttttgccacttacttcccgttgatgacttgtttatttttcttagttcatgcttactttgcttatcaagccaatccttttgtgtgttgattattcaggattggagataattggaaacccatgtagtaatttttaagttctttcactttgtaaaataacttagtcctttgtgtcctttttgttgccttttttcaaatccatttgggaaataatccgaaaagtatactttgttgaatctgcaggtcctggtttgcagttaaatcaaagcaaaccctat

SEQ ID NO: 91576 - DNA, 1016 bp, Eucalyptus grandis
  Intron number 3 from transcript Egrandis_v1_0.015043m (loc us Egrandis_v1_0.014997m.g) derived from phytozome v7.0 (c hr-ID scaffold_7; pos 5934540 to 5935555)
cgtgaagcgggtgaagaagaagtgtatcgaaggaggtacattctttttgttactgttgagattggtctattgatgatgatgatatttgaacatcatggtttcttgcatctttgaaacttgaggaaccaatctttgccgtgcatgtcattctggagtgttaagctggaaatcatgattggagctttagtcatcaggattggagccttactcattaagtgagcataagagtagtagttgcttgaccaggtgtttgtattgccttttgtttatgggttactatttaaaagtttaaaaagccattgcaatgttgttgtcatggtgcgagggtcatttaacaggagcgatttcatgtaaagaattaaatgtctgttgtgcatactcacgtgtgtagtcttcacaattttccccttctactgctggaaattcttttgagggactattatgaaaacaaattgcctgattcaggaagaatgttatctgacgaaactcaaatgctaccagtgttttctggtctatagcttgttttctagtatgcattagctatgcaaggcgttcaaaaacctgatgaacaattatgaaaacaacacatattgcttgttaatttcagttctcagtttgttgtttttcccttatcaatcatgaaaattgattggagagaattacaatacctcttttgcacatgatgtgcagaaaaggaacattagcagaaagtaaataggatggaaagatcagaaaattgagaaaataagaaaccgaacaaaacagtggcccactcaatatattgtaatttgcttttgaggatgaactgctaattgtctcaaagaatcttctaattaattcctacgcaagatccttttgatggaaacccaggatggatgtttgtattttttcatcaacaaatcattttttatctgcccagcttttcaatgattcttttagtgattttgtatggatttcttgaactgtctggttgttgtaatggttttgacaggacaaattcagctatcagtgatctt

SEQ ID NO: 91577 - DNA, 938 bp, Eucalyptus grandis
  Intron number 1 from transcript Egrandis_v1_0.029743m (loc us Egrandis_v1_0.029743m.g) derived from phytozome v7.0 (c hr-ID scaffold_11; pos 32185772 to 32186709 reverse strand )
gcgggtacatcgtcatcaaggggcgcccctgcaaggtaatcatcgcgccgcgatgcggatctgtggtcccgcgagatcgggagatttttccgcttcgtgcgagttgtgacttccgataggttgttcaaatgcgtggctggtgattccgatcgagatctgttgggtttctttatcctcgctagttgactgtcgtttgatttctgctctggttcttgagatgcgacggtgctttctcttgaagcggtgggccagttttttttaaaaataaattatggtggcctgaaattgacgccgggtcaatgaatatgcgtatgcgttgtgcctgaaattcgagggaaatggatctgtccgtactggttgggtgctgttggtcgatcttagccgtgagtcgcttactggtgcgagcttctgttcgggattcgtgctaatcggcgtctcaatttgtttgatattcgcgcgatcgcactgacggtgttgtgtcctctgtgttcgggactcttgttgttggtaactctgctgtccctcttgtgttccttttctctttgatctactgtatgatttcggaagaaattctttcatctccagtctgattgttgctcatctgatggtgctcatttcagtgaatgggtaatattcaattagaaccatgttgctggggtgttaaattatggagaatgttcgttgtttttgtgactagttctctcttcttgtgtcgacatttcgtctgttgctagtggattttgtcaatgtttagtgataatatatagttgatatgagcacgaaacaatgctctttgagatctcttgggagtacttttccgctacgttcttacactttgatttacggtagattttcggctgcatgtattggtttctggggtgaaactaatttcttcccttgaaggtcgttgaagtctccacttctaagactgggaagca

SEQ ID NO: 91578 - DNA, 838 bp, Eucalyptus grandis
  Intron number 3 from transcript Egrandis_v1_0.025038m (loc us Egrandis_v1_0.025038m.g) derived from phytozome v7.0 (c hr-ID scaffold_2; pos 5045139 to 5045976)
atcagactataaagattggcggcggccttcgtcaggtttttcctttcttttcttatatagtgccaaatttagtttcgtttttatatgctggttctgtgaaacttttgatggaaatcgtcaagatgatgaattgaatttgatttggccacttaagtgattggtttactgtactccatcagaatgcggggaatgccattgcattgttcttgttttcgtgttttctcctcactctttaattttctctattgcagttttctcaacatggttcaccttgtttaagattactaacggatttttgtaagaaaaattgatttttgaatcatttgcattgtcatatatttggcttatacatttggctattgatgagcactgtccaagttagagattgatgcacgtgagttttctacctctgaggtttttgttttcctgaatgcattgtctgatggctttgagggatatgattgtggattgagtggcctaggatgagggaatttgcgatacatatttcattgaaaattccacaagcataatactgggacctgatgatcttatgaagttcgggtctttctagctgtgagtactttattctggaaaacaaaattgcttatgccttattttgccagtgacggtcaaaatagtttgccgtatagaggatcagctctttcaagtcctgcttccagttttgatagtgtagaaaagaaacatattcttagaggtcttgtttcctcatgtggaaaattgaagatggttgatttttctttttcttattgaagaagaatagcattaattcttatttgggcaccctttgtctttacaggaatctgattttattacagtc

SEQ ID NO: 91579 - DNA, 866 bp, Eucalyptus grandis
  Intron number 1 from transcript Egrandis_v1_0.027128m (loc us Egrandis_v1_0.027128m.g) derived from phytozome v7.0 (c hr-ID scaffold_7; pos 50811430 to 50812295)
acttacgttggcgtcaccaccgatttccgtcgccggtaggtaatgtttcgctcctcgatcgaatctctccttcggggaaagttcgggttttttgtgcgtcgatgggtggatttgttggtgtttgtgtaactgggagcaggaaaagattgaacatttgaacggtttgattcattgtcgaggtaccaagtaatgtagctaatgaactcccttgatgtgatgtggatttgcttgtaatgttgaacttttgcacataattgctcagacgcagccttgcaatgtattaagcatttgactcaagtgtgtgttgtaggaagttttgcatatgtgactgagtcgtgtggtacatgttgatatttccaatgcttgaaatgctactattggttgatgaaactattttgttctctcatacagtaatgtgtccgtgtgctatgtactcctctgttttgacttcccctaacttggaaatgttcttgtgatctttcttgtcctccgattctctgtaaattagtatctgaaatagcatgcagatactcggcttcttatcgctactcttcatttgggttgtatgttttctcattgaaggtcatgtaatacactgctcgaatatttgaatctgtatgcctcattgaatctgcggttgatccaatagtgtacagttttctgtctgcatgcctaagtgcttatttattttttttggtaaaacctaagtgcttatttatttctgttggcatatctcaaagttcaaatatttgaatctgttatgcctcattgtatctgcggttgattcaatagtgtacagttttctgtctgcatacgtaagtgcttatttgtttcggttgccatgtctcgaagtttgaagcaacata

SEQ ID NO: 91580 - DNA, 822 bp, Eucalyptus grandis
  Intron number 1 from transcript Egrandis_v1_0.010336m (loc us Egrandis_v1_0.010336m.g) derived from phytozome v7.0 (c hr-ID scaffold_2; pos 1240083 to 1240904 reverse strand)
ccaccgtcattatttccatcagcttcgggttcttggttcgtgcgctctcgcttttcctctcacccatttttcttcggttgcggaatgagcgatggcggatggaaataaagagttgggtttgtagaagttgaaaacttgtgtgcatggctctgtgcatctgcgtttttgttgtagttatttgagtcgggtctggatgaatgggctttgaatcaaattgaaattgcattctttatctcgtctaaagttcgggagtttatgaatttgcatggatttcatcaattattttgtgatatgggactagttagcttgttaaagtgggggctaaattagaaattgttttgatagtggtgataatggttgttggaagtggcggctgaaatatttggggtggcggaggtgggcagatgagggttggaatggtgatgatataatgaaggtgatggtggaggtgactctaatggtgctagagtctgtgatgtggtcgtgacagaaatgggatctgtatggcagtcgtcatggtggcagcagcagtgatgagactgatgatttggctttggttatgataataatcgtatgattgagggaggtttcgatttcacattagaatcttagttccttgatgttagcaatcaaattggattgataaatgtcaataatttggaatagcaatcaaaattcaaattactgctgttacaaatgatgagtaatcagtggaattgtaaaggagaagtgtcttcaatagcagtacttatgtttgattcatagagagggatgttcagattgtccctaattcaaacttttgggctgcttgtgtagctgggc

SEQ ID NO: 91581 - DNA, 437 bp, Eucalyptus grandis
  Intron number 4 from transcript Egrandis_v1_0.042369m (loc us Egrandis_v1_0.042369m.g) derived from phytozome v7.0 (c hr-ID scaffold_2; pos 47622525 to 47622961)
ttgtgaggtcagcagtaactttcttttttggattgaacatagaaaatgtctctcgttaaacagatcagagtgccatttagaccatattttctagagagaggttcggaagagtggttgcatttgcatgtgacttgcaagcatagaacttcgtcatgtgttcaaatatataataagcttccaaaatcaaatgttgtcctcatcagttacaggtttgtgcttctcaggcttaaatgaactggctgctttgcgacaattacttatagaaatactataatagctgattcttagcagcattgcttaattaacaggcaaccacaagacataataattgttccattcctcttgtgcgagcaattctcgcggtaaagtgactgctcttttgtttttgtgcattgctttcagattcttgagtccactagctgctgtccctttagtcg

SEQ ID NO: 91582 - DNA, 491 bp, Eucalyptus grandis
  Intron number 3 from transcript Egrandis_v1_0.000985m (loc us Egrandis_v1_0.000985m.g) derived from phytozome v7.0 (c hr-ID scaffold_2; pos 7633018 to 7633508 reverse strand)
taccttcggcaagcacctgatgtaagctctctatatctgtttcatcccatttccgtaaaggacttgcaactgctacttcattgttcaaattgattaagacaagggaaatttgagtttggatattcaaacaatgttatgtccatcaaatatttgtttccctggtcacagtttcatgcattaactatatatccaatggctcatgaaaaattcactacgtcaattatctttgcaagtataagttctttattttaggtttcttgcgtgtttatatgcaatgttgtaaataaacccaagaaatggcattgttctttagatttcttgattctatcttctttttctcttttttctttgacatagtagtctggctccaatttggccttccacacagtttggtgttcagctcattttgtggtttggacagtggtattaagaattgattgacgttctttatggcaggaagtaaatttttataaaactgggactgagaaaca

SEQ ID NO: 91583 - DNA, 608 bp, Eucalyptus grandis
  Intron number 1 from transcript Egrandis_v1_0.043802m (loc us Egrandis_v1_0.043802m.g) derived from phytozome v7.0 (c hr-ID scaffold_11; pos 7345730 to 7346337 reverse strand)
cattacgctctgcaaagaactccggcggattaagggtcctcaccctctccctccctccctccctcccgtctcattgttttccacatgcataatcctgacagtagtgtctcttgcttcacatgttaaatcaccgtcaatatgaaccatgaatggtgtttaggacttttttttttttaactgataagtagtgttgtttttgactttggagctgtggatatctttttgcttcactttgatgcatattcaggaatcatatttattgggggtagttcctttgtgagggcaggtatctctttcagggaatacgtttgactaagattaagtaggggcaaatctttttcagtagtggcgatgttagtggttccgattaatttttttgtctgtagccagatattctcattcggtgataacttgtgatgatctggaattatgttatctgctgtcacgggtattcctcatgtagaattctcctggtctcttcttgctatgcataatgacatttgacaaattgacacgcgagcatattcatccgtttatatgttatatgcactctaggctacgcgtcagtttccttacatgttctgaggtcaattactctttccagtggc

SEQ ID NO: 91584 - DNA, 1037 bp, Eucalyptus grandis
  Intron number 1 from transcript Egrandis_v1_0.046831m (loc us Egrandis_v1_0.046831m.g) derived from phytozome v7.0 (c hr-ID scaffold_11; pos 30567891 to 30568927)
gatcctgaaagcaagaattttggaaaaggtattatgttattatgggattatatctttgtttagaagcattttgtttgtttgttcatttttttcattacatgtcatgatcataggacaaaacatactgagcagcactactttcaattaacaaataaaagtcttaggatccatctgaattgacttttgcttctcactttttgcttaatctagcggttcatacacatagatttttttgtttttttaaaatccgaaactgttgaaacttcagattacaataatattaacacataggttgacatataattcactcataatttttcaaatctaagtaatatactaagtcttggagggaaagctgaaaaatactatttgcttttgctaaatcttaattaaacaagccctcatttaattttcttccttcatcatttgcatctgattttgataggatctgagggtgaacttatgcttcatgtgtgcttttcttcacttcagcagatggtataatgatgtactcaacactccatgtaaggggagagtgtccctattgattatcctcatctgaaaaaaaagaaaaaaaacatatggtgatcagatgctttatgttaagggtaataatgatttataaatctgctttgcatgcacattttactgaaattggtgaaaatgttggtgttagtatgagagcaggaagaggtaacttttaattgcactttcattcttgggaaatattttgcgcaattagcacaatttgtgtttcttttctgaatttctgatctatgcttatatattagtcatctggtcttgtaataaatgatgaatgtgcacatctccttttttcacagggaaattcctgctttttgcttgcacttatttgtattgactgtatgttcactttgtgcatgttggattttgctgcagtgatgtttctatgttcccattaaagcttaatttttaggttggcttacatttcttcctgctgtatgtttctttttgatcttttaggatcgagagaattgactggctctgtagatctcata

SEQ ID NO: 91585 - DNA, 792 bp, Eucalyptus grandis
  Intron number 1 from transcript Egrandis_v1_0.032691m (loc us Egrandis_v1_0.032691m.g) derived from phytozome v7.0 (c hr-ID scaffold_7; pos 95870 to 96661)
tagtaagttttcgaggtaactatatccaatttagcaataataaatgtctgagatttgtttatactatcatgcataacgagtattcatcttcatatcctagaaagtaaatatttgatgcgccagccctttttcttaccgacttaagcattagtttcgtcaatccaatttgcagttatcaaaagtggtcttctcgttgagaataatgtgaattttgtattagtctggttgtttgtacgggattgctcaatggtcatgttggcaattttgacggggtagagaaaaactctcaataaaaaatcaaccaaaacaaatcgtagaaaagatactaaaaagaaggagaagagttgcgagaatcaagggaaataccaaaataaagagatgtatgatatataattactcgtgcatcaataattctcctaacgtcgagtcaaagcaaattaatggttgtcgaaggtgattgcccagctctcgatgcacccaaatttcatgcaacttttcatgcatcaataccaaaaatagcaaatatatggaaattacctaagctgtagttaccacgaaattttcacaaaaaaccataaaaacgatccaaatcatcaacctaaatattcctaaacaaatcgcaaatcaatgttgaagagacataaactttcctctctactcctccactttacgctcctttcccttcgatgctgctgctcccacagtcgattttcgcttcacgggtaagccaaaatattcctccattgttttcgcgaagaagggaaaattaggttcatcatcctgatcgcaaaa

SEQ ID NO: 91586 - DNA, 460 bp, Eucalyptus grandis
  Intron number 2 from transcript Egrandis_v1_0.023982m (loc us Egrandis_v1_0.021076m.g) derived from phytozome v7.0 (c hr-ID scaffold_2; pos 37587433 to 37587892)
gagctcaaggtgctattcacgcgtgattccaagtagtttctatgtcttccggtgatctattctatttattctttttgttaatgttgtgatttttacattgctcaatagcagcgtgaagaatgggtttatatggtacatcagatagataaaacctgtgagcagtttgttgggcacgcgatagtctttctaaatagattgtcctggaggttgcacagtactcatctttagatgcattgccagccgatgagaccgtaaatagtgaatctcagtgtttatacattctagttgagagtacatctgaatgcatgatgcatctcaactttgaatttttctcctccagttatgaaaatgagcgccttcttttatcctttttaataatgtgattttggctgacatgctctagtgattgtcctctgtaattatagttcctgagtttaattgccggggtatttcgtctttc

SEQ ID NO: 91587 - DNA, 1044 bp, Eucalyptus grandis
  Intron number 1 from transcript Egrandis_v1_0.001472m (loc us Egrandis_v1_0.001472m.g) derived from phytozome v7.0 (c hr-ID scaffold_2; pos 3304199 to 3305242 reverse strand)
gcctaaggcggggaagttcatacgaaaggattgcggtcagtgtgttccatgtcctgtcgtgtttgatcaaagcggtgtgacgtgaatagggtagttaattagtaatgtgcacgccatgaccatttatcttgcttgcatatgttgtgatctgtctatccgggatcaggtcctagatgtgcaaatatttcatattgttattcgtctttgggcaaattgtagagctgttctttaagtagtttgtgttgatgcggatgttgaggagagcaatgagtctgtggtgattagaggaaaattacggcacattaccgttgtcctgactgagaaagataatttattaaactaggaaatggccgatcgtcaaggactagaactagtttttgtgatgatgcttcttcaagaagacaaatttttcagacattagggaactgggaacttaatgaccttgttggtcgggttatataaggttgagcaactgggtctgtgtccctccatgcagcatttgaacctgcggcaactaatttctctccccgtgaaaactatggggaacctttctggagatacctaaattttactgctaaaatgtcccctcatggatttgtccaacatgggttggttttttttggatcccatggtgggccagcagtccagattacctatgttgatcttgcatatttaattctactgggcatttggatatagatcatacatgtgatggcacaagtcattttatcaatttaccaagcatctgaaatcattatataacccatgacgagaatttcctttcacacatcaacactatctttataaggtgctaaatctggaaaccacgctttgtggaatgctgccattgggatccttttgtttttgtctcccggcttccattttaaatgcgagatttatcttcgatccttggacatattcgtgacttaagatttagtggcattgtccattcaaacttataaagttgtctgccagggggaaaagtaattctaaaatttgatgcaccacacaatgcagggaagatacttgtatcgatttccttgc

SEQ ID NO: 91588 - DNA, 819 bp, Eucalyptus grandis
  Intron number 1 from transcript Egrandis_v1_0.021341m (loc us Egrandis_v1_0.021341m.g) derived from phytozome v7.0 (c hr-ID scaffold_7; pos 38550870 to 38551688)
ctcggagggcggggaccactcgcacgacggccacggtaagcatcgagtctatggtggtggtggttgttcatggtttagcatggttttcgggttgatctcgttatgcttgaatactgtttacatggcctgtcttggatggatttgagcttcaccgttagctcaattcccatcctagtgtacattattaagtagggtgtctatgttaattagtctgcaatgtgactagagtcaactgattttagaggctcctctgtaaaatttcatcatctgataatttctgtttttagcttcctttctttcaaattttgggtctaagaagtgtaggtggaagtgtcagcagtttgtgctctggagtgaggctgtgttgtaattgtggttgtgctgtggtaatgcttttcagatgtccataggcatagttcgataacccctgtttctcttaatgatctttttgttcatgatattcatgctgtctaattagtactctgtataatgggaagaaaacgatgagggattcattgacaaatttctatgctgtatgtcctcaaattattataccaccaccattgcaatttactaatgcaaagtgggaataaagactgctcatgacaggggcagagtaagataggcaacaggagtttgatgcttgagaaaacagacaagcaaattggtttagttgttcattctcctgaggcaacctagaacgttctaatggggaaaaaagtgccagattgttagtcatttgattgctccattatgtaagtgtagctgagctgagtaggaccatgctcatttgtgcaattatttgaaaaacagatcata

SEQ ID NO: 91589 - DNA, 999 bp, Eucalyptus grandis
  Intron number 2 from transcript Egrandis_v1_0.020528m (loc us Egrandis_v1_0.020329m.g) derived from phytozome v7.0 (c hr-ID scaffold_2; pos 58915327 to 58916325 reverse strand)
acgggaagttgtccgacttgttgggcgagctccaggtacccccctgcttttgctttctcggtcgaagttcagctcttggttgtgttagctttgaatgtttcgctagagagacggaaatggtcgattcttgtttgtgtcgatttcgttgagtgcgattcggttggtcgatcgcggcctcgtgttgattttaagcggagggagggtcgagatggggttacgggagctggagagagagagagggagggagggagggagagggattagtcgagagcgtgcctaaaatttgagattcatgtaataggttttctgtttgaactttgtctgtgctggctggattgcacttggaaatgttgggattggaaatcgacacgaaccagaattgctactttggctttctcagttaaagttcagctcggattgtttagctttcaatgtttactggagaaatagaagcggctgattcctgtttgtgtcgattttgttgattgtgattcggtcagtcaatcgcagcctcgtgtttattttaggagtggggagggtcaagatggggttacaggagctggggggagagagagagagagaaattaatctagagcgtgcctaaaatttgaggttcatgtaattggttttaagtttgagctttgtctgtgctggattgctctcagaaatgttgggctcggcagttaatgtcttctttcattctataacttcatcaatgttcggtaaaaatattgatctagcacatagagggtaagcaatggaagtacttttcctctttgtttctttatctcaaagtggaagacattagccattttttatgcgagtaactgtaaactgttattttggttggtgaatgtgctttattttcagatgagtactttgctagtatgagtgataattgttgtcattcttgtgatccgctctgttgggatttagtggcatcttcttcctgtgccataagcagggtttggtgaagggattagaaaaatctggtagcca

SEQ ID NO: 91590 - DNA, 711 bp, Eucalyptus grandis
  Intron number 1 from transcript Egrandis_v1_0.011279m (loc us Egrandis_v1_0.011279m.g) derived from phytozome v7.0 (c hr-ID scaffold_7; pos 27315244 to 27315954 reverse strand)
gccgtctccttcttgctcgccttccactagcaaaggtctctctctctctctctctctctctctctctctctctctctctctctctctctatggaattttccggatcctgaaacaaactagaacatgaacaagattggttcaattcagtgcccgtggtaatcgaacatgaaccataggacggagaaaaagtataccgctctctacttagtcatacaaagccatgccttgcacctgtgagtgaccatggattcttcctattttacacagtacttcttttgattgagcaggcttcactttaaactatctgttcaaatccataaatgtgtgatcatattaatggggaaattaagaattaagagaattatcagaagaagacacaaggcaggtcatccgtctcttttgcattagctgttgccgagcagttcaaatttcattttgtgcagagacttggtcgtgcaatggtggtaatcatactgatctgtcacatccaaaaagctcagtcttttgctgcatttagttgagggagttggtcccccgttagctgtcatccaaaaccaagtccttgttgaccggaaaagtagaacactttttttgacaaatgcatcttttcttttacaaatgcattatcatcgtactatttcacatgatctcgtactgtcgcattacatgctttcagctagcagccgaaagtcgaccttggaagtagttcac

SEQ ID NO: 91591 - DNA, 869 bp, Eucalyptus grandis
  Intron number 2 from transcript Egrandis_v1_0.024415m (loc us Egrandis_v1_0.019484m.g) derived from phytozome v7.0 (c hr-ID scaffold_2; pos 49334997 to 49335865 reverse strand)
tcgaggttcgtgctttatgtgtttgtaagctgtttcggtaaataaaggttttctttttttcgctatcgacattgcatttttgttgtgcgtctgacaagagaattctgaagaagtgtgagattatacttaccgttgttctttccgttaaatttgtctgcttggtattacttggggttggtgtactctcaacgattaaggttaggaatgtgaagattgattgcaaaattgatctatcgagcaaggcgaggaactctgtggaaacctagacaagtgtgttgtcttcaagcacccaacgagaatttctcctgtaattttttgagatactttcatttagcagtctttatagtttgcatctctgcattatccaacactgaatatatagtcctttgactggcatgacttttgagctgagttttgctgatgcttcgcggacgctccatatcgcccctttctattgaattgtaacaaaaatacagccaggtctttgatcagaccaattcttcttgagcatcgtgatgtaaactccattgagctagtacatatgctacttggtttccttctcgcttagtccagtgtccctcctgtcaagcttgtaaaataatctcagtctggaaagtatcttttttttttttttttttcttcacaatgtagttttggtaagaagtttcacctcattggcagattgctctatcaaatgcatcatggtgattgacaaacataaatctacatttgatcctatagtttcagtttatggcaaaaaaggttcagcgcttgttccaaggtccatagctggggtgcaaatgttgtataatcagatgagaacacagatatgatttgtgatttttattttttgcaggttcctattttag

SEQ ID NO: 91592 - DNA, 814 bp, Eucalyptus grandis
  Intron number 1 from transcript Egrandis_v1_0.051586m (loc us Egrandis_v1_0.051586m.g) derived from phytozome v7.0 (c hr-ID scaffold_7; pos 666861 to 667674 reverse strand)
cacttgataaacatccgcttttcttgatagaaaaggtacggcccaagattatttgttttgctttgatggtgaatatttgaagtgatgattaaagtcacagccaaacatctcatacacgtagctttatatatgaagatgtgaactatatgactctcctttttctttacgggcaataagtttctccctaaatccataaaaatatcatcgaaacatcatatgatcttcatgtattgaccaaacattcttgtcaatatctaatgtattaaatgcaacttagttaatcccccttttgaaaaaggtaatgctgattctgatcatttagctctctcctaagcaccgcaaagattgacaacatgtggcatgtggtgtgatcttaccatggcacaagtgtgttgtctaatttgaaccctattaaggtcatcgatgttatgctaaaaacgaaaaaaaaaatgggaatttatcgttgacattaatcaccaaaatttatgcaattatgattgtatttgatgcataagttattttcagaagggatatatttttacaaacatgaatggaaagagttacttaagttcaaatatggaaacaagtcaaatataaaagatcggtgataatgtttggttcatgagggcacatttctttctgttcaatcatttgagactcaacattttaaaatgcaattattttttgcaatatacaagacttatgtaataatacatgaatacttttttaattaagttttaattaagctggctataggttctgatttgactattttccagggcacattacctaatctccaaaagttaaaattgga

SEQ ID NO: 91593 - DNA, 733 bp, Eucalyptus grandis
  Intron number 2 from transcript Egrandis_v1_0.000599m (loc us Egrandis_v1_0.000599m.g) derived from phytozome v7.0 (c hr-ID scaffold_11; pos 8762381 to 8763113 reverse strand)
gattagtctgcgcgaggaaccggtaagtgcatctaatggggccaaagtgttccaattaatgttttgttttgtgtctggtagctatgttttctttgagttgcatcaccgatgtatgagtcaggtatgcctttttttatgagttgtatctatctcgaaatggaccttcagtttctttacctgtctttttcccctaagcagcaccagtttctctcttcaattaataatagcaatctacagggttgagcaaaattttgattgatgatgtcgtgtaattgccaggccttgcaagtgactggttgtccctccccccaactccaaccaaaccaacccccaacacccccccccccccccccccccaaatttttgatttttagatatgggatctgaaaatattggagggacaaacgaacattaattttgtccatggagttaatatcctccttgattgcatcacaccacgtggcaggttgtttcttgctcatggtttcttttgttcatgttcttgtttgtccaaaaatcagtggaaacaatggattctgatgctgtcataaactgttgcacaataaccgtttggttgatacttcttaaatctttattagttggactccacaagtgagacagttgtccgttgcatgttgttgcaagtagcagaatgcagtgtatgtgaagcttatcgattttctttaccttttgaacaggttatatacattaacggacgaccctttgttttgtg

SEQ ID NO: 91594 - DNA, 604 bp, Eucalyptus grandis
  Intron number 2 from transcript Egrandis_v1_0.047962m (loc us Egrandis_v1_0.047962m.g) derived from phytozome v7.0 (c hr-ID scaffold_2; pos 27162060 to 27162663 reverse strand)
gcaaactttatttgcaaagaggtttgtgatctatgctatgtgacacttgtgatattttccaagaccttaccttaacaagtagccaagcctcttacaaagattacagtacttggttgcgcttggactagttcgatattgagcaagtgcatatacttcacatgaggagaatccttgcctccaatgggtagcccatcctgccttttactatgaccgtgctggagtaagggtttgatcttagctctttggtacaactccttgcggggttcacttataaaaaaaaaaaaaaaaaaaaaaacttcgggcatctagaagtttatcatttggcctaaatgaccattcttccatcttccaaggtccactggcttattaactcactattgactactattcgcctgctttatggtaactgatcaggttggattgaaacaagtttgatcaaaagagctggcaatgttcttttgcacaaagcatttcaatgctagttgtagtcttgcaccttccggaagagctgcttgagtggagattaatctgtttatatgtcattcaattacttattttacaaaaagtacactaatttcttcctcaccgcaggtggaaacaattg

SEQ ID NO: 91595 - DNA, 698 bp, Eucalyptus grandis
  Intron number 4 from transcript Egrandis_v1_0.029607m (loc us Egrandis_v1_0.029607m.g) derived from phytozome v7.0 (c hr-ID scaffold_7; pos 50599478 to 50600175)
ataaccttgggcaacaatacaacactccacattctgtaagtctgctcatttgtcttcaaatgttgaaatcaatttgccacttttagcggccatcaaattttcagcttcaccaatatgggtgcattgtatgttagtattactaggtaggtgtgtgcaattttctcaaaatgatctttggggtgctgaactggcatttgactttttgagagcaagaaactatttctctaacaaaattaggagacgggcattagtttgggaccttctctaaagcatctctctattgtccatgtgaattttcctcatctatgcatataatgtctccagtattggccataacttgttacctatattgttggtagaaaattgttcagtagtaagaatagctggccatgatggcaaagactgttacaagagtaagtggctgtcccgtggaatgtgttatataaggtccatttcatatgatcagacactactgaattgcagtggaactggattgagtcttgtctgacttaggctcgagataattagtacaagaatgtctcgctttaacttggcaatttttctgtttatgctattcttattcggaagggttgcttgcggacaaagttttggtgtgtcaaactggagctgcgtattatgtattcttttgttggctgagactgactccttgcgattgaaaatgtacttccaggtgatcc

SEQ ID NO: 91596 - DNA, 339 bp, Eucalyptus grandis
  Intron number 1 from transcript Egrandis_v1_0.038692m (loc us Egrandis_v1_0.038692m.g) derived from phytozome v7.0 (c hr-ID scaffold_7; pos 49316493 to 49316831 reverse strand)
caagagcctcgaggcccaggagcacctcgccgagggtaaatgcgtttgacccgttgtcaccgcgaatgatcttatattggaagatatttgattttcctttcttttgtatatctgtcaaacataccccaaaagagaagaaaaactacagcatctcccaaaaaaataaaagtaaataaaaagagactcaaacgtaccgcgtctgttatttagttttatagaaattgaaatcacacgccttttaatggatttatttaggtttttttccctcatttttgcttttgtcgactggaatgcatatttgtaggaaggcaaaaaggaggggaatcgaggaagcagcag

SEQ ID NO: 91597 - DNA, 767 bp, Eucalyptus grandis
  Intron number 1 from transcript Egrandis_v1_0.010262m (loc us Egrandis_v1_0.010262m.g) derived from phytozome v7.0 (c hr-ID scaffold_7; pos 19998374 to 19999140)
gctctgcagctttcgcacgcccacggctgtctcgggtgaagctctagttttctgtggacgttcttgggttgattttccgctgctttctttggtgtttcctggggtattggtttcctttgcatacgtgagaagttagatgctgtgtttccccgagtgatcagtggaattgctgctgcttgtttgtgtcgatgatgatgtgaatgtgtttgcttacgtgtctgatgatttttggggtgtcacttgcctgcttggttgtgtcggtgatgatgtctctgccgacccaattcgattttgggtaggatttttcctgggtttatggtattttcttataaatatgtcagtcttctccgctgccgcataagcagtcttcgtctgtcgagggggctttgatcgactgtgtagctttcgcaaggccacggctgtttcgggtgaagctttagtttcttgtagaagttctgcggttgattttccactgctttcttttttactttctgggttttgatttcctttgcatgcttgaaacgttagatgctgtgctttccgagtgatcagtggagttgctgctgcttgtttgtgtcgatgatgatgtaaacctgtttgcttacatgtctgatgattttgggggggttacacactgattttggaatttgggtcgatgggtgatttcgatttttttcttttgttctttttcggtttgtttgtttcgatttgaattgattgtaatgtaatcggtactgctgtttgtgttgcagagatagattgcgcgc

SEQ ID NO: 91598 - DNA, 1043 bp, Eucalyptus grandis
  Intron number 1 from transcript Egrandis_v1_0.040060m (loc us Egrandis_v1_0.040060m.g) derived from phytozome v7.0 (c hr-ID scaffold_2; pos 9766409 to 9767451 reverse strand)
ttcttctactataattgcattatcatagccaacaagtttttacatatttagtggactgtgctagcaattccacccaccattcttttgcttttcttccaaggaagcattgtaggaaatggattactattctgctgtcagctcctgctactctacagttagcatacctgtatatgtaaatgccaatttccccagccctgatgtctatggattacagtgagagtaagaaggggttcctattgaactggactgcaattaatgcggcaagtgttctgtttgcctttgctaagatgctcctcattcttatagctgcaatgatggtaaatgcctgggggattcagttttctacttttgcttcttgattgagatttcatatctactgctttgcttgatctttcatttttatatgcggagagaaaatgtaaattagaacttcacctcaaccttctctgccttgattgtttgatcttgaggttgccatatgcatcccacaagatccaattgttttaatgtattgagtgaagatgcaccaaattcacggtaaaatttggatatgttagattaaagcgacttgactttctttgcagaattttgttgtgctcgcaaccaaacagaaaaaagcttctgcctccattagtgatgccaaaatctgaccacgcgtgcagttgaaaaaaaaaaaaacattgatagatttgaactctgcatataaaatagtttttttttagggtggatccaagcatgagcacatgcttccattcaagatatacgcatgatctaccgcactgtaggaagcactcttttactagtttcatcgcaacttcattcggggtttattagataagcatttgtgtcatggcatgaaaacgtggcattttggggacaaaagccttaataggtaatccattaaattatgtttttcgttgtctattttctataaagattcgcaacttagaagcctcaataaagtgatgaagtgagattgctgttttgaaatgttctatgttttttcaggaatagcagcatcaagagttggaattgggatcacc

SEQ ID NO: 91599 - DNA, 601 bp, Eucalyptus grandis
  Intron number 1 from transcript Egrandis_v1_0.017822m (loc us Egrandis_v1_0.017822m.g) derived from phytozome v7.0 (c hr-ID scaffold_11; pos 30300887 to 30301487)
cactcgctggaattgccatcaagtacggggtcgaggtatagtctctcttcctccaagtggttgatctgttcccctcaaactgtttattcgcttgtggacgtaaagataacatcaccgattcaagaagaattcacaaggactgtcggtatgtagaagctgctgtctagatggctgcaatatgatccatgggaacatatgatgggtaattgcttatagtggcttggtttcatatcagatgcaaaaagaaagtgaaaaacttggccagttgattcaggcttctttgtcaagatttccagagtcatttgaattgcccatctagtgttgttggtcctgaaaatcatgcagagtattcgaaaaggtcttcacccaaatagttttgtatcttccttcttactcatggtctggaagagacatgagcactatccatctttaaccaatgtttggtaagagatgtgatcaacagggtttttagtttcccccaagtttttcatgccagaagcagggcatggctgttaatgaatatctaaaatctgctttctcctgatgccgatatctgtatcttttaggtggctgacattaagagaataaacgggttggccac

SEQ ID NO: 91600 - DNA, 435 bp, Eucalyptus grandis
  Intron number 2 from transcript Egrandis_v1_0.017822m (loc us Egrandis_v1_0.017822m.g) derived from phytozome v7.0 (c hr-ID scaffold_11; pos 30301549 to 30301983)
tcagcctctttgcctaatactgctgcttcttcagggtaaattacatacctgttatccttaatttcttgactctgaaaaagtttagtttggcatgtttgttgagcaggtttgtctgctggagatcatttctatatgcccagcacccttagaatcaatcttcaattacagtgccaaaattgtgatccaacttttttaatcctctcatttttctaaacatgaaaagcaaaatgaattgatgagggagaagaaaaaacacaattttgatgatgtgcgaaagcatcctctttatcgggcacttggctggacatgaattgtatgtgcatgttcctcctaacagcaaagcaaagcgaccgtattgatgtcttggtgggtatgatctcaagtttgtgctttcttgtagggacataagtgctgaaaaagcatcatcaagtgcag

SEQ ID NO: 91601 - DNA, 992 bp, Eucalyptus grandis
  Intron number 2 from transcript Egrandis_v1_0.027078m (loc us Egrandis_v1_0.025226m.g) derived from phytozome v7.0 (c hr-ID scaffold_11; pos 22636147 to 22637138 reverse strand )
ctcaatcctctctttcagaaggtgaagttctctctccccttctgtgtttttccttttctttttccatctggaccaacagaagttgcttgctcagtttgaatctctactgcccttttcttgttttcctaacttgagagtgtttggagtgaattgttggcgctcttgagggaaattagaaagcttcttgctttccttgccatggagggggcagcgttgcctctttggaaaactgggttccaaagggaaaccgattcttctgtgcacaaacctggtctggtctttactgtgtgtctcaaggctgatctcatcgccagctgcaacactgaggttgatgatgtaaatacacttcgttccgcctctctctctctctcttcctctctcgatgaggcaaatccaggctgtctggaaatgtttcctgatgacaggaagtttgggaaaggtggaaatgaagaagatggttaaagaaatcacagtcatcgagtaccaatatgttgggtttcgttaaaggcggtcgatcgaattgttatactgagaaatgtgccgatgccgcatcgcttgatgtttgaactttgtaaatcattatcagcggttcctggatcaccgaaaaaaaaaaaaaaaaaaaaacattccttgtgatgtgtgtaatccaaatttatgctatagaaatcgagtactttactcaatcgtatgcttaataactgccttaggacaattgtcaacacaatggtaaatctcgcgaattgcagcactttaggctttgcataagccgtttcttccttagaatctttagtcaaatctaaggaagatgatatgagctgtctactgctagagcctgatgctgtattgtgacttcgaatggaagttccattatgcaactgatatcattttcctcaagtcatgcatataatggtgcagtttgacagttatagaactgatattgtataccatcaagtatgtgattgaatttcatagtaattgaaactcgactttag

SEQ ID NO: 91602 - DNA, 691 bp, Eucalyptus grandis
  Intron number 1 from transcript Egrandis_v1_0.045416m (loc us Egrandis_v1_0.045416m.g) derived from phytozome v7.0 (c hr-ID scaffold_7; pos 10693881 to 10694571)
tcactgaacgccttcattgtcttcttgaaattgcggtgctttatatttatgttgtcttgatttcacttgaattttattttaaatttcattgacatgggtttgtcgtaataatgggtttgtagttgttgaactggatggctgggcaaaattgctgacatgagtttgcggatggtctcacgtaaaacatctccatctcgcctagaatttttggtattgttgctgcttttggctcatttgggaagaatatattactttgagttgctgcatttggttcagattgacaaagtttgttaggtatatggagttcctaatatacttctcgttcagattttccaaagctcgtatggatcacctaaatctcattgcaattgcaacaattttggcctgcctatgttgtggattttatatttacttggaggaattttgtatatatcatccatgagcacatatgtcatatgatctgatcatgttttgaattcaatctgcattagttccttccagtctcagatgtcatatgatctgatcatgttttgaattcccgatactgatgcagtcattcttataagaagactgagagcacaattattcttttattgttagtatctgactatgctttttgttgtgctgatcatgtccacgctgactgatgtttttagttggttggccggctcgacaacagtgctgtctcatc

SEQ ID NO: 91603 - DNA, 607 bp, Eucalyptus grandis
  Intron number 3 from transcript Egrandis_v1_0.030502m (loc us Egrandis_v1_0.030502m.g) derived from phytozome v7.0 (c hr-ID scaffold_11; pos 9531591 to 9532197 reverse strand)
ccaaagctttcaaaagagaggaggtataaatagccctgtgcacatttagctcgtgatggtgatgtcattaacttttagtaatgttcgaggatgcaaaggctgattttaaaaacggtttacaaagctgtgtcaaactgcataatgggcaatgtataagtgccccattggagtttggcgcactaatctttaaaatagtctttgcatcccaagcattcttcatgttttttttttcttaaatattattgaaatggtttgaaattttgaatcttttgagtttcaagttgacgttgtccctatttaccgagatggcccttcaatagattgacctaatgtatccctatcaataatccctgaagatcaaccggttttgtagttcgtacaaacaaatgtattcacacattgttgcctgttaaccataacttgcatgataatcatttatgagattcattcgtgcgactgttgaagtcatgcctttttcaacataacatcatgtatatctgttccatgttacgctgaacctattccctttcatggacacctgagtgggtggaatgcaaatgatatgcggcagaagtgatttaattgttgctgccttttcaggatagag

SEQ ID NO: 91604 - DNA, 408 bp, Eucalyptus grandis
  Intron number 3 from transcript Egrandis_v1_0.010499m (loc us Egrandis_v1_0.010499m.g) derived from phytozome v7.0 (c hr-ID scaffold_11; pos 2138308 to 2138715)
tggagtcttgcttggcagagttaaaaaagaaagaggtaattgtcagactcacaggatcctaggaaattcaaaccagcacactggaaagaaacagctccaaacttataattgcaatatctagtagacatcgaagactcatgtccttccttgtttaagttcttaatcgcatgaagtgatgggatggattacgctgttgatccagtaatatatattagtcggccatccttgattataacctttatcatgatatcagcaaatttactttgtaatttatatttgtacaatttatattctcttttcacgtgttgatggtttatcttatgttatgccctgctgaagactgatgtatgttcattttgaattcctcatctaggagtgtcttctttgtcctactgggtttgcagcgaa

SEQ ID NO: 91605 - DNA, 618 bp, Eucalyptus grandis
  Intron number 1 from transcript Egrandis_v1_0.018567m (loc us Egrandis_v1_0.018567m.g) derived from phytozome v7.0 (c hr-ID scaffold_2; pos 8976873 to 8977490 reverse strand)
tgattgaagtcgaaaaggttggtgggctctctgtttctctcgtctttatcggttaaattcggcgtttttgtctgctgattttcagcggggttttaaatgggttttaggttttcttgatagacgaactgttgttctttcacagaatgagtagttccgtgattctgtctgctcatttctttcttgttggttccactttttgtttgccttgtgatctgtactgaggttcttgatgggttttaagttttcttggcagatgaactggtttttcacagaatgattagttccatgattctatctgctcatttctttcttgttggttcaactttgtgtttgccttgtgatctgtactgaggtttttgatgggttttaggttttcttgattatatgttgtttctactacataatttgtgcaggcttgccttggatcacagtgttcaggggctcattatcaaacgggcagaagtttgattttaaattctgggaacttggtgtgactggatttggagttgaaacttaggatagcccgaggaactcaagaattcatttatttctgatcttcttttttgtactctaggtaaacttgattcatagcccattgaatctttcaggcaagtgaag

SEQ ID NO: 91606 - DNA, 636 bp, Eucalyptus grandis
  Intron number 1 from transcript Egrandis_v1_0.007370m (loc us Egrandis_v1_0.007370m.g) derived from phytozome v7.0 (c hr-ID scaffold_7; pos 19918711 to 19919346 reverse strand)
ctgaggaggccttcaaagctcttgatcttaacaaggtgagcgaagggatacaactttcgttaacacttgatcgaacagcgtgatctttgcattgcgtgggatcaaattcatcaaattctaagcatgcgtgagcaaagaacatgcgattggttgattttgttatatggggacagtaatgactgttacagtggtattcttaatcatttggcctgagaattgacttttaactcttgcttcttgtgtgtagaagtagaacatgtactgtaattctgttagtttgtaggattattgtgtcctttgtggggaaagactcgtaatagataacaactggttttatataatgtcgagttaattgtgcagttaagatggggctcgcctgccaaattaagcagatgcacgtggatagacttcgttatgtgggtatagttctatagtgttttgattacaggattagttgtcaattaacgaaaatctctttggtaatttggagaggtgattcatagacctgcactagttggttctttttcaatgaatgttcagtggaagcaatgccccaatactacctattccatgtttccctgttcatatttctgtttggcagttgaggagctgttttggcttcaatacgttctttgc

SEQ ID NO: 91607 - DNA, 932 bp, Eucalyptus grandis
  Intron number 1 from transcript Egrandis_v1_0.022400m (loc us Egrandis_v1_0.021784m.g) derived from phytozome v7.0 (c hr-ID scaffold_11; pos 26120227 to 26121158 reverse strand )
acaaagtatggtctttctccctgttttcctccttttgtaaaatttacttaatattggactgtggtgttccaatcatatcactgaactttgacttcaatcgcccaattactttcatttagtggcaattgatttagctatgactagaatttggtcaatttgccagccaattgctgacatgttggccatgtggccatgtgtataccacatcggtactttgcttgaaaattgactggaatttggtcaaagtgcataaattgtaaagaaataaaagtattcgacatgagatgatcaaaactaaagttcagtgaactgatagcataatccactcaagttcagtgactgctgatggaatttgccctttctcctattgcttttatggagtcacaagtgaaataagttttcaatgaacctttgagagccaaagtactttgattgactgtgtttggttcataaaatctctttttcgaggtgattcatgttctgctgatcattgtgtgtttcattaacaaaagtaaatgtgttgtgatattgagaaatatatgtatggagaagctagagagagggagggagggagggagggagggagggagatcatttcgtttgtgtaaatggagggatcatttcgtttgtgtgaataaattagccataattcattttcctatttactattgcttgcttggtttccctaactactttagttcactctttatgtgcagcttttcaatgacatctaaattttcatcttcaataccattccatttatatcatcccgcattgctaaatctagaattttaatggatatttcatcttgggacaggattgaatctagtgtggtcttaatacccttctcccttgcttattctttcctttacttatgatttcctttaattaaatcagtcaatagagattctgaagagaattggggcgttctc

SEQ ID NO: 91608 - DNA, 534 bp, Eucalyptus grandis
  Intron number 1 from transcript Egrandis_v1_0.037674m (loc us Egrandis_v1_0.037674m.g) derived from phytozome v7.0 (c hr-ID scaffold_2; pos 4476792 to 4477325)
ctttattttgctcctgaacctcatcttacagaaaggtacgaaattccttcttcttctttttttatctaaactgcgtaaataattgagagataccatttgaaaagtgggtacgatcatgaagatatgttaatatatagtactttcgcctttaggctatgatctcttatatttaacaaaatgagcatatttcgttgtcatgttgtttctagacttatgtcattatatcatgcatgtgatgatattggatagtttcttggaaatgctttggcagcgttaaactcgcccctattaattgcatagataatcaatagattatcacaaagatatgttgatttaatgcattatttctcttttaatctatgattgattaaatcaagtagaaaggagtatgtttaatctatgtctggcaacgttaaatctgaccatataattgaataaataatcaagatatactgtttagaaaaggggttcaatcacaaaaatattttgatttaacgcttaattatatctcccttttaatctataatcaggagt

SEQ ID NO: 91609 - DNA, 929 bp, Eucalyptus grandis
  Intron number 1 from transcript Egrandis_v1_0.012072m (loc us Egrandis_v1_0.012072m.g) derived from phytozome v7.0 (c hr-ID scaffold_11; pos 38019128 to 38020056 reverse strand )
tcggtcggattacttctctctcgtccaacatcggggtctctctctctctctctctctctctctctctctctctctatttagatcatttacttatctgtttgattttgaacatgatttatggcgtttttccttttcttcgcattcaaagcaggcaaggcactttttactactccgcttagattttagtggcaaacacggttgagttaaggtcaatgaatgacgagatacatgattaaattatagcgaaatggtgtcgcttgtgcgtttgtcgtttatggaggcgtcctatttaaaacttggatcacttctccggaaccgataattccaccttagatatgacaaaacaaagaagggaaaagtcaatagaagagcgacatggaagcagagctcgacagaattctgctttgatcctgttcatttcattacgtatgttgctcttctgggaattgttacaatatactaaacgataacctttttaatcgggtaaaaacttcctatatgcccatgtcggcatatatcggtgcatatctttagtattgaaatgcaaaagctagtaaatttagtggctcctagaggtttggtagcgcaagttggataaactcagcagatatcttactttcgcttttaggatttccaacttactctctagttaagcagtcgatggaaagagcacgaaatgtttctccaacggacccgagaggctctcttccataatatctacgttgattactcaagctggtgttcttgacattctgtagaatattgaaggaacagtacaagataggatgtgaaaaacagccattttaggtcttaggagaaaacagtgttgctacggttcttatgtttttgaaatggtaatgtctcacagttggaacttatgtttgatatttgcagcatccactactgcaagcagaactagagacagcaga

SEQ ID NO: 91610 - DNA, 484 bp, Eucalyptus grandis
  Intron number 1 from transcript Egrandis_v1_0.040721m (loc us Egrandis_v1_0.040721m.g) derived from phytozome v7.0 (c hr-ID scaffold_2; pos 62615320 to 62615803)
gtgctgctcatttgggttttgcgtgttattctcaagtatgtgtgcgtgataaagaaaaaagtagtcttatgtcaaaggatttcgtttgtttcacgaaaaacaaataatttgaaaagtattttttttaaatgatttcttatatcactaataaaattgaataaatggaaatttttttcattgcccgctaaaataattagacataaattgttattcattgtgaaaatatttttcactgatcaattattttaagcgataaaagcgatcatttttaaaaatatatatattctaaaatattcactttttgtgaaactaacggagcacgtaataggccttctttttttaatggaagacaatgggaccttacttggtactaaaatgggaaaataaatcgaattggttatggattatacaacaattcttttcagaataatgatatatgagtgatcaagacaaatagaagcagggtgacgagcaataacaagaa

SEQ ID NO: 91611 - DNA, 714 bp, Eucalyptus grandis
  Intron number 2 from transcript Egrandis_v1_0.036612m (loc us Egrandis_v1_0.036612m.g) derived from phytozome v7.0 (c hr-ID scaffold_7; pos 49287304 to 49288017 reverse strand)
agatcgttgtgaacggtctggctaataggtacttattgttctgaaccatccttttgcccctcttcttttttaacttctgtctgttggttcacccagttactcattaaatgtaatccatgaacagatctctggcttgctcttgatgctcagacacaacattgtgttgccttgttaatttgagttccagggacttattatattatcatttatagagcatgccttacagctgtagtattttgttgattgcaacttacctcaattttttttttcaatgtactcattgtttgctgcatctttgcttattgttatggtctccatgctgtcttcatatatctattcatagcatgaataacgttcatttgatataattagtttgtgtaatacatagaagttgttagtgcgttgcagcaaagctgaatttttccacccagtgcaatttgattttgatatgagtgtgatctttgctgcaagacctcaacattaattctcttttcatggtgtgcacatcctacatgagtgagttatctcattgcttgtgtacgctaatgtgataattgggctccaacgccagcttcttgctacgataatatctgttgatgtcctctctggtttaacagtatggttgcaaaaataatgacttcatctcatttctttactattgcctattgtctttgcaaagccctgcttttcaaagatttgcagtgaggacatcaa

SEQ ID NO: 91612 - DNA, 491 bp, Eucalyptus grandis
  Intron number 2 from transcript Egrandis_v1_0.014420m (loc us Egrandis_v1_0.011027m.g) derived from phytozome v7.0 (c hr-ID scaffold_2; pos 52413894 to 52414384)
ttttctgatgtaagtaattgctgattggcaatgggccatatccctcttactaattggagcatgttttctgatgtaagtgcatgctgattggcaaccatggttcaaatgatatgcaagcttacgttaagtttttttgcatatagctaacattgaatgacagactctcttcctttaaactctgatgtgtttctggtcttccttaatgttgaaatgaatgttaactatgggcagaaagagaaaaaaaaaagtgggtgctagctgctatctgtttcttttgtcctcatggtggcattgttggacctgattgctttctatgctgtgcataacttcacctatcttatgaactggaggaagactcgatgatatttctttaactcacaggaacatatgatttatttccttttttgagcaactggagtttgttacgaaaagtgtagtaacgtaaattaaactatacttgaatttccaaaattcaaatatcttctgtctag

SEQ ID NO: 91613 - DNA, 372 bp, Eucalyptus grandis
  Intron number 1 from transcript Egrandis_v1_0.052092m (loc us Egrandis_v1_0.052092m.g) derived from phytozome v7.0 (c hr-ID scaffold_2; pos 22537733 to 22538104)
tttgtgttgccgatctcgcttccagtaagagcatataagcttgtctatgtgtgcttcttataatcttcttctaaaactacctgggactccagacgagtattgataaatcttagacatcaagtgtgcatttggtaacatttttgttccggagaataatgtctttttgagaaatagtttttttctatttctattccctggaataatttttgaataatataacgtgtttagtaacaatgcaaaatttctattcttagaataaaagtatttctgaagttagtatagggctcataagtttctctcacaaaacaaataatatgcatgtttaaggcattgtatgattcatagtattgtgatgaacagaagtgaaagtca

SEQ ID NO: 91614 - DNA, 585 bp, Eucalyptus grandis
  Intron number 1 from transcript Egrandis_v1_0.010774m (loc us Egrandis_v1_0.010774m.g) derived from phytozome v7.0 (c hr-ID scaffold_11; pos 20218582 to 20219166)
ggcttcaagacccattgtccccgtgcaagcgagaggtactaaaaatcagattttgggggggcttttgtttgccgaatagtatattcaatctctttcggtgactatttctgggatgatttctttgaacccccccggccctgtgcgataattcgtgggactcccttggctgtcttgatgttctgttcttgatgggttctgttctgtagtcttggaaattagcagacccgtgcgtgcatcttcttaggaatgttcttgtattacgttgaagatctcgtgcttctgtcgacgacgatttcttatgtggacaagtgtttgtgtgaaacccagaccttgatgagcgaataatccctctgaaaatcggggctttttccccttcaattcgtgtttttttcagaaaattctgagaagcaatcaaatggcaaatgccaaaggattttctgggcaaccaaattgaccgcagcttgtttatgttttttctatcgtatatgtaatttatccaattaatcgttaatatccatgctgattgtattcttatgcgaccatgatataggcgaggcagcgataggaggaggagcgggtaaggca

SEQ ID NO: 91615 - DNA, 885 bp, Eucalyptus grandis
  Intron number 2 from transcript Egrandis_v1_0.009998m (loc us Egrandis_v1_0.009998m.g) derived from phytozome v7.0 (c hr-ID scaffold_11; pos 20601251 to 20602135 reverse strand )
cgatatcgtctcttttccctttcttgtatttcgtactgtatctttcttttttcttttcttttttctcttagcttacttgctcatgattttaaatttgattatatttgtttcgctctgaaaatcaatgtctcagttttttaaagtaggtgttatttgcagattatgagaaggcatgcgcatttacttcattaaatctctaagattccagtcgcttgattttagtcttgtatctgtgtatggagatgatcaagcatgttgcataatccacatttagatacctaaataaaaggctctcaattcaggcttattgaagtttgctttttctttgagcctgcatatgctcatttacttcttttactctcttagatttcagtcacttgactttagtcttgtaaatgcgtatggggaattcgagctttaactaaatcttgctttctcattgagcctagcttggttggatgccctttggtggcatgcaaagcatttctgatgtgataatcattagcattttatctgtggttgttaattaaggctgtggttgactgcatgtcactgttctttgcccagcccctgaagatcagtaagatggtaatactgctggtggagcgagttccactttttcagtctttttggtccaaagagcctcagtctttggttcattgacacattcccaaaatgagatgaataccaagattatttcttcatgctttcttctatatgacttttggcatcagacaattctatatctatgagcacgagtgtttgcactagatgctatttatagttgaaaatcttcactttgactttttaggctttactaatgcagagcttgttatttcaccttctccagataagggacttcaaaatagccaagagagaagaaga

SEQ ID NO: 91616 - DNA, 970 bp, Eucalyptus grandis
  Intron number 1 from transcript Egrandis_v1_0.016173m (loc us Egrandis_v1_0.016186m.g) derived from phytozome v7.0 (c hr-ID scaffold_2; pos 42275084 to 42276053)
agaaccctcgaaagcttcgagtttcgtcctttcaggtattgctcccaactgggttctctgcgttcttctctcgctcttcttctttcgtcgcttgtggcgctcgactgtcgtggagttttaggtcgtgggttacatgggcttgctgcgacggcaaccttaaattttgggttgggtctgtcctgttgcggtcggaggtggagtttggctaatttcgctactttttttttttctttttgagtaaatatgaaatctgctccggcgttaaaggtttaggctgatcttggtttttttgttttgatcgggggttgagcctcctagtttttcttttattttcttctctttttgaagatgagagggagctttagctacccttttgttgcttgagtgagaggttgattgaacactccaaagttccatgcttttaaatctggttggagtacctaattcggtcttggatgaaaaggagaaagggaattttatgcccctttttttctttttttctaactttttgatagctcctgcgtttcgaaatgattttataaactctggatttttggttgaatgaatgcctgaatgtcatgtaattgcgtcctaaaagttgtttttttttttttttttggtaatgcgaatgcatctggaagagtaagaatttgatttttgtttgtttttagttctgcttgtagggccaaagagaatcctaatgactaaaacgtcaaacaattgttcctactgcaagaatttcagtctgtaaatatgttagtgtggaatctcccatctgtgcatcgatgctttatcaagagagatcctactgcgatgattgttttttgatgttcagatgataatatcaaatatctcgtgttccgccacttcgctttaatgagtttatttttcattatgatcgaagtaatttgtctgagttctttttcagatcacaattaggtctctaatactatttcttcataactgcaga

SEQ ID NO: 91617 - DNA, 842 bp, Eucalyptus grandis
  Intron number 3 from transcript Egrandis_v1_0.016583m (loc us Egrandis_v1_0.011742m.g) derived from phytozome v7.0 (c hr-ID scaffold_11; pos 40231296 to 40232137)
tgtactgcagaaattcattagaaacgtcgagaactgtaagtagatcattatgttttctcaatggtgttctatttttcttggcaatcagatttagaagcacattgaatagtagtactttttatctgatggctggattatcatgtcacgtagattggtttgccatttctttttgagcagctgtttgtgtagatctggttctttttctccctcacttttttcttttcttgtttttttttgggggggggtggtagtggttttggatttgcatggatgctaatgaagcaggtatatttcatcgtatttaagtaatgtgtaacttcatttgattgcacatgttcttgcactcatacatgaatccttgaattgggagaaaacagagtaatatggaggtgcgaggggccaggatggctatctttacatggtgaaataattgttctagtgacagtgtttactaaaagatgtctcatgacatgcaatgaaatgtttagaatacgtataagaatccaaaaggacgtcaaagaagacttacaaaagatttttaatgttcatctttacgtgataaagcgcaacagcatcaaatgatccatgtaaccaatcctatttgggggggggggggggggggggggggggggggtaggccttggtggttgttgttttccctatctatacttcctcagagaagtcctagccaaaaatggtattcttttgttgttacatttaatgtattgctgtttcgatgaacatctttattataatctattgattataccttgatttgacgattcaaagaccctctaatttactagatatgcaaatttttcaggcacgtgcggtgttgataa

SEQ ID NO: 91618 - DNA, 434 bp, Eucalyptus grandis
  Intron number 1 from transcript Egrandis_v1_0.000018m (loc us Egrandis_v1_0.000017m.g) derived from phytozome v7.0 (c hr-ID scaffold_11; pos 36404176 to 36404609)
cgaagctgtcttccgataaggccaaggcccgagaagtaccgtcgccttcctttctttcctctttctttttttctcggtaaaatggaggaatgttaaacacgttcgatcgatcgattcgggactgtctaccgccggtttctgtaaccgaactaaagaagatatggagaatcggttgtttaaatcgcatgaagttatcgtggagaccgagttaattattcaagaaaatcctgaaattcccgatcattaaatcgtatgacgttttcgcggagacagatttaattttcaagaactgcgttaagtagttgcacgggcttgtgttaatcggataagttcgcatctgtatcgtgttgtggttgtttgctcgttggccattgaggttccttttgattttgatacgtgttgtgtcaataggagggaatcaagttgttgaacat

SEQ ID NO: 91619 - DNA, 830 bp, Eucalyptus grandis
  Intron number 1 from transcript Egrandis_v1_0.023028m (loc us Egrandis_v1_0.023028m.g) derived from phytozome v7.0 (c hr-ID scaffold_7; pos 39918124 to 39918953)
ctcttcttgtaagtctccttctccccttttagcttccttcccttttcccctggaatctttttccctttccataagccaaaaaagctattcaatagtcatcgttcaaggcttttgaaatggtgaagaaagggaagaaaaagtgtctggcttttcttgttttagcatctgggtcgccttcctttcccctcatactttgttctctgattggtttctctgacaccaggtgctctgtttctgtcccccgcttttgtacatagaagaaaatgatgtcttttgagaacacccctttcattcggttgttcgttttgtttggtaatttggtaccatcaagaatgtctttttgttttgctgtcaagggaggatgctatcttttgcatcttctatttctttctcatacctgttcttgtttgatgatcttaatttttcggtgcaaagctggaaactttttgttttctgaacgtcacgatatgactctgttacattctaatccatttttcaactcatttgttgatagtatgaacagaggcaatttgtcttctgttgatagtctcccgttctgttattgctctttaccttctgcacgttaatttcaagagtacagcttttctttagctctatattgatttaggaaatcattgtcaatgttcgaaatagttgattcgatgttttgttgccacccctttgtctctgtgattggcttccgctgttttctctttggatgtctctttggccttttctgtgtccttggcttagttgttgccacttgttaatcatcctaatggtctcctgtttcagaagtttgctaaaagagaaggcatcgaattgaattg

SEQ ID NO: 91620 - DNA, 642 bp, Eucalyptus grandis
  Intron number 2 from transcript Egrandis_v1_0.023028m (loc us Egrandis_v1_0.023028m.g) derived from phytozome v7.0 (c hr-ID scaffold_7; pos 39919249 to 39919890)
ctcttgttgtggcagcttgaaggttagttgagtcgtcctttctacattttgtaagatgttgttcatttgcttttgtccagtgatgatttctatgaatcaacctctttgtaagtttcatggaggtcgatatcatttatctgcacaagtatcatgcaccaccagcccacgtcaatctgttttaaccggtctaacagaaaaagtacctggaacgatttttgattgatgttcttatgtaattcttccttgtattaaagacttctaaggtcttaaacatcattagctcgagcagcaatgctattaatttgcccatgtgacatgtggtaggagtagaaaaatgtaccaagaatgtggatgggatgtatttcctcttaaaaaaatagaccgttttcggtttggaatactttatctgcataaggcgcctctggtgcaattgcaaagttgttaatggacttcattgttgatgtcatgcttggtcctgctgcggcagatgatctgtgtcctgttgccagatctttcatattagagtctcttgccagctaacaagccaattctgtctttcgtttgtatggttccaccgcatagtttcagtcctctggctgcattttgtttaatcattctttcctctttcttgaatccttcagt

SEQ ID NO: 91621 - DNA, 669 bp, Eucalyptus grandis
  Intron number 1 from transcript Egrandis_v1_0.008383m (loc us Egrandis_v1_0.008383m.g) derived from phytozome v7.0 (c hr-ID scaffold_11; pos 32205224 to 32205892)
tttcttcactgggtttctcttaaaaaccgtcacttgtatgtgtttggctctgactccgttatgtcctgttttcggttcagcgtgtgcaagtggtttgatggggaagtggggtttggtgggtgtttgatttcgtatgttagttgctatgtatctgtcatgaccttgatgaggtgtgactcttttggctcaagtggctcaagtacttgtagcatttgcacggctgaatcatgaatcttgattttgaagcttcgtcgacttttcatttgcctgttgctggtagcaaacttgtagtggcgtttcttctacttttggtctccttaccagatgcaatcattgactcccatttctgttggtatttcctaaatttgcacttcataacatcctagatgttcttttccatagttgctgtctgctagttgttcaatctgcatcttggatcttctttaggaaaccattattgcaattgtctagagtaatgtaattttctgatgtgaattctttctattctaaaactgaatgcacctgttggtctgtgcatttatgtgctgttactgaagaagtttttgtttttcaaagtctgcagaaagttctgaactttgtcctgcaattgctcattcttgaatttctttatcagctggaagattagaaaatcacgtcttcgtggaccat

SEQ ID NO: 91622 - DNA, 1014 bp, Eucalyptus grandis
  Intron number 1 from transcript Egrandis_v1_0.024603m (loc us Egrandis_v1_0.024603m.g) derived from phytozome v7.0 (c hr-ID scaffold_7; pos 36858038 to 36859051 reverse strand)
tcccgattccggcgacctgcccggatctttctcaggtaccgcgctcgtccgggtttttctccgaattctctctctctctctcttcttttgtggtcggcgagaatcgcgagacgggcggcgtaacggcgcggccgcggcggggatgcggaggcggaggcggttgggggtgggggtgggggttccgcgccgtggaggggtcgggattggggcggaaggaatcttgggtcgccggggggttggggcggcgcggccgtttccgagtccttcgacggccgattgtttgttgattgaagaagatggttcttggacgccccgggagtgaaaaaaaaaagtaatcttttgaggcgggtcgaggttcaatcgcgctgcccgctagtctccctttgcatggctatgcgatgaatgtgaattaaggcttggatttggttgagatgtgtttttgtgttgatgagaagagatgatgatgtttccggaccgttaaaagcatggtctttgacgcgggaagatggttaacttgaggcggaagttttgatctctctcggattacgcctcgctagagtcacctcctttccgtggcgctgccatgattataaatgaatccttgcctttggttttaatgtattctgtgtttaccaaaaaagatgtcgatatttccggtcctaaaaagatggtcttgggcaccggaaaggagtggatttgaggcggtttaggcattaatcacacggattgtgccttgctagagttgtctcctttctatagctatgcgatggatattaattaaaccttagctttgattgtaatgtattttgtgtttaccaaaaaggtgctgatatttccagactgaaaaaagaggatcttggatgccgggaaaaagtaaagttgaggcggatttggcatcaatcgcttggattgtgccttactagagttatttcctttccatagctattgatggatattaattaaaccttagttttgatcgagatgcattttgtgttgaattagatagcgaaattg

SEQ ID NO: 91623 - DNA, 652 bp, Eucalyptus grandis
  Intron number 1 from transcript Egrandis_v1_0.004430m (loc us Egrandis_v1_0.004430m.g) derived from phytozome v7.0 (c hr-ID scaffold_2; pos 60720107 to 60720758)
aagaagaaggcagcacggcaccgttccctgaacgcgtatgtttttctcttttgggcgttaattttttttccccagtttttgggtacggttggatggtgctacgtatggatactgagaaggtcgttttttgtgtggtagtttggtgttatgatatctttgattgtttaattgcattgtagtttacatataattaagtagaaatgcggtataatgaagggtgtttagattgagttaaaaatttgacaatccactcgttgattgtttgatgtttgagcatttcgggtggaataagatccgctacctaatcaaaaggaaagaaattaaattgttctcgcaatctagaggctgcacgaattatgatatcggcggcgtaattatggattgtcaaccatagattttggtgaatatcttatgttatggcatgaacaacttgtaacgagtattatgtcaattttttgatagtaactcgcttataatgatgttggacgtgacttatgtcgagtgatcatgaaatatctgtttgttctgtagctgtggatcaagattgaggaaaaagataattgctgtgctaattagggatttatcttaacttctctgtttcttctatatatatgaaggtacaagtgggaggatcaccaacttacaagataga

SEQ ID NO: 91624 - DNA, 936 bp, Eucalyptus grandis
  Intron number 1 from transcript Egrandis_v1_0.004168m (loc us Egrandis_v1_0.004168m.g) derived from phytozome v7.0 (c hr-ID scaffold_7; pos 46696388 to 46697323 reverse strand)
acgacgaggtggtcgcctttttctttttctttttcttatttttatttagttttgttcttttgatatctttgcggttggcatttggagctgcacgagttagttgattttcttgtcgtcggatttaatttgcgcggagcacaatatctagaagctcgcgtcgcggattgtgaacggtgtggttggggttgtgattttgccgcgctcggtttgttgctgttatcctggatgtcgtcttgtcgtatcgaatatgttctggacgagctgctagtttccgaatttagtttgcttggacaatttgcgaaagctcgctcgcgggggtttattgaatacggttttgttgctgttggacgaggagtcttgttctaggaattgtacggtcattgatttatgcagaatgatacctgaaacggcatcttctcgtggttttgtcggcttcagagacacggtcctggtcatcttgcatgaatgaggcatgttcctttaccaatagaatgagtggaaatcaactgagtgtgaaatagaatgatcattgtgaaatccatctatgttgttcagtcgtgtattagtctcttcatattatttctattcgtgcatcttagtctgaagtcttgcacttgctgatctagagctatcggttatcaaatctgatgtttcccgatcggttcacatagcccttacagatgataggaagaattccccaagtaaatggacagacaacaacatcgcaacaaaatccaactatttgtgtttctactgttatattaacatatttcttccagttgtttgtaccatttaaatcttatatatacagcattaatcatctgctgtggcagctgagagtccttttctagttccatctgttagggaagggccagctaacagaatgattccctttgttcaggagcccatcagaagtgcagctattgactcttgcat

SEQ ID NO: 91625 - DNA, 929 bp, Eucalyptus grandis
  Intron number 2 from transcript Egrandis_v1_0.000305m (loc us Egrandis_v1_0.000305m.g) derived from phytozome v7.0 (c hr-ID scaffold_2; pos 53291496 to 53292424)
caccaccgagccgacgactccgtccgcgaacccccgtaaggactcgaaactcggaatgcgtgaagcccgtggcccggctttgcgttgtcgcttgtgtctgttaagtgcgtaggagtacgattgtggagcaattgattaagtttccggtccaactgaaaatggtcctttcgttgtaaggtgaattagatggtttttgccccccctttgcgtgaagatgaatcaaagtgaaagaaaggaaggacgatggaagatgatggagttttagctttcttctttctgtatagaagataacgtgttcatctgagagcattcttatccagcttgctctgtttttctatatatatagtacatacgccttccaaagaagtaaaaacagctaatgagagaagaaaccgactgatataaacagaaaaagaaaactgttagctcaattgttagacacgccaaaactgaataacagttcttcaacaacagatcttcgcttatagttgaacacgtggagtttggaagttccatcaccgacttcatagctttcccaattggctgatcctgaactcctctcccgtatgcggctggcatggtcgatgacttgcttcctgacttgcatacttcattgcctctgatctttgttacagcagcaacaccttcattcctttccttcgtttccttcgttgaaacagcaacagagcatgcttgtgcaggctgtgctttgagattcttaacactctgtgccctaggtctaagatgagaaggtgattttgctgtccgaagttgggaagggaaatttcgatgtgtttgttgtttgaataagagttcgacttctgggtattgttgggctgtgcgtcggatgcaatgaggaatctttggtggtttgcttccttcgggggttaattctgcttcaatttgcatctaaatcacctgcaggaata

SEQ ID NO: 91626 - DNA, 385 bp, Eucalyptus grandis
  Intron number 2 from transcript Egrandis_v1_0.001911m (loc us Egrandis_v1_0.001911m.g) derived from phytozome v7.0 (c hr-ID scaffold_2; pos 9023817 to 9024201)
ggattcccaagtttgacattgcagacctagagaaggtattgtcttttgtatgcattttcatactctatccaagtataagaattttctttctatcttttcaattgtatagtctacaaaagggcaaataaaaaggagaaatatctagctagtcgatttataaaagaggggactgatccttttaatacagatacgaatggcgttgtcatggaagtggtttataggggtacacagatttataaatgccatttgaagaaaattcctgccaaatgcctactagtcaaatcttcagacgcccttctatttgatgctttcacaagcttcttcgtttatttattctttccagtataaagttctcattttgaatgttctaataatgaagggatct

SEQ ID NO: 91627 - DNA, 761 bp, Eucalyptus grandis
  Intron number 1 from transcript Egrandis_v1_0.031297m (loc us Egrandis_v1_0.031297m.g) derived from phytozome v7.0 (c hr-ID scaffold_2; pos 20244771 to 20245531 reverse strand)
aaggtttcaagagcttaaacgtgaacctagtccatgtgagcagttattcccgtgtgatttggtcgtttcccacatttggtgctgcttcgaggaatcgaagcgtcccttgccatttgatcatgctcggaattctgagaaatgtctttaaccagtagtatcggagtcgattttcatctcaatctttcacaagatcgagttgatggagtcacgtcagaattcggcgttcctttttttcttctctgatatttcggcctcgtaagttggtgaaaccagaaacaatctccctctcatttttcacactgactgaggaatccccttagcttcgcatgctgaaacgaacgagtacatttttagacaaatcttgtgaaagtttccatttttaggcaaatcttatgaaattttccatatgtttcgtactgtgtagatgaatttttatacagaagtacatgtggctgatctgtaattcagatgccattgcaaataccttgttgtaacctttcaaaagattggtaggtaatgcatggacaagaattctgtggatagcagctttttttttttttttttaatttctcataacactttttcttgtctggtgaaggtattgaagtcttatcagcatttgtatttctcctttttcgtagtcttcctactggccaaaattggatcggttgatgattgctcactttattgattgtttttccatgctcatggttatttgattcttagggagacatatacaatcaaaagagtctgttgagtgc

SEQ ID NO: 91628 - DNA, 736 bp, Eucalyptus grandis
  Intron number 1 from transcript Egrandis_v1_0.017767m (loc us Egrandis_v1_0.010404m.g) derived from phytozome v7.0 (c hr-ID scaffold_7; pos 45535592 to 45536327 reverse strand)
gctacacggcgcccgtcgacgccgacgccaagcaggtgagcgagcgcgcgcgtgggggcgaccggcggtttcgggataaaaaaatgattcctttctcatgctttgatactttcgtgcgtctcgtcaggagcagtttcagtcaatttttttaagtcagattattcataaagaaacgatttttacaatacccttttgcattacacaagacgaggtgaactcgcagctttgaaaaacgaagaaaagttagcgagcgtttagaggcgctgtcggattcattaataaaaaatctgatttttacgagggaaggggtgtgggtcgtcgagcctttttgacttcagcttatctgcgccttgatgggaacgggtgtcctgttgtggagtgtttccccacttgccgtgacggcgcgtgggcagcagacgccgctgtccttgcactagtccagcctggtactcgacgtggaagctttggttggtccgtgtcgtccggtagatcgactctggtccttatcagtgcttgacagccatgcaaccggcagagtttcttttggtactgaactcgacccaattgttttcgagccgtttcacattgaggatgcgcttgtttcggatctgaaggacgtttctttccgggggatttgatatgtttgttatgaggcgaaagatttgacatcgataggccccagtgacgctatcccaatgcaggtgacgaagcgcgtggacacggaggagaccgagtg

SEQ ID NO: 91629 - DNA, 946 bp, Eucalyptus grandis
  Intron number 2 from transcript Egrandis_v1_0.031559m (loc us Egrandis_v1_0.031517m.g) derived from phytozome v7.0 (c hr-ID scaffold_2; pos 48198456 to 48199401 reverse strand)
aggtacggacgcatagatacgatctgagtgttcctggttgaatatcatccctcttgtaggagtcctgagtgcgagaacttattttgaataaaaatttgaccatcgtctgaagaaacgtaggcagtgagatcgtgggtcatgatttcagatacttttgggatatactgcaatcctatgtgcggataagaaattctgaaatgaattgatgatgatgtggaccgtgagggattcctctaagtattggatcgttctcttattggctctgaataatttttttgaggcaattgtgaagcctttttattttatggttgcactatttgaacaagcgggttgaagtaaaatgggcatctttggccaaaaatgttgctgacttttggtgggtgggattttataaatcatgtagcacttaaatgggtggttcaacctttgggagatgcctgtcttggtttttctagtatctcgagtgatcagttttctttcttggaggccgcaggtccttttgcaggaatctagaatttacctgtatgagattcaaacggctggaaaacgtttgtttgcatgggtcattctttggttgagtgggacatgaaatagccatgtataattttatttaatgatgacattttctgaagtgcctgagatttactctgaaattatccatggtctgttatgcgaatcacagtattgaaactgctttgagatgtattagtcaaaacgatagagagattaaaagtgttcctggcaactttagctatcagaaatgagactacatttaccgctgtagatccttatcttggcactgtacatgtgtgcactttagttgcaataaatcaatgcaacgtaatgctggctagttcaccggagattattttgatctggaaattcttgaatgatgcgaatttactgtgtaggacactgtcactgggtttttactggctggtgtcgg

SEQ ID NO: 91630 - DNA, 488 bp, Eucalyptus grandis
  Intron number 2 from transcript Egrandis_v1_0.003090m (loc us Egrandis_v1_0.003090m.g) derived from phytozome v7.0 (c hr-ID scaffold_2; pos 21620079 to 21620566)
gtgttcttgccgctgcttcctttcttgatcttcaggtaattgctataagtgtgcggaacctattgttcttcatcgtttttgtagatttcattttgttttttacctgtcaatctgcaattgcggtttacctgggtgcctactgttcttcgtatgttgcacactttggttttctccatagttccaccaagtgctcgacacgttggtcctctgatgctatctaaatgatcctgatttgcccaatgtctgtttcgagattgtcgttatgaagaaatttgtaaattaatctattgaaagtcaaagctagcgtaaattttcaacactcaaggggtttccatgtaattaaaattatcaccttgtttcaagggttgctgttacacgctttttgctttcttcatatatttctgggaatgtattttattttcatgtatatgcttttgttgggttcactttgcatattagtgataacatcatgatgctctgcaggacct

SEQ ID NO: 91631 - DNA, 733 bp, Eucalyptus grandis
  Intron number 3 from transcript Egrandis_v1_0.030235m (loc us Egrandis_v1_0.030235m.g) derived from phytozome v7.0 (c hr-ID scaffold_7; pos 43293414 to 43294146)
ctgaaaccagatcttgttcgtgccatatccgagcggtatctactctattctacttaacagtttcttctttgattagtgcgggggaaaaacagtatctttaatatcttgaacgtttatctgtgagtatggaggccagaagttagggatgattactgtgaggggaaagtgatgtgagatgccaaagactcaatagatagatggcaatattttctcaagcggtggaagctgattattctggccaaacaacaagcactccccccacatttaggcattgcatatcatataagtctgttcactcatttcatgaatagaagattctattttttgagaactccttttgttttgcccttttttcaatctgcagcttattccctctgcttctgaagcttatgtctctgggctgtgacataagcatggatggctgtgacatatatgtcaagttgtcatatatcatctggaagttggaatcgaatccctgcatagctcctctttagattcctaagaaggttgattttggcttaattttattagatttatctgggttatggtttatgagtaaattgtctagagggtctcttctaacacaaaatggtggtatattatcaagctgaagcgtgccatgcactagtaagttgaacaatggatcggtgcaattatttagctgatgcgtggctgacttggcccttgtttttatacagggataaggtttttgaacaacagaagactttgtatc

SEQ ID NO: 91632 - DNA, 651 bp, Eucalyptus grandis
  Intron number 2 from transcript Egrandis_v1_0.032330m (loc us Egrandis_v1_0.032330m.g) derived from phytozome v7.0 (c hr-ID scaffold_2; pos 33094107 to 33094757 reverse strand)
cttcctgtgagtactttttttttttttttggggtcgattacagtactactgtaagtatctttcttgtggagtagattgtaggaattctcgcctttccccacttttgaacaggcggctaaatattaaagattaatttatttcctgtgaactgctttccaacatgtatttctatgccatcggcaaatatatttgcaagttctttaactcctgtcatctggaatttggtttttctttgtgtacagatgcatgttctttcttttattttttgagaaaaaaatcaggctaagaaggagcttgtctttcttgaagagattaagtgttaccgataatttctcacgtttcttcaaatatactattgccaattagaggctataatttggaagtgcggcaaaaccatgtacatctctatgttctgatttgccaaacactgcttttttgttcccatgcccattctttcatccttctgctgctgtaacactcatcctgtaatactttagtctgtcgtaagactgaactaatcctcaccgttgtgttgcagaaaaatttcaacagatgtttttggcatcatgtcaatttaccttaaatggttggtgcttcctaacaatttactaattcaagtaaatttaacatcttgtccagggtattcctgca

SEQ ID NO: 91633 - DNA, 372 bp, Eucalyptus grandis
  Intron number 1 from transcript Egrandis_v1_0.044030m (loc us Egrandis_v1_0.044030m.g) derived from phytozome v7.0 (c hr-ID scaffold_2; pos 22564088 to 22564459)
tctgtgttgtcgatctcgcttccagtaagagcatataagcttgtctatgtgtgcttcttataatcttcttcttaaactacccgagactccagacgagtattgataaatcttagacatcaagtgtgcatttgataacgtttttgttccggagaataatttctttttgagaaatagtttttttctatttctattccctggaataatttttgaataagataacgtgtttagtaacgatgcaaaatttctattcttagaataaaagtatttctgaagttagtatagggctcataagtttctctcacaaaacaaataatatgcatgtttaaggcaatgtatgattcatagtattgtgatgaacagaagtgaaagtca

SEQ ID NO: 91634 - DNA, 402 bp, Eucalyptus grandis
  Intron number 1 from transcript Egrandis_v1_0.043689m (loc us Egrandis_v1_0.043689m.g) derived from phytozome v7.0 (c hr-ID scaffold_7; pos 27910065 to 27910466)
agtatgtttaactagttaggcacaataaatttttttttttttttttggtctttgctttcgaaagagtttgcttttttttatttattatggtagataataattaatggtctaaattattttaagctattctaattaaaattaataaacttcatgatagaggacagaaccttagcccgatttgttttcaaattttcgtttttcacgagagcaaagaactctttattgcagaagaagaattcaacttcgaattgcttgatatgttcccaaaaaggcgcaagaagcagttttaaataaaaaaaagatcaagcttgatgataacaaatatgcatgaatagatttgactcatacctctaagaggattttctttttgttgttttttcagcaacaagggaaaagatctgt

SEQ ID NO: 91635 - DNA, 769 bp, Eucalyptus grandis
  Intron number 1 from transcript Egrandis_v1_0.013806m (loc us Egrandis_v1_0.013806m.g) derived from phytozome v7.0 (c hr-ID scaffold_11; pos 19128994 to 19129762 reverse strand )
cgtcgacggcagaagcaaggtctacagagaactcggtccgtctctctcgcccaattccattatgttggtctttctcgaatgctttcatgtgggtagttcttcttttggtcagattaagatgggagtgctcggttcatttgcaaatgctcaagatgatagatggttcttgctttattgagaagttctttgacgtgttgttttagactgcttgtgaagaaatccagaccggttcgtggtaaaatgaaagagaaagagtgaacttttccggattttattggtcagacaatcatgtctttcgtgtaaaatttgaagtcagtgcgtatcttttaggcctgaatctttctcatgaggcctcttgcttgtcttactacattaggcgaactcccatatgtgagtggttcttgctttttaagttatcaccctagtggaaagattcttcctttcttgttcctcagtgttccaaatatgcttggtttcggagtttgctctttggaatttcgaaccagggattcatttgatatctatggttgccgttgcaaggaagttatgtcgaacatgttggaaaaagatgagttttgcaaaatgtgagtcctgtcagaggacttgaagtcaagtttaattttcttgtataatctgacgagttctgagaaatgtaagcaaaagtgtttctgggatgttggtggggtaaaaatctctgcagttcggcttttatgtaaaatttgtatttctttttctccaggattgttttcactaaaaaggaagatcgaag

SEQ ID NO: 91636 - DNA, 811 bp, Eucalyptus grandis
  Intron number 3 from transcript Egrandis_v1_0.009970m (loc us Egrandis_v1_0.009970m.g) derived from phytozome v7.0 (c hr-ID scaffold_2; pos 816840 to 817650)
tgtctatcttcgtcgcagattctgtaagatcgaaatggagtgctgcaccttttcttatcgatggtttgctctacattaactgcagattgggatgatgttgaaatgctccaaaattcgaagctttttccttgggcaggattttggtgcagtgcattctatccttcttaacttgtaacacagctaatatgtaaaattgtatctgctcattattttccgatagattgtatatgacatgtccattatcattctatcagcataagctgacttatctctgtgaggacattctaaggatgccaaatagcagatcccacgtagaaccattgttgggttgccagaatctacatagagccacttggaataatgccagtgtagattatcatgtgtcgtttgttttttttactgcaatagctagtggatctccattacttattggtcaatctgtcctcatccatatggtaatgtctgagaaactctgaattgactttccttggtttttaatgtctagtcagcactgttccacatcagagtagtggttgttgtgtgatcatgaaaagttttgattatttaatcatttccagtgagggagctggccatagaattttgcttgtatggttgaaaaggctggtcatcaattttggtttctggacagtcaagtactgagaatggtttataaattttttgggtgcatgcattttgaacaagtggtagttttgattaattacaggaccttaaaattattgtccttttcttatgggaggtactttttcatacttcaggtctgcttacatattaaagcaagaaagtttgcctc

SEQ ID NO: 91637 - DNA, 884 bp, Eucalyptus grandis
  Intron number 1 from transcript Egrandis_v1_0.010506m (loc us Egrandis_v1_0.010506m.g) derived from phytozome v7.0 (c hr-ID scaffold_11; pos 19738102 to 19738985)
ccttcggtgtcgagcagcttgcactgctcactcaggttccgatatgttttatactcccagaactaacatctctatagtgttcatgggatttcttttgcttttgctttgtgggaacattgcttgatttggggtttcggatagttgggatgggatttttcttctttttttttgggattttggaggtggaattgtttattgagtgccattactattagtcttttcttcgtagatgactcaaataaattatggatccatcatggagtgggtgacgctaggtgtgttaaaaaacaaatttaggctgataaaattctattattttcccctcaaaatatcagaatatcagaatatcagggcgcatctccttgcagatattctttctactctactctcactgatttctcaaactcaattcactttctcttttgttcatgatttgactttgttactttagcagttcaagaccttcattgaccaatttgattcaactgtaaacctaaaaactagagagatgtaatggagttgatttcatgcacaacttggggtttcttgaaatggttagatctaccttttagtggtaactctcaagagctttctacatttagctatggtgatgatcagtcttgtcttccacttcacaaaacttcccaaatttttcccgacattcactttcctcatttagaggttttgctcatgagggtaaaaaagaaaggacaattgccaccgaaagacttgttctaagcaccatatttgtgaaagcatattcctatcaatttgcacttcaaaaaagtttaaatttactacaatgatgcaatgcaaagtcacatttcaatgaccaattttctttttgattatggcttgtcatttggcagaagcaattagcaagc

SEQ ID NO: 91638 - DNA, 567 bp, Eucalyptus grandis
  Intron number 2 from transcript Egrandis_v1_0.050033m (loc us Egrandis_v1_0.050033m.g) derived from phytozome v7.0 (c hr-ID scaffold_842; pos 9909 to 10475)
tagagttgacaagatctcggtaaactaactcccagactacttccttgcgcagaatcatgtttccttgtgtcgctgcttggatgattatgcttggtcaacctacctcctccttttcatttctcgtttggtcattcctctgctccatcagtacaataaagttggtggaatctgctcttcttgtatgttgaattccattgtctaatcaaactttagttcgtcgtcagtatcaagtaggtgttgaaatcatggtgcttgagcagctgcctttgtataaatacatgaattaggacacttactctttccattgaatcagagtatatactatgttcatttcgagatcatgagtttgtaatgtctaaggagcctttttaaactgaagtaatttgatatcgcctggttattgagtactggtaatgtagttcttattatatgagccaccagcgtaggcgatcatgtattaaatattctctctctctctctctctctctctgaatttcaatccctctgacattcttttttctgccacttccagactagtgtcgcagagcaccctctttgaccatccga

SEQ ID NO: 91639 - DNA, 709 bp, Eucalyptus grandis
  Intron number 3 from transcript Egrandis_v1_0.025142m (loc us Egrandis_v1_0.020240m.g) derived from phytozome v7.0 (c hr-ID scaffold_11; pos 36695515 to 36696223 reverse strand )
cggtacagttaaattgtttgtgcttgagttttctgttccgcatcatagggctgtcatattctgcttcagtgcgttcaggcttttactatcatagccctgagatgagtttttggtagaggtattctttaataagcacatacatgcttgcaaatcagagcagctgagattgttttcaacatttagtctgtgactttggagtttacatacctatatgtctatctgcaaactaggtatcacaaacacaacctctataaactcgataagaactgaaacaatttccaacccaaaagtggaaatctacctgaacttgtagaaagagggccttcgacattatcaaattacaacagccaatgagactttgacattgggatatcttataatgtcttgccatcttgaaaaccccgattcatttgtcagaagctatttgttttaatccaactatctacaacatattgttttttgtggaggatctgacattaagtccttgatcaatataatttctttgagacagttttttagttttaccagctttaaaactttagttatgtttgctatgacgtattaagtatcctgtgtcagagtatgcccttcagcactagtcttttttgaccgctttggtgcatcatgcctttcagcactatgcacttatcacttgtttgattggctttatgcaggtacagggaccgcttaccattgggcctttcttaaa

SEQ ID NO: 91640 - DNA, 544 bp, Eucalyptus grandis
  Intron number 2 from transcript Egrandis_v1_0.025142m (loc us Egrandis_v1_0.020240m.g) derived from phytozome v7.0 (c hr-ID scaffold_11; pos 36696870 to 36697413 reverse strand )
gaagtgtcaagaggttagttatctatctacctatcaactcgttcgttgcttgctgaagcttcggttcattgatgtgaaattcggcaatgatgatggggctgttaggttttcctttcttaaggtcttatttgattggattgtcgattgagggatatatctatttgattagtttgagaactaattgatggctcctcaatgtactttgttgatgcttcaccatgttgggtttattttccctgttggtaaaaaaatgtggaaaaagtgagcagtaagggcaaggctgatgaaacaagctgctttcagtttgctcttctttgcatttcattatggcgtatttgcatgtcataaactttttttatgtgagaaaagatctactctgccgatgattttttcatttttgtgaagaggatctcgatccctgcaaaaaattaagaactgggatagggacatttagtttccttgggaaggctgagcagggaattaatctgaagtaagtctttgatatgttgcagacggagggccgagagcaatattaagagcttga

SEQ ID NO: 91641 - DNA, 910 bp, Eucalyptus grandis
  Intron number 1 from transcript Egrandis_v1_0.011616m (loc us Egrandis_v1_0.011616m.g) derived from phytozome v7.0 (c hr-ID scaffold_7; pos 46707048 to 46707957 reverse strand)
ccgaacgcagggtacctctctctctctccctccccttctcctccttcgttttttctttccatttcccgaagcgattcgcgcccgcgagtgcgtcctgcgttccctcgagatcgcggatcttgagctcggaatcgccgctcgtccgagcttagattggttgactgcgtcgtcgatcgattttgactgccgagactgtgtattggagtgcgtggaattccttcttaatttatcgaagcacgtggaatcgcttcgtaccggaagtgataagagtgacggggcttaggtccttgtcgagccgtggatggacgtcgttgtggtcgcgagtttgtttagaggggttttggagccgtggattttccgacataagggatcgagtcgtgttacgtatggaatgctgcttacggtggcggtcgtggaccttgtggacgattctcctcttcatttgatggttactcgggaatgattagtttataggaagtttgggggaaaagatggaattttgtttgttgatgatagacttttcactgcctcagtctgccacagcttctcaatcttgtcgagatttctttttcccgtctgtctatcactgtgaacaggaagagccagggagtagctcatagcttattcaattcctccgtcccatgaatgttggttcaaagatagttttctgaaaatgcaaggctttacagtttattcaatatgacgctagaaactaagaatggcctttctggtagttgtttgtttttcctgtcccttaagttacattttcatggtacatcaattgcataagataccactgattactcatggaatgtttctttgaacattgctgatgactgatgcattttcctttttgtgctgttaacttcttgcagattgacctgacttctcacatcattaaggttttcct

SEQ ID NO: 91642 - DNA, 518 bp, Eucalyptus grandis
  Intron number 3 from transcript Egrandis_v1_0.050779m (loc us Egrandis_v1_0.050779m.g) derived from phytozome v7.0 (c hr-ID scaffold_7; pos 49343003 to 49343520 reverse strand)
agaaataagcaaagtacaggttagcttctagctggtttaagtctgcattctgagatacctgcatcgatgcatagtagctttaagcctttgaggttcttgtgaagctcttgcttcgtagcagcaaaggatttgaaagcagacattcacgtgttgagtggagaaatgcttccacaatcttggttcccaataacatgttattcatatgcatcaagatggtctctgtacgatatggatatgggcatctcttttagcatatttgaacgggagacgtgtatctcaaatttttgatctgagcccccgggcagaaatcacaccgtgtgcacctcataaggcttgaattttttgagctttctactcgtgttaatgcgtacttaatgcatggatccattcctgatcgctacttggatgtgctcattctttcatgggagtctcttagattgatctgtatttgacattttagtcatataatcatttggcgttcatcctgttatgtgttttttcttcctatttagagaggg

SEQ ID NO: 91643 - DNA, 1030 bp, Eucalyptus grandis
  Intron number 1 from transcript Egrandis_v1_0.019545m (loc us Egrandis_v1_0.019537m.g) derived from phytozome v7.0 (c hr-ID scaffold_11; pos 43573273 to 43574302)
ctttctaggcacaggtgtgcgttcttttggtttgtctatttggccttcttttgctgaatacacgcttgcattagaatttggtgtgcttgagctactggttaatcttccactgagtcgatagtgcagtttagttttttccatcttttatggaggaacagttgtttcttatcctcccatttgcttctaaaatatggccatcaaattagattaagatatctttgttttttcctgaatcgaactgcatacgttctaattaggcaattgctgttgcattacaaaacgactgtcattggtttaaagacgcggtttatgacttttatacaaaattcaagttatagggataggattgtttgagccgtgttatctattggtgtggctaatgatggtaatggctataacctccatgaaaagtgaagcattttggtacctgtcacgaagaggataagtatccctgacatgtattaatccatagaaagggggtgatattttctgttaatctctgttatgagagagagagagagagagagtagttgatacttttgtttgtatatgggcgtaggtgtttgtgtgttaatgaatgcaagtttggatgaagctgcaaatgagtttatttgtatacactttgttttcaaagtcaagtttcaaaccaaatatgggattaggtgaatgctttcgttcttatgcagttattgcatgtctaagatatgtgacatttgacttgattttggaatgtaattcctagatccttatcgacactgatgaagtgaaaagggatataagttcgatgcaaaattgcctattgtaactattcggaaattatattgtcagccttactatgacacttgttgctctattatagctgtaatgattccttcttcaaaaatcggttatgttgcagtatatagtgctgattgatttgattcttcttgattgttcataccaaatgtatgcgttctggaattttgttgcgataaagactgggaacaatgtttcaggaaagaggtgtcacagctacaaaacaaggaaactg

SEQ ID NO: 91644 - DNA, 690 bp, Eucalyptus grandis
  Intron number 2 from transcript Egrandis_v1_0.039012m (loc us Egrandis_v1_0.039012m.g) derived from phytozome v7.0 (c hr-ID scaffold_7; pos 2879615 to 2880304)
aagcttgttcaatgaccttatgaaagctcttaaaatggctgttacgatgagggagtttagcaaaggaatgaccaaggtacatttcctgtatcaattgatcctgtatcagttaatgtgattttataatttgcatgatgcactctcctatgggggttttgtcaactgtatatttgcatagtaatattccttttgttgtcaacattcatattcaaaatgaggagcctatattcaagctttttctgatagtaaatgggtgttgagagacaatggaaactttatctccttttctgctttatcatcttcaaattatgctgatagtttgaagagtggatgagaaataagataatgaaatgaacgactatatcaatatgatcttatagcgcacaattcaggaacattgtcttaagcaatttgggaatgttagttctccacttcttgctcacttgctggaatatggcttgcaaagtggaaaaaagttggaaatgcaaattgtggaatatttttgttacttctcatcgtaaagttgtgaaataatggttgtggagtagcttgcatcctgcagcatacgaatagcagaggtatatatttgattgctgaatgcagtttgtttatatgaatatataggctggtgtggtggaagaatttgtgaatgacggctctcgacacggaggacataaaagggggagatag

SEQ ID NO: 91645 - DNA, 804 bp, Eucalyptus grandis
  Intron number 1 from transcript Egrandis_v1_0.027210m (loc us Egrandis_v1_0.027210m.g) derived from phytozome v7.0 (c hr-ID scaffold_7; pos 8644269 to 8645072 reverse strand)
ggtggcctcgtttgctgcgatgtgagggctcgaattcccggttctgcctctctcgttgtgctctctgtttctcgtcgatggtcggacatggtcgtgatgctgtggagtctttatgttaatttggcatgttcttgcccgatacccgtgatttgttcttgttgcgtgcggtggatgatgaccctttttcagttgttcttttgcaactgatgaggtcggtgtgcgggtcttgggatactaaattgtgctttgtttatgccctctttcggttaattgtcattttgagtttagtcattcggtgtcaaactcgccagtctgatttctgaagttaaagcatgtcggatgtttggaattgctctgcacaaatggaaattggacattggtttttccttcttcttctttttttcctgttatttggtttccgctgtcctcaacactgagcttgctgcattttttcgcttaatctttgcaagaacatttgtggatttatagaggtattaaatcccacatgaaatttcgtgtatatgaatacggtagagcttccttgtgaggttttatggaatagaattctatctacctgggcatcatagcttcagcctatctacctggcagaagcagcacgcccagttttcaatagataagaatttgggtcataagccaaaattgaagtaggaaatgagagtagatacagtgagcactagtttcgcacttgaaactgatatggcaatttcagaagctaatggaagtggccttttggtttttgttggtgcagttatttgttggtcctggatcgaacaaattggagaa

SEQ ID NO: 91646 - DNA, 439 bp, Eucalyptus grandis
  Intron number 1 from transcript Egrandis_v1_0.034329m (loc us Egrandis_v1_0.034330m.g) derived from phytozome v7.0 (c hr-ID scaffold_7; pos 28409445 to 28409883 reverse strand)
ttcgaccgtgcatcgaacgaggaacttccagcgaagtgagttcagctgtagcctcttgctcttcgaaatttctcgctccctctttcctttccgtttagggtttgtttctcttggttcttttaagggtttggtgtcggtttcccctccgtaaagtcgcttgaatcgctgcattttccagtgcatctttcattctaagttccttcgatttgctgtaaaacgagggacaagatgagcacacaagagggtcgtctgcgttttgatgtttgggggggttattataggtagaggtgaacatgggatttgccacagatttctttgttcatgagccctttttttttgtcctaaattggcgtgcaattttgtttcttgtccattgattaagtatgattatggatattcctgtttcaggtagaggaaacaccggttgagtattaggagg

SEQ ID NO: 91647 - DNA, 784 bp, Eucalyptus grandis
  Intron number 2 from transcript Egrandis_v1_0.027466m (loc us Egrandis_v1_0.024644m.g) derived from phytozome v7.0 (c hr-ID scaffold_2; pos 43228943 to 43229726)
cgttcacttggaacccttcaggtacttttcttttgattttcaatcttggttttgttctgagatttcgaaatcttgaagttggtttcctttctgaattgggtcataaatcgagcgacttgaagagggttgaaggtggttgaagctcgataaagggtgtcttggatttgtgcaggttatgtttgttgtgtcgaagatacgactaaaggtgactggaagaaaataagtaaatgtatctccgtaggctggaaatgagtacagtcactcaactggaaaaacatgagaattcttgagaatcatatcactggcttttccgaattggctttaacagaattagccttcttgcagttatgttgaacctcaaattgtatccccatgaagggaatgctgaagttgaaaaaacaacctaatcattcgaatccttgttgtggcatctataaattatatgccctctgcttgaatcataacgacttacttcaattttgcccctctccccccatagtatacgtgtaagaactacagattattcaacaattttgatctatagtgcttgtgcatattggtatgtcaaatttgacatccttttccatttaccactttaagtggcttttggaaactgacctttaatcgactgtagtgtgcgacccttgcagctaattctacattggtgtgaagtgaactgataaattttgtggacaagtagttgtatttctctcatgtgctttttccattttatatttttgatggtgtagatcctgattcagaggtggtagtgtttgcgaagaga

SEQ ID NO: 91648 - DNA, 608 bp, Eucalyptus grandis
  Intron number 3 from transcript Egrandis_v1_0.016719m (loc us Egrandis_v1_0.016719m.g) derived from phytozome v7.0 (c hr-ID scaffold_7; pos 50513618 to 50514225 reverse strand)
tggtggtggatcctcttccagcaggcctggatagggtaagtcattttctatgtcaattgtccaatagctcatgcattcgagatactagaactttagtttgttggctctgtgttttgtgtacgtccacaccataattacatacaaaacttttgtgctaactatggtgtgctttctctcagtattgtggacattctgaaatgaattttagttagctatacgttcttcttagtcatctgaccacacaataaggagatataacccacctgtaatctaccccctcaaggagtcagatgcaagtatttcttcgggttgctaagcatgttgcaaaaatttacttgtattttaactgatgaatatggagtgtcatattcttggacttgcagcactaatatgtgatttgtactgttaaaagaattttgcttgattcaattctaattctgtagcatgtacggaacttattctttagagttgcatcgcgcttgaacacaatataacaatctttcagaaatataccgggatgagtagttgtggttattcattattattttgagattgtctcatgccatttgtgtacattgtaatcagggatacgtcgtcttaaacagacc

SEQ ID NO: 91649 - DNA, 585 bp, Eucalyptus grandis
  Intron number 2 from transcript Egrandis_v1_0.016719m (loc us Egrandis_v1_0.016719m.g) derived from phytozome v7.0 (c hr-ID scaffold_7; pos 50514738 to 50515322 reverse strand)
tcgcttcttcgcgggaaaccggagtcgagatcgaggtgagtcaatcgccgagaagtgagaattcgctctgtctgaatctactacatcttcctcccgcgattttcttctctgttttctgaccttaattgtatgacgtgcgcttcttgtttgactttgaacctggtatctaattatttgctataggattacgatgaatgcgatttcgcagctgcgttaccggcttctgttcgtctggcttcagccatgcagcgacaatgtcagtttttcctgaaaaaaaagagaaattccttggcttgcattcttacgaatcatgttgcttgagatgccggaaagctccttgattgtgttttgcgatgaacagtcaagacagaacaccgccttttcttttcgtttttccgagtgccttcaaagtttaaatactcggctgaagcttgtgctagtgattcagtcctttctttggcgtttgaagtttatgaatgcatggtgtaaccgtagttatgctccctctgtcatgtcttccgcgaatagaactgattttgcagctttgattttgattactggctactgcacaggaaggctcttatc

SEQ ID NO: 91650 - DNA, 508 bp, Eucalyptus grandis
  Intron number 3 from transcript Egrandis_v1_0.032122m (loc us Egrandis_v1_0.032122m.g) derived from phytozome v7.0 (c hr-ID scaffold_11; pos 41606312 to 41606819 reverse strand )
tcacatcaccactaggaagtcaccttgtggagaaggtatttaattgaaaacttctgcccaatgcctttcgtgagatgagtgagtgaatatgtgtgatttctgatgcatagccctccaaaatatgatgttctctgtagaatagttatcatgtggttgtcactccacattagaggtgctgatactgtattacttttgcaaattcatgtcggaattcagaaaagttcttgttttctaataatttcttgtggagttttgggctgtccacatgttcgccatatatgattcgtttggccttgaagattgtttattcatagctgagtttatttgagccaataactgaatgcatgctctgatcacggtcgatgtctcaacattgttataatccgtttaatctctgcaaactgcattgtggttttagttttgtttttgtcatgtactctaaatgaacttgactgtcctcttgcattgatcaggaaccaacacctgggatagatttgagctccgtgtc

SEQ ID NO: 91651 - DNA, 880 bp, Eucalyptus grandis
  Intron number 1 from transcript Egrandis_v1_0.037965m (loc us Egrandis_v1_0.037965m.g) derived from phytozome v7.0 (c hr-ID scaffold_7; pos 7199035 to 7199914 reverse strand)
tcgtgactcaattcaccacccttccttattcgcaggttattaggaatatctcggcctttgtcgaagaaatcagattcgccataattccattttcgtaaattttaatctatgtgcctaattatttgtagagcatataccaaagcggggggaagaatttctgggggcacaacaccaggccattaggctgtttgtctaacatattggtcaccaccgcctatgatgtgagcgacatcgatgagctcaaatgcctccgatcttgcaatgatgctgctcgagaattcaattagcaattgcaatgcctttgtgaagaactaagggcgcacatgataaaatttttgtttcttgatttctctgtttctctgttccccggaacaggtttggaacagaaatccgtttggtaacgcaatttgatttctctatttctgaaacagatttctattccagaaatagagaaatcgaagaaatcataagctgaaatttttaacttctgagtttctgaaatagaaatagaaattttttttctcaacttttcaatttagttaatttagtccaaaatattttaatgattttttaatataatcatttcaatcaatattgattgaaaatcttaaccattgggccggatggtgggaattgaatgaacaaggcttcatttgttgcatgcaagagatttcacgcatggtaatagtcaatttgccatagtcatatctaacgagtctttcttcacctactctttcgtagtacgccagacaacgactctatctggctaactatttttttaatcataaacttcatattgaggcagtaaaatcattagggtttcatccgatttttcttttatatagtgtcctcacttatcaagacacgggtaaaaagaaat

SEQ ID NO: 91652 - DNA, 940 bp, Eucalyptus grandis
  Intron number 3 from transcript Egrandis_v1_0.006876m (loc us Egrandis_v1_0.006876m.g) derived from phytozome v7.0 (c hr-ID scaffold_2; pos 37799307 to 37800246)
gaagtcatctacaaaatcgaagttccggcgaacaggtgactgcgaagctgattcagcattcggttaagatgttgtgtgtttcggatgggtttggagctgttttgtgggtcgcgggtgaatgttggttcggggttataagatgctagtgtccgtcttcagatgggttaaagtcttgcgcggactgtgttgctcgtaatggctattgagatgccgtgtggttcgatattttctttgatgttatgatgttgccaaaggtttttttatgttaccttttcggtcgatcaatgtgaaggaccaattgcatgtaattagagacttcataaacacattaccacctgaaaaaggctcagcttttgagtagtccatgtcatgtggcatttatagtgtgcatcgaggcttttcttattgatgtgtaaatagtttcttttaatagtctacaagttaggacattttttttcaccactttgtgaagaattctagttgtatggggaagcagattgatattctgacccttgggattcctggttcatgataatggttctgaaaggggtcgatcttgaatttagtttatgttcaacaccttgtcatgctagatgggtcaatccccaaattttataggtattatcattggcaagaaacgtaacaagccttttcagatttggtcagcaggtgatattgactccttaatgctgttggcttatttttgaatcatgtcatctagaaacttcattatctagttataagtcaagcttttcaaagagacgacaggtttatcatcattttagtctgtattggtaattaatgattatttttcaccaaaaaaaatgattattcttcattcgtgcatgtactatagaaataactagactattataataatgaggtatcctctgggaaatgcacagatacgacttgctttgcctcgaagggcttgctcagg

SEQ ID NO: 91653 - DNA, 686 bp, Eucalyptus grandis
  Intron number 1 from transcript Egrandis_v1_0.022796m (loc us Egrandis_v1_0.022796m.g) derived from phytozome v7.0 (c hr-ID scaffold_2; pos 8120792 to 8121477 reverse strand)
tgtcctcgtgtgcactcagtctctctctctctctctctccctccctctccaggtgagactagatcttccagtggcaagaagatttagtacatgaaattagacagttttgagttgtctagttttagtacgagatcaagatacttgtattttacttttacactctgttttatgttataaaatacactctgttttatgttatgcaaacatatcttaaatctggtattctgaacacaagtatggcttgcttcatcttgagctctagcgtctcttcaagaacattcagtaaacttggaactatagtgagagcatcctagcgcgaagtactttgcactttcttgattggaaattttctatagaagaatttcaggtcttgctagaaattaatgctcaaaaacatcaatacacaaagaaggagtttaaacagattttggaatgagaaacaaagacggtgagccaaaagttgctgggtttacgcctgctgatgttttgaaagtcttaagacatcttcctgcaggttacatcaatcttgacttgtttgaaacgcgaactatgcccgttcaattttatctatgatgcatggctacagtttgtatatgagagcctattccatgtctaagaatttggtcgtatacttgccgtgttcggggataaccaggtccgggagttggaaaacaaccctcacttca

SEQ ID NO: 91654 - DNA, 432 bp, Eucalyptus grandis
  Intron number 1 from transcript Egrandis_v1_0.011948m (loc us Egrandis_v1_0.011948m.g) derived from phytozome v7.0 (c hr-ID scaffold_7; pos 12252862 to 12253293)
gcaggtagatgggagatttcgagtaactttgcagaagaagggtcttcccaagttgaagcaatgaacttttaagaagactagttactttttgccaaaaataaaaaagagaagaaaataaagctgtccattgtaagttatccttcagaaggaataaaacttgctcactaatcaaattaagttccgcaatcattttccaagtaaagattggactatttagcaacgacaatagtatagagatttttttctcttttttttttttaaaaaaaaaattcgttttttcccttttgtggaacttaataatgccccctctcttcttggcacacgtatatattaacattttggaagttcctaaattcgtgatttaactaaatcacacttccatgagtgaatattgcaggttgtcttttcaaaattggagacattaaatatcaa

SEQ ID NO: 91655 - DNA, 400 bp, Eucalyptus grandis
  Intron number 2 from transcript Egrandis_v1_0.014050m (loc us Egrandis_v1_0.014050m.g) derived from phytozome v7.0 (c hr-ID scaffold_11; pos 17874960 to 17875359)
tgcaggtttggctttctttccctcgcgcggttcatctgttacttggatattgttcaggttgttccgtacgtttgggtgcttttttgaggagtttttgtgcgtggtcaccatttattttatatatgtccaagcttgggtatccatttatggtggtatttctttctgatgatcttttttatgttttctttaaaaaaagggtggtctacaaaagtaggcttcttgttgggtatcgaatataattgtttgattgctcgcttacggtttggggcgttactttgtaaatctggacatattagttaattgtaaaatttcagtactttcttattgggaagaaagtaattgagtttctgttgcactatgaaatggcacagggtaatttgaggatagggaaggctcagaa

SEQ ID NO: 91656 - DNA, 900 bp, Eucalyptus grandis
  Intron number 3 from transcript Egrandis_v1_0.025302m (loc us Egrandis_v1_0.025298m.g) derived from phytozome v7.0 (c hr-ID scaffold_11; pos 1929845 to 1930744)
cacaggttcttccccctctcattgttccaagcattttgatcatatatgctaatttgtgctaatattgagttcattatgcatttgccgttgaacgttagctcttggtgattgaactttgagggttgtgcgctttgattgttaacgttttggtgttcatcctaagactatttagtttttgttactcatttgtattgagttactatttgttttgaggaagggacttgctatcggaatcatacataggtgtaatactaaaaagaggatgtggacaccattgtagagctaggatagaattttgagggagacgtatacttggcatgtgctctctcccctcacataattgtagattttgaatgggtggtttccacatcatatctaagagaaagggagtatttttaacgtacccaagaattaccaaggagggagcacctaagttgtctgatcatggacataagattcactactggaagtctactttcctttgggatgttggcaacttcgtgcaatgtgcaggctctgttaagtttttcttgtctcttgtatgaagaaattctcgtctctagcagattcttgctaaatcctggcaagagttatattaatcttgtctaagataacaggacaaagctgttggccttatttgagtttgaactatcactccaatactttagaagatgaggttgatttttggaaatctacctttgtcttcctgggatcactctcgcgtgttttcttttgctttctcgtccgcctttggttttggattactagcctaataaatgtggttcctctgttgcccctctcttctgtaattttttttttttttttttgggttctggtctggctcctgttgcatggcttgctgaattattattgtttgttcatagattgagattgaagttg

SEQ ID NO: 91657 - DNA, 890 bp, Eucalyptus grandis
  Intron number 1 from transcript Egrandis_v1_0.006109m (loc us Egrandis_v1_0.006109m.g) derived from phytozome v7.0 (c hr-ID scaffold_7; pos 19844008 to 19844897)
acctcaatttgaaaggagaaaaagggaaaggacacgtgagtgaccaacagatcgattgtaagcaaaaacatatataaaaataaaaataaatattaaattcaagacttagatacaagaaagaattatgacataaaaaattatcaaaaaattctaaaacctaagaaatttgtattgcttttttcttttcctttccttcttttttttcccaactatgggttaacaaggtctgagcgaggcctccacctcttgctggccatgggcaagtgcctaaataagaaatcaactggatcaatggatctgccaagatttattaatttttttttattttttattttgaaacaaaccttaattattaaattatttttttcttttaatattggaaaactcttgcttatagggatttataagaaaccgaaaaacaaaagaaatcaccggttctagaatctggtgtgtcgattcacggttccacgaatgtaaaccgatccaataatctaaaatctaccatccctacgcaatgccttcattgggccgacccgtatgacaacttttcccacatcaaaaccacatttcacctcggaacctttttttacgtttcattttataaaatttaaatcctcaagaaattataattctttaaaaaaaaaaaatcactttagaagctccgtcaatatcacggcggcgacgacggcagtgtcccggcggtttctcttttttttttttccttttttttggtccctctctttttctgcaaatttcattttattatatgctatattctttctttctttctttttcagtaatatatatatatatatatatatatatatattattatatcgatatactcgacgacagtggtcgttctcggttttggatccctgtaaactctc

SEQ ID NO: 91658 - DNA, 705 bp, Eucalyptus grandis
  Intron number 1 from transcript Egrandis_v1_0.030999m (loc us Egrandis_v1_0.030999m.g) derived from phytozome v7.0 (c hr-ID scaffold_2; pos 42816055 to 42816759 reverse strand)
agccccctccgattggacccaagaggggcactaaggtaatcgatttgcttcaaagctcttaccatttaagtagaacagattgtgatggattatgtggtattaccatacttgtgaagcttatcttgcatgatttttcatcaattagccatcttatcgagcgattgctattaatatgtagattcaaatctgttaaatgactgttgtagttagcaatatctgaaggagaacgttgattacactgtgatctggaattactgcttttgagtttttctaaatttatactaattgactacccttgctagttgcgggagtatagacttcactttgcttaaaatatgacacgcgaagtattgctccgtcgagaaaatataatattgttgtttgttttataatacgatatgattcgcgtgcatttgcgaggatcattacatatcgttaagtcagcaaaaagttgaatattgcgatgattatcagtctaagaaccgatgataaacccaattaaagttcgatgtcatcattagtagagatgaagtatggtattaatgggtacccaacaaaatctacaaaagttgcatcttctgtaaaatttcagttcttgcattgggtttatactaaattactgtggcatatagtaagatgggtcatcataactcctttctttcttttgtaggtgaagatcttgaggagagagtcttactggttcaa

SEQ ID NO: 91659 - DNA, 657 bp, Eucalyptus grandis
  Intron number 2 from transcript Egrandis_v1_0.047239m (loc us Egrandis_v1_0.047239m.g) derived from phytozome v7.0 (c hr-ID scaffold_7; pos 1147640 to 1148296)
gcaacgagggagcttgaaagatcgcctctttgaaagtatgcgcacttgtcctttaacatgtgcttggtgcccttaatgacatgtcctacattatgtttgtactatataagtgctcacggtaaaacgacccacctgtatggatatggaagtcatgtctcccaagaaactatttgattgctactagaatctggataataattttaaggagaaaaatgttacttctccttattgtggacgtctttccagaagattgtagggttcggaaccataatttcctagataattcttcaatgctcatactctgttgaatgttcttctgcctgaaatgtttttatgtaaattgcttttttgatgttggtgccgccgaccaaagggatgcaattccaaagactttcaatgttatcatatactcagaggacattatagttttttttttcgatgccagtaaaaaacaaaaaacgaaaaaggaaagaaatagcggaagatcatgtgatatggtcatgaaatgtcactttctagcagcttcatccgtgagtgattttagtatcgttttatcatctgtctctcagtagtacatctcagagaatcctgagacttaattctctctaacttggtcatttaggcgcaagaacaccagcgctgcaccgtatcgaggat

SEQ ID NO: 91660 - DNA, 818 bp, Eucalyptus grandis
  Intron number 1 from transcript Egrandis_v1_0.044899m (loc us Egrandis_v1_0.044899m.g) derived from phytozome v7.0 (c hr-ID scaffold_11; pos 29560371 to 29561188)
tgacacctggagcatcgaggcttggaaccgcttaagtcccgccttaccgttaaggaatggatgaagcaaaatcttgatcactagacatgtaaaagaagtggcaaaaagatgcagatccaggagttcttgtccacaagccctggagtttgcataaggaacagagttggccactgttccagaagaaggcatttccactgagggatgagccaggcactcccaccaactacagaaccatcatcatgtggcataggattaactttcttttaagttcattaattaaaacatgattaagaaaaagtattggcatacaatgaactattttacggggcttgtgggcattgcatacacataaaacataatataagaagcataattaatcgctacattgattcaccatccacgtccgcagtccagctcctatgaaactagacagcatatgaccaaacagagatattatatataaatatattaagttttcctacatttgattcagactaaactcttcggatggaaatgtcctagagcagaataatatcctctataaaaatctcctacttggctgagtgtgcatattctgattttcttccttcctataattacacattgacacaaacattgtggagtcagcaaagaaaatgcttagaagatgtgctggtctatcatcggctattactgtgctgggaggtgctttcaaaaaagcattcattacatgagtgggaattggtaaaggaaaacctaaatttatacctaagaagaaaaaaaagctatgatgaattctctgagtatccaaagttttagctttaatctaccaggaactt

SEQ ID NO: 91661 - DNA, 975 bp, Eucalyptus grandis
  Intron number 1 from transcript Egrandis_v1_0.013764m (loc us Egrandis_v1_0.013764m.g) derived from phytozome v7.0 (c hr-ID scaffold_7; pos 2559401 to 2560375 reverse strand)
ggtcgcaaagcaggtcgttttggggaagatatcttcttgacaattactatttttttggctttgttgtgatttccattgcattaattaaattcttcttatctacctagctgcatgatcatcttttatatgcacctctattttgaatgctagttgttggaagtagttaggggtgaccggccccgatcaatccaatttggttgtcgggcaattcagtttcaacatgcaaaatattcaaacttcactagtatgaatgtcaatcacacttcgtgtgttttacactttaccttaaccatgaaggccatgaacaattcggctaacagttatgcttggcttaggttgtataaacaatctctcttctgttctttaaatgtttagtagatgttggactcttggaggcttgaagtgtcttgtgggtctcttggagccttagttccacatcgaacatcgagtggaagatgaaactaacaagtagattttctctataaataaaatagtaacaaaaagaattttaatggtctcttggccacataagaggttcatatctcaattgcaatttcggttgcaataagttatgatgtttacatattttatatgttatatatatatataaaatttgttcggtccggtttggtctagttcccacttggaactgggaattggaccgaccggccaccgattctcggttcgggcggttccggttgcacacccctagaagtagtacaggaattcaaagtcgaagaaaaaaaatctggagatttgtacttgttcgcatcgtgtgaatctttggctagacagaaattgaagagaaggaattcttgttgctttttgacaagctttaatgctctagggtttggctgttttctggcttctgtttctgcatcaccttttctatgcttcgtcttttcttggatagtttaaccgtttaggtcggagcaatggacgattatttatcaaacaatttttttttgcaggtgc

SEQ ID NO: 91662 - DNA, 851 bp, Eucalyptus grandis
  Intron number 1 from transcript Egrandis_v1_0.005637m (loc us Egrandis_v1_0.005638m.g) derived from phytozome v7.0 (c hr-ID scaffold_7; pos 45162657 to 45163507 reverse strand)
ttggaaccggggtggatctttaatctgtaatccgggtatcgtagcgaatcgtctgggtacttcgtcgaagcatttgcttcgttcgcatccccgccagctcgtaggtttctgcttcggcagcagttcttgttcttgagttagccacgcgagagcgtgtgaagttgtcatcttttttggccgattgcgagtacccattacggtgattgtttgttttgctcctgtttgatctctgcccgagctggttacggcttcatttctgcatgctctgtcatcgagagttgtccttgtggcttctgatcgcttcggatgggcttgtttagcttgaattcacccgagttttttgcgctgtttgatgttcttgtgggatgtatggggagaaaaaatacgggagaaaaaatacgggtatagattctttttttttttgttctgacagatgtgaaaggctgttgacttggccatttgtgattttacatagtatgaaagagaggttgatgttgtttttggtttaaaacatgaacagaatttaacctgaatcgagccaggtgagtctcttggaagttattcggtgaaataattctttacccttttgtgccctgaagattggttgcgctgcttaagcttactcttaactggggggtgggtttatacttgcaagtcaaagactgttagttggataaattttgcaggttaacgtctgtcctgcattttctgcaatatgctcttcaaccgtgcattctggcttctttctacttgttctcttgatcttcaagttgtgaagtagtggtaatgactgcttcaattgcatctctttttcaggtcaatttccttctgttagatttgtaggaggtttg

SEQ ID NO: 91663 - DNA, 507 bp, Eucalyptus grandis
  Intron number 4 from transcript Egrandis_v1_0.028941m (loc us Egrandis_v1_0.028941m.g) derived from phytozome v7.0 (c hr-ID scaffold_7; pos 29755736 to 29756242)
cgttgaaaagtggtgaagaagaagagatgtaagttcctatatgactcttgctcctgtcgacaagcatattgagaatctcatgagctgggtttgtgtctgccagtggaacctttgacgcagtatctttattttgtttgttttctcataaaccggaaaatgattaatatttttttgattggacttagggtatgttcttgtctagtcatgacaactagttgctccactattggcacgtcatctataaatatacatcttttggtcactgagctgtaactcaaacttcgaagtttcatctgtaattctgagcctgttgataaatttgttgggcttcctttgattgtcccagttacacctgcacagataaaccttgcactctaaaatccatctctgtagtgtactgtttcattttctgtatcaatgataatactaacatagtcttgtttgtgctctttgaatactctgcaaaatgcagatacttgccagacaccattgacgttgcaaacagca

SEQ ID NO: 91664 - DNA, 901 bp, Eucalyptus grandis
  Intron number 1 from transcript Egrandis_v1_0.027626m (loc us Egrandis_v1_0.027626m.g) derived from phytozome v7.0 (c hr-ID scaffold_7; pos 1976922 to 1977822 reverse strand)
gacagagaagaggcccacagttgtttttgttttgggtgagcatctacttttaagtttctgcaacttactctaggataacagggttctttatttcatcagtatggtctttttaataataattaattccatctgagttagcttctattagattctgtgatactattgttctattagttgattttgttaagtagcagaaagtagattcattcagatctttcagcaaagttgcttgagggatgcatcgtgtttcaaattttcactattgcttgtctttcgtttgcagttttgatccttcccctttggatcaaatgtttggtgcttgatttagagttaggtgagatttttttttgtcggacgaaattcaacttttttacacatttttttttctttttaaactttattttatttcttccccccttttttcagcattatctttcttttttcttttatttcaatatattctattccttaaaaactgaatgagcattcagtagctccataatgttaatctaaatacaaaagattgatttgaaatgcatcatacgttattgctaaggggcataatatgtgaccgtttgctattatgcacgtttaataatttttgcttacactcacgataaactggggttcatgtcttctagatggagaatattagagttgccttttttaaggctggaaatttaaatgtggaatgcatgcttcaatgtatacacatcgaattttgcttctacagattttgatataggttttaaaattctttgaacttattggaaggagttttttattttattgcttcagaagacttctaagttcttctttcccaaaaggtggaggctctttcatcctttttaatctagctttcttaatttgtaggtggacctggctgtggaaagggcacgca

SEQ ID NO: 91665 - DNA, 763 bp, Eucalyptus grandis
  Intron number 1 from transcript Egrandis_v1_0.023652m (loc us Egrandis_v1_0.020720m.g) derived from phytozome v7.0 (c hr-ID scaffold_7; pos 36208440 to 36209202 reverse strand)
agcaggataaattgaacgaaggcctcaggaggtaaatttattgtgctctatctcttttcgaaacgtatgtgatttttctccgttgctttgcttctcttcagctcgggttttattagtcaggaagctttttgagcttggtctatcagccatgtagttctttcactcttctgcgcgattgaaagagaagaaagaggagagacatattatagagctgcctcataggcttgtggctaataacgtcatgcttgagcttgttattctgaatattaagcggagttatgaggaagagagcacgcactctttgctgttccacagacgcaaatcattttaaacctgatatttgaattctcttgctaggtaaaaatccatcttttgctgctcagcggagactcctgtttaagctacatatatttaatttctgatttagctgctgcagctcttctgcttctgaacattttgtcctcgataactcttttggtcgctgataatgagtttgataagcttttataggatctcatgaataatctgctgtctagacttttattctagggtgtaatttccataactgtgcctgtttgtaccacctcaaagtgtatccttcatttcctttgttggctctcatgtttccacttatggtatatgtactttaactgaagttttggtgcatgtgacattaagcagtttctacatcaatcatgagattatcttcttttccgctttggaaatcatgagtgcctttctcccttcaattatagatacgctg

SEQ ID NO: 91666 - DNA, 926 bp, Eucalyptus grandis
  Intron number 1 from transcript Egrandis_v1_0.017220m (loc us Egrandis_v1_0.017220m.g) derived from phytozome v7.0 (c hr-ID scaffold_11; pos 22595932 to 22596857)
gcctgtgtggtccatcttgcaggtatggcgagtatatgattttgtggactttggtgcagttaggagctggttttattgattcggccatagttgcaatgctgggatggtgaagttctggctgaatatcatgtgaattttgaatagctgagagcctgaattgtgaagtgtcctgtttggcttgagagaagcaggactaggaaaaagcagtgagtttgtactttgtacttattaaatgaagcacccgcgcattgtggatagctcatatcgtcttgcctctcgtttcagatgttttccttttaagtggacgttggaatattaattgttctgttgggactatatcaatgtgttctttcaatagttcagatgttcgctctgtcagatatcatagttacgatcttgattaagagttctatggaggttaaccaataaaaagtcaagatagaggtttttctcggataaaagggatgtccttttcaagtttcagcttggtctcgctcatagtggatctagcagcaatatccacatggtgatggtggataatttgacatatagctttccttaattattccattaaattacgttttcaggctcttggaagttgataacttgatattgtggttctgtatcaatcccagcactcacgatcctttcttttgctgtttattgcttcttctttttcttatgtcctgaccttatatcagtgaactacttgaaatgcaaagcacattgatttaggatataaccaacaagtttgcttttgacataagacaagttagcaatgacttcattggtttattattgagggttatccggtcaattataattatcgagttaatcaacagtttgtggtatggtaatgattcatttgttggcaacttatatgttctgcaggaactggagatcatacttttgaaaggagattgcgt

SEQ ID NO: 91667 - DNA, 783 bp, Eucalyptus grandis
  Intron number 5 from transcript Egrandis_v1_0.014673m (loc us Egrandis_v1_0.011980m.g) derived from phytozome v7.0 (c hr-ID scaffold_2; pos 31072651 to 31073433)
agggaatcggcatctattgcttgccaggtacttccatgcatttagatgctcaggaaatagaaaaggaaaaccttgcaaatctagtattatccttttggcaaattcttttgttttttggattttattattgctaccttgagagttttcagttgaatatgtgacctgatgaaatgagagctaggtgttgatttcaagtgatttgtaaggacagtcaatctatcttgtaaacttacaaagtaatttcttgatcatgattctgtgaagatgcaccaatgtgagttaacctctcgcctgtcgcttgttggaaactttattgcaatctttgtcatcatcacttgctctgactcgctacttcagaaggatttggtacattcatctttgttaataacattttgtttctgctctcaaagtatctagggggtgaagagatagtacttcttatatatgctattgcccatctaaggttcctttgtttgatatgtctacacctcatccttgaacgttgtttgcatttcgctatgaacactgatatacaactagggtcattctcacactagaatttgggcttgaaccgtgaggtacatggatgacatgaatacagtaaccagtttgtcttttgttgtgtgtgtgtgtgtgtgtgtgtgagagagagagagagagagagactctgagtgaatacttttgtcagtagttgtgtttcatctaaaaattagtttgtcatggaaacttctcatgtatttttcactaacgtgtatctcctatttctaggctcttttgcagaca

SEQ ID NO: 91668 - DNA, 613 bp, Eucalyptus grandis
  Intron number 2 from transcript Egrandis_v1_0.030761m (loc us Egrandis_v1_0.030761m.g) derived from phytozome v7.0 (c hr-ID scaffold_2; pos 41194409 to 41195021 reverse strand)
ttggctggaggctgagactgaacgtcaagcaattggtaagatattttatgtcaagtcctcttgctaattatcgcggtggattccaaccctgtttcatctctgatggaaataactttcctatttaatgctgagtggaccactatagcttgctttgactcctgttatctcctaaatctcaaaggtcctcacaacctctgttcttaaaagaccttcagaagtagatgtctcacaagacaagttaaaagctatttctagagcctttgacaagctccttttatccatctgattgacgtaactaatcggttatattgtttattgatcctgaaaatagtaaaaccttcctaacttggcagcagctgaaaaggcggacttagaaagcaaagcaggcaacaaaaaagaagatgcgtgcttggtgtactgggtttcaaatggtcatgggttttgtttacttgtgttatctgctagatgttttgaagtgtgtctgatcgccacacgaaatggaatggggatgaccttgctaattaaatattgtgttcactaacagacgatacatagatattgggttcaatgaatactcattctatgatgatttgtgatcgcagtgaacgacgca

SEQ ID NO: 91669 - DNA, 780 bp, Eucalyptus grandis
  Intron number 1 from transcript Egrandis_v1_0.026878m (loc us Egrandis_v1_0.026878m.g) derived from phytozome v7.0 (c hr-ID scaffold_480; pos 14712 to 15491 reverse strand)
ataacaaaatagttgaaattcctccccactgtgaagtaatcatgagacctggcattcattggacaagccctcacttgtagaggttagtctaaagctgtattattccaatttccgttatttgctaatggatacactaatattatctaatttaggcacaaaaggattcacgtccatgtctgtacatttttttggatgcttttggacaatatattactcatactaagctgttggttatgctccctaaaagtgatggagtatggttttacgttgatgctttggttttgggggtggattgtttccgcatattgatgggggaagatggaaagtggatgaagagtggaataaatttttttccttgaatgtctcttagcacatgcgtattagtagtctatagtattcttttggccaaaagcagtctataccatctaaaggtgccaccagcattctgtaagtcatttaatctgcttggaggtgaagagaaataaaatcaggagaagtctctgaaatttcatcgattgtgctgagatgattgaggattacattagggtcctatcattgattgtgctgagagattgaggattatattagggtcctatctgtttctcttctttcctcaaattgcagaagagtttttgcagttgtcctgaaaattgtttctattcattttgccagttcgttgattctcaaaatttaactttgtacagaggtattgtacgaactaatttaggttacatatcatgtccagtttctcatagattgtagtggagaggaagacagtga

SEQ ID NO: 91670 - DNA, 711 bp, Eucalyptus grandis
  Intron number 2 from transcript Egrandis_v1_0.025161m (loc us Egrandis_v1_0.025161m.g) derived from phytozome v7.0 (c hr-ID scaffold_2; pos 48548911 to 48549621)
tcagcatcgctgagattcctcctgccgtcaaccaagtgagtttattgttggctccttggaattcatgttttcttaaaattactctggaaaaaaaaaaaaaacttgtttgtcgtaacaaagaaaaactaccgagaacatgttttccaaaaaacacttttattgaaagtctggcattgctccttttttatgctccttaagtcttcgcgccgttccacaacagatgtgcgagcatgacccctcaatagttgaagttctctatgtgttgaaaaaaggagtaccggccgtaatcctagatcaacctaaatctaatctcccaggctcctaggccgcccctcaaaagaatccaaatagtgaaggatgaacgagtcttctaattatcgataaagtcaagattggtaacatgagatctgcccaagaacgtcatccgcaggcaatcttctaacataccacgaaaaggaaaaaaagtggaggcactgagattatacgggtaatttggtggacaaaattcattatggtacagaaaaaagctaagtatcatcgtgacctttttacaggaacccatgtgaaatatacaataaccaaaaacatttttctcccgaagtggctagttttaatcttaaatcagatgagttgtgattcctcagacttcaacaagggggtgtgagtttttattatgatttgaatgggtgtgatttgattgtgtaggtggag

SEQ ID NO: 91671 - DNA, 959 bp, Eucalyptus grandis
  Intron number 1 from transcript Egrandis_v1_0.041351m (loc us Egrandis_v1_0.041351m.g) derived from phytozome v7.0 (c hr-ID scaffold_7; pos 579197 to 580155 reverse strand)
cagacgctctgggattctcaaggctcttacgacaggtctgtgctctctctctctcgcatgtgtacacccctgcatgtaattcttggctgacaagagttttggtctgttctttgtgcagacttcatagaattctacgatcagtgtgatcatgctctctctctctctctctctctctctctctctctatctatatatatatatatagcacatagagtgatgcacatgcacttcattttgtttttcgagccacaatcatggcttactctgatgagcttcttgagtcgctcagccatgaatctttggtgtctaattttcaaggtgcaaatgcacgaccttgctctgttttcgtccctaagccttctcttgtgctctcggaatttttaccggatgccagctttagggagtaatttgtggtttctcttttcaaccgtcagcatgaagaagaaaaagaatcttggtctgccatttttgataggaaaaggaacacaaaatgaatcttcttcattgttcagtccacgtgtttatgttttcagatggtggctctggatatactgtatcgtgtcgtgctgcttcagaaaggtttgataggtagtttgatgtaatttagattggagttcagtcactacatcaagattagtcgattagaaggttagaattaagaactgcaattacaggaaagttgaggtttatctgcatattagcttactatgtcaagttgttctatgatgttctccatgaagaattaaagctatattccaaatacagtcaacttccaacactcggaatttcgtatccatttgctttgcagttttttaggttcgatgttgacagttgttagtgaagttttagactggatgtgtgttttatgaacgaaaaccatttttgtatttacttcgtttgatgatttatgtgttttgaattcagagaacagcgagcagtgtttggttgggcttccaaat

SEQ ID NO: 91672 - DNA, 692 bp, Eucalyptus grandis
  Intron number 1 from transcript Egrandis_v1_0.013329m (loc us Egrandis_v1_0.010257m.g) derived from phytozome v7.0 (c hr-ID scaffold_2; pos 61946040 to 61946731 reverse strand)
ttgttacgaactgtcgtggctcgcgaaacggttgcgtatgctcccgatcctgcgttgaagggttgtaactttagggggatgtttgacgcaaatttagctatcgagttaagctagtttgcgatatggtgcgtgatgctttttcggtttgagtactgcacagtgaaatggagtgcgttcagttgttctgtctcatgtatgccctctgatgaatctgagcctttacatacatgactgggataagaggcggcagtggcaaaactaagttttaaattttcttatacctcgtgctttaatcctctctgtcactgtggacaagttggttgtttatgagtagtcgatcgatggatttggggtcgattcaaactggagcgagtgttcatgttagacgatggacgatataagaagttttgacgaggcactttattctttgaccagtgtttcagtactattttgttttcttcacctttaacttgtcggttctaatgttgtcacgttcgattctttttcctgaatttatgtaaaagcacctatttttatttaatttcgaatttattatgtataactttatgaatagatgatggggggatcatagtttcttctgcagtattaaatgatataattgtgctctgataattcatcttgctgcttttttttcagctctcccgatcacgtcactttttccatttgtgtac

SEQ ID NO: 91673 - DNA, 892 bp, Eucalyptus grandis
  Intron number 5 from transcript Egrandis_v1_0.028184m (loc us Egrandis_v1_0.028184m.g) derived from phytozome v7.0 (c hr-ID scaffold_7; pos 49186674 to 49187565 reverse strand)
aatttggctgcaagctggccccgatgtgagtattttttgcaacacctttaccctccacagcccagaatcttggtgtttcttctgttgcgttcactgaatacttccatcctatttctaatttgtacctggcactgtcagggtcctgcacatgagttttggtcagaagaaaaggttttgaacatatttaattacttcaactcgggagaagtagggaattagtgagcttttacatgggtgaattgcatggagcgaactaaatcttccccgtagctcagtggacatgctccctgtattgttttggtgattacccaaaagactaagactttgtattatttttcaaagaggcgtagtcatttcgactgggtgtttcatgtcctttatatccatcagtttctgctcccttagcttcttttccggtatattttcaagaaaaatccatttctcagtggagaattgttaggaatattatattagagaggcaagttgttattttacggcctcttttttccttcctcattttcacggtaaagagtactgcagttggttcactcaacacagcaagaaacctgatgatagtgcatgctggtgaaagtttaagatcttctagtgatacttcagatgagatgggcttcatctaacgaagcactattatatgattgagtggtttcaagtcacaactcaaagatttgctagttaatgttatagttctcccatttgctgaagaggtggcgtatctctggtttaacttgttcaaatatatacatctgttacaattgttaataattccagttccttctaaatttgagaccttcttttatgtaaacttacgatttctccttgttccttttcatgaacagtgttgctgataggacccttggatttctgctcttct

SEQ ID NO: 91674 - DNA, 931 bp, Eucalyptus grandis
  Intron number 1 from transcript Egrandis_v1_0.000559m (loc us Egrandis_v1_0.000559m.g) derived from phytozome v7.0 (c hr-ID scaffold_11; pos 15643527 to 15644457)
ggggggagaaggaaaaggacgggacgtaatctcaggtgaattgggtactactgtttaggtttctatcttgcctctgattcttaggcttctaatcggtcggcctcgagtttcgtgctcgtgggtacttttcccctttgtctgacctctgctcttttcttttcttttttctcttttatggccaatcagatccattgcggctggtttcttgattgttctttgatattgggtagttttttttcctgggtttctggggtgcttgagtgaagtctttttgatttcttgcgaattggggagggtgggtttccttcgctggggttgaatgatccattcgggttgcttggttttgattcgagctctgttcttcgcttcttctgtggggttctggagatctgggggtgttcttgttttggagggtcggatttgatgctttgacttgtgccgttggagctctcgcgagtgtagatagataaaagtgggcttcttgcctttttctttttcctcccctcctgttgtactttctgattttagcgtgtgaatgattgcgctggcgcgaaatgtgtttcgttagatcatgatgatggcaccctttttccgttttgatggtccagttgactttctattggtgaatgaaccagtcagagcgatgagttccaatttcattaatatagggttttgggagttctgcctcgaggttccgagattatgtctgtctgtctctttaaaatcagcagctgatgaaaggatgaaggaaaattgatagtttagcgttgatgttgcgtttattggtggttggcaaaccgaatactttactgcttagaatatgtccatatccttgatgtgttggtgccaaattatcatccccttttcactgattaatttgttacctctgtgctatgacatcattagattttggagttgtgggttgacacgg

SEQ ID NO: 91675 - DNA, 842 bp, Eucalyptus grandis
  Intron number 4 from transcript Egrandis_v1_0.015396m (loc us Egrandis_v1_0.015396m.g) derived from phytozome v7.0 (c hr-ID scaffold_7; pos 42521618 to 42522459 reverse strand)
ttttgttcctgttgatctctgcgttgcttggctatgtgagtgacttctctttaaagatgaccaatttgggacagggctcattcgatgaaacattagtgtggttcctttgttgccagtgactataataaatttgtatcatcaattatagatagctgtgtctccagaggtcgactagttttactctgaatctgcttatatctcaatatatagaattttgtgcatgtatctaaagtcagaacaggtgtgtagccaattgtgcccttaaggatttagaccaggattctcacttctttgaagatatgaatcaataaaaatacgaacgtcttttttgtttctatgatgccttgaaaggtaatcaaaatattccttgaaattgtcagtgatggttttcttttattgtctctcatttaagatgtttggagacactttttctgtttgttggtttagtgcagagacctagctttgctcttagtggctagtgtggtaaattttttacctcacaaagcagtctccactccagttgacagttttcttgcatacatctccacttccttgccaaattgttgctagatgtatttgtttctgaaagaaattcatgtgagagcggcctaaacacaatgagagacgcttgtagctttttatacctgaaaatggacaaatgatgctaaaaacaggtttcttagattaattccatgcttatttttgtgataaggcctataggattctttgaaggctttgcttatttgggtaagcatctgaagatcagtctctctgctgcattttacttttgctacatctttcctccagatatattctcctcaattggattcacctccgcctag

SEQ ID NO: 91676 - DNA, 695 bp, Eucalyptus grandis
  Intron number 1 from transcript Egrandis_v1_0.016523m (loc us Egrandis_v1_0.016523m.g) derived from phytozome v7.0 (c hr-ID scaffold_11; pos 13868560 to 13869254 reverse strand )
cttctcaagctcggcgctcggcaagtcctcatcaggtggtcttccttcttgttccatgtgtccgactttattactcagtgaaacctgactctgcttcaattgcattaccaattacgctgaaaatgtgcactgtgtgttcgcgtagtttggtatgttagatggattgagaataatggggcatggttttttcagtatttgaatggattggtggcggtgcatgtaatctagagaatgcagtagtgcaagcgaatcagttttggtttttgttgtgacttgtgattgagtgtaggatgcgttatgaagtccagcttcatggtattggtaaaaatgtgatgttggctagccaggagctcggaaggaaggggatgataatctgtaacaatttttctttttgggtgaaaaaaggtggattgggttgagtatcggttggttgctgcagtttgaaatgttgttttgttggatcaccatgaagctctagagtcaaggccaggggttaccgcaaatgggttaacgacctggttttcttctggggtcgggattttgagaatgcagaaaagctgaacacaaaggaagaagctttattctattacttttcggaatctgtcaaagagactcttgatcttgagactccaaaaaaagcgggagatgctaaccctgtactttgacatgccaaatgaacagcacagctgagaaga

SEQ ID NO: 91677 - DNA, 620 bp, Eucalyptus grandis
  Intron number 2 from transcript Egrandis_v1_0.016722m (loc us Egrandis_v1_0.016722m.g) derived from phytozome v7.0 (c hr-ID scaffold_7; pos 46444483 to 46445102 reverse strand)
gaatactcgcactccctaagaaggctgcccctgctgtaaaacctccctccctgctaatttatttccttcttctttttaagtggcaactttcgttgttgatgtattccctggttttgattacaaattgtagaatctatgttcttgtggccttctagttgttgggtctgttctcagctgtcattgcggtggattgagaattctgcgcttgaaatggactggcgatggcttttcttatattcggttgatggtgaattttccccggagaagaattgtttgccgatttttctgttttgagtctcgctctaggaacagtatgatggtcagtcaggcgaaatgctgattgacctgtatgtataaatacaacaggcaagttgggtttagttaggaaagatcgtggagctaaattgaagtagttgagattacttcgcatggcgtctattaggaaagctaagcttttttctctattcgaaagtaatggaatcattggaatgcatgttaataggatgagagtatttaacgacactctcttcgtatgttctagggactgtttccaagttcagtatgtatgatcttgtgttgggcgtttctcttgattgaagcgcttttgcttgtggagatca

SEQ ID NO: 91678 - DNA, 407 bp, Eucalyptus grandis
  Intron number 1 from transcript Egrandis_v1_0.019922m (loc us Egrandis_v1_0.019922m.g) derived from phytozome v7.0 (c hr-ID scaffold_7; pos 18973810 to 18974216 reverse strand)
ggcaggtcagtgcttagcagcattcagttaatctcttctatgagatagaaaaatactgggcataattgaaggcacaattcctgggctttgattgagttacataaatatccatagcgtcaaaattagtgcttatctctccatttgtgtttcctgactaattggattgaatttgcattaagagaatttgcggaaaataaaataggggggtagctgtatggaaacaaaaagtcagtctttctggatgcagggtttgttaatgtaaaattctcgataacggtcatatagtctaagttcttcatatgttgctaataccatgatgttaagtgacattgctgcagttcgaaccatcaaatgatgatgtcttgtctgtagggattgctggaaagcctaaaggcacaacggacaaa

SEQ ID NO: 91679 - DNA, 690 bp, Eucalyptus grandis
  Intron number 1 from transcript Egrandis_v1_0.054182m (loc us Egrandis_v1_0.054182m.g) derived from phytozome v7.0 (c hr-ID scaffold_7; pos 6633182 to 6633871)
ggaactaagctcgtataaaaggtatgttgcattacatctgtcttcttttcttgtaggtttcttctgatttatttgctcaatcgacggaggtaatgtcgagaatgtcaggaagaggaagcccaacgacattttcccagcaaaaaaagcaaatattggttgactctggtgcactctaaattgttttgctcacttgcttgggtttatgattgttaccgagcctgtttcaaagctttatggggactaaactagagaaaaaaagaggaaattattgatgggaattaagtgggttaacatattcgattccctcttcttccttttccaggccaaatctttctctcgaattgaccctgtttacactacatttctgagtttggctcagtgaactatctttaaaacttcattctgttcaaccacataatcgtgtaattctgttattcaacccgtggttgagtgatattttcactcgatggcaaactgtgagaatataatccattgtttggaccaaatacttgctgcaatggcattatccaacgttcacacaattactaaacatcagtgtgtatgtttatatctttgcatcaggtaaattatgttctgcataaagtttcagtgatcttttaatggtttggaactgagattttttctgccttggcagtgaagaggaacttatcacagccatcgttggagaaa

SEQ ID NO: 91680 - DNA, 189 bp, Eucalyptus grandis
  Intron number 2 from transcript Egrandis_v1_0.002170m (loc us Egrandis_v1_0.002073m.g) derived from phytozome v7.0 (c hr-ID scaffold_11; pos 36380629 to 36380817)
ctacaggtcaaaggaagctatcccactttgtcaaggtgaaacggtgcactttgaattttgtttgaaagtttcttatatctcctaatcctaattggtctcgttctctgaatatattaatcgttttttcctcagaaaatcttcccgttttatgtaatcaagatttggccctttcacgttttcttgcagtag

SEQ ID NO: 91681 - DNA, 891 bp, Eucalyptus grandis
  Intron number 3 from transcript Egrandis_v1_0.002170m (loc us Egrandis_v1_0.002073m.g) derived from phytozome v7.0 (c hr-ID scaffold_11; pos 36381139 to 36382029)
atatctctcacttggctcttgacattggaggtacggaataagattccgtggttttttttgttcccaagttttttcaaattgggttggtgtttcattaactccctcaacttttcgcccttctctcttttgatttgtggagccgtaattggatggattgcattgctttaattttctgtgggaagtgtaaggtttgacaacaaaaagaatcaaaaatatatgcactgcatgaagtttttgtagagactatgcagcactctgctcttgaatgttaaagcttttcatagttgtgaacttgtttttgtgattatattactatgttacctcttaattttccatttgatggagatattttcaccgtctggctgttgacttcatatttttgaggatatactatgcacgcaggtttccactctttttttccctcctctccagcgaatttaaacttcttcctttttctctatcttttatgtttttggagtggacatatcggctcctttcactttccctggttatttgaagaacactttaatttatctttactaatatgtcgtgagatcttgtttgcggctggtggatcagaagtgcttgatagtgctttatttggagggttatacccgatacattatatggaatgcataattagaaatggatgatataaactcttctaacacttgagaagagatgaaagttgagtttttgaggaaaagtaaataatagaatatattctagcacttggaaggcgaacaaggtccttgccgccagaaccttttcgtcatcagttgctcgtactaaatgttggcttctaaagcagccctattcatcatcaaattttgataatgtgttggtgttctggcaggttctctcatcaagttggtgtacttttcaagacac

SEQ ID NO: 91682 - DNA, 583 bp, Eucalyptus grandis
  Intron number 1 from transcript Egrandis_v1_0.037938m (loc us Egrandis_v1_0.037938m.g) derived from phytozome v7.0 (c hr-ID scaffold_2; pos 4485748 to 4486330)
ctttattttgctcccgaaattcatctcatcgaaaggtatggaattcctcttcttcttcttttcactttgaattgcgtaattattgagaaatgatgtttgaaaagtggtatgatcatgaagatttgtcaatgtagagcactagtatttttcccttttgagcactgatttgttatatctaacagagcaagtatacttcactttcatgttgcttttgaattcgtgtctaatatattgcacatatgatgatataggccttagatagtttcatggttatactttggcagcactaaatccgcccctaattgcataaataattaagagattatcactgcgatatgtttatttagcgcgttattatattcccttataatcaatgatcatttaaatctagtagaacatagtatgtttaataagcggtacagtgaagagcatatattgatttagcgtgttattatatttctcttttaatctaagatagggagcatgttttgtgagcatgttgtttttaatcatgttaatatgttgtgcatatgataacaatggccttaaatagtctctttgtaatgctttgacagtgctaagt

SEQ ID NO: 91683 - DNA, 1017 bp, Eucalyptus grandis
  Intron number 1 from transcript Egrandis_v1_0.004469m (loc us Egrandis_v1_0.004469m.g) derived from phytozome v7.0 (c hr-ID scaffold_7; pos 3746055 to 3747071 reverse strand)
gcaagcagttcgctgctgaggaaatttctgctcaggtatagtcccattgtagtctttttattagttctttgtttttttttttagtagctgcagataggaggatatgttgttgatatggctgttaataattagtgtcctgccatcatatttgtttcggtgacttgtatcatttcatgtcattaacaaaatgttttggcgtgtgtttttattagaaacgagtgaagacgtgtcaactcatggtatgttcgggtttgttgagttgttctcattaaattcgtgtcgtttcaataccctagccgttggttggtcatggcgggctgatagaactcctctgtgatataagtttgtgtgaagaaagattgaggacttgtggttttgttgctgccgtggatggtaattcagtttgcaattggaggatagctgaagactatggaaacaggacagttgcatttactgtgaggccaaactcaaagcttgtgtgttcttctcaattgtggtcaggggtcgtgggatactgattttgattgctggttcatgatataaattctcagttaaaacagagtttagaacatttaaaattaggtcagttggagctgtgtgtttagctggtgtgggtctctctttttcgtgatcggaccacaggacaaattgcatggtggccagcttgttcagcttgttaaagggagagtcgttcgcttaagagtacagggttaattaatgagttccgggatgccaaattgttcttttttttgttgatgatcttgtgtgatcttagctgctaagtataatgtattttgtaggtcataagcatgagctatgcacccaatcttcaaagattgaatgtttcattcttcatgatctatgtttaatgtgttgacgtgatttgattgtggtgatactggaaactggtttctttttcagttaatgtgctgattgatagtcggcttgagtatacggtctagacactgaattgtaacatcataacacattggatgtaggtgctgagaaaacttgtgg

SEQ ID NO: 91684 - DNA, 959 bp, Eucalyptus grandis
  Intron number 3 from transcript Egrandis_v1_0.004258m (loc us Egrandis_v1_0.004258m.g) derived from phytozome v7.0 (c hr-ID scaffold_11; pos 1914273 to 1915231)
ggggagcggccagtacacataaggcaggttaggaccatcctgacaaagctcttttaggagttgcttattttgaaataatgttctttcctccatccttctatagaacccaagaactagtgaagattgcaaaacatgaagacaccctgaaatccatctcagttctataatttgtcaaatctcacttgaaagtggcatgtaatcttagggattttgccctctttttaaaaaaaaagaaaaaagaaaaaagtgtggcaccaatgtgttgaagtgatatctaataaaagcattgagaactagtttgcccgagcaagttcataattgagttgaacataaagcttttagagcactaatgagttattatgtacatattgtctagtagtaatttggtagtaggttaggaacaattgtccaacataaaaatggcttccaaaagtataatcaagtcgaaaatgttatgggttcttgagttgttgagtctttaagcatcatttttctgcatgattgcattaacttcgatttcagtaaccgtgacatggaaatatcatcttgcaatgagacaatcaagagcctatgagatgaatgatgggatttgaaaacaagtcttaaatagcccctccaaaccaaaaagagaaaataaaatccttagatttcaattctaaaatcaaaatgctacataatatttgaaagaaatattttatggttcagaagttactgtcagccaactgagagttatacagcattttgggtaaaagattatgaagttgacaactaacatattgctattgaaggctccacgcaagctctttgaaaatgtcgtggtaaagcatgataacaaactctctgggttggtaggatgtcactactattatgttttataaatctttccaggactttcgtcttgattttcagaatgggccagaaacagttacggtttggaattctattgcagtctgatcaaa

SEQ ID NO: 91685 - DNA, 758 bp, Eucalyptus grandis
  Intron number 1 from transcript Egrandis_v1_0.002286m (loc us Egrandis_v1_0.002286m.g) derived from phytozome v7.0 (c hr-ID scaffold_7; pos 401813 to 402570)
gggattgtctgcaataattctcgcgttacttccatgtaaggttttgagcttgctttttgactttatgtttgagaatctgcctttaagaattctatctatctctgcaaataatcggactctcttattttcagaattctgtcgagcgcgggtttgacaggtccgctttcgggagacattggacaattatctgaattacagtttctgtaagttcactgtccctttcccttcccagtttatgttcagagcaaggactaaattaccacttatgtagtctttttctcccaaaagataatttggatatatattacaaaagttttatctagaagttggacgtagaaaccataattggaggcaactattgggaaaaagggctccatttttattttattttttggctggtgtcatgtatgtagtcctcttatcttgatttttgtgttttcttctctcccctgtgtcctaaattgcaaaatggagctgtcaatgttgtgcaagtagcgtgattcatgtctacgatttggtctatttatctgtttaagctgcttgaaaaggcctttaatttgttgctgactttcgatcaaaaagaaaaattggttgctgactataataaaccttttcatgaagagacctatctaacaacaagggtctgactggatctcttcctgaacaaattggaaacttgatgaagctcacacacttgtaagctatataccatcagcatttctagtgtattttgtgtcccacgtctttcagagtcacaa

SEQ ID NO: 91686 - DNA, 579 bp, Eucalyptus grandis
  Intron number 2 from transcript Egrandis_v1_0.033187m (loc us Egrandis_v1_0.033203m.g) derived from phytozome v7.0 (c hr-ID scaffold_11; pos 4629052 to 4629630 reverse strand)
cacaacgatatcatatctaagactttccaggtgaggcctccttcaaattttcttttccaagaaaatggagtgccgatcgtttggattgttgttttatgtgaatggaggttgcagtaggttctgcaatccgtatgtttatgttgctttcgaattagaaggattgaggccatagagtcctttctcactggttcactggatggcaattttgattcaggagggaggatggtcatttgaattcgaaaagcagtcttgaactcaaaggacggtggttgtaaaatctctgctttagttcttcgtgataaaaattaaaaccttaaaagcagtgagacaaaccttttgtgctaatatgttataatcggttgtgcatatgaacaatgagtttcaaattcactgatatatcctttgatgactcttttttccaccttaagaattataaatagattgtacttgggtagttctggcagattcatgaccaactatgttgttgttcttcttgaatttctgtggcctttattggtttgactggaacaaaaactttcaggatgattttgttttcgtaatcatgtccctagggaagaa

SEQ ID NO: 91687 - DNA, 667 bp, Eucalyptus grandis
  Intron number 2 from transcript Egrandis_v1_0.019340m (loc us Egrandis_v1_0.019340m.g) derived from phytozome v7.0 (c hr-ID scaffold_7; pos 38151968 to 38152634)
tccctcgccggattcgctccagagccgagcaggtacgatctcggggacctcccctcgccgaactccgtttccctccggctctccctccggattcgtttttccgcttcgtcgctcgattcttagttcgagctctcggttttcggttttcggtttttgcgcgcgtgtcgtggtggtccggatcggtcgacgtcgttcgagtttcctctctctctgaggaaccgcctcgtcagtcgcgactcggcttgtggagaagtcgcggacgagtgtcggtcggccggaagttcgtcgtccgaggagaagaaagattcgtgaactcgtcgagttccgcggcttcgagtttattaatccgttctgtagtcgagattcgatcgagattctatcagtcgccggcgaaagatttcgtgaatttcgcgctccgagtttttttgctttggaggagtcgctttcagtttgacttgttttagatttctgctccatggaatcgcatcggtctgtcgaatttcttgcgaacttgaagttcattctaacggcgtcgcgagtcgcgaatctgcttcggaatcggattcggctgcggtttcgagtttctgtagtttggagtctcgttcgctcctcctctggctgatcgtcgcgttgtaatgtgcgttcttgcagataggttgcgggttct

SEQ ID NO: 91688 - DNA, 678 bp, Eucalyptus grandis
  Intron number 1 from transcript Egrandis_v1_0.044912m (loc us Egrandis_v1_0.044912m.g) derived from phytozome v7.0 (c hr-ID scaffold_7; pos 45569759 to 45570436)
tagtgtggccaagcaggagtctgccgtgctctcgggtatgcgtcttgaaccttgaaattagtcactgagctttttaatcttgattaccaccattttcctgcttgatatgttcaaatatgttatgattagaaaattaacttcaatccagatgtaggaaataccgattatatgttactgtgcatatttattaccccatgttgcaaagtgaatgaactattttaaagagtaaactaaaggttactagcagtgcattctgcttatatggtgttctttgcttatggttatcgtgatatctggtgtaagtagatagcaaattttaggagcctctccttcatcttatgcaccgacatttttgttttgaattagcaagaactttgtgctggaggtcatcaaatctttgaagtcatcgtgagtcgtttcaagcttttggttctttcatttgtcaagtagcatagtcttggtcagttataaacattctgtgtacttggttaagccacctgttgtttatcaattccgagaaatttcctctcctccttcatggaaggaaaattgaagagaaatttatgatagaaattagcatataagtttctactgctgtctttttgcatgtcacctgatactaattttaactgttgtgttgcagaacccctatcgttgggttccctgttttggttccta

SEQ ID NO: 91689 - DNA, 636 bp, Eucalyptus grandis
  Intron number 1 from transcript Egrandis_v1_0.001686m (loc us Egrandis_v1_0.001686m.g) derived from phytozome v7.0 (c hr-ID scaffold_7; pos 38623243 to 38623878 reverse strand)
tcgcaagctaattcgacttcacatcgcaacgtccagtaagtacttgtgcccttcatttgtctaatcatagtagttttcaaaataatggctcaaagtcaaaatttagtgaaaattgagctgcaaaattcgattctcaagctgtggagctccgggatttcatggaaaatataaattatatcgttgtagaaccatgagattttgtgaaagttgatttgaattaacagtttagttggagtgaaattttaggatttcacgttcaagttttgctttgcgaataccttgaataattgttttggatatgtgatttgttaatacgtataagttgttttgttagcatttaggcgtagtttaatcattttatagttgaggtagcattttacttgattttaacgttgtttctcgaatatttgatagaatcacgaatttaacaattcgagtaacgtttgttgtttggtcataggcattttgagttgtgctatctattctatgaatttataaactcacatcttaaagtgatgaagatttgatatattttgagttattaataaatatgtttgccgcatagaattcgaatgacagccgtgccattccctttttctattaggattcggggtgtgacaccattggtcgagagtg

SEQ ID NO: 91690 - DNA, 883 bp, Eucalyptus grandis
  Intron number 2 from transcript Egrandis_v1_0.006368m (loc us Egrandis_v1_0.004810m.g) derived from phytozome v7.0 (c hr-ID scaffold_11; pos 8522996 to 8523878)
ctcccattgaacattttcgtgtggcgctgcaacaggttagtccttgctggcttttcttttcgtgatttttttaaaaggtggaagtttcattcaggcatagagagtccatggaagccatctccaaattttggcaaacgcataaatgggtatctatatgagcaactattatttttcactttctagctctgtggtaacaaggtccaggctctttatggaagcgtctagtgcattactttattgactgtggcaaataataagttagcgagaaggcatctctaacttgaaattctcattctggacacttttttatgcgacgaagaacgcaatttaatttcaactttgcactttctgctgatatgttctgttcagttatagtggactgaagtttgtaacttgtgactttaacacatgccttaatcaaattttagctagatctctcttccttatttattttcttgctcaacatttttccaccttagctaagtaaaccatgagccacaatatatatgctattgacttatggattatataagtattaagccaaagctcaattgagtgatccaattacgagattgctgaacttgtctcttttgaggaattgaacctgtaatgttgatcctttccttgaacttgttcgtacttctttacggatagcatttcaatcatagaaaaacatagttgaccttcaatcttaataacctggagatgctatccaatgatgctccagtgcattgggtatttaccgaacgtgtagctaagtagccgtggagaacaaaataatttggactgtgttggctgtttttgagttgaaatatattctgctaatttggccttttgattatccatagggttgtccagtgtcaatcaaggagctagatagcct

SEQ ID NO: 91691 - DNA, 601 bp, Eucalyptus grandis
  Intron number 3 from transcript Egrandis_v1_0.015596m (loc us Egrandis_v1_0.015596m.g) derived from phytozome v7.0 (c hr-ID scaffold_11; pos 25940711 to 25941311 reverse strand )
cccatagcgagagctgtgttaagaaggtccgtcaaaatgcgtttgctttttgataccggcgcctttaattcagtgcatctgcttgtcaagaacattaagggatgtcctcatagaagttttgggggccctcttaagtttgtaaagcctaggatagatgttggtcaagaaagcaagaattgactttggcagtcgatttgatctgtagcataaagccttcgatcaggtttcaagaatcaataagctcggccataggctgagaccaactaaaggagtttcgcattgaagtccaacgtggcagtgtcgaattcgctttagcctctgaggtttgaaaactgcaactggattttaccaatgaagatttgcttctgttgttgctagatgtctttttctcttagctgcttttgactgcattttgctatcccttcttagtaattgctgcaagacactttgttttatatgtcttactgtaagggaatgctgcttccatcaatgcagtaactgcacgattgtgccttttctcttcttggagatgtgacgccttggatatttgtaattcttttccatagcttctggatcttgtggaggttaaattgaaggaagt

SEQ ID NO: 91692 - DNA, 475 bp, Eucalyptus grandis
  Intron number 3 from transcript Egrandis_v1_0.011289m (loc us Egrandis_v1_0.011310m.g) derived from phytozome v7.0 (c hr-ID scaffold_2; pos 6997192 to 6997666)
tggagaaggcgacgcgtcagttttgtgtgaccatgctaatttcctttccatacttacgacgaagaattatttgatatttgctgagtgggaagtgccatagtgaattaatcaaaccaactacagtgttcagatatgagtttgaagtttgtatgagctagtttagaccatgatctaagctgctggagactactttttgaatgaagttttcttgcttcaggacctgataatttgagtgacatattacactttacatggtctttacatatttaaatggtagtgtgtccctgacactttttcatgtctatccaactacctagtcttttgctaatttaatgagtgcatttgcattggaattttccaattacaatagtcttgagcttggaatctgcaaagcagcagtttttaatgttttacttcactctgttttttttttttttttggcagcttggactggtagagaagaaccttttgagct

SEQ ID NO: 91693 - DNA, 503 bp, Eucalyptus grandis
  Intron number 2 from transcript Egrandis_v1_0.046193m (loc us Egrandis_v1_0.046193m.g) derived from phytozome v7.0 (c hr-ID scaffold_7; pos 1036179 to 1036681 reverse strand)
tgagggtgttggaatttgtgatccaattctagaaacttcaagatagatatgagctagaaaattcaagaaaaattctagaagaatctacaagctgccatctcttatgtattctagaagtttcaatcttatattactataaaataatagtagctatttgtagagaagtctagagacttcctccacctactttggcagcctatatataaaggagcaagtgctccatgttttgtgtgggagctaagcataaaaaccacatcatgctccctcaccaacacttccttcaactattgtaaaactattttatccaactaatgaaactatttctcatatcccatgttctttgtccttcaattatcctaccttgtcccttgtccatcctctacaatatataccatgcacttgcacacatcattaatcaaaaactataactaataccaaaaccatgcttccgcgcacatttaaactctaacagaggggctaaaaaagccaccaaaggaagaaga

SEQ ID NO: 91694 - DNA, 555 bp, Eucalyptus grandis
  Intron number 3 from transcript Egrandis_v1_0.032922m (loc us Egrandis_v1_0.032922m.g) derived from phytozome v7.0 (c hr-ID scaffold_7; pos 17960421 to 17960975)
ttagagttcaaacgacaggtattatgtgctcccattaatgtcaagcctaagaaaatgtgatgtacttagaatgctttgctttgcttctaaacatcatgttctagtgtggcattgtagttggttatgtattgtttgtatagataggtagaccagaaaataaggattaagtgttgctggattttgtcaaaaaatggttgacacactcacggaatctgcacagcacatcatggaatcttaaatacatgttgccatacccaacactgttaagtcattcaaaattgtaccaactctctgttttaactttgcaccttaatgctgcaatacttttctaatgcattgccctggttagtagaggccttcctttcccaggcattaggcccagctttcgtgtcttgcatccatcttcccccacctagcgtaaccaatggatctgttggtcatctagtattttcttctctggcgatctccagaatggcttttcatgtattatactccgtttgaatcttttacgtggtgtttctcaggtgacccagcgagagaggtgctgaaagatac

SEQ ID NO: 91695 - DNA, 600 bp, Eucalyptus grandis
  Intron number 2 from transcript Egrandis_v1_0.000962m (loc us Egrandis_v1_0.000947m.g) derived from phytozome v7.0 (c hr-ID scaffold_7; pos 44875654 to 44876253 reverse strand)
gaaggtaccgttccaggtctctttttctttttttctcctcttttttgtttttttgtttttgttttggtttcggttcgcagtgaatgcgtgggaattctgttccctcttccggtcggtttgcgctccgcgcattgaggcgagggatttgcattctttcgaggctagctgcttggatgaggttttctggaaagcgagggattgccggatcggtgtttgtttcgcttgatcgtcgagtgagcttggagcatttcgggagggttgattatatggatactggactcgtgttcctaattatagttctgggagctgcattgagtggctccgtacatgcttcatttttcttttcgggtagcctagaaatctgaggaaagagtggcgagcagaaggtttgattagtctgtcgcttgttgtgcttgcggtttcgtaaagtttggaacttgcttatggtgacatgtagttgtaatgctcttggaggctgagtgcgttgtcctctttttagtggcatattggcttgagattttcatgttgtatattgtgcgttatttcttgtttttggagttgcgtccttaatgtttggtgttggttttgtagttcaagcag

SEQ ID NO: 91696 - DNA, 444 bp, Eucalyptus grandis
  Intron number 1 from transcript Egrandis_v1_0.000179m (loc us Egrandis_v1_0.000179m.g) derived from phytozome v7.0 (c hr-ID scaffold_11; pos 30544668 to 30545111 reverse strand )
aatatttgaaggacccgacactgatattgagacaggtaatagtagcacagatgtatggcttgcattttggaaaaccaaaactaaattttgtggaaaggaaagaaaagtggtctaacatatggttacatcttaaagatcaatctggttttggtgggtctgtttggtacgtgcaatgtaggaatgtattaatcaacttgctaaggttgtgtggcctcctacacttctggcctgtgttaagtggcttgttgtggcgagaaaacttagcactctgattctctgagttcctcctattagtttgtcgttagatagtggcattatatatgtcatgataatgtagatgtttatccttttttaatggagaaatactttcttaccaatggttttcttcctgccacttaacatcattggtttatttatgaatttccttttgattgatctacagag

SEQ ID NO: 91697 - DNA, 822 bp, Eucalyptus grandis
  Intron number 2 from transcript Egrandis_v1_0.035973m (loc us Egrandis_v1_0.035973m.g) derived from phytozome v7.0 (c hr-ID scaffold_2; pos 48574999 to 48575820 reverse strand)
aaaacagagtttggaatttccaattcttgcttggggtactatttcgtgttcaagttattgccatttcatcttctccacgatagtttcttcttttcgcaaccaaatagttactggactaagccttaatatggtgtaccttaaccataagatataaccataactcttcatattacattaaaaagatcttttgcggtataggcacgttatattcatgttcatgagtcctcttttttcttccgcttaatctaattgtattattgaccaactctctttttctctcacaaatagtacatgtattttctgcattcgcattgatgatggttgagctgcctacaaattttctgatatgctctgctgattttctgttggcttgtatctccacaccaagtgagcatgtaatggatcttcaagtgtttcaccatgacacctttgatttaatactgttcctatattgtcagcaagacagacatatcggtgcttgttgagataatttttcactggcatgactgctgagctgaagtgtcaaatttgagaactctgaatgtttttaagaattgttttgctctttcatgttgagtacccattacattccagtactgacttgcttctgtttaagggaagatgagggttcccctgtgttgctccttaaagcatttggacctcttttccaacttatgtgaataatgagatttgaccttatcttttttcaacctaattatctgcaatattaaaggttcattgtttggatttgaatccatgttaatgaattgactttctgtttttgcagtgaagtttgcagctttgtgcaaagaagaagaagtg

SEQ ID NO: 91698 - DNA, 876 bp, Eucalyptus grandis
  Intron number 1 from transcript Egrandis_v1_0.015722m (loc us Egrandis_v1_0.015722m.g) derived from phytozome v7.0 (c hr-ID scaffold_2; pos 61409875 to 61410750)
aaaaaagaagaaggaaaaaagtaaaaaaaattatttaaaaattaaaagaaattaatttgaaacagaatctatgagcacgataccaaacgtaattttattttcagaatcagaaattttagatatttaccaaacggcttaaaacttagatttttatagtaaaaacacttgaaccggtatactcgtgtcacatttatccaaaattgggatgattgtgtcatagttgcccctaaattttggtaaatcttggactttggaaggctcgatgtggcacaaatatattggtacgagatttttggtgatgtgagtccttttttttttcatatgaagaagctctgataggttttacttttgtttttcggtgatttcatgcaagttcacttgccgagcattctttttttttttttttttggcttttttatgtgacgataaggccgtgtagatacaattcaaaatgatccgacgtctttgtcttctttttcgagtcaatggtcaatagaccagctggcccacgtcatctctccattgattattctttatttagtcactgaattgacgaaaagtggcgtgtctgccataagagaggaggcgtttagcttggccactccaaaatgatttaccttactgatgacgtaaatctcctcttcaattccgtaagccgacgcgtcaccccgatacctaaaccttccttttcaaaacaatataaaaatgctcattataattataaaaataataccttgacgttccgttagcatccgacggcaggtacggcgccacgtggggtggcgtcgacgtggcgtcagcgtttttaaaattggatatcgaggcgcactccgctacgaagagcgctcccggttgctcgccagtcgcaactgcagc

SEQ ID NO: 91699 - DNA, 855 bp, Eucalyptus grandis
  Intron number 1 from transcript Egrandis_v1_0.001267m (loc us Egrandis_v1_0.001267m.g) derived from phytozome v7.0 (c hr-ID scaffold_2; pos 63731713 to 63732567)
tgcggaagcagacgctggcggccatcaaaattcaggttcgctcccctgggcttttgtcttctgcccgctctttctctcctcctcctcctcctcctcctctttttccttccttttttgatgatcagaatatgactagtatatagaattgctgttttggtagcatctttctttttgatgaaatggaagcttcttttctccgtgtagtagtagttcaatagattcaccatgatagttgccatgccccttgataaggtcggaaggctttaagtgtcaaacgagcaaatgctccaggttctacaactattcataacatgtgccgacaatgcgcgtatacaagtggagatatgcagtgtaaatgtatgggcatcaattcaggtggttcgatttaagttggaataatggttcctggatcattggaaagatgatggaatttgatttgttcctgtgccctgctatcagcctttattcaatcttgtttctgattcaacttcaagggaaaagaaagtcgtcctcttctttttcttgattgaggtgggggtagggttaagcttggaagagccttccgtagtcctaattttacaattcgagccaacaagtaaaagagaaattaagcttttgctggagcagaggttgattatagcgttgttgaagccatttgctcacgtgaagaactacagggcatctcgtctagtctaagattgtcgatggtccttactgatatttctcacttttctctatcccaagtaatttcaagtcctcgattgagactatttctttgagaggcattatgtattgtggtttatgtgaatgtgttgaccaacttgtacctgcagaaaggctatagaggaagaaagg

SEQ ID NO: 91700 - DNA, 776 bp, Eucalyptus grandis
  Intron number 1 from transcript Egrandis_v1_0.043230m (loc us Egrandis_v1_0.043230m.g) derived from phytozome v7.0 (c hr-ID scaffold_2; pos 32931784 to 32932559 reverse strand)
gaaaaatacggtatgctcgatatattatcttgatatagtaggaatatcgtccctagtaaaatgtgcattgtacctggtattgaagagatatttcacaaacacgactgatgacaccggcacatatcatcaacggatggaagtttttcatttcgtgattgcttatgaataatattttatataaagaattgagatcctctaaattagggaatcaactaacaatgcaaatttacctcattgagaagttgacactggcctttggatggccaggctcgttttcctttttatttttcttttttttgcttttgtttttccctttttacacctttttcctttttgccttccctctcctctatcacaagtagacccaccaagagtaataaaggaactttatgtgcggatattccatgtggtagtgacaatcgatctaattgaccaatcaaaaggagatacatccaaacatggtgtgaagtaagatgagattggtaacataaaagtaattggtcggtcacaccatattataataactcccgattcgtgacataacatactttccctccgaagaggcccataaatctttctctctctctaaattcaaaggttgccgacccacacctcctctgtcgtcgcaatcaagcagtgaccctgacccctgcgactctcgagcctccattggccgagcgagctcctccgtcaccggctccatcttttattgcagatcgatgttttaacaccactgaacaaaaaacaaattgttttgcagggaagcttttcttcac

SEQ ID NO: 91701 - DNA, 546 bp, Eucalyptus grandis
  Intron number 1 from transcript Egrandis_v1_0.009466m (loc us Egrandis_v1_0.009466m.g) derived from phytozome v7.0 (c hr-ID scaffold_2; pos 45339248 to 45339793)
acgaaactttaactctcgattgtccactctttgttgtaagtttattcttaaacccatagtacagttcctccatttgtctgttcattgtgatttcttccttgaatgggacaagctgttgttcacaatttatttatagcccatcctttgtaaagggatatagtgtttaagaaaagcaaattactagaatccaaaacaaaaggtatatttctgatatgctgggctctatggttgtgtttacttagttttcttcaggaaatgagttactatgttttcggttttagattctactcaaacctatgtgtggttgctcaaacaaaggcagtctgatgaaaaaatattactgatatgctggactctacagttgcttctacttcatttacttcagaaaaaaagaaacaagatcgctggttttaaattttaacgacacacagactctctctctctctctctctctctgtgctcgtgcttacactgttttggataagaaaagtggttttgtcttgttctgttcaatattctaactatgtgaggttatacttcttcagc

SEQ ID NO: 91702 - DNA, 774 bp, Eucalyptus grandis
  Intron number 2 from transcript Egrandis_v1_0.051796m (loc us Egrandis_v1_0.051796m.g) derived from phytozome v7.0 (c hr-ID scaffold_2; pos 64206729 to 64207502 reverse strand)
ttgttgctgccattaaagcagctgggaatatcaaggtggtgttgtgcctagtaatttcatttcaagttcttattgttggtttagcatttgactaatgggtgatagcttgattcttgtcttactggtttaggtgcatcgcgatctctttgtgagctttgctttaatgaaatgggatggatggacttatctatctgtagacttcaacttctttctttttaaaatggtcataaccttgtgtagaagtcatcagtgaaattcaagagtaactattttgaattcaactataggagagtgtgggaaacatgaactagttaatccttgaaatggtacttagtagttgtcgctactttgggtggttgacaatcaatggcgagtggaactcagcatgctcacataaggcattcatcttacctgatatcttgttacttgagaaagtgtccaagcaagtagaatctcgggctattctatacttgacagagttatctggctactgctctatttcttctattttttcttatagcacttggggtcgactttgcttaattgttgaatttgttgattcacctatgatcactttttactatgttatagtaacttattgaaacaactcgaattcagtctcatataagtttgtcttccttttttcgtcggaactcatacatgtttttttggttaaggggaatatgctctaaattttttctgctttctaacaaagatgtttcttctgatttcattgtgtttatttttagagattcttgccttcagagtttcgaa

SEQ ID NO: 91703 - DNA, 488 bp, Eucalyptus grandis
  Intron number 1 from transcript Egrandis_v1_0.018376m (loc us Egrandis_v1_0.017157m.g) derived from phytozome v7.0 (c hr-ID scaffold_11; pos 2624656 to 2625143)
tgggagtgacgttcactatctgaaggttatggttttatgactgttatctgtcttctttattgatttctgctccttctgttaatgatagtctattagctaaggctcgggatggcaacttactttcatgtggattgtgcaaaataagctggggaagggaagaaaaaggactagttggtacactgctatgactctgatgagtcacagattggggacttgattttatgaagggctattcaatgagagaggacattttagatgctggtacgtcagttaaaaaaagaatgattgatcaaactcggttgagggattcccttatatgttgggccatatggattgtgaaatgtagtgaggaagatatttctctttggttagcaatacctatgatttcatctttagtaaaatcacatctcacaagttgcacttggcttataaatagatttttttacacttgctctcttttgattgttttttgacttgcagaccctaag

SEQ ID NO: 91704 - DNA, 950 bp, Eucalyptus grandis
  Intron number 2 from transcript Egrandis_v1_0.027565m (loc us Egrandis_v1_0.027565m.g) derived from phytozome v7.0 (c hr-ID scaffold_7; pos 10907141 to 10908090)
gctgcggttgcagccacaatacagaggtagcatcatcaccactgcatgtatttgctgtaattaccctgggaataagatcaaagcagtttcggctttttagcagtaacagccactatgacagacacagatactttaggtctccctcccaccacaagaaaatttcgtgataaattgactattacccgaagttgttactatatgagtaaaggaaatatgtgggtagacgtcagtttgtggaatctctctctcaatgaaagtttttttatttttatttcctcctttctaaggagaacctgtcttgaaatcaattaaccctttgtttaatagttgtggataatttgcaaattagctatcttgcaaactaaagatagatcaaactctcaggacttataaaaaggaatctgagtcttagagaatgatttcttgtccctgttcatcagggccttgtctaggggcctcttgccttcgtacacctgattgctgtgggaagcgtgcagtcatgatttaatgattagataggcattataataggctttgatatccagcatcattaggataaagaaaacataaacatcactggggtttgttttgctttctggtatggttgtctatgtgtctggttaatatatgccatatcgtttgtttatgggtttcgatggaccttatatacatatagttttcttccggttaatagcctaatcttttgggttccaacatagattggaaatcagattctgccccaatttattttctcactgctctgttttcatcaattccaagtgctgctgtttgtccagtttgcatgtgacagaggacgttaaagtattacacatcgcttgtctatgtagtgtttcaatgtgccgtacatacttttagtcttcctccacttaatagcttaagttttttggctggatattctgacttatatattttctctacgctcttccagg

SEQ ID NO: 91705 - DNA, 239 bp, Eucalyptus grandis
  Intron number 1 from transcript Egrandis_v1_0.013228m (loc us Egrandis_v1_0.013228m.g) derived from phytozome v7.0 (c hr-ID scaffold_7; pos 561773 to 562011)
cgatctttatcgctacgacccttgggagcttcctggtatttatttacgctactcagtcaattgatatctttctttataaggtatttttgattcaagcagttcttctcttttcatacaaaagcatcaagatccgatgcttaatcttatcagtttcgtccaaaagctcgcgttgacccttttatgggttctgtttttccaaattagccttagctgcaattggagagaaagagtggtttttc

SEQ ID NO: 91706 - DNA, 631 bp, Eucalyptus grandis
  Intron number 2 from transcript Egrandis_v1_0.013228m (loc us Egrandis_v1_0.013228m.g) derived from phytozome v7.0 (c hr-ID scaffold_7; pos 562211 to 562841)
gcttgccgcagcacgagaccgaacgctatcaaaaggtgtcaaccatctccattctcttttggttcttcacaatcagatcaatcatataacacaaaagagatgtttccgaagctttaaagtatttatgtcttttgaccatgcaagaaagcaaagtctctagctaaagattcgatcacttcttctttgccctccttttcattttcagctaaatgactcctttttcacttagccaaagaagtgaaattgaacaatcttttatgaagttagaatatctctacttaaccctagcaccaggactcataggattccgaattattgattatgcaatatgccttttccgatagtgtaaatagggtattcaaaatttctgcacaaaattcaagaaggaactcatcacctttaaatcagttcaccaactcattaagacctcttgcagattcaatatccttctttgcagtgaatgtcggagaaaaatttgcgcagcagtccttcctatctcacctttaaattggctgctctcgtggtctcttactacaataacttctctcatctctaacccgtgaacactcatgttcttcctttatgttcgtttgttttcctttttcgatattttgcaggccgaaatatcgtt

SEQ ID NO: 91707 - DNA, 1027 bp, Eucalyptus grandis
  Intron number 2 from transcript Egrandis_v1_0.035640m (loc us Egrandis_v1_0.035640m.g) derived from phytozome v7.0 (c hr-ID scaffold_2; pos 47950536 to 47951562 reverse strand)
gacaagaagctccaaagtaagtcgttgcaattttttcttttttcaatttctgtggcttttttttttctttggagttctagtgttcgtcgttgtctgtccgaggtggtttcgtggatctacgtcgcgtgcggcgagctcaattttttagctgtgtagccggttctagaactagagatcagggtgaacatcgtgggatttcgtagtcatatatgtcctatgtgattttgacggtgttacttgctttttgcctctaattcctttcgcggcaaacgacgccatgttgtttcgtgctatgggtgaaattatccaatgtggtgttgtctggattcacttgccttgcatttcatgatggtttgccgattaagggacaggtgaattcaaatgttgcgtgatatgggttctttcaaattacagtctaggtaatgtgtagcctgttggatttgcttatgagattcggttagggcaaaggagctgttcacacccctttgtatagtgcacagtaccttgatatcctcaacaccgatggagctgcttggcatgtactgcgtcttgacttgtcaatgttgggtcttggttatgataagaagctgtggccttgatctgtattgttttgttcttcagatgtgaactccaagagttatgtgctttgattacctaattatgttctatcttcttcatatgagtattttggtttgtggggttcattggtttgtgcatgtgtttcatctgcagcatgggttggaatgtcagactattgtcgttggaagatgaaaattgtgcttagagtctggtgtgcattttgagattagtctgaacagttcgtggtgattacctgttcatagatcacttgcgtttgtgtattttcttttttattgaaacatttggtactattggcggtttgcatatatgaaaattcattgatggagataaaagatccttttcatggcttgatttgattcatccagatatcaataagatagtagacctgactgttctcttctctgcagttaagcttaacgcaaatagg

SEQ ID NO: 91708 - DNA, 630 bp, Eucalyptus grandis
  Intron number 1 from transcript Egrandis_v1_0.004414m (loc us Egrandis_v1_0.002089m.g) derived from phytozome v7.0 (c hr-ID scaffold_7; pos 46547555 to 46548184)
ctggtttcttctcatatagacactgttttctctacgtaagtttacttccctctaagtttgtctttgattttttattttttttttaaaagtgcacttatatgcaatgtcactgggcatgtgcttgctttttcagagtttctattaggaccatgacattgtctatgggtcatatagcataatatctgctttaggatctgaagtacttctgtttttcacctctgatgcattcgagattttcatcttctgcaacactgtattatcagacaaagaggtgcatgtgtctgtattgaaaagttttataagtaatgcttcatcagagagatgagctacataacatattctagtggctgggtaaaagaaccagtgttgaattatattgttgtccctggaaaagaagataacaactactaggtttgaccctttccaataatctagatgtgcccacagtatctttttactcaacatctaacttgctttactttagatactattgcttgcataacttataatttactatcacttcagtttggtgttgactgacaccacattttggctggtctcccttgtaatatccttatatatcactgattgttttctgttttacagagaaggtgctggtgattgcagttc

SEQ ID NO: 91709 - DNA, 863 bp, Eucalyptus grandis
  Intron number 1 from transcript Egrandis_v1_0.041928m (loc us Egrandis_v1_0.041928m.g) derived from phytozome v7.0 (c hr-ID scaffold_7; pos 25942838 to 25943700 reverse strand)
accttcaaaagaaagtcgtcaagcaggttttaattgaatttttttactttgtttcctgctaatgtttatgcatttgtcaggattattactttaccttatgatgtttgtttctgataattaggcttgtggatcccttagtttttcgttaatgcaattagatggacagtttggcgagggaaaagctatttgataatgagaacacgcatagagagaatgatataggacaggttcagctgatgttatcctattgaaacgtcggctttctttaactttcaaatacatttatgctcttaccaaacatgcattttcgtgatatggtggttgtggtcgagatgattttcttcctctcacaaaaagagtgaaacggaacatacccttgatgagatacaggactacgaaatattttccatttttcagttgagatatgttagagataattaggataattttctagatatatgcgtatgattactgtaagttgagggagattcttggggagattcttggtaccgcacattgttctctgtgtcgaccttctcttaccatgacaccagtctttgcaattaaatgtgcaagaattctctcttgcaaagatgaatgaatttacttcctccagaatttatttatttatttattttgggtcagatacttcctccagattcaaatattatgtttttcacatggtttgtattcattaagcagaagaaataacttgtctaaatgcgttaaagaaaagaagctggcctcttaaatggctaattatctctctcatgtgtgatgtggcaagaatattctggcgagttcagttgagcttgagagtgtttctttatgcacaaaaacaggctgaatatctgtttagcagc

SEQ ID NO: 91710 - DNA, 778 bp, Eucalyptus grandis
  Intron number 1 from transcript Egrandis_v1_0.041673m (loc us Egrandis_v1_0.041673m.g) derived from phytozome v7.0 (c hr-ID scaffold_2; pos 19920252 to 19921029)
agaccaacagtgcaagaaggagaaggagactgagggtgacgcacttcttcctcagttcttacgtcttcgcacacgcactcctctgcggagatataataaaacccttcatcttagtttgcctgatgacttttctccaaaaaagcttggcatgaagaagggagctgtccatggttttggaaatgatgttttcggctcagtcaagggtctagcttgctactcaaatcaagaaactaattttgattatcacttaagtggtttggtcttgaattggtatttatgtctccatttttctagattatatgtaaattttaggcacctactttgttagtgaatttgaagggaatgtataacaactatctgtttcccgttggagaattgaatacctaggtactaaaaaaaaattgagttgtgcagctttacagtatctctcccttgaagatgagaagaacctttgctatttattagttgactggactatttaacatgcataaataattaggagaaagctattctctgtgaacgaaattaaaactttgtgaaaaatgtactatttcaccctgtcgtattgcaggtatgcacttctgattatcataatcaacagttttgtttggcataacattcgctgttaaagttgtcaatggaaatcgtatgcaaataagtcagattcattgtaatttatatgttagcaaaagggaactcttggtgtttacattctgctttctaagtgaatgaattctctctaggtctgggaccgtcgttgtctttttacaacaggaca

SEQ ID NO: 91711 - DNA, 706 bp, Eucalyptus grandis
  Intron number 1 from transcript Egrandis_v1_0.053495m (loc us Egrandis_v1_0.053495m.g) derived from phytozome v7.0 (c hr-ID scaffold_11; pos 8216586 to 8217291)
gggtatacgagtcggaaggtaggtaacatgaacagtcactatcttatttatcaatttactggtgatttcatagactcatacattattgaaggcagatcttgtattaaaatcattatgtctccgggccaactggacgtctgaagtaccgatcaaatttctagaatagccgagactcctctctgatgaaagttctacaagtctataatttagtcttaataggaggtagtcaaagtttgcgatcatgaatttctctgcagttagaaacaaagtaacatgtctttgataatacggagataacaagttatatatttcgcttaattgagccaatgaatacagtcatgaataaaaggcagggtttgtcaaggttgcattctgcttttcataaaacaaaaccaggggtcagagtggcaaatttgaccgctccaaatgtagcacaatctcataacattattatatgttaacattatcattatgtcgacctatgaaatgactggccacatacattttttcatacctcttttctcgtctaaaatgaacttggtacttatgtgttatttcttccaaaagagcagaaactgcatttttagaagtagaagtttccagagttcattcccgttatcaatatggtataagtttgttcttttttcctttttacatgcttccgatcccagcaattggcactcctagcgttggcttgctcgtttgc

SEQ ID NO: 91712 - DNA, 1004 bp, Eucalyptus grandis
  Intron number 1 from transcript Egrandis_v1_0.015648m (loc us Egrandis_v1_0.015648m.g) derived from phytozome v7.0 (c hr-ID scaffold_2; pos 58078577 to 58079580)
gggccaacgatcttggatataatttgcttgggtacgttgatagagctacgaggaagtgaaactgacatgatcatcaggtaatggatgccacggacctcggaagccactaataacagaggctgagcgatgtgggttatgacaatcatcgattaaagtaatgagggacttcaacgatgatgttggacgtgaagagtagcaaccatccggtagggtggttgggggtggttgtgtctacgtgttgattaattgtttgtaagtacatgttgctgaattttaggaatcacgtgggatgtgtttgatttctttgtaatcgttcatagtagttataaattttagaattgtaatttgtgcaagagattgtcaagcagtcaatggatataagtcgtttgattttgctttcaatttatctttacatttcaatacacgtttacacagctaaacacgattgtctctaatctcggcacttttaattttcttatcaattcccattttaattcaatggattggatcaaatattgacctaaacagttcttatctaagactgcattaaatttcatttatagaataactggctcatacttgggaaattgctcattcagtcctcgtctcgattcatatttcaaatttttgttggtgggtttcatgatccgaaatctacctaagtaactacataagcgtgggtccacataaagtaactacaagggttcgaataactgaatatacgaagaagaaaacacaaggcaaaaaacacccaccacagaaggaaaagggatcaaaggactggaggaaaatgcaagtgaatctgcaacatcagattctcatctcatctcatctcaacgttggggacatgaagatgaaagatgaagatgaagaagaagagaaggccctccttctcttatctccttttctttcctatccccatgaccgcgacacaacttcacggcacaacatccgtcgcattacccaaagggagaaaaggcagagagataaaggaaggaaattcg

SEQ ID NO: 91713 - DNA, 831 bp, Eucalyptus grandis
  Intron number 1 from transcript Egrandis_v1_0.023912m (loc us Egrandis_v1_0.023912m.g) derived from phytozome v7.0 (c hr-ID scaffold_2; pos 44049400 to 44050230 reverse strand)
tggagcgccaggaggaggtctctctggctgccaaggttttggcgcattttcctctctgggcattcgcttctttggttctttggcaatttcggtttgcttaggatgttctgtatccgctgttagacttaccctgtacaagttatttggcccgcaagttctttttggtgctgcttctagtgctaagcgattgcattgtatgtttctcgcattcgggcagcgaaatgttttgcgtgcgtagctttgattttcttcaacgtagaaactatcaaatcgcatagaaaagcaaaggtacgttggaggagaagtccggggaccgttgcctactacttggttgatgaaatgcttgaatgatatatttctcctggaactgagattagacagtgttagggtttgaaactgataaaatattgatactttgtgattaagtcttgtgattgggattttgctgcggtaatttaactttgttgcactccaaaggctgaagattgacttgcttaaatgtacctcttctttttatgtatcggtctgttttcctcagctgccaccgcttgcaatattgacaatgagtttatactgtaactagtgtttgactgtttttcttccctgtgaagttgttacgaattatgttcctttaatgagtagctgggttgctaattgcggccttggttcattttataaatttttcaagggaagctcaacaatcagaaacttccaatgtttgtttgatttgccaacctttccagcactgctatggcatttatctgttgtggctcaaaagcaccttgtcgaaatgcaggtgtttggggtcattcaaaagcaagactggtataa

SEQ ID NO: 91714 - DNA, 959 bp, Eucalyptus grandis
  Intron number 3 from transcript Egrandis_v1_0.010909m (loc us Egrandis_v1_0.010909m.g) derived from phytozome v7.0 (c hr-ID scaffold_7; pos 50408956 to 50409914)
tggaactggtattctaaggttagtcagcatatctttttatcagatgtcggctctttataaatatgcatttatctataaaagattatctttactatcatgtatgatgtaagtcatggtcataaatgaactttgttctattagcaaaattcacgtgttgctctttgctcttcatttcttctgtctgcttaaattttggtgatgatattgtttggtacttcctcccaaaccaccaccaccaacaccgccccccccccccccccccctaaaaaaaaataactaacaattttaaaactccttataaaataaaagtttattctcctgcttccttgtatggatgtcaatacctttttaatttatattgggatattcttacataaatggcttgggcagaattttccttacttgtataggtcacgctgcattattagttattcattatttagtttaagcaccattatgttcagtataagaatacgtatctcaatatctttgttgtggttagattggctctcttgggttatataatcctcaaccagggtattcttgttgcgggattagctatgctgggaccttggtcatgttttctcttgattaatgtctagcaattgcgtgcacagctcactcagtttatgttacaaaaaagttttctgcttccactgctgtttgcaatcggtttgatctctcaggtcccctctcccaatacttttgattggattccatcttctagcaagccattaagatgcctgagtttttaccatctctaagccacctggtgttgcttgccgaattgttttatctattcaaatggttaatttcaagtgtcctaagtttgataaattcaagttgtgggtgttcactttatccctcccttttgatgacctcatattagtaaatgagcaccgccaaatttttcttcattgttagcttatttgctgctcaagctggggcctcaagagtga

SEQ ID NO: 91715 - DNA, 580 bp, Eucalyptus grandis
  Intron number 1 from transcript Egrandis_v1_0.007798m (loc us Egrandis_v1_0.007798m.g) derived from phytozome v7.0 (c hr-ID scaffold_2; pos 57365576 to 57366155 reverse strand)
acatcctcgatctctcgctgatcgaaactttccaggtaaaagccttctccgtccttgctccctacttcttcaatacggataaaaggaagttggggaaatcagaaacccaaaagccatcttcgtctccgtcgcgtcgatttacgcgttctgcgatggaaaccaaaaatgtttgcagccaatcaaagatgagaaacgaagaaacggagatctgggtgacgacgaatcgttgctttttcgtttttcttttactgggttgtgaactcgtgatcagtgacatcggtggttgagtatggggaaagtggccaatgactatttctctcgcattaataaaccgaacagtacaagccaatagtggaccccataagacgcaaccgaggaggaacatccgcctcgtatcttgtcatgccgtgtcgtgttctgtcgtgttctgattcgaatccaaaacgagatcgattttgtccgatgataattccagagcagattcgactcccgctgctacatggtcgatgaactgagcaggtgcggcggatcgtttgtctttgcaggcggtggtctcgagcctcggagacaacgacgtgat

SEQ ID NO: 91716 - DNA, 924 bp, Eucalyptus grandis
  Intron number 1 from transcript Egrandis_v1_0.010032m (loc us Egrandis_v1_0.008766m.g) derived from phytozome v7.0 (c hr-ID scaffold_2; pos 52327243 to 52328166)
cggggctcctgatctcctctggaagcagacaggtagcttcttcttttagtcctctctcttgataggctgatttgccagagatgatcctcattttctatattgtcacgactcgggaaatcgtttcattttttttatttttcttttcttttcctttcatcttttttctggtttgattttagctacgtgcacatcgaaaagtactgtctgtgaattaggtggagtctaagaactgtagagatctgtgtatggaattgactttagctcgtatgattggagtgtccgaatgtggttgattatctagcgcgacattgggctggaattctcacttctagcaatgcatattttaaaaaactgaacagtttctaggtctgaacatattactggaaagatttttttattttcctggctttattgtccagtccttcgacaccctttaaacttttctcgcatttttcgcaccgttcgtttactataacaaggcagtgaggaacatgaagctatattcgtgttatctagtaaagggtaaaagcatatggaatgagcaatatgcagtatgatctgattggttctaatcttttactagttactttctttgtgatgggtaatttaaatgtaattcacatcatagatgaaaaacctcgaccgatttctatgataggactgaagttcctcaagctttagatgcgtggaacttacgcttttcattcattaggaaaccaccttggatcctgacggtttgatggccacataagcttgttgttaaagccatgatcacgtctgttttaatggttctgtgctggatgcctggtttcccatttcccctcttgaatctagttgaatcatttgtttatgcatagccagttgatcattgacattaacaagaagcactctcatacgaaggcatatactggtactgactcttgg

SEQ ID NO: 91717 - DNA, 912 bp, Eucalyptus grandis
  Intron number 1 from transcript Egrandis_v1_0.003955m (loc us Egrandis_v1_0.003955m.g) derived from phytozome v7.0 (c hr-ID scaffold_11; pos 12973818 to 12974729)
ccccgtaccagaaggccgccactctcgtcgatctggtgagccccccacccccccccccccccccccccccctcccgtcccctcgcgccccgccggcgagcgagcgcgcgcgactcggtctcgccagctcgctttctctctctctcttcgtctttcgttctcttccgtgttcaatcccgcgagtcggttttagtcgacgagcgcgtgctgcatttgcgccgggacgtcgcgtcgtcttctccggcgcgcgacgaatgggagggcttcccggagcatgaaatcagcagtcttttttttttttcggtttccaatctcgatcgcggattgccgtcggaggtggcgtcgtgacgctgcgttcgcggcgatcgcttttcgccgcgttgagatcgtcgctgactgatggcactgcgctgttgtttgctgttgaggtgagatgggctgagtttgcgatgtttcccgagtcgttgagttcgttagaaccgggttacgtgacgggaacgcgaaaagtctcgatcttgtctacggcaatttagccgcgaaacattggaatgtgctcttgtttgattatcaggtttttgggatattaaatcttgagtgcttctttctagctaatcttggcttaagcttgtaaacaaactatttcgagtttctttcctgcccagcttgcatttctatatcttgctttctttgtttcaatcgtggcccactgctttagtgccttttgacttgtctgcgtatgagaaccgtgagcttgtaaactatataattgaggataggtgttctgtatatgcgcttattccctatcttggggaatgaacctataagtttgttcctccagctggaatgatcattgctgatgttctttttgaataatcacgtgcgaatgattgaaaatgcatcctgcaggccgaag

SEQ ID NO: 91718 - DNA, 865 bp, Eucalyptus grandis
  Intron number 1 from transcript Egrandis_v1_0.033522m (loc us Egrandis_v1_0.033522m.g) derived from phytozome v7.0 (c hr-ID scaffold_11; pos 11343820 to 11344684)
cttcggccagcggcgcggcctcgccggcgcggcgggtaagctccccccacccccacgaattcgcatttggaatgatcgaggatcacgcgtcgggactgtatgagcgtttgcgattcagttcggatccctgtgtcgctagtccctcttgcatcgtggcatcgctattcatggtcgggaagttcggggaaggacgagacgacggtgtctctagttaggtttttttttctgaatatcatctgattttggttttggcttattcctagctggatggtgggaattatctcctgaatccgcgttgcgcggttgtggatttttaagatgggtgtgtatgacttctgctggcatggcaatagagataggcggatatagggcaaaatgccggttcagtggtggctgtgttgattgttgacttactgggtattctgtgaagaacccattagggtcatgattcgatctttgggatcgaaagtgggaatgaaaaagattagcggtgaacgtagcatgtgcaattcgacggatattactcgtttaggtcagtgggggaattggagtagcaagatttgttgcttccaagctctagttaagtgtcaatcatggaccttgacaatgttgccacaacaaaaatttgttttgttactagacaatggccaattcttgaatctttgctttaagcatttctctagatgaagatcatgttgttaagttgtatagaatatctcgagacttcttatgtaaatctgtaaagtgatggtttctcattatctttcaatttaatcttgatattattttttttcttatctatcctggtattagaatctgctcttttcattttcttgattcgcttttttatgtcatacagatcacc

SEQ ID NO: 91719 - DNA, 523 bp, Eucalyptus grandis
  Intron number 1 from transcript Egrandis_v1_0.046264m (loc us Egrandis_v1_0.046264m.g) derived from phytozome v7.0 (c hr-ID scaffold_7; pos 3888479 to 3889001)
cagagtttgagcattcaagggagcaagggaccgcagttatgattgtctaatatcattgccgcttgatatataaattatgaggaattagtctacagaatctagacagagcttaaatttatggtttttaagcaaaagtagctagtagttccagtctgtagctccagaaaagcccctgtaagttgaacatgatggtcagaggaaatttgctcgagagagaggacggtcgtgcttaattggtactatggcttcacttcttttgttattaggactttaggaattttggtgccatatgggtgtacgaatttgatagtttttgaattaagtgtagaattaattgatccgatttttcaccgatggaaactttcatgtttttggaagatagtattttccgtgtaaagcttttcctttaattagatttgccacttgtgctgatggagggattggttgttcaagtaagtttacttgaacaaattattttgctatgatgtttagcggcctcagtttgttcttctgaagatactct

SEQ ID NO: 91720 - DNA, 831 bp, Eucalyptus grandis
  Intron number 2 from transcript Egrandis_v1_0.046264m (loc us Egrandis_v1_0.046264m.g) derived from phytozome v7.0 (c hr-ID scaffold_7; pos 3889068 to 3889898)
tttttcactgctgccgagacaattatagttgttctgtaaggacaattatagttgttctgtaagaataattctttcttcttgttttttaacttattccttgttgtaagaaacaacgcgagttgatgaaaatgacagcagttgcttgctctatggtcagctatatgtgctcagtaattttgcacgtgctctatggtcaactgtatgtctcgagcaaatgtgcatgtgcatgtgatatccatgtgtagcaagccaattagtggccatgcgtgtttttctgctgaaattacctgctagcacctttctgataaagcaaagtgtttgaacagttgaaatgggttgcggtgtagctgttctgcctgagtgtcacgagctgacttttgcagaagctttgagcagtcacacatttgacgtctaactatctagtacctactggcatggcgtagtatgctggacagtgtttgtcaagctagatgtgcaatagtggacttctggcttgagatatggcttgagttatgtaatgctccttgatgagcttagcatcttgttggagtgtatagttctgttgttaagatgtgcaataagtatttcaacagtgttaaatttctcaaaacaggagtgatgcatttcaattttcttttataatagttgaatctagaaagaaaataataaatgatatccttcttggttggtgtaaagaattatcgtcaagttagggtcagcaggtgctgaatgctgcccatcgcccttaaatcttatattaactttgattgctgtacataaggcttcctgatctggcctgatatattatttgcagggaccttgaccctctat

SEQ ID NO: 91721 - DNA, 699 bp, Eucalyptus grandis
  Intron number 1 from transcript Egrandis_v1_0.013454m (loc us Egrandis_v1_0.011813m.g) derived from phytozome v7.0 (c hr-ID scaffold_2; pos 62943621 to 62944319 reverse strand)
ccaccgtgtggctcgcttgggacactcagaaatcggtacgttcgtcctctccttggggggctctctgtttgattggtcggaaaactgcgatgagggaaatgggaagaggaatggagtttaggagagtaaagatttggtttttaagatttggctgcaaaggaaaatgactgaggatagacactttgtaatgcgtgctgtctaactcgtaagttgctgttgtttgttcgagctgaagcgttgatgatagggattagtgccatattgggtgatgtagaagtacgtgtatgtaagtgtgatgttctttcctcgaaatactgaaaatttgggttaattgagccagcaatcagttcactcaggtacgttagttgcagaaaggaatgtgtatactagcttcatgggtagttgttttgcaactgtgtggggcttccctgagtagacgaccttgctccttagttcttagtaataaaaatgctgatacctctattggaaattcctagatattgtgtaagtctcagtttgtctggttactcttgagatttttcatgtttttttatgtagtggattcttgtcttaattgcatcaactaattcaggatgttgccaataattctctctgttctagtcgttaacaactggagaaattcattatttgtagcattatgtagctttgaagatccagaagagcgctcagcattacaca

SEQ ID NO: 91722 - DNA, 881 bp, Eucalyptus grandis
  Intron number 1 from transcript Egrandis_v1_0.054413m (loc us Egrandis_v1_0.054413m.g) derived from phytozome v7.0 (c hr-ID scaffold_7; pos 11551378 to 11552258)
cactggcttgaagtgccagtaagcaactgtttacttttgggcaccgaggaaagatgcacataactgccaaatgggcattttgctttcaattactgtcgttgagcagactttgatgtttcggctttgctagaatgtggtgtgtagaacttttgaatggtgctaaaatgtccagaaacaaaagcaggaatttgtgtttgttatggctgtagcattttccttctcctcttacactggggggaaagatctcttcagcaagtcatctcatctgttgggaaaatgaaagattgtgtatatggtataaacctttccttgcaaatattgtgcatcactctatgagagaacttgctttttgaagattgtatttgtgtcagtctcaaatttcgtcaatctcgaagttgatatttatagcttgattgttcgtctggcctcttatttagctacatactgctgaaaagaagaatgataaatgaaaattttaaatttgcatactatacgtaatgccctgcctttgaatatgagttacttggttttgatttgtggaatcgcaccatgcagatgaacagatatgggctaatcataatgggattctttactaatttgcctgttgatttctgttttgttaagggtagaggtctcattctggcttgtcagttaggaatatcactctatcatcatccaatgcattgaatcatgtcgcagagactccggagattggttggagtttactccatggtgaaataatcatataaaattttgcaggctgagcatgtcatggaagcgcttcagaatagcaggatctcacaacatcaagtgagtgtcaaatggtggaagctcggcagattattctatggcttccgaatgtctagcattgcctcaggaaa

SEQ ID NO: 91723 - DNA, 825 bp, Eucalyptus grandis
  Intron number 2 from transcript Egrandis_v1_0.023865m (loc us Egrandis_v1_0.017153m.g) derived from phytozome v7.0 (c hr-ID scaffold_11; pos 13237552 to 13238376)
gcgtctctgttcaaggtacgcaatttcgtctctctgtcgtcattttcgcggcgttctgcgttgctccgtgcgattgattggacgagtttagattgctccagaaaaagcttgtggaaggagattgttctgatttggttctttcccgccccgatggaccctcttgtttttgggggagttccggcgggacctgattattcaaatgttttctggtttggttgggttggatgattacacgatgggcattccggatcaattttttttttctctagtttttttaaagattatttggtcattgaagtctttagagcgcccgtgatgaaaaccctttgaagaaagatgtatccttttgcttcgaatggattttgccacccgattttaggaggcttcgtgttctttgttcgggtgctttctgtgtagcagattatctggatgtttctctaatgctttttctttccggttctgaggcccgctgcacgattgctgcgacgaaattaagagcttgttctggagatgtgttggtcgacttttgcaatttctcttttgggctttttgtgtgactgaggttaaggttttgcggactaggctggagcttttgtcaatatttgagagaattaacataggcatcactcgataccctctttcttcatgagttctgcgggtgattaaagatgcatgaacataaaatagacttggctttggcgaagaaaatattcatcttcgtgtatatctgagtgataggatgcagtgattcccttttcttgccttcttttgatttgtttcttcatctcaggaccaaaacaagctttcggcataccgagacagaaa

SEQ ID NO: 91724 - DNA, 898 bp, Eucalyptus grandis
  Intron number 3 from transcript Egrandis_v1_0.018002m (loc us Egrandis_v1_0.018002m.g) derived from phytozome v7.0 (c hr-ID scaffold_2; pos 42532883 to 42533780)
gctcgaaccccaacgcggacttcaacccttacgaggttatggcgctgtcttttgaagtttcgcttgtcgctagcatttgctagtttgaggaaaaatgggctgtgaatggtattgtgcatagggcctttgaactgttgagggttttagtaggtgggattgcatatgcttctgatctcgatgtcatttcaagtgtctagcttttgatctgattctaccatgctcgcaagctccggtatcagtggtcactgtaaatgtggtgaattcagtacgattgaagtgctttctgtctttttacttaaaaacttaaacgctgtatagaaccaggtgcgcgatgctgtccgccatttgtttctctttgtcgtgttctttttttctttctcttgcatcatttgttcgttgttcctgaatctgtcagagccatactctattcctgaagttttgtccattggagtaaattcgcagcagtactgcattttgtatcacaagtctcagactttagcctttgctctgggttttgaaaccagtcttctattccagagccttccatggtcatcattttagtgttccatctctggttaacgacctatcatcagagatggatatgatgctcgacctcaaccagagggaaggtgggcagaccttaataaaaagaaaagaacaatgaaaaaagccacattgatttttttttttcacttgaaacaaatgaaactatgggaaggacttggttgtgccatttgaaagttttgagatttgactgcactttggttatttaaaacttttaggactaggtttaggacttttggtacatttagcattgtgctcatctttatatggaaatgtctaattccttgttcttgattcaggttttgggcgttaatccaattgagggatttgacat

SEQ ID NO: 91725 - DNA, 561 bp, Eucalyptus grandis
  Intron number 1 from transcript Egrandis_v1_0.025219m (loc us Egrandis_v1_0.016925m.g) derived from phytozome v7.0 (c hr-ID scaffold_2; pos 62623846 to 62624406 reverse strand)
gaaaaatctgaccaggtagctgaggtttttcttcacttcacttgaagggttccctgtatcaagttgacaacttttcatgcctgagagataattttttagctgaacgaggggattgggagtaagacgtacacgtaccataggattttcttgatgacgatgcaagcacatcaaagtgcttttatgagtgaatttagagtatatacatgtgtcttatgctggaaagatgtgatcttgcggaaagatatcatgttcaaggagttagggtcttgaattgttttggagcatatggggatatggaagatccaatggtataagataatcattgtggttgacacaattaagtggaaaaaagactttgcctgttgcttgctgtttgtatttgtcctaaactggatgattaaaagcaggtttagcgagattaagaatacatcttcatttctgttttattgttcctttcttctgctggacaccactcttcgcattctctcatacctctctcaagatttctcgggttgcttgcttgcagggaagagctgactggagtcaggaagaagagatacc

SEQ ID NO: 91726 - DNA, 713 bp, Eucalyptus grandis
  Intron number 2 from transcript Egrandis_v1_0.015168m (loc us Egrandis_v1_0.015168m.g) derived from phytozome v7.0 (c hr-ID scaffold_11; pos 17312201 to 17312913)
gtgcggaaggggaccggcgggagatcttccgtcaggtgattgctctatcctccggtcgtgctctcgttcgttttctgtttggtttgtgaggggtagtgtgtgaaaaattggggtggaggaggatgtttttgctgtgggcgataggaaaatgcgaggagcatctgcggaagtcagtgcagtccttattttagattataggcggtgcatattgggattgtcgatactgaaattgtgtgcttccggcattgatggaagcatgcatttcccgttggcttttaagtgatttctagagaaactgtggatttccatagaatttcttctgtgggccgattttatgctaagtgttttacactgaatccactatgtccagcaaatgaggcgcagtatggcattccaaaaactaattttgattcgttcatcatctcatgttttgtcgagtttatgaagggcaagataaaaagtccattctttcttggcacgatacttatgctcatgtacggagtatttacaggatagggtaaatgaactattgccatgatcagatggtggaaatcttttagggcttgtagttagacaatcttctgttgcagtgagcataccttttcaccatgctcagttatcattacatttttctgatgtgtttcatcatcctggtcatttgacctggaatttttgcagtggcatagtggctacggtttttggagcaaccggct

SEQ ID NO: 91727 - DNA, 537 bp, Eucalyptus grandis
  Intron number 1 from transcript Egrandis_v1_0.011797m (loc us Egrandis_v1_0.011797m.g) derived from phytozome v7.0 (c hr-ID scaffold_2; pos 59975263 to 59975799)
gcctctctcgtctgacatttccagattggcctctggtcagtcctgccaagacccctaattttttattttatttttttcaaaacggacacttacctggttcttcagtgatttgctttcttgatctgttctgggcgtgtctgataatgatgatgcttgctttgttgtcgctgttgtgtggatcattgttcgtttgattatctgttgatgagattgttattctttgctgttaagaagcagactccacagagaggattgtctcctgtttcttttggtggaatgagatctccttatgactaagtagacaatctatgtgtagattatgcctctggttagtgtgagataaatgactgagccaaatcaggttcttttgctggcaccacccagtttggtaccccttgattttgcaaatcagaaatgtgaaccttttgatttttgtcttgaagtcaatgaattcaatgtatttgtcaagttgtaactccaatggttaactccaacaaattatgtttgcaggagtggacagaccacgattgagaggca

SEQ ID NO: 91728 - DNA, 901 bp, Eucalyptus grandis
  Intron number 2 from transcript Egrandis_v1_0.022948m (loc us Egrandis_v1_0.020150m.g) derived from phytozome v7.0 (c hr-ID scaffold_7; pos 13297153 to 13298053 reverse strand)
aaggtcgtcgacatcttcatcccgcgggatcgcaggtccgtgctctttctccgccgcgtgcgcttgcgtgctgtttttcgcggcgtcgtattggtatggggggaaattgattgaattgatggaattgatttgagtttgttagggaaggaagtgtagaaatcgacaagaagggtttcgcgtgaactagttctggaaaagtggaaatcttgctgccttttttgcttgattcaatcgtggaaattggtagtgtaggatgcgtgaatgctgcctcggcttttactagtgggattgcttcactccgcagcagcagactgcattcaactgtcttaataatgacacgttcactgcagctgcatagagagctttggctctgccgtgtgctgtgctcgtgggtggttccgtgtgcgcttgcgaatctgcctcttttatctttgtgtgtttctacgttacttctattctttcgaggaatgaaatttcttctgaaagttcgatttttttgaattaattgtgggctgaattttggggtgaatgcgttttgctgttaaaggcattagcttgatgagttttgcgttcgctgtgtggtgaacctgtcacgctgttgaaggccttagcatatcaagttttgtatttaccgcatcagattgattgatttggccctgatcaagagtactgacttctagatttgatagagcctattggtctaaattgaatgactcgtgttttttgcttatatgtgtattttacatcacattatataatgcataaaattgtgtggaaatggaagataagactatgcagttgatgagtattgcgccgttctgtctatgatatagcactgattctttaatactgtgcaatgcaattaggacgggtgagtcacgaggttttgcatttgttcgct

SEQ ID NO: 91729 - DNA, 903 bp, Eucalyptus grandis
  Intron number 1 from transcript Egrandis_v1_0.038831m (loc us Egrandis_v1_0.038831m.g) derived from phytozome v7.0 (c hr-ID scaffold_2; pos 22573434 to 22574336)
tctgtgtcgccgatctcgcttccagtaagagcatataatcttgtctatgtgtacttcttataatcttcttcttaaactactcacgactccagacaagtatcgataaaccctagacatgaagggtgtgtttagtaacatttccgttctggggaacaatagtttttctagaaatagtttttttatatttctattccctgaagcaatttttgaataaaataacatgctttgtaactataaaaaatttatattcctagaataaaaaaaagaatatgaatgcgtttggtgcaacctataaattttttcatgtcatagaatttcttttaatatttaaatactttttttctttttccttttacttttcttttttcctctcttctttctcctcctctagtcgacggtcggcggctggcgaccggtgattgatgatggtggcaatgacgagtctccaaccactgattagaaaaggaagaagaaaaaaagggaaaaaaataaaatgacttatttctagaaattattcccccgataaagagactatttttttctacttcttgtttctattccaaatctatcccctgaccactttttcattccatggaatagaaaagttaatcagcgttattaaatggatttctcttcttttattttattttggggaacaaaagaacaaaagaacaaaaaagctgtagtgttaccatgcataccctaattctatcatgtacaaggcttgtattctcttatacttctccatgacgagaactttatatctgcactctttctagtttcattagctaaattgtttttgaagttagtatagggctcgtaagtttctctcacaaaacaaatagcatgcatgtttaaggcattgtatgattcatatattgtgatgaacagaagtgaaagtca

SEQ ID NO: 91730 - DNA, 704 bp, Eucalyptus grandis
  Intron number 2 from transcript Egrandis_v1_0.048269m (loc us Egrandis_v1_0.048269m.g) derived from phytozome v7.0 (c hr-ID scaffold_7; pos 47300107 to 47300810 reverse strand)
caaatatcaaacctgtcattacctccaccggtcagcttcatattccttcctcttcttgtattatttcagaaaccatcctggttttttcttcccctccctctctagatacatatatatttaggccctgcaagtaattgaatcttaattcatcctcggtgagcttactaataagaaagaaataaagacagttcagaatcatactaacttaaaaatatcaaacgaaagtaaacgttattgaaaagatttattaaaaaaagagtccttgtcgtgaaaccaaccgctcttatacttcaaacacatatttgttgtgtatttcgtccttgttcattgaaatgtctgatatcttcagctcctagggtttcttgggaaataatcttcactaacctccatagctaatagcactgtcatcatggtctcttttgcatgaatatgctcttgctcaactttaaaatattcttgcacaatatacaaagacgaagttcttgagttttgcatcgatagtcagatatgttgaggataaggaagcttgctaaacacttgattttgctaacccccgaagcaagtatgaggaaaacttttgattttcaaagttttaacttttcttgaaactttctattgcaaaagcttgcctaataagtaagtattcgtagatctaatgtgatggattcaagtgtcacatgaaatgctaatgaatgcagtgtgga

SEQ ID NO: 91731 - DNA, 711 bp, Eucalyptus grandis
  Intron number 2 from transcript Egrandis_v1_0.026052m (loc us Egrandis_v1_0.026052m.g) derived from phytozome v7.0 (c hr-ID scaffold_2; pos 7001546 to 7002256 reverse strand)
cacggcggccgccgccctcaacggaggtaatgtgtgatttgatgttcgaaatgttatttttttttttcttttttgttgttgtcaatgctgttgggggaggtgttcttgattcgatagattggtgattgtgtttgatgggatgtttagaatcctgggtgccctttatgggtttctaatgattccgaggaaatgcatatggaaagtcttggttatagttcgtaggttgggcatatggaaatgcattggggaaggttttcttgattcgatagatcggtgaatgtatttgatggaatgtttagaatctctggagccctttgtgggtttttaatgattgtgaggaatgcattgtaagaaagtcttggttttggtttgtgggttgggcagatggaaatgcaagtgtaaaaacattgggaggaagattgtctttttaccatttcattatggttaatgctgaactccagatcatggttattcctcatgttatctgttgatttatgctctgcgatcggcatttaaaagcttgacaagattaaagaatttctttgatggttgaggaagttgattatgtagaggggtctggagatgtaactaggaactgggtgatatactatgaaattaacttatttttgtttgttacctgattgtggtgagctgtttgttcctcataaatatgcagagcagaagaagcagaagctttctgaaattaaagct

SEQ ID NO: 91732 - DNA, 220 bp, Eucalyptus grandis
  Intron number 1 from transcript Egrandis_v1_0.052382m (loc us Egrandis_v1_0.052382m.g) derived from phytozome v7.0 (c hr-ID scaffold_2; pos 56184354 to 56184573 reverse strand)
cacggttggacccctggtgcctccattcaggtcgtccacgcctccattgattcgtcataattagtttttttcagcctctcttcttcaacttgcatcgctgttgaacagtgtttgattttgactggtgctttttgttttttcgttttttggcgatgttatgatattctgtgacatggggtttgaagggtggtataaaaagtttcgccaatcaacaagtgag

SEQ ID NO: 91733 - DNA, 910 bp, Eucalyptus grandis
  Intron number 1 from transcript Egrandis_v1_0.047584m (loc us Egrandis_v1_0.047584m.g) derived from phytozome v7.0 (c hr-ID scaffold_7; pos 51529386 to 51530295 reverse strand)
gaatcattaagttttggctaagttggttactaataattattcaatcgttctgcaactactaataattccaatgatttgtcaacgcttatttgtgcaacttaccaattaataaaggtcaaacgctactaaaaccttacacagaattactaacttttatttgagttcaattatcaatgttcatatgatttatttcaaaagtagtaattgttccaataatttatagatccatggaagagaaaattgcaaataagtttcagactcccaccattctctaaatctctttcttttctttcccacgactattcaattctccaagtcctacactcatgtttggcatcaataaaggcaactggattaagatgaacttttttcttacgggaagtgtgctcatcaagaaattctttttgttgttggttaaaaagaagagaactttccaaagttgacttgatgcagtagttgataatcgagatcggcgtatgagatggcacaacaatatcataaataagatctgacgttaatacgagaatgggggtgatcggttaatgcgaatgaatccgtgaatgccatctctgctccaaaaccaaacaatgaattaaatataatagatgccgttagcttttcaagaaacctttttatactccatgccagaactttcttgtgacatctcatgattatcccactaatcctgcttgacttgtcaagcaatacttggaacaatcatgcttgacttgtcaagcaatacttgaaacaaactagtcccaggttactagtccttgcatcgctaccttcatccctttgcattatactagtctctatctccattttagcatggctatcgacttgtgacggcaatatccctgttgggaattgctcagagtctgatagagaagctctaattgacttcaaaaat

SEQ ID NO: 91734 - DNA, 1048 bp, Eucalyptus grandis
  Intron number 1 from transcript Egrandis_v1_0.028280m (loc us Egrandis_v1_0.028280m.g) derived from phytozome v7.0 (c hr-ID scaffold_2; pos 10847271 to 10848318 reverse strand)
tgcttcaagcagggtataaagtccaggcgcttcaggttgggaatggcttggtgattgatcgagtggaagtggaatttggttgacgttatgatgatggggattactttgttttctgggttaatcagtctcgagttttgcaatgcttccaatctagtcgggtttcgaaaggaagcgaaagcttcacttttgactttctgggtttcacgggcaattggtctggatcaaaaactgccctgctttttgccttttgctttttgctttttgcttttccattcttaatttgttcccataaggatcgatcctttctattctagtactagtatagagtagccttcccgacaacaaataaagtatactgctaggaatctctatcaattcctgaactaaaccaagccaaatgaaacttctgaaacaaaaacaaaagcaaacttctgaaataaagtatatctggtcctacttgcagtgttgcgattttaagtgtttttttgacactagtgattcgtaaatacaaactgtattatactgtgctagcaatttgcgttaactgggtcactgctggaattgagaaatgggcatcatgtaagttctttttgccgctgatggagttgggtttttattgtgggactaaatttaactttgttctatcagtaatcagtatttccttatgaaagcttgatgtgaatgtacattaaactgaggtaaagtgccagcaggcattaagaagctgcgagtctaggttggtttgggaattggttctgacttcatattcgggtgttgatcactgcttaagttttgggattctgatatcatattactcttgtaaactaacctcacaaatcataatataaattttttggtaaatattatcaatggtatttgatttgtcgcaatatgtaacgaccaattaagtaacgggacatctgtcccttctatgtgtactgaagtatgcatttcttcctaatctaattgtctattgaatttagaactggtttccagcaacagacggtcttttttaactgcattactttggcagcaaactggccctctg

SEQ ID NO: 91735 - DNA, 754 bp, Eucalyptus grandis
  Intron number 1 from transcript Egrandis_v1_0.039495m (loc us Egrandis_v1_0.039495m.g) derived from phytozome v7.0 (c hr-ID scaffold_7; pos 50883194 to 50883947)
gttaataagattatttttcatatgttctatcacttgattaattaagccattcttacttactataatgatttatttttgacttagaccaattaatcaagttttgtgtatttagtggtcatcaaaaaaaaaaaaaaacttattcaatgatgttaagtgctataaatttcattgcttacgctttttttgttttgcggaaatgcatcatttacaaaatatttttctaaaaataattacttgtataacttataaagatgatcaagtaaagatttttttgcatcgtctatgaaaatattgaaaaataattattgtttataatgaatttttttattcactgattagttttagctatacaagcaattccttttaaaaaaatgttttctaaacaattcacttttcacgaaagaaacggactcttaatagcatggatattattacctagatctaatcaagcttactcaggttgttgagacatttccgttcaatcactaattgccatcttctctttcttcctattttctgtatataaagctaattcgaattcaattctatacattaaaaccaccgttaaactctctttctctttccctctctcactctctcgtggctcaaagaggaagaagctgagagcagagagaatggagagaaaacctaaagcacgatcatctcttcttcttttatttttatgtttcttgtcgtcgtttgttcatatccacggaaagaagcaaggagaggctctttattctctatataaagc

SEQ ID NO: 91736 - DNA, 972 bp, Eucalyptus grandis
  Intron number 2 from transcript Egrandis_v1_0.019501m (loc us Egrandis_v1_0.019501m.g) derived from phytozome v7.0 (c hr-ID scaffold_7; pos 326131 to 327102 reverse strand)
gggagttccatttctacttggaaaggtacattttctctgatccacacttcaaatacatgcatgcaaacatatacccttcaggcattcgcgtatcatgaacaagccagcactctactgcatgtgcaagtgcatgtgcatgtgcaatgcctgcttttccgggaacccaatattttctctgtttatacttgatgattgtatcacagaatgtggaggagttagaagtgtcttgtaaatcatctagatgttggcaattgtttgtctttttgcaaatgtatttaatttcgaagatgcaaaactggtcaaaatagcagagcaagtaaagtgcttgtagcgtagctaaaattagttccttgttattaatatatttgctcatggtaataagggccctcttgggaaattgatactatgtctttcatcacgtgctacagctagtgctaatacatctgagcattcttcctttctatttttctgtttattggtttgattcagtatccagtaaacataaagtatatttatgttgtgttctgtgctgtcttctaggttctttttctgtttgttggtttgattcagtatccagtaaacataaagtatctttttgttgtgccatgtgctgcttctgggttcttgaaggaaggtggttacatctactgtcttatattgtcattcatttgattagaacctctgacaagtttttcattgtatcccctactatttgcaattaattgtacttcacaatacgatgcagatctagacaaaatgagcccaataaggtgtatggggtcaggttacatgcatttttaggaaaattagagctaattaaaaaaagaagaaggatgtaactgttttggttgagtgttccagtgtgaactggcattactttgtcattctaactaacttattttgagtagctactgatgatcctcgtaaccctaaatgtcctttgcttgttctttattgtaggttctctatcca

SEQ ID NO: 91737 - DNA, 1008 bp, Eucalyptus grandis
  Intron number 3 from transcript Egrandis_v1_0.032113m (loc us Egrandis_v1_0.032113m.g) derived from phytozome v7.0 (c hr-ID scaffold_7; pos 18736650 to 18737657 reverse strand)
gaagaactacagggtgagaattgtggcctaatttttctggcagctagaagaaagttctttttttgttttagtaatagttatggtgtcatgtgataattatacatttgaatttattatacagccgtgtcttgtccatgttatcgtatctgcagttatttgctcgcttacttggattgttatgtgttttgttttctcctttttgtatgtgcaaggtcataagtgggcatttgggatgggtgagatctatcgcatttgatcctagcaatcaatgattctgcactggctctacagatcggacaattaaggtattaagcttttacaattgtgctttttgatgattcctggtcttcttttgtttgtaaaatttgctgatcatagatgctcactttttagttctttggttgctaccatttgctaatttaaatttctatgtatagttcttttggttagttgagcgagatgatttggttagttgaatgagatgattgttagaatcattgagtcgcccgaaagttgatcactcttttctatggcagcattttgttctaaaacttttttgaagtggtatccttaattctaatgttatttcgaattgcatgatctctgtgatttaattgtataaagtacaatttgagatggaaattgctattaaaagttttgaaatagatgagcaatgacattgcagagatgaattctaaatggccccaactgcaatgcatgagcttaaagcttttgagtcataattattaagcattttgttataggtcaaagttctcaataaactgctttagctcgagcttcaggagcagctagcggcagcagagtcttgacagatttagtagagggtctagaagaagcagcttttgctgtagaattgaggttgaaggtcaaccagagtcatctggacttaaggggagggtacgtggtttcttggtttctagcaatgtcattttctttttccttctctaagatcctgatagtgtaaaggttacagatctttccgagact

SEQ ID NO: 91738 - DNA, 792 bp, Eucalyptus grandis
  Intron number 2 from transcript Egrandis_v1_0.032113m (loc us Egrandis_v1_0.032113m.g) derived from phytozome v7.0 (c hr-ID scaffold_7; pos 18737708 to 18738499 reverse strand)
actactattttctctgcttctggatcatcagacaggtaaatatgttgtattgcattctattttagtgtctgttggagtgtctttttgcttcttcttttttccctttaaggcgatcggtcgcataatttgacttttcttcaataggaaagaccttaaatctaaaagaacattttttatatttatattttttggtttaaacacacaaaaccttgaatagaagaggttaaggtctacatgtgttggcagttcttccttttggtagttaagagatcacatttgtgtaatttagcaagttttttatttttaaattgtttgattctatgaattactatctgtcgagcctaaagaaatttactcttcatgagttgctggtcattgtaatcgtgctctgaatctaatcaacatctagactagttgttctacatcacctatcgttggacccatagccgatatagtgtctgttacatgcatcagttgcttatgctttgtagttattcagaggcatcgacaaactagggcaaatacctatgtatcctatatttttggtgaaaataggacttttatattaccgttacttttttaatagattgacatgcatctatttgcacaatccactgaagtaacatcagaacatttcttaatggtttatgaaaagctgtttcatggattctcataattcgactcatgcattcaaggatcactgagtcatcttaagttctgctctaaggtacttaatctgctttggcctcatgctctcactctgtttttaggaatttgtctacctcagccatc

SEQ ID NO: 91739 - DNA, 974 bp, Eucalyptus grandis
  Intron number 1 from transcript Egrandis_v1_0.046994m (loc us Egrandis_v1_0.046994m.g) derived from phytozome v7.0 (c hr-ID scaffold_7; pos 2177647 to 2178620)
ggtcgcaaagcaggtcgttttggggaagatatcttcttgacgattactatttttttggctgtgttgtgatttccattgcattaattaaattcttcttatctacctagctgcatgatcatcttttatatgcacctctattttgaatgctagttgttggaagtagttaggggtgaccggcctcgatcaatccaattcggttgtcgggcaattcaacaaaactaactacacatgtttcaacgtgcaaaatattcaaacttcactagtataaatgtgttttacactttaccttaaccatgaaggccatgaacaattcggctaagagttatgcttggcttaggttgtatagacaatctctcttctactctttaaatgtttagtcgatgtgggactcttggaggcttgaagtgtcttgtgggtctcttggagtcttagttccacatcgaacatcgagtagaagatgaaactaacaagtagattttctctataaataaaagagtaacaaaaagaattttgatggtctcttggccacataagaggttcctatctcaactgcaatttcggttgcaataagttatgatatttacatattttatatatatatatatataaaattggttcggtccggtttgatccagttcccacttggaactgggaatcggaccgactggccaccggttctcggttcgagcggttccggttgcacacccctagaagtagtacaggaattcaaagtcgaagaaaaaaatctggagatttgtactcattcgcatcgtgtgaatctttggctagacagaaattgaagagaaggaattcttgttgctttttgacaagctttaatgctctagggtttggctgttttctggcttctgtttctgcatcaccttttctatgcttcgtcttttcttggatagtttaaccgtttaggtcggagcaatggacgattatttatcaaacaattttttttttgcaggtgc

SEQ ID NO: 91740 - DNA, 1036 bp, Eucalyptus grandis
  Intron number 3 from transcript Egrandis_v1_0.011502m (loc us Egrandis_v1_0.011502m.g) derived from phytozome v7.0 (c hr-ID scaffold_2; pos 58816609 to 58817644)
gagacgacgaggctgctttcgagctgcatcaaaaggttttttgagttctttcttttctttttagtgggaaaaatatttctcagtttctttagtatggatttatgtcgtcgatagtggtttgttgtaaatgcagcattgtctttgttggtcttttaattgcttatcttgctagtgaggaaatgccttcattctaacgatttagtttaccattcagacaattgcattatgaagtttgttttgtcttgtcgaaatgggtttcatgtccttttgtaactcataatagcatggtatgcgggataattatgttggtcaaaagatctcatgttagtcagtgtgggacctctcaacctatcaatgcatggtgtcgttcatctcatccttactctggatggtgaagatgttagtgactgtgaactaatatttggttatttacacagagaaatggaaaaaattgcagaaaattgaacagttatacaatctctgccttatgtaatatgttgggattattcaactactatattgacaagaagcattgaccgtaaatggaccaaaatagttgaggaatattcaagtacctaacagagccagatatataagggtaattatgttagagttgagtcatataattagccaaaaggatcatgtatggaatgctcattgaaggagaataaaaacctccttagatgtttcctcgcctttgctttgcaacttgtttatatgagcagtgcttatggagaaatttgatccaatgaagatctaatgagccaagccatataaataagaaatatactgtgtgtgtgtgtgtgtgggtgggtgtgtgtgtgtagacacacgcaccaaagatgttgatgaaataattgcctaaacaagatatatcatgtgagtttattccttactgcaagtggtcttgatacttaaaacaagctccagttttcatacatttaggtatttggtgtggctccaaagtccagatgtaacatcttctctttcattttctgcagctcttaaaagatttccctaaagatttggtatcttt

SEQ ID NO: 91741 - DNA, 552 bp, Eucalyptus grandis
  Intron number 3 from transcript Egrandis_v1_0.014241m (loc us Egrandis_v1_0.014241m.g) derived from phytozome v7.0 (c hr-ID scaffold_7; pos 45476306 to 45476857 reverse strand)
tggtaattacaaggtacatattggcaattggcgtccaatcaatagcttattaacttgcctctgtacaacttcaagttattaactgtctcatgataatgagtaatgttgtgaagaagaataggtttattctatcttggttagacttctgaaaccaaccttcacccctaggaatttgctgaggatagtagattataacctcttattttgtggaaccttgacattgttgtgacttatactatatatcttgaaattgtgacctggcccattgaattgcaaggaatttaaggtcatggaattttgatggagttacattaagacatttaatgtccatcttatcagttcagttcaccaatgaatgtaggtgcaaaatggtggaatgttttcttatttctattggatcagcagacaaatatagtcactagtgtgtttcacccagttagactctgaaaaaattgtatcggacgccttttttttgttttttttggtggggtcggggttgttatacaagccatccttgcatgttaatcattgttttgtgtgtgtaggacgcat

SEQ ID NO: 91742 - DNA, 623 bp, Eucalyptus grandis
  Intron number 2 from transcript Egrandis_v1_0.051487m (loc us Egrandis_v1_0.051487m.g) derived from phytozome v7.0 (c hr-ID scaffold_7; pos 6130444 to 6131066 reverse strand)
ttgcagaaattccacaggtatggatatatgtcttgaaaaatttgtgccttattttggtgtagacatggtggtaagacattttgagttcgtttattggaactcacttggacctcaattttgattttaagaactactggagataggttagcaagagagatttatgtagtcatcgtatctgagatatgtggacagggcattaaggagtgataaccctttcacaaaatcattgatgtaaaataggatctctgtcctaattgagatagaatgtagtcttgacaaagtgctgatggtttgaaccccaaagtgtaatgctgaaaccgtctttgcaagacacaagaaaaagaaatgaccaactctagtcactcaaatgctgtggttgaaaaggtctgtgtcttagagtacttctgtggtgatgaactagacaagcgcttctctaatcttacatagaattactctcgttcatataacaaagaaaatctccatgaaaaagtaattaaaaaattcttcacggtgctgtttaatttagttgttagttctatatgccagaggctgtttttaattgattctggtggctaacttatcttgcagctctctaatttgcaagtctggtttcagcgaccaaa

SEQ ID NO: 91743 - DNA, 788 bp, Eucalyptus grandis
  Intron number 2 from transcript Egrandis_v1_0.029505m (loc us Egrandis_v1_0.029505m.g) derived from phytozome v7.0 (c hr-ID scaffold_2; pos 20977404 to 20978191 reverse strand)
ccaaagactgcgtcacttcgagtaatcgtttggtgcaaaatttcgcttgcccgtgctgttaattgatttgggttttcttctgattgttgttatattgatcgggaaggttgagtttctgtgcgtgttgtgtgatgtgagaattcgggactgatagtgttgatatagatagttgtggctcggtgtgattgaaaaggtgatggtatgttgttgtcggttgatgatgagaaattcgatctcgcccgattgttaatgtgagaggtttgacttcctttctcggttatcgataaaactctgtaggtttcgcttagctcactgggggttttatggcttactgtcaagtgggatttgttccgttcgaattgctttccgtgacaacgtgttgtgatcattctttattcggactcggaccaggctgtgaggcattgctttctgtgtgctgatgaatgctaatgtttcccatgttctctttcttgagtcttgtctacatgacaagcttgtgagttgttattatcaaaagaagagagggtcaatttggaattagtattgccctgcacttggtttttgttcttggttgatgcgtgttgataaaattgaatatcagctccgggttgagtgtaaggttgctcaatcagggggtggagtttctaccctttttgtttttgcttgtgtgttatgacaatgtgacctttcagtgcatgctgaagtcagggagattagaaactaattcagattgatggctaatcttttaatctcccttttcctcaggcagtacctcaacttcaggaaga

SEQ ID NO: 91744 - DNA, 526 bp, Eucalyptus grandis
  Intron number 1 from transcript Egrandis_v1_0.050226m (loc us Egrandis_v1_0.050226m.g) derived from phytozome v7.0 (c hr-ID scaffold_7; pos 27476598 to 27477123 reverse strand)
aagtgtttgtctgtaggtatattgtaaggtttgaataatcatcaatttaatgagtatccaccatctctttgtatctgtgaggggctgattgaaatgaaaacaatgtcgagcatcttctcagaaatagcttcatacaagtggtggctgatgtgaatcagcattctatttttttattttttatttttaataatgttgatgctatgtttcataattggggggctgtaaaagatgattactttgagttattcatgcttgtagattgtcctccgccacaatttctggtgtaagaatagaagagcttcagatatgtgtcagtgtgctgttgctaaacatctggagtacaacttccttttttgcaatacgcagtcatggaaaatacctggattttataattgcttgcacccttctttgctttagcatacgtaatggaaaactgatattcaagtatttaccttattttacagagtccaaacattagaatctcaactcagattcatcttattgagggcataattgatcaagttga

SEQ ID NO: 91745 - DNA, 858 bp, Eucalyptus grandis
  Intron number 1 from transcript Egrandis_v1_0.001891m (loc us Egrandis_v1_0.001895m.g) derived from phytozome v7.0 (c hr-ID scaffold_7; pos 30787553 to 30788410)
ttcgcgcgtcgaagcgacctgagctcgtcttgctggttctggccgggaggtgactagattttcgggttctcgtgtttgataacgaacggaagttccgcaaaagggtatctctttgttgcgactgtgctcttgctttgcggtaacctggattttgtcgggatttttcggtttattaaggaggggtcggttgaaattcacgagaaatgatgaatttgttctcctttggagatgggtttgttttcttggagcatctgtgcttttctttttgctatttgaattgtggcgtgaggcctgggatgggatggcttggttcaaaagccctcttggctgattctcgcatatgtttagtttctgatggcctttgcttgaatttgaatttgagttctttggaggaggtataataaattcgagcctgatacatcaatatagggaccttgcttatttgtcgaacagagaacagaatttatttggcattagcatcctgaattttctccatattgatgagatgagacgacgtgttcctttggagctatgttggcttggttgcacagagtattttgttttgttttgtttttttttttttttgggggggggggggggagacatgcaacggtggactaccattataagtgccgtgccatcagactcctgttcattgacaataacattccttgatatttcttggctttccattaggtttcagtagtctatttgagaagtttggttcgatcttttgttacttgagtgcctgggctgatcagcctttctctatgctaattacgttcgcttggctttattaataaggagcttgtatgtgtgataggtttttgcttcccccaggttctcctggaagaggca

SEQ ID NO: 91746 - DNA, 697 bp, Eucalyptus grandis
  Intron number 2 from transcript Egrandis_v1_0.018803m (loc us Egrandis_v1_0.018803m.g) derived from phytozome v7.0 (c hr-ID scaffold_2; pos 47651396 to 47652092 reverse strand)
acttcgatcgcttcctttactcgcacagcttgccggtaagcttttttcccgtcgaaccttttgatgcctgccgggagctcgagactcgcggcttgcgtgaatattgcgtcgtctagattggcgcatccataataataattgatttctcttttcttcatattttctcctctcttttcccttcggaaatcgtgtaacaattatttgattacctcgagtaattattctcgaccttttaggaaaaaacgacgaaatgacgcaaatgcccctgtggggctgttctctccttcccccatcaacctacaggggtcattgttataataatgatttattcataaaaatcgttatccttaaataatacggacaaattgaatgctcattttgtaggctgctttaattgcaaaagtgagtcttttataatttaacaatttatttatctttttgtttgttggtataaagtggcaagcgcatttagtgcgctggcaatgttggtgcgtgcgtgtacattcacgttttgttagttcgctattgattatcacggcatttgcgttttagctctgtgctgacttttgtaatattcctacgagcctttcgtcatcactttttgcaaaatttcctatgcgcaattattgtccaaagtctggatttttcccatgaattattactgatcctttctgaaattctctgttccagcaaccaa

SEQ ID NO: 91747 - DNA, 806 bp, Eucalyptus grandis
  Intron number 2 from transcript Egrandis_v1_0.044287m (loc us Egrandis_v1_0.044287m.g) derived from phytozome v7.0 (c hr-ID scaffold_7; pos 44936827 to 44937632 reverse strand)
caaagtaagtattgcctaaccttgtactctacgttacccaaccgatcatgaattaagaagctgcgaggcttgctttggttctcatagaaaatgggaaaatcctccgtatgtttcacttttgctaatttgatcataaactttttaggtttgccaattaaattataaaccttttgattattcatcaattaagtcaatcccgccaattttaattggaaaatactgacatgaatgttgatagtgttaaagaggacaagcaaagctcacgtgaataatttcttaaaataacttttggatatttattcttttcttttcttttccttttctttttcctaccaagttcaacgccctgcccctagtcacaagtgagggccgatcaaccctcacctgccacttggcaaaagctggcgaccctcttcggccaatggaagaagaaaaaaaagtaaaagaaagaaaaattaataaataaaaacttgtttttttttaaattataaattcatattaagtgtcgaacataccacgtaagacagatggcatccatgtcagtagccagatagactcaattgacaaattatcaaaagatttaggacttaattgacaaaattaaaagatttatgattaaataagtaaaagtacaataagtttagaactttttcaagaattttcttgtagaaaagccgagagttttcatgttgttcctgcaccataagcgattaggttcgcgcctttcttatagaacgagcctatatcatttatttttcctctccatgcaagatcgtctacctcacgcgcaacccgaaagacaccct

SEQ ID NO: 91748 - DNA, 276 bp, Eucalyptus grandis
  Intron number 3 from transcript Egrandis_v1_0.012388m (loc us Egrandis_v1_0.012388m.g) derived from phytozome v7.0 (c hr-ID scaffold_2; pos 43869496 to 43869771 reverse strand)
aacttccagaagcattttgcggtaagaaacttgatacgatggttttaatctgctgatattcatattgttttgctttattgcagtttcatttcttctatgcaaaacttactgaacaaggttgttatcattatgaaaatattatgtctcaagtgataatggattttgaattggactattcaactttttcatgatatcaaagtcctatttcttttcattatttcagaactagttttcatcttttatctgcaaataacaaactcctcttggaccaggtgg

SEQ ID NO: 91749 - DNA, 973 bp, Eucalyptus grandis
  Intron number 2 from transcript Egrandis_v1_0.009891m (loc us Egrandis_v1_0.009891m.g) derived from phytozome v7.0 (c hr-ID scaffold_11; pos 42372324 to 42373296 reverse strand )
actttgacgacatcgttaaggtctctctctctctctctccccgcaatacagtttcttcatttgtcttttccactgcttttaactgcagagtttttttttttatttgttatattgggaagttctcttctttcttgatagtagtccatctgcttcgagattgtaattagattactcaaaacttaaattaggttaggaacccaagacatataatctactattgaattggaatgaaaagagtgaatcacaaccattgattttgtgggtctcacgtgagcctctcataaatctcacgatgtttaagattttcatacattagcttttctcggtattttcccttcatttaagggttttagacgtgggatatacttagttactaaaaatgaaaaatgcacgaacgtggctctttgaatattgccttcacaaagaaggtttgcggtttgccaccttccgtagacgaaataagtcaagttctctggaataaaaaaagtcagtcgagttggtaagatgactaagcctttgcgtggcgagaaaacaacttctggcaagaaggcatgtaattcatcgtgaatcctttgcactgagggcgacccgcactcaatctgattagagatgtcgatttttatgatgcgtgaaaactagctcaaattccatataagtgtgacatcaaaaagagggaaaggaattctatgagatattcgatgttttaggagatcttgagcaacagtgttctgaacagacataggcgtgctgcaattgccacgataactctggacgcatttcttgtcattcattgaaaacaagaaccgtattcctagacgctgacatgttttctgacaatcaaaataacttgtcaaagtgttctcagataaatgcattaatcgatgtttctaataccaagttagtgctattcgtaatcgattactgtataacgatggcagttcttccgctcccacaacaccctgcagccgttact

SEQ ID NO: 91750 - DNA, 974 bp, Eucalyptus grandis
  Intron number 1 from transcript Egrandis_v1_0.041671m (loc us Egrandis_v1_0.041671m.g) derived from phytozome v7.0 (c hr-ID scaffold_2; pos 1676192 to 1677165)
atagggtattccttcttgttaagaaagcaaatgaacgagttaggggtgtgcaactagactaggtatatccaggaaccagattggcccacccgaaaaacagggtcgggaaccggtttaaacctatccaggaaccggtttcgattgattacccacccaggaccagttttgaaaccggtttaggaatcggttttgtaaatataggtctaaaaccctattttttcccattatttctattcttactctcgcaatcacatagcatttttcctcttggctctctcaaacacacacagcacttctccttcgtcgttcctcttcctcacttgcttccctccctcattgactccctctcgcaccgtctgatggacaatagtattcgtcaccgccaaattcttatgtaccacgtggattggctcatctaatttctcttttgtaggaggagttatacttgcataaatgagtagttttatataatagttatgggaataatagttgtgggaataagactaatattatatgtgtttttgttgctaattatttgccttatgattttatttattataattagctctgtagattcttaatttttcgtttagtcaaaaagtgcatgtatttatttattacaagtgcttaatatttcgatacaaattatgaggattacgttattttctgtattaatataaaattcgaagtcatataggatatcgggagattgcaaaataggtttaagtgaaaacaggttgaccttggaaccggaccggaaaaatagggtaggtcgggtataaggtctaatacaaatagagtcgggtacatggtccaaaaaaagggaatcggttataataggatcgggtatagggtccaggtctagactctactcaccctagacccgatcactcctagaacgagttggtattcttttatgcttaactgaatagattgtaattttgtagacattgaccttgaagcttttcctgagc

SEQ ID NO: 91751 - DNA, 771 bp, Eucalyptus grandis
  Intron number 1 from transcript Egrandis_v1_0.031608m (loc us Egrandis_v1_0.031608m.g) derived from phytozome v7.0 (c hr-ID scaffold_2; pos 10014285 to 10015055 reverse strand)
cccattctcttcaagtaagagtctaccatctagtgagatatcgtcggtgtcatctgcatcactatcatattatttaatcgatttgagtttaaaaatcgcagtccatgaaatacttgattaatctcatgactcggaagaaaacattaatactaatgagaatatttttagggttgcacatcgtgtgtttgaatttgattttgtgctataattttgacataatgtcgaattaatagcatgccaaccacactagtagattctttatagtcaaacatgcagattttggctcaacaaaagaaaattatagccacaaacacgctggttggacaataacatctgaatacccttacaggagctttcttggaaaacttcagcaagcttagaggtgcaaaaagtagacgagaagaaaatcatgaagaaaaattgacgcaactagttaaacttaatcatatgcaaagctgcctctttctctggccacggtagccatatttcaaatagcagctcatcaatattacaattgataaagtggatctagtttaactcttggattttctctgatgtgaaaacagaatggtgtaggttcttgccacatctcagattcatgagaagtcagtgagaagtagaaaccacctacagcaacatcaagcaccacaagcgccgccacaggcagcaccgcaaccagcggcacatccagcactatagaagccagagtcgtcagccgaagctgctctggccttggaggagggagacgcaccctctgcacaagacaagaga

SEQ ID NO: 91752 - DNA, 863 bp, Eucalyptus grandis
  Intron number 1 from transcript Egrandis_v1_0.007284m (loc us Egrandis_v1_0.007284m.g) derived from phytozome v7.0 (c hr-ID scaffold_11; pos 42679092 to 42679954)
cggacctttcgccgccaaacgcagctcctctcgaggttcgtctctcgtccacagcctctcccgaagctgggattcttcatttccggtgattggcgattcagtttcgcgcgtgcttcgaaggccgcgttgtgcgttttgcattgttttttatttcctggaattcgaccatttagtcatcatgaattggtgattgagatgactgttcctggttgataccaattttttctccctttttttgggcattggttttttttctctctctctctctctctctctcttggtgtttgctttttgtgagtgattttaggcttgaggtacgtgatggaactgatgtttgatttcgttgaatctggatgttcggctgtgtaaataatagctgcaggatcgagccactgcacatatgtcggtattggtgatacccatttcctcaattcaagaaaattttcctgctttaccggaataaaatatcctgctgagaggaaccatgtgatttaaaggccatgtgttaaaaatatattttgccgaggtgatttaatgtggttaatctgcaaaagttttccggtttataatgtcttggataagaccggtaatggggaaagcattgatctttaagactaaaacgggtcagaatattcatttacgtgttccgagtccttcaatgagattcgtgagatgggtacactgtgtctgttgtttggaaatcttgggtatataattcagtcttttgcttgtttcgttgtacactgattgccatgtgtttattcataaatcaagcatttcttcttctttttccaattaacttaataaaaagagaaaaagcatgcttaatttgtcactctcttacctgatgctcaggtctgaag

SEQ ID NO: 91753 - DNA, 782 bp, Eucalyptus grandis
  Intron number 1 from transcript Egrandis_v1_0.005586m (loc us Egrandis_v1_0.005586m.g) derived from phytozome v7.0 (c hr-ID scaffold_2; pos 7537617 to 7538398)
gacctcaagtccaccggcagccgcaaccgcttcatgtcagtcccctctctctctctctctctctatctctatctgatctctcgtttgtccgttcgatctctccttcggccgccggtcgggtgaggttcgatgtgggattccccgagctcgctggcgagagcgagcggttttctcaagcgaacgcgattaaggaggggggagggggaaaaaaaaggggtcttggtggtttgggttctcggtttcattgcgttttaccgacgatggcgctaggcattttcctgtccgtaagatgtacgtcgacggctgcgattaagggagggaaaaaaggacggatcttggctgctagggttcttggttccgttgcgttttgccgacgacggcgctcggcattttccccgtccctaagatgtatgtcggctgctgcagcggcggcacggcggcgttgccgggttgattacccggcccgtcgtctggtgtttcctgggccgcgggtcggtagtttgtgatgggtactggacgttttccgggtttctgtgggggaggaggcttgggaagccgaaacccaccagggatctgcagtgcttattgaaattagtgcaaagcgtggggatggatttgcccattgtcttgctgcatctgcttgttttcttgttctcttttgtatcgttgctggcccgttatgcttttgatttggttaggaatatgaggaacatcagttgagatggcaattggtcctgtctaaggttgtctcttctggctttttgagcgcaggttcacggcta

SEQ ID NO: 91754 - DNA, 917 bp, Eucalyptus grandis
  Intron number 1 from transcript Egrandis_v1_0.015007m (loc us Egrandis_v1_0.015007m.g) derived from phytozome v7.0 (c hr-ID scaffold_2; pos 62605523 to 62606439 reverse strand)
cctgacggcttcgggttcgctctggttcgagagaagtcgattcgactttgaggtttcttcttgtctatctattccatgaatgtgttgcatcgctcgctctccttttgtggtctgtgctcgagtggggtgatggtataattgggaaagttcgcattttcgctatggtcattagcgaaacgctcctgagttttaggaatgtggtcgagccgctacgtttttgtgaaggggtcattctcggtttggattgcagagtccagagtccaggaattccttatttagtagcagaagattgaaaaaaaagaaaagaagaacaaggtttttttgagtaattggttagcaggtcctaagtggacggctgcttctggaattttaaagagcgaaacgtagagtttgagtccgatttatggcagtcgattgttgatttaagtgaatcggatcgatgtaaatgcatgaaggatgcttcaatatgattcacataaagctctccgaccatctttactgtgtatcacaggctacgttatgttgcctttacttttttaattggttacaatcccgggatgagattttcacaggcattctgcgagtcttgttctgcttgtctgagtcgttttgcgatgggttttcttaacgatcgttgatgatcagtgactgagcttgaatgaatgtctaatttgccgtggccaaatatattaataaatggaagaggaaagggtaaagaagtgattatacaactatcagaggatttatcattttaactaggattgaaacatcatcttgatcctggtggagaatgctggttgctgtcatactctaggctgttcatatatgcatatctgtctgtggcttctagggcatattaacattatctctatctaagctggaagattactcaatggccactcttctcgtttccagcg

SEQ ID NO: 91755 - DNA, 781 bp, Eucalyptus grandis
  Intron number 1 from transcript Egrandis_v1_0.032130m (loc us Egrandis_v1_0.032130m.g) derived from phytozome v7.0 (c hr-ID scaffold_2; pos 14387998 to 14388778)
ccatcataactctgcaggctcctagatacagtgtaccaacatgcgcaggttcctctcacctaacgaatctttgtttatttatttatttatttaattttgtgtctacattaaataaataaataaaatgtaccctaattgctaatttttattcaaaaaagtgaaatcagatcaggaagatataaattaaaaaaaaattggattttactcttctcttgatcacttttcatcagatgacatgtgcttctgacttgtttgtacgtactagggaaaaaacaaaggaaatataatttaacaggtgaaagtgaagtcatgatcatgcattgacataatattcaatctagccgagcaaattcaacagattattctaatgaaaatcatatttggttggtaaaaggcataattgtcatccaaagtaaattaaaattctaccactccatcatcatgatctttaaatctcgaacaatattaaattaaaatataaatcttatactttttgttttttgtttttttttctaaatcttatacttgacaattgagattttgtcagaataagtttctattttttttttactttttgcttaatttaaaattttacaatggaattgcacattcgatatttttaatccaaaatattgttgacatatagattcaaatacgactattccacatattttgaaatatggattatttttaaattgaatatataaatatatatattgattttgcttaatccaaataaagattcattccacaaataatcagcatcatcccacaaaagtat

SEQ ID NO: 91756 - DNA, 680 bp, Eucalyptus grandis
  Intron number 1 from transcript Egrandis_v1_0.023326m (loc us Egrandis_v1_0.015613m.g) derived from phytozome v7.0 (c hr-ID scaffold_2; pos 15977737 to 15978416)
cccttttgtcttcccgattcctcctccgcggacaggttcaaagtcaacttttccgtctccctctctctcccaccgctcgctctctcgttcgttggattgttccattcgcggtcgtgcttgtgatgggtcgcgcacgcgtgtccgttcgggcttcgatctcagcggtgttcggtcgcgtttaagggtcgaactttttttcccttttgctgtcgtggggggaagaatcgtgggtctctggtctcgatcgcgtgcgggttggatcgtgggtctctttcgacgtgtttacttttcatttctggtcggtttttcttgataaatattgttcacattcgatggaattctagtccgtgaaaaactggtgagaatcagaggctgcggactgcgaaaagtcaaattatatttgctttttcggtgctgcggggaagattccgaggaatgttgttttggatcgttgcgtcgtcaattttggagggagttaattagaaaattaagaatcgagaatcgagaatcgagaatcagaatcagcatacgaataggaatacatttaggacccggagtttctgtctttctgctataagttgctgtctcatttcgtcccggttctttgctctttttttaactcgagtaattttatctgaaattcagctggtgtttgatttctgaaaatctccgtgttggtg

SEQ ID NO: 91757 - DNA, 896 bp, Eucalyptus grandis
  Intron number 2 from transcript Egrandis_v1_0.023326m (loc us Egrandis_v1_0.015613m.g) derived from phytozome v7.0 (c hr-ID scaffold_2; pos 15978846 to 15979741)
ttgcaggtaaatcatcatcataatcagttcgtcatcagtccatcaccttctttcactcattaatcaatgctttgatgcacctatttcatcgccacaaaatttttccggctgtataggatgtgagatcaaatcatggactgtagagtcttatctcggcatggcagttgcgtgatttacaagttgcaaatgacagtattataagtgtgtaattgcagtgtccgttgtctattatgatttgtgacatcaaatagtttcttgcatttggttaactgttcttccacatgccatcttgatatggtatcatcttgtgatcgattaatgatctcgttttgggtttacagtaatagattgacaagccaataaaacttgatcgataggtactttgtcagcaccatatgtgtttatagtgattaaaaggcagaccttcctatgcttgagctgctttctatactttgatgcctcttgtgtgttgtgctggagtgctgcgttattttgagcgatggtgattgatttaagtattatatgatcatatgagtccttttcccttaccactatgccgttttgggtgtcgtagtgaagttgttggactggggcgaggatggtcttaacacagcagctgaaactgctgccttgcgggcatcgtttcagcaagaggttgctgtttggcacaagcttgaccatgctaatgtgacaaaagtacataactcttagccttttaccttgtatctttcgttttacaaaataattctggtgacatcagactgaatgaagatgatgttgcaaaggcctatgtttcacatacctgtttaccatgatacatttgaaaatctaatctgttctgttgctttaaatgattgtaataattgctacattggatgcagtttgttggagcttct

SEQ ID NO: 91758 - DNA, 904 bp, Eucalyptus grandis
  Intron number 1 from transcript Egrandis_v1_0.026825m (loc us Egrandis_v1_0.026825m.g) derived from phytozome v7.0 (c hr-ID scaffold_11; pos 40572200 to 40573103 reverse strand )
tccgaggaagagaagcgctattcgcgcgctgagaggtaggacatttctgcgatgcttgttcgtcctctgtgtagttattctgtgtgggcgttgctcttcattggtcgatgcggtttcgttttccctttgattccgggagagagtgaggaaagtgagagctgcttgagcattaatatccaaaggcaggtcaagaaatgtccaattattagagcatggatttgccctttgtatctttgggaaagggcgcgatgttgaaggtgaatagttgctcataattgcgaaagggaagtctcattgtagttgtttcttagggatagaagcgatggtggccgtcgcgtcatcgcttgaatggatttgtttcgtcagcaagccttttgatatttctgcgcagtgtaatttggtcaccccacttatgtagcttgttgtcttcttcattagtattgccggtttcatgtctttcttcgtccagtcatggaaatgagatgaacctttaagatgcaggacctggaactgacatgttaccttttgcggatttttaagtctttagcgtttctttgtcatgaagtaaagtcaagtctccataggcatgtctatcattggcacacattgttatggaaatttcagattgattgttataatctccaactacatgaactttatgttgccttttttgggatgattcaaaactcacaacagcgcatcacttcatatggaagttctatagtctgctagaaaattaggtttagtcttctgagttggaatgtaatgtggcctttcagccccaattttgtcgtggaactctcattcttttcttttctctttgttatttttgcaattagcacgctaaatctgggatgatctcggtctaggtttggcactggatctgttctgaacaagtcagaag

SEQ ID NO: 91759 - DNA, 863 bp, Eucalyptus grandis
  Intron number 1 from transcript Egrandis_v1_0.012258m (loc us Egrandis_v1_0.012258m.g) derived from phytozome v7.0 (c hr-ID scaffold_7; pos 39848833 to 39849695)
ttccctccgtctctctgggtcgggcgttgtgtaaggtgggtgtcgatgtgttgcggacctgatcaagctgcttcttttccttttcggcggtggtgatcgtattagctttcgtttcaagcacgttaatttcgtcgagtgttctcgtgttgtttgtaattcacggtccggggaggaaggtggtcttttgtttctctctgggtttctctggggttcgacgatggtttaatcgctgcgacgcagctcgtgacaagaattgggaatatagatcgattatcgacactctgctcgcacttctggtgtagtggaaatgatatataagttcttttgtcctgcatatccactaattgttcggcggcggatggaaaaaaataaagaatttgtaggggacaaaacgaatccatgtgaatttcatacacttaagtttaagatcaccaaaagtcacaccatccgcgtattttttttttttttgtgcttcaattcgttcgcgagattgtaatacaccctgaatccaacggcgggtcgtttactgcaattcatgctggagtttattagttagtgtttgattcaatcacatctttaatcttactcgtgaatgggttttactttagcccctctgtttttgatctgcagaaggtactttagctttaccaaaggcgctgcatttttgtatatttgctttgtatttggagtaagtaatcattgaccctcctggtgtctgattgatttctttttcggactatgaatgtcctttcgaaagcttagaaacagctcctttcaagagacttttttattctttttttaatggttctcttatttgatgcatttcaggggtaaattctggtgattcacccatacggcaacgt

SEQ ID NO: 91760 - DNA, 509 bp, Eucalyptus grandis
  Intron number 2 from transcript Egrandis_v1_0.017371m (loc us Egrandis_v1_0.017371m.g) derived from phytozome v7.0 (c hr-ID scaffold_2; pos 47535285 to 47535793)
ccagctttcactttcattctcgccgtcatttcaaggttcgttctctctcctttctcgttatctgcagtgcacttgaagaaacgagagaagcagatgatggtgtgttgattggatgatgggtgtttgattcagctcaaagtttgtgagtgcttttaatcgagtacgaccaaagcatagttcatagttcccgtttcaaccaggcccggagaaattcactttgccaccactcaattcactcatcattttcttctgtgcatctgtccttttaatctcagagagtagaatagctctataaccttcatttctgcaaacgaatgaacccctgaaacatgacagaatcaagaaagaacatagagtagaatagctctataaccttcattttagcaagtggaggcaggctgcacgttcatacgaaacgcaaaagatagcagtgcatgacatgtcatccacgatgaaacgacaagcttatttcattcttgaattggttttatcgaattcaaaaaactagg

SEQ ID NO: 91761 - DNA, 1030 bp, Eucalyptus grandis
  Intron number 1 from transcript Egrandis_v1_0.004220m (loc us Egrandis_v1_0.004220m.g) derived from phytozome v7.0 (c hr-ID scaffold_2; pos 59237840 to 59238869)
caggaagtaggtgcgctaatcttggtgtttctgtattttaatcgtgccctaaggaattcgtgtcttccaagctatgatcaatgacttgtagctttaacattgcattgtaatctttcgtggctctgtaattatagcgtgtataccttactattcacataatttaatggtcgaggaggaatggcaaaacataggctggctaaaaattgaattttggccaaatgaaagtattcgtggagagtgcagagaaactttaatgtccatttgcttacctgtactggagctaaatatgctcactctattaagcagtgaagtgattggttttattccattgaccattgacacggcatcaacttggaagcactgaataaaagtatgaaatccagtatggaagtggtctgagtgccttctttttatatgcattctggggttgtcctttacgatatttcttcatatcaatagtgtcatgcaagcatggatatcttgctgtaattaatttgcttgaatttgaaatgaattttccaccagagaacttttttgttttatgcttatttttatttcatattcatatagcttttgttttggctgccaagtggagatgtttgttggatttcaatctctcataggtaggcttccctactctatgaaatatggagataattgcctatccgctcggtgaccactatctcttcttggttagtctgcagttcagttaatggccatttgctagcataggtgcccattttgattacaacgaagagggacggagggagggaggcgtctactgatgatatgtttgcattcgagttagctacataactaaatgtttcaatggttctgcctccctgaagatgtttgtacaagttttcttttgtactgattgtgaaattggtagaaatcctcaaccaatagtgctctcactttttgcttctcatgtttcaattgccctattttcttaaattgattttgaatcataatctttgtacatttggccacaggagaaccaaaagattttaggcctcgtgctaagttc

SEQ ID NO: 91762 - DNA, 922 bp, Eucalyptus grandis
  Intron number 1 from transcript Egrandis_v1_0.019207m (loc us Egrandis_v1_0.019207m.g) derived from phytozome v7.0 (c hr-ID scaffold_2; pos 47779986 to 47780907)
gggcttgtcctcccagccctcaagaatagcctcaagtaaaaaattgtcttccgagataatcttgtaaggacgtgtttgataatgattcttttccggagaacaatttttgatgaaaaatagttttcttataagaacgcgtttgataactgcaaaaaatttatattttaggaatagaaatgctataattttgttgtttcttttaatttttcaatatttatattatgttttttcttttttcttttttttcttttttttcctttttcctcctttgtggtcgatcgccggccacagtggcggccaatgatcagctgggcgagatccggcaagttcaccggagcctcaccaggccaccacgaggctcgaccttaccagtggcctcgatggccagacgagccctgacctcgcctaggcaacgcgagtcgacctcaccaagccaccactaggtaatggcgacctggcgatggcctggcaaggccgagcctcacccaaccatggtgagtttcagtgtcaccggccaaaaggaagaagaaggaaagaaaagagaagaaaaaataagagagaaaatttgatttttggaattgttcccaggaacaagaagtcacttttttctactttttatttttgttctaaatctattctcgaaaacaaaaattttaccaaacatgtttctattcttttttcgtcctccagaacaaaagaatataaatttttgttctggagaacagaaacaatttttaacaaatagaccctaaatatggtcatttcattgtcatacgaacacttgttgaaacttttaactgtaatatcccaggtaatgttataacaaatccgttcttaccttttgaaatgttttctgatagcctctagtttgcgaatattctcatcagaaaaatcaagttggattacatagatctctatctta

SEQ ID NO: 91763 - DNA, 724 bp, Eucalyptus grandis
  Intron number 2 from transcript Egrandis_v1_0.011121m (loc us Egrandis_v1_0.005897m.g) derived from phytozome v7.0 (c hr-ID scaffold_2; pos 60660048 to 60660771)
gaggagcaccaataaatcaacaggtttgtattttctccgtctctctttttccttgttcctcatcacctagattctgcagtatcatgatcacggtataatgtttttctggtatgttactaatttgttatcttccaagaatttaatggcacctgttttgagtgatttctacctatgacttactttttgtattttgtggcttacacttttgactttttctttaagctcgaaatatttaaaatctattctattatataatgtcaacatgcaaattcaactattgctttctaacagtttttagagattcacaatgttcttaatttaattggagaatttggaaagaaagtgattagtagaattgataagtatcttatgaatgttttccaaacatgccatggttctgtttttgctgtctttgtagatgtgtagatgtattttatttccttatatgaccccagatcagtgccaagtttctaaagttacttcttggctaaaaaaggatggtatttgaaaggtagaatgcttattggcattctcattcgtacttttttttttttttactctctcttgttctttgtgtgtaagtattttgattttggccagtatttttttctgtgctgtgatgtatcaagctattgtaagtgcataaaatcctccgatatgtactaattggtgattttgcatatctttagctaagggaattggagagaggtgtggatatacttgt

SEQ ID NO: 91764 - DNA, 877 bp, Eucalyptus grandis
  Intron number 2 from transcript Egrandis_v1_0.018490m (loc us Egrandis_v1_0.016110m.g) derived from phytozome v7.0 (c hr-ID scaffold_7; pos 46323651 to 46324527)
tcgagcaaatacggaaattcggctccagtccaagggtgcttccaattttgatttttaactcgagtgccgtctaatccgtttgatcgccatctcctggtcgcgctcgtttcaagcgtgcgatgtcggagaaaaagcgtgttagggttcgttattgcggacgaaaaccgcgcgttaacgttaatgtaggatcgcgttgcagagcagagagaagccttgtggcattcgtgattcgatgagttgtggtttgagttggtggacacggtggggagtgaaaagttgcagttttgatgggaattgtccttcctcggagggctgtgcaaccggtccaggttctggttccaaatttttggaaccggtgctaggcaggtaggttctgcgttctatgtgttgaacgtatccactcaccaacccgggaaccagttagaacctattttatgagtttagaagaagatgatttaatattcttaaaaatgcttaacttccttttttttttggtaaagaaaatgcttaacttccttattactttgtatttctatttattttgtatagatgacatttggctgctcgtattattttactataattgctatttgtctttgtttaaaaaaaaaaaatgaggggaaaaaaatgggtttccggatagaccctgaaacaagaccaaacaaacggggtaggttctaggttctgaaaactgggaaccggaattgggaacctacctgccctggaaccgatcacccctacttctttggattgcaaggactagagagtctggttctttttctgcttgtgttttctcttccataaatgtattggcaattggtatccatacgctgagtgttttgcttatcatgatgcagttggttgcagcgaattcaaa

SEQ ID NO: 91765 - DNA, 524 bp, Eucalyptus grandis
  Intron number 1 from transcript Egrandis_v1_0.003655m (loc us Egrandis_v1_0.003655m.g) derived from phytozome v7.0 (c hr-ID scaffold_7; pos 44833407 to 44833930)
ccctcgctgccctccaacatgtaattgatgatcccctctccttcatagtgattccgatggcgtatagctatcgatttcgccgttctcagtgattccgatgacggtttgatggcgtatcgccatcgatttcgccgccggttgattcgatgaatcatgagattagataatgaatgttttgaaaagaagaatctgggaatttttcagatggctttggggtttcaattagggctgaactgactcaaaagagaatggattgattcatatccagttcagatctatctatagtgggtcaagatcttattttccaaagtagattgttgttaatggagaatgagtttaatgggatttagtattgaatatggtttagtcgttttcgatagaatgaagttgctcgaaaatcgagtgaagagatgattttttttttcttatttgtttttctgctatttcatctaattggctttgctcatattctcaaaatttatgcaacaggtcgaggggttggaagaattcctaaatccatccga

SEQ ID NO: 91766 - DNA, 492 bp, Eucalyptus grandis
  Intron number 3 from transcript Egrandis_v1_0.012282m (loc us Egrandis_v1_0.012282m.g) derived from phytozome v7.0 (c hr-ID scaffold_7; pos 43027833 to 43028324 reverse strand)
ctgtcctgcgtcggacttctcataaattttttcaggtatcatttgattgaatttggttgttaagctaccaatcttaacagaaagtttttttttttagtttcatggattatatatggctaattctcttgtctgttgaacaggtaagtcttttttagtcaaaagttcacgtaaacttagatcttctaggatttcatcattttgttcttcaaaagacttccttgaccattgcagaattatgcatgttttcaccattccaagtttatccttcttgtatcatcattcccaacctattaaaggccatactttccatttgcatggttactctggttctggttattataaccagatatggtccttgtgtgaaagcttatgccaagattatacatggaacttcttttccattttccttttccttcttttgtctcatataacactcacatagtttggtcacttttgctgatataatttttggaatttgagacagactactgc

SEQ ID NO: 91767 - DNA, 1008 bp, Eucalyptus grandis
  Intron number 1 from transcript Egrandis_v1_0.012592m (loc us Egrandis_v1_0.012592m.g) derived from phytozome v7.0 (c hr-ID scaffold_2; pos 27825895 to 27826902)
acggtcattcttccggtctctctctgtcctcttgaattgtgtcgatcgtttgttccgcggtcgcttcgtgctttttcttttttgttcttgggttcatcccaaaatgaagtcttttggtgcgtatgagcgggactggagtttggcgtggtcctgcgagttcggtgttgtgctgtgatttttggatgtttatctgagcgaactctagaggctactcttgtttgtgcagtgaaggctgaatcttttataacgacggttattgcattgtctatgtggcgtcgaccaggtattagagttcgcttgtctctggaatgtgatcgatggtctcctgctatgtatgttaaagttttctcatttgagccaaagtgtcagctgatcgagctgctggccagctttttgtgttgtcgaaccgaactgaaatgtcggctgatcggggtcggtttttttacttgtatttgtgggtccttgttggtgtcattagtgagaaatatcacgacatagctcggaagtatgatatgctattgtaacagatgtggtggtgttttccaaaatgcgtgctagtttatgttttccctcacttaatgtatccaaaaccgggagatcagaagaaccttcctgaaatcacttaaatgactgtttgacatagtctgaatagcctaaggcaatctctccttttcaatgaaggcagtaaatttcctgtcatatgtgaatgtcaaacaaattggaaacgtgcttttatgcacttttccgtcaacgacgtgacaccatttgacttcaaacggtgtaattgtcactgattcatgctagttacctccacattttgttttacttatgccgagttttagagatgttgtaggctgaacttgaagctttcagaacgtctttgcccttctcctccttaacagtataagtctctgcttttgcatccttatttccaatgcattatatatagtccgcgtcccagaaattttcctttgctgatctatactttctctatatagggtcactgac

SEQ ID NO: 91768 - DNA, 690 bp, Eucalyptus grandis
  Intron number 2 from transcript Egrandis_v1_0.012592m (loc us Egrandis_v1_0.012592m.g) derived from phytozome v7.0 (c hr-ID scaffold_2; pos 27827038 to 27827727)
aaaaagttcctctgaaaaagaaggtctcgcattggcaatcgcagtcgttgttcactctctctttttaactacagttgtttatcgtactgctatagaataagtatttgattatcttgattaaatctctctgatggacaatagcagagagcaaaataatcttcatgctatgaagcttagattggtgcaataatcttctatccaaaactgtataacgcaaaggcaattgacacggtttgcaagatcaattttgttaatcgttgtttcacatttttttgaggagcgaaacacatgttttgtgaaagcattttatcgattcatttaaatcatgctcaaccaaaaatcatattgtggctggtacacatgcttgagtattactaaaatttgttatattaagctactctcagcgttctgctttgacgtgatgttgcaccataggcttagtacagggggaatcattcgtagactcactttgcattttctttcgcagactgttcccttattaaaaaatggcgttgttgcaaaattttaaagttgctgcagctggataggtttcttcacacatatactcaactcttttatttgtgcatgatgattggtcttatttctctaatatggtttattttgattgtttgagatggatttaaatctgaagcatgcagatttatgtcaatgatgttactctgcagctta

SEQ ID NO: 91769 - DNA, 1002 bp, Eucalyptus grandis
  Intron number 1 from transcript Egrandis_v1_0.004598m (loc us Egrandis_v1_0.004598m.g) derived from phytozome v7.0 (c hr-ID scaffold_7; pos 32107749 to 32108750)
agtcgaagcgccagctgaagcgcgagcgccagcaggtcctctcctctctccccgcgaatttcttttgagtgtgtacgcgtacgtgcgagctttgcctgcgaagattttgagattgtttgtcctgcggatttctcttgtaaattgcggttgaagatgagatgcgttggaccttcgcgtggagagatgctcggttcactgttcagacatctcgaccacttgcttaggacattgattcgcttttgtctcattgggtaaagtagattgagtgtaaaagaaggggaacgcgggtggttgatagaattgaacgcatgggcttgtgctccgtaatgcagctgcggtcgacttatctcaaagccattgcgtaaaaactgaatcttgccctgagaaaatgatggtctagacatgaaaacattatcttgtgcactggtaaaagccatggcgatggttaatgatcccgtatgattactaaaaattgtgggtttgtttcgaacttcacctctaaggatgatgtgtttatgagtaggctgaggagccggttgacgactttctgtttggtgtttttgtgtcagtacaatcttaggagtatgttttgcagagctttcttatacatttgttaatattgtgatgctgagaggaagctcttttgaagttggaaagtgatattatctgttttctgttgctaaattcgggcattatgattgatggaaggacacagttaagattaacagcttttgtcagctgcttatgtagagaaggcaggaggtctgaaactatggttttcaaataaattgtatggtttttagtagatatattgatttatagaattgttgcttcttactctaagaaatctgattgtgcgagtttgttcctttaatgctactccagttttaagtgctctgattctgaaaatctatttgctccctcacatgtagtgtctgaccatgaaatgtctgttttaattgtttaggaaaagaaatctgctttaaatctctgtcctgagat

SEQ ID NO: 91770 - DNA, 709 bp, Eucalyptus grandis
  Intron number 1 from transcript Egrandis_v1_0.028188m (loc us Egrandis_v1_0.028188m.g) derived from phytozome v7.0 (c hr-ID scaffold_2; pos 43224433 to 43225141 reverse strand)
tccttcttgcgccctcaagaagaagaacaagagaggtctgtgattattacttctgtcattgcattttccttgtcttccgtctttttttcctcctcttgttgccgtttcttggctattggattaggacccttttggtgatgggatttttcgggtttcttgttttgtattagtgctgtttggataatatgggtgttcagctctttccgagcacctgaataatctctcactgactcataatcggagcacaggtttgtgtatatgcatggaagagaatggaccgcccatgtaattgcagtagcagcaggtctatgagaagaggagtgttctagattagagtacggttggtatccacggatcatcttgatggccctgtgtgtcgatttctaaaactagttaaacaatgagatcggaatattgggtgaatcgaaggagttgacatgaactctactggttttgatgccatgttggacattgcacaactaattggcttcggtaattttgggtattagagagagtagtgcaagcaatatgcatttgaaatctaacatgtattgtcgcttgaccaatatatatatgcctaatcggcaatggtagtgtgcatataatcgatgctagaatttcatttttgtgctggaaaattccgtttctttttttgatgattctgctgggttcagaggaaaacgacgaggacttgttcacggttccggac

SEQ ID NO: 91771 - DNA, 645 bp, Eucalyptus grandis
  Intron number 1 from transcript Egrandis_v1_0.022974m (loc us Egrandis_v1_0.023028m.g) derived from phytozome v7.0 (c hr-ID scaffold_7; pos 39918312 to 39918956)
atactttgttctctgattggtttctctgacaccaggtgctctgtttctgtcccccgcttttgtacatagaagaaaatgatgtcttttgagaacacccctttcattcggttgttcgttttgtttggtaatttggtaccatcaagaatgtctttttgttttgctgtcaagggaggatgctatcttttgcatcttctatttctttctcatacctgttcttgtttgatgatcttaatttttcggtgcaaagctggaaactttttgttttctgaacgtcacgatatgactctgttacattctaatccatttttcaactcatttgttgatagtatgaacagaggcaatttgtcttctgttgatagtctcccgttctgttattgctctttaccttctgcacgttaatttcaagagtacagcttttctttagctctatattgatttaggaaatcattgtcaatgttcgaaatagttgattcgatgttttgttgccacccctttgtctctgtgattggcttccgctgttttctctttggatgtctctttggccttttctgtgtccttggcttagttgttgccacttgttaatcatcctaatggtctcctgtttcagaagtttgctaaaagagaaggcatcgaattgaattggtt

SEQ ID NO: 91772 - DNA, 563 bp, Eucalyptus grandis
  Intron number 4 from transcript Egrandis_v1_0.018463m (loc us Egrandis_v1_0.017581m.g) derived from phytozome v7.0 (c hr-ID scaffold_7; pos 44789961 to 44790523 reverse strand)
ggtatgcaaactgtcttctaatttgagtgcttttgtatgcatctttgctatggtggtttcctttattctctcatgccatgaagcagctcgaggattttcctatattttggagtcaggaacagatgggtctgactcttgagaaaggatttccatttgtgttctattattcttaattagtctaagaaacaatataggtgattgaggacgcatctttcctataaactgacacgagtttggtgattgcccctgctacttcaactgaaggtagttttagtaagtaagaggttggtcaataaatatcatgaatttgttttcgctaggaaaattatttcgctagttgaagtacaagacagttctgacgatacttctcattttagtgaagacttctaattggcaatatacttatgtctggaatagcaatccatctaactcctataattcttatttataaagtctccaacaatgatttgatcccttgcttttatgtacctgtggttgattgtttttaagaaatcctttttcggtcaccatcttaccatctttgagaataatgcagatcaaca

SEQ ID NO: 91773 - DNA, 543 bp, Eucalyptus grandis
  Intron number 1 from transcript Egrandis_v1_0.016209m (loc us Egrandis_v1_0.016182m.g) derived from phytozome v7.0 (c hr-ID scaffold_7; pos 31225818 to 31226360)
gagccgtcaccgcggtcaagaatcaggtacctttgtttcggcgaaattctattttcgtagttttgtcggtgtgaatgggaaatcacgttgaagatcctcagtcgagacatggggacggacgtagtttatcttagattctaactggaagtcggattttcctgcttgatcgatagatttgtttaagtttttagcacccatctttgtccgacctttgaagtttaattatttctccctttaaagattttgttcccctgcgtctcgtgtgcatccgttgaatttgatgactgatcggtgagtttttcgcctgaattaatggtctacgtgacaaatatggatctgtttcttcctaaattggaagtagtatatacgactcttatgacaatatgagagttgacttttggatttgaaactttgctggcgagttctgggattttgaatggttgttctctttaatctggaagtaaatttcgtctgcagttaagtgtttgcttcgtctgatgaatttaattcgatgtgattgatttttttgtgagattagggttc

SEQ ID NO: 91774 - DNA, 806 bp, Eucalyptus grandis
  Intron number 2 from transcript Egrandis_v1_0.055148m (loc us Egrandis_v1_0.055148m.g) derived from phytozome v7.0 (c hr-ID scaffold_11; pos 31540591 to 31541396)
ccccccgagctccgcggtcgtcgcaacgccgtcaggtaataatctgaagcggacgcgcgccttcgcgtaagcgtatgtagggcaacgttttggattatggagctttttctttggttgtgtgatttgtatggtgaatttcgcggttttagagatgattgcttgctgcttcttcggattgagctagcgttcgacttctgcctttgtgtatctttctcgagatgtccatttgtgctggagtttgggctttaatttgcacgatctttctcttttgagggagtagaggtatggattatcggtggctgagtttgaccgtggccgccgggcattgcattctatgcataagcgctctgttttatgataatgttgcctactcagttaggcttagttagatgctgcagagtataaagcaattcactcagaagatcaattacgtattttttcgcctgttataatgcttatgctgaacgatccaggggaggtaatccttttaatagagctttcgttgttcattcccgtgattttgattgttactgttatttgttgctgcggtagaagtaggtaacggtgaggaatcctatgcggcgagttgttgttaggtcgatttctggattgggacttattttgtcttgatggtttcattgaagaagagattaggacattccttgatcttcgtttagcatcttgatgcaaactttgtcgcttgaatagaaaacaaagtcaaaaacttaattaggggttgggtgatgatgttttgcgttacccttttggcagatcggagactgatattgtgaacatagtggagcaaa

SEQ ID NO: 91775 - DNA, 955 bp, Eucalyptus grandis
  Intron number 2 from transcript Egrandis_v1_0.008933m (loc us Egrandis_v1_0.008933m.g) derived from phytozome v7.0 (c hr-ID scaffold_11; pos 40380120 to 40381074 reverse strand )
gttggtggctatcctgcgttgtactgagagaggtatgctccgttttgttatggatgaatgtggttttctcaagttgagatttttattgagggcacatgctgttctgtgatctttgtgctctttttgtgactgagattggaggttgggtaggcattccactggctttatgctccttttgcgtgagctattatgattgcgccattgcatgtgaaggacctaatgttttaccaatcgatttcttcgagtgtttgttcctgtatgagctcttgagagctgctagatggctttttgtatttggacaactttatccttgcacattgtagcaaggcaatggacttgcagtttttggacatttagtcatggacactgaaaggagttgccccatattactactaagaagtttgtagtgccctgaacgaaaactatttgcccccatgaacatgttattttgaagcaagtttaagcaatctgctgtcagattactttgtgcattttgcatcgtctaaggattcttctgttctttcttttttcgactaatactacgtagttggctctttctaataacctcttgatggtttaaggattgtttgattgattcaaagagtcaaaactgagcaatttgtcaataggaacaattaagatgaaggaatttctaaatttcatcttgtgattaagcagagactcagaaacaatattaaaaagcaccatagaagccttacattttacattaaatatgtgcaattttggtggtcgtgttttgcttgatgctaatatgagaaatgctttgtgcactttggaaagaatgtaatgagtagtggtggtgtcatgttggtaaagccgtgcttacattttgtgaaggatgacaagtgtgtcttctgtctatactgaaatacaagattctaagccatttctttgggcagtctttccagaatcagggcttttggacgggaaagga

SEQ ID NO: 91776 - DNA, 905 bp, Eucalyptus grandis
  Intron number 1 from transcript Egrandis_v1_0.023180m (loc us Egrandis_v1_0.019966m.g) derived from phytozome v7.0 (c hr-ID scaffold_2; pos 55913178 to 55914082 reverse strand)
tcgcccgattcttcctcgacaggttcgtcttcgaggtaaagatcttcttcttctttttttgtcttttgccccccacccgcgcgttgctcggtcgatgcgtgcggttcgattcggctctactggattattgccgtccttcttcttcatccccgcgtattggcgagtccctgacttcgattcgagctggtcggtgacttgttgtccggttgcagtacgtagtagtagcgcgtgtcgtggtgcgttgtgtatggttcgcgtggggggattacagggtcgagctctctgtgctgttcattaatcatgcctcgactaggcctcgactggaagagcgtagataacatcaccggatgcgttacttgcattcatgcggcgttgctacttgttgtcctgggtactgacttgggctttgactcgctgaaaaggctgaatttcatgagttaacttttcgtcgagatgctgggttttgcccaaaagtgtgtagcagttcagaggctgaggtcttttcctcttgcaacgtacatacgcttgctctggccctctccgtttcgtggctcctgggtgggaatcaaatttatgtgattgcgtatagtcactttggttgtgcaaactgaacctttatttggacaccatttgacttgcgtttgctattttgtggtctgtatagaggagggcattggggggttttgaggattccggcattagttggttactgaataatgagtatatcagtctctcttttaaattggttttttttttttcaaaaagtatttaacatactgaaaatgctattaactgctgctctcaatggtactatagccttcttttctgcactttgataagttagcctgctttctaaatctctgtgcttcatctaaaaaattgatgatgtcgcagacagttggtag

SEQ ID NO: 91777 - DNA, 776 bp, Eucalyptus grandis
  Intron number 1 from transcript Egrandis_v1_0.005829m (loc us Egrandis_v1_0.005825m.g) derived from phytozome v7.0 (c hr-ID scaffold_7; pos 42788715 to 42789490 reverse strand)
atctggtgagtcccccgccgacctcagttttcgatttgagtccgttgtctgcaccggcgccgtcgcgagccgcggaggcggtccggtggaatgtcggggcaccgcggcgagatcgtgctcgagttaatcccgcggcgctattagggcgagatggttagcaaatctgaatccgagctcccgccgccgtgtctattgactgctggttttcctaattcgtacgtttctttttccacgcgttggttttattgcgatgtattttggtgcttgctgcattcacgaactggtgacaggaaatgttgcagttactgcacttggagagtgaactgattgcgtaactgatgctgctgtgttgtctgaaatccgtgtatcgttcatgcactttattgcttggcgggtgaaactctcggcggcgattcgcataaacgtgggtcgaaatgcttcgtattccatctgaatgacaatcgttcctctcctgttatgcagatcttcttccctttctgtatggggtctggcaagatggcgcgccacatgtagccaattagcatcgagcagcctctgtgatctctctccgctggcatgtcttttgcctcgattgtggtttcagtggttgccgatgggatctgataaaggatttaccgattgatgatactcacgtcgggttcagtgcatccattcgtccccggcgttgcagtctggtgcgatcttgggagggaattgctcttcagccgcccgccactgttgctggctgcgaagctcaggctctccctctccatttc

SEQ ID NO: 91778 - DNA, 859 bp, Eucalyptus grandis
  Intron number 1 from transcript Egrandis_v1_0.050556m (loc us Egrandis_v1_0.050556m.g) derived from phytozome v7.0 (c hr-ID scaffold_7; pos 35841863 to 35842721)
caactagtggagagttttgaaccagataaggtcacttttttttcttttttctttttttatataaaatatggatgatattcattaccaaattgagttcttcgcaaatacatcaagagtatcagcacataacaaatctaaaagtgtagatggggatagtaacccactttctagggagacaattgatgcattgagttttggctgtccaatttgttgttttgtttgtgtctcgattacaatgagctaatgtaaggcccggaattctttgcaaatacatcaaaagtatcagcaaataacaaatctaaaagtgtagacggggttagtaacccaatttctggggagacaattcatgcgttgggctttagctatccaatctgctattttatttgtgtcttgactacaatgggctaatgtaaggcccggaattctttcattttgagcttggcctggtccatcaaaggctgtacttcccagcttaagccaactgaagtgagaacactttccacgagcctactgcagttagagtgtacttgcatctctcttgttgttttgttttctagggataaggtcactttgctcagcgtgatctcggcggtttccagcttagaggccttggaatctggtaggtgagccgattgttacgttcggagaagtggctttagttggaagattactggtggggcctttttgatggacgtgtactccagccgcgggtgactccatgaaacgatgagggtgttccacaaaggcacaaaatgcctgggagaaatgtgttgacttggaccgtggcgatcaatgggctcacagtgcacggccacagtgacaaggccctcaattgttcaatgatatgaagaattcagga

SEQ ID NO: 91779 - DNA, 779 bp, Eucalyptus grandis
  Intron number 3 from transcript Egrandis_v1_0.011348m (loc us Egrandis_v1_0.003487m.g) derived from phytozome v7.0 (c hr-ID scaffold_7; pos 50176385 to 50177163 reverse strand)
ctcacagaaagtgaagcttctaaattatctggtaatgagtgtttggttcatgaatacttggtcatgctactgttaccatttagtgcataacatttattctacgcatgctgggtgtggagtgtctgtggatggtggagtggaccaatttctgtaagcatatcgtcgtcaatcattcttaaatgcgcatttatgggataatcatcaactttcacgcacacttaatggctattcatttacgtcatttttagacagaaatcatcacctaacatgctggttgctcaacagcaagctgtggaatgatccttgaactgtgccttcactgttcttcgtgggactagccctggtattgtgttcaaacagttttgacttttttcattttttcgtttgatcattttttgttgctacagccgaaaaatgggtaaaatagtctattgttagatttattttttatttttttatttttttctaacatttgttgtccaagcctgtcaatatctgcttttgttcttatcaccaaaaccatggagagccgaagagcacatatgtcagcacagaccaccagctaattttagccatgtttgcagctttattatttgagattataaatatggagaagctgatatagcttttgttttgttgctttatggaaaaataaagcagtcgttttgtttctcctcctgttaaggtgttttgatgatgcagacatgtcacaagttgaaaaaaaaaaaaaacagtacactacaatttctaatgaaagtgttggactgtaaaaccaggcc

SEQ ID NO: 91780 - DNA, 346 bp, Eucalyptus grandis
  Intron number 3 from transcript Egrandis_v1_0.024272m (loc us Egrandis_v1_0.024272m.g) derived from phytozome v7.0 (c hr-ID scaffold_7; pos 18379783 to 18380128 reverse strand)
aatcaatagccatagcaaaggtaaaagaaacttctacacccattgtgtctaagtatcaatttttttgacttcgtgcttttataaaattacttgggtggtttgagttaatggcacccattttgtactttaggacaagatagaaaagactagcagaatgcaatgactaattaaccgtgttagacaaattgttttgttttttcttttctcgaaagtttaagctgccataaaagattgaccaccaagggaacaaagattcactattcctccccttgttattcctgcaaaaatgcgaatggctcgcttattccctctttacaattgatctcgtgcaatgtattattgcagc

SEQ ID NO: 91781 - DNA, 986 bp, Eucalyptus grandis
  Intron number 2 from transcript Egrandis_v1_0.004497m (loc us Egrandis_v1_0.004492m.g) derived from phytozome v7.0 (c hr-ID scaffold_11; pos 35779109 to 35780094 reverse strand )
gtcacactctgggaagcttgtacgggtcaagaaaggtaaatttggtgctctctaattattctcgagtaatgtttccgtcgagaaggatttggatgttcggttctgtttgtcttgggtcttgtgatcgtctcattgtattatcgtcattagaagcacttgctgctaccactctacatttttagttcctcctgtttttacatactgcggatgttttcggggtaaaacacatgtctaggtcaaagtttatctgatcatttgaactcctatgaagtcgttgtgatcctctctataagagtttatttccgtttcctgcctgagactaattagttgatcttttgcgaagtgcagtagttaatcctttttctgtttgtgaactatatatatatatatagtagatgatcaagggaatccatgaccattattcctcttttcctatatttttgtatcgtggattttgaaaaatgctttgccaaaagtattatctagttttagaaccgttggagctgtggtttcgggtcatattccggtttttggctgcagtatgggtggttaggaggcctttgatttaatatctcttacaactcagagttgggctttttgtttagactgatcgtgtgagtagctctgctgttcttctatttccagtagctctactgcagcaaccccaagagctgcatttggaaatctgcttattagagttggaatgaactaaggttccccacctaattgcatgtggccataggcttgtcatgtttatatttttggtgcgtatttattggatgcgtatctatctttcttgattatgtgattatgctacaaaggagagtaattcaatttaggttagttgtcttgatgcagcagttataatctattgcttatggtctgaaaccgctaattgagcaatcttttcttttttatgtgcatgtgctgttacttgtatattggaaacagacggaggtggggggaagggaacttggggaaaattg

SEQ ID NO: 91782 - DNA, 954 bp, Eucalyptus grandis
  Intron number 1 from transcript Egrandis_v1_0.004497m (loc us Egrandis_v1_0.004492m.g) derived from phytozome v7.0 (c hr-ID scaffold_11; pos 35780277 to 35781230 reverse strand )
aacctcctcggtgacgtgcagccgtaaccgcagcggtagcctccctatataaaccccctctccttggtgccctatcttcccctcttcttcctctccatctctcctctttttccgtctcctttttcgctccattctcatccatttctctctctctctctcactctctctctctatctccatccgcatctctgttcaaccgattgcgacccggacacgcgacacgcggggagaagaagaaggaaataaaaatacaaaaagggggagaaaaaggaaagcaggaatcggatccgcagtttttttttttttttcttcttccaggggacgggacgggacgaggtttttgacctagggtttgcgtatcggacttctcttctgctgcggcggggaaggagcgcggtgttccgttgcgtgggcggcttcgtctcgccggcgggagtttgctttctctctccttctttctctctctctgttcatcgattggagatccaatccgtgcgctgctgctgcggctctctctctgtctctctgtcttggctcgagattcatcgcccgggccaagcgcagaggaatcggacgcgcctcggttccgtccgcctcgccggtgcaattgttcaggttgaatctcggttgtgttctttaccgttcttgtttcgcggtgctggcgcttctatcggtctcgtgaatgttgtggtattattagtgtttttttttttcctgctcaagtgctgccgattggaactcgcaagctcggattggctctctctcccgttcatcgcgcttcgtcctgtacttgaggccttcgattcgttttctgaatgcgcggcgagcaccccgcggatcgtgcgtggttagatcgagtgggacgatgatcgtagatggcgatggttaggctgctgttggtggtttagcttttgattgtcgttttgtctggtttaggagtgggctgctgcgcag

SEQ ID NO: 91783 - DNA, 854 bp, Eucalyptus grandis
  Intron number 2 from transcript Egrandis_v1_0.016544m (loc us Egrandis_v1_0.016545m.g) derived from phytozome v7.0 (c hr-ID scaffold_2; pos 59592797 to 59593650 reverse strand)
actcttgtttgaacaggtacgttgttacacttaataaaatttctccaaatttctcataaagttggtcattgcacgaggccttcgaaacaataaaaagagatcattttagtgatgatcaaattctctggtgtaaactatacatctaatttgattggtaatcatggatttatgcttcaagtcctcataaagctgtcaggtatttgcagagtacgtttcctgtttcaaacaagtagctctctgcatgagaaatatgcaaatagctatagcacacggtttgactccctcattagatttttagtcatttcgcttgcaaaaatctctcgggggttaaattgttgttatattttgatgcatggcgaattcaaatcaaattgaaaagttaaaattctattttttgtccatatattttcactacttttctaagtgagtacttctgtgataaagtccattcgatgtaaaatccggttaaatccagctaagatgaacgttggaggacaccggagcgtgacgtaggtgaaaatattacctaaaaggatacccactatgggttgtcgatggtgaatggattaaccttttgtcaatctgtcttctatgctcccaccagttgaatattcgtggtgggtgtcgtgtcgcgcaggcaatttaattcatgtcgcacctggtgtcctctgactgtatttgttaggattttgcgttggagaggattgattagataaatgactaaaaatagtaccgcaggtagaaattccccaactgaacagatgacctctaattttcctgtaacgatgtatctagctcggtttgccaaactgaaatgagtcacttgtctatgcagttggagcaaattaaggaat

SEQ ID NO: 91784 - DNA, 592 bp, Eucalyptus grandis
  Intron number 1 from transcript Egrandis_v1_0.046268m (loc us Egrandis_v1_0.046268m.g) derived from phytozome v7.0 (c hr-ID scaffold_868; pos 424 to 1015)
cttgagggtaagcgatcccttgtcttctctttggttaaagcataacattcggttttgtatatcatggcctatgtcacaagtcaataatgattttctcacagtgatttttgagtacatgtggtgtttaattgccatgtacttcacttacaatcgattgattttgttttagtttattgatacaatataggtagttgtataagatacttcgtaatttgtatcgtgcacgaaatggtttggttatgcatgggaactgttctctttgttgaaaaaatcttgaaaggtcacctttcatgtagaacatacgagaagaattacttgcgcttgaatttctttcccgtaactatatttgtttttcttcttcttttgccatcgccaagaaaagtcatcataacttcaattgaaagcataagtttcctgtaggacgtaaaaggaagctttaaaatttcaaaccttccttttgtttgcatttaactgtgtttcatgacggcgtatacagttcaagcaattaccaaagagatgggagattcgattataaatttgagttccattgaacgcagaacacgaacaagaggaccaaagctcaagttaccgc

SEQ ID NO: 91785 - DNA, 433 bp, Eucalyptus grandis
  Intron number 2 from transcript Egrandis_v1_0.050332m (loc us Egrandis_v1_0.050332m.g) derived from phytozome v7.0 (c hr-ID scaffold_11; pos 38686293 to 38686725)
tttattacatccaagttgtggtatgccttcattcagcctacgtcttgacattgtttttcatgtctatggtttagagttggtttcaatggactacggccattgcgagttttaagttccaaaatttgtctttatcatttgttttactggagagccatcattctttcttgtgggttctgattgattaagctttaaattgattttaaaaaaatgaaagaaaacctcttctaatgcagaaatgcctatatttttcatctctatattttcaaatttggtttttccaaccacggtaatcgtgggtttcgaatccaagttttttctaaaaaagaatcgttttttgggtcttatgactttggtttggactgctattttgtttattcatgtaccgctactacatttaagtttcagtttgattacaaatgcaggtgcagtgacc

SEQ ID NO: 91786 - DNA, 561 bp, Eucalyptus grandis
  Intron number 3 from transcript Egrandis_v1_0.013761m (loc us Egrandis_v1_0.013761m.g) derived from phytozome v7.0 (c hr-ID scaffold_2; pos 22638661 to 22639221 reverse strand)
gttcccgtgagtgtttccattcttgctgagtttattgctgcctcttcaattggagtttcctttcaatcaatttaatttgttccacgtagtgttgtggctcgtttcctattttttcatagcttttcctagtttgaacaatcaatatgccttattttggaaattacaagttgagtttagtgagcaaatttttttatttgattaaggtgaaattgggccgttaggtggattgctgttgattggcgcttgtgatgattatgaacacttgtaaatgagtgtctgctctcgactcaattgactaaatgagggaaagaatgcttgggatgtgctggcactaaagatagaagagaaatttggaatacttagcttttcttatgtgtgtttatccaattgtggatcagtgaaatgtttgttgacttatagcttaaaaaacgatagacgtgaggattatttggtgtcggtatattgccttgggatcaggggaaacaattgtaatgcttattccaagtctagctcatgtaattacatgatttgctgatttgctctgtattactcgacaggtat

SEQ ID NO: 91787 - DNA, 817 bp, Eucalyptus grandis
  Intron number 2 from transcript Egrandis_v1_0.025631m (loc us Egrandis_v1_0.025631m.g) derived from phytozome v7.0 (c hr-ID scaffold_2; pos 63254338 to 63255154)
ggctcagctaaggtaaaaacgcaatctttgggatgctttgcttgttgtttctcgagtaaaggttgctctttccaataatttagggttccagtaggttatatgacgtaattttctagaggagatcatgtgaggtaggtacgatttttgagtgctagtgggtagtggtgaatacaattcatgtgtaaagctgagatgagaagcttggttctggttcttgtggctgttctgggaagcaatgttgtgcttgtgttggcatggaagtcactgttgctcgaggaattcgcatgttgaactggatttgatcatgcatttcatcccgtggatctcctcaattttctcttcttcaagattgaatttcgagggaatgcattgctcaagtacataatgtttgttggtttgatttgctttcttgatcatcctctatgctctaatatggtcttctggccagctggggaatttgaagcttcttggttggattattacaaatttagatgatcaacagtttgatgcttttcttgatccctacagaacagaatttatgcatcacataaattctaattatcagatatttctggttgctgcgagtcttggacatctactgaatgtctgaccttaccagacttttagctttgatacacttgtattttcatttatgagattgaatggtgctaaatatactccaacagtagttctgacgttcgtctgcatgataagcatttgaaggtcatacacgcatcttcttgcttccactcctgtattgacattgcaatgtttccccttctttgtaattcaacaggcacttgctaaggaaattgtg

SEQ ID NO: 91788 - DNA, 342 bp, Eucalyptus grandis
  Intron number 4 from transcript Egrandis_v1_0.042156m (loc us Egrandis_v1_0.042156m.g) derived from phytozome v7.0 (c hr-ID scaffold_11; pos 35030655 to 35030996 reverse strand )
aaatcgtctgaaaaagtaagccactttgtacacaggttggtttgagctttacacttgctatgatctccttatgaaatgttgcttttcaagagtctaatctagcgatgatatatccctttggctgcatcagtttcttttgcttagattccctttctttaccttttttgtttcttcaggcttctttattctttcttcacccacgagttaagaattctaatcttaatttacagtttttttctagaagttttagggtattctttgaatatgtgttaatgttgataaggttgtaggcatgagcctcctgtgatgagccatgtgtctccatcctacagaaagaaccgg

SEQ ID NO: 91789 - DNA, 552 bp, Eucalyptus grandis
  Intron number 1 from transcript Egrandis_v1_0.011768m (loc us Egrandis_v1_0.011768m.g) derived from phytozome v7.0 (c hr-ID scaffold_2; pos 63842499 to 63843050)
cctgcaaaacagtcattttccagtgaatctgtctggtgagtcgatgattaccgattaacgctgatatctctttaaacaatggaaagccatgaagatttttatctttatttatgcaatgtctatgtccgttcagtgtcaatagaaagtgtaaaaagcttctgcatatgcaggaaaaaaaagagtgtgtcgaattgataatcctacatgtcctgaagaagttcactacaattggtttattttaatttttttatttgaccaaacgagtcaaccgcctaaactttgtgaatcctcttttgtatgttctatttttctttatggtatctctgatatttctctttggtacaattaactaccaaaacacaaatagtaatgtcgaagccttagcaaaaacaagcaagccttctattttgagttctttccgatttttaaccagcttaaataaaggctttaagctttagaatcttacatatcgcgtgccatatacaactgattcagtgaatattcatttttcaactgtaacttaaatgattctacctactgatgtgctagagc

SEQ ID NO: 91790 - DNA, 499 bp, Eucalyptus grandis
  Intron number 3 from transcript Egrandis_v1_0.027743m (loc us Egrandis_v1_0.024840m.g) derived from phytozome v7.0 (c hr-ID scaffold_11; pos 31486949 to 31487447)
gtctgaagttagtcacctggatctcttttcttctacttttttttccatttatattttcggtagagcaagtttctagttaagactctaagtgctgctttgttttctacactttggaagctcattctacttaacattcaatctatattcaactacttgagggccaatgtttataaatcaacgctatattatcatgttatagttgcagggaatgtgacttcaaactagattgcctagctcattttgaacaatggccgagtaaggaaagtgattgatccagactcatgcagaatttaaaagaggatattctgtaataaatttgcagaaacttcagagcgtcgaatgtcacagagtatcattgcactcagactgtcacgattttctattttgagtgcaatttatgcttttatatctcaaaaaaaaaaaaaattacttggaggtgtgattttggagcgggtggactcatgtatggtaactttgaaaatgttttgctccaggtatt

SEQ ID NO: 91791 - DNA, 699 bp, Eucalyptus grandis
  Intron number 1 from transcript Egrandis_v1_0.008593m (loc us Egrandis_v1_0.008593m.g) derived from phytozome v7.0 (c hr-ID scaffold_2; pos 47785864 to 47786562 reverse strand)
agcccggcttgggcggcggcgttctgtacttgaaggttcgtctttcgttcctctgttggtcccggtcgtgtgccgtgacggcggtgcgtgtcgtgaattatccgttagtctgtgttgaacttagcacggtcgaggtggtgctctgtaggttttcttagtgcaaatggagggttataggggctggtgagtagagtctgggttgtaggagagggagttaaaattacaattttcatcatcctttgtcggttacgacgatgcatatgaatgggtttaatattcaagtatcttgtggtatcaaatctgacttgttattagtcaaggtagagacgattgtggaaacatgaaaacagtgtcattttctcttctctgcacttatatggagtcggtatttgggttgtataacgctactggcattacacagttgcttaggttttacatacaaagtttgcaaaattagtgcctcacttgtgctggagaaagtttaatttaattgcttgaatggcaggagcttatattccagtctcaaatggtttaaaatggttctagctaaatcgcctaccatgactcttttaagacaataagattattgctcgaattttgagatttcttcacttgctagttgcttccttcactggagaaatgaataattttgttttttcttgctttctccttacagacatctgaaccacatagctggac

SEQ ID NO: 91792 - DNA, 937 bp, Eucalyptus grandis
  Intron number 1 from transcript Egrandis_v1_0.049768m (loc us Egrandis_v1_0.049768m.g) derived from phytozome v7.0 (c hr-ID scaffold_11; pos 32674518 to 32675454)
cccggttggcacccaggtcccattgtgcgggtccatcattttcgtctccgcatccgtcgtcaaattagggatgcgtttggtaacgattatgttcccgggagtagattctgatcataaatcattcttttttattttgtttccgggaactgattctaagcattctaagccatttggtaactgtccacaatttctgattttggaatagaattgcgcttgctaccgtgctcattaattctgtttcagatcaatttattttaatttttaaataaattttttacttttttccttttttttttcctttcctttttctccaattcttcttcttcttcttgcggacggtgattggcagtggcagtggcagtggcagtggcagtggtggcggacggcgggcggtggcgacggcggacggtggcgggcaatggcggacggcggttgagagatggccgaaaggaagaagaagagttgttggttttgattctcaattcaaattctggaacaagaatcaacttttttttttattcttgattccactcccaatttgttctcggaataaaaattttaccaaacgcgattctgagcccaaactaactctaggaacaaaaaatcaaaatttgaccctgtttggatggttaccaaacagggcctaggtagactatggttgcgttagcgatgcagattctgcatctgccgttctcagctgaaacgttgtaatggcccctatacacaaattagcacatgatgttcttgaacggaatatgatgcgtttggcgataattctattccaaagaagaatttctgctcaaaattatgtttttctgacaatgtgctctagacgagtttctgagtactcaactttgttgtcctcagtttgcgtttgccacaatttaaaggcaatgctttagcaaatcacaacaccgaagcccgttcttttcaggac

SEQ ID NO: 91793 - DNA, 782 bp, Eucalyptus grandis
  Intron number 1 from transcript Egrandis_v1_0.009682m (loc us Egrandis_v1_0.009682m.g) derived from phytozome v7.0 (c hr-ID scaffold_2; pos 8943675 to 8944456)
atttcgtgccttttctcaggccacttgatcttcaggtacgtgcagggctattcttgccgttctcttggctccatctttagttcagaaagttcgtcatttcagttattgaagaaggcacagatcgtgcatctccctgtatcatcagaccgttcgattttccatgtcttctcatagtacattcttcaaatacaataatttcacatgcggttcacatatgtatgtgagcgcgtttgatgaacataatcaacaaaagcgaacatcgccatcggaacatggacagttgcagcgtacacagacacacattccaggcgtacatttagagggaaattcaatgcaacaaacttctaatctattagaataattaaatattgaaccatgccttcatctaacaagttaagttttttaaacaaccggcagtggtactacaaaatcctatatgatatcaaagcaagaaatcttgagttcaaatctttccggaccccatttgccttccctaattaatataccatgcttagtactaagcaaaatgatcaaattaagcccgagggaaaaagttgtaataattaaatattaaactacatattcgtctaacagcttgagcttttagaacagtcgacagtgatcatacaaaatcttacatgatcaatgatggaacactcatgctctgctactagtgatccatcgactttctggtctatcttctgtggcaagcttgagcgaggtactaatgaagtttgttgttcttaggggtcgacacggcggttcaaggcagtcagaaggtc

SEQ ID NO: 91794 - DNA, 727 bp, Eucalyptus grandis
  Intron number 1 from transcript Egrandis_v1_0.009720m (loc us Egrandis_v1_0.009720m.g) derived from phytozome v7.0 (c hr-ID scaffold_11; pos 43628044 to 43628770)
tggttggtcaatttagctctcttacacttcgttgtgttcatttccttttggctgttctcaatcttatatctttggatcgagaaatagagttttttcttctttgggattgcttttcgaaattgggtttgcttcagatcgacttgggttgttttaatttttgtgctctgggaagcaaactcaatagcttttttaatgtattcattctaacgtaaaaacattaagtgccaaagaatctgagaaaacttttgaatgtgtaaacagagtttatgcatttccattgatgagagtgggctatgatatatatataaattttccgtagattggtcaaggcagagcaaagaagatttgtgatggttttcctccttttgtaaaacaaagttgtgggaaatttgaaaatgaaaaagatgaaccgtttgaggacatcatatcatcttgaaaatgtaaatttgagttatcttagaaattcagtggggagcccatccttagctcaatcatatcccagatttacctcatcgctgtacttcttcttttcatttgaatcgcaatcggactatttggggtatccaggggagtaaagtaaaaggctagttttgtgcttagtcgcatatggatagttttgcgtggcatagtcaaacatccattttttgtgctcaacagctatgctttgtccttgtttcttctatctatcacttttttcctaactgcaggttcttagtggcgttgcatt

SEQ ID NO: 91795 - DNA, 1028 bp, Eucalyptus grandis
  Intron number 1 from transcript Egrandis_v1_0.006633m (loc us Egrandis_v1_0.006633m.g) derived from phytozome v7.0 (c hr-ID scaffold_7; pos 42876801 to 42877828)
agccgcgcggccgccgctgcgccgaggtgagtcttcccggtttcccttgccctccgttttgtgggtccccgatttggattcgggttagggattgggcttttgctcgaacgtttccgggttcaatttcggtggtgatttcgtcgtctccgaggtcgttccgtcttcccttgtccgtgttcttgcctgattttccgcgccggtgagatgggattgtaccctgtaatcatgggtttttgttttttttgggtactacggcgggacgtggtactggcgtcgatcccgatgaagctttgatatgcgcttcgtggctgaatctcgaacatgcatcgcggcttcttttttgctgatttgtcctgtagtttgatcttctgataggtggaaaataggttcctcttgattactgggagcatttcgtagccctaattatgattgtgcgcctgcgtatgtattggtttcacttttgttgctagcggtggaattgtattggagctgggctctcataagtcataacatcgtaagctccgggaattggattgattgggagatgacgatttgcatagttataatctccattcgtgtgtagctattggatttggtttttgaatgtctagaaggatcagcctaatgaagatttttcggtcagcggtttatcgtattcaagtatagaaggacggacatttatggagatgttcgaacaaagagtcaatttaaatttagtttttaccgcgtgatcagttcgtgctttgataattttgtgtgtgttaataaatgatctgtacttttttacagttatgtcaatggtttgttctctgtcgagtcttcaagtcatctgggaaaactatcgtctatacattttcactttgcatgatttcaacatgaagtgttttcagttactagtagcgacatttcgtttcttttcctagcaaagtttgggacatggaacaaattctgttttctaattttctaaactcatgcttatttttgagtggaaactcatgcatctgtgacatctctctttgcagaaggaa

SEQ ID NO: 91796 - DNA, 1006 bp, Eucalyptus grandis
  Intron number 2 from transcript Egrandis_v1_0.020454m (loc us Egrandis_v1_0.020454m.g) derived from phytozome v7.0 (c hr-ID scaffold_7; pos 10115928 to 10116933)
tcaaggtggtgctgtttctaataatttcatttttgttactataaaggttgctgtgtttggatgtgaagcttcttaggagcaatttgaactggtgaaaatcttagaagggggtaaggtgtattttaattggtgttctatgggtgagcacaaaggtgaaagttctaaccacttgttgctacagtctagggtgaccagagagctttgagagctgctactatgtgtggtgttcaataggtcatcctgtacttggtgaaagaagttttgctaagctggtttctttataagaaaaggaggaataccgacaggatatggaaaacaacacccgtttgcttgttttggtgcgtctggctggagagaaataggagttccataaaaggaaaaagagaataaataaagtggatccaaacttaaatatatgtgtgagcttattctctcttctggtacaagtgcacctcgttctccttgtgagatccgccttgaagacttgggatggatggccttatttatctgcagactttaacttgtttttcttaaatggtcatgcatttgtgtagaagtgatctgtaggttcaaggataactatttcaaacccaagtataggacagtgcgggaaacgtgaactagttactcctggaaatggtccttttgagtagtacttacctgatatcttattacttgtgaaagtgtccaagcaagcagattgtttgccaattttatacttgacagtttcttctatttttctaatagtagttggggtcgaatttgcttaattggtgaatttattgattcgcttataatcactttttcctctgttatagtaacatattgaaacaacatgaatttcagtctcacataagttttgtcttcttgtcttcttttttgccaaaattcatataagtttgttggttaaagggaatatgctctaaatttttgttgctttcttataaagacatttctcatgatttgattatgtttccttttagagattcttgccttcagagtttgg

SEQ ID NO: 91797 - DNA, 920 bp, Eucalyptus grandis
  Intron number 2 from transcript Egrandis_v1_0.034661m (loc us Egrandis_v1_0.034661m.g) derived from phytozome v7.0 (c hr-ID scaffold_7; pos 51344683 to 51345602 reverse strand)
gatcgtgtaagtattcctcgctcacaccagagcttaaatttgtgaaagtcaatggaatctgcgggcttggttaggtcgatttgttagcttcaatctcgattcgtccatatgtcctgtggttttccgatcagtgtttgggaagtaaagttgcttgctttgggcgaatttgatcgtgaagcgatgattgatgattactttctctgttcttccctcatagtcattatatattgtagagttggcaatctcattcgaaaggttttgattcaacgcaattagatgttctgggcagagcggtctgttacaatggattgattagagtggttgagagaatttggtttcatgttgaaaaaaccgacgctcttggctctttcttttgcaagagtgagtttgttgtccaaactccactcatgttacttgattttctaaacagagttcgtagcatttgttctattctacaaattcagtctgccaagagcttattggtctgccacctctcttttggaaccagcagaggattgtagtgtgtcctttgtgatttctgtagacattcaaggaaattgagtggttttaattttgatacacatggttgacgatctcttatggttcgatgtttggcctctcttcttgcctccagaaaaatgcactttccaccactttgatagttgcttggcttgcacctgcgttcggttttgttatgagtttactgtctcaactagtgcactctgaggaacaatggttttctttctgtcatttgatttctgatcatgcttattctattctaattgattatgatcgtattctcgtcgagtctaattcttggtaaaaggaagaaaatcaatccattaacctgagcattcctattttccctctaattgaatgatgcaggagttaagcaagttcataaatcactgcaacgaaat

SEQ ID NO: 91798 - DNA, 1037 bp, Eucalyptus grandis
  Intron number 1 from transcript Egrandis_v1_0.032641m (loc us Egrandis_v1_0.029695m.g) derived from phytozome v7.0 (c hr-ID scaffold_2; pos 7153713 to 7154749 reverse strand)
acggctacatcgtcatcaagaaccgcccctgcaaggtgcgccctctccccccccggccaccagatccgctcccctctccttcgccaccgcccgtcgttcgatgagatttcgcgcgttgtctgattttaccgtttcgattgcgccggagctgtttgatggattgggattcgggttcggattcccccgtgtggatttccggttctgatcgattggcgatgattgccgcggctttgtgcgggtttgattgtgttctgattccgagagctggttgttaatcagttccgctaatttgttctctctgactttggttttcgtcgttcgccgcgaaatcttgtcctgaaatcgggccgcctggtgctcgtgtgtccctatttgttcctgagggaatagcaattttgggtgttaaatagaaatctaatgtgatgtgttccggtttaaggttgaccttgtggtccttgcccgggtatgttgaccgaccgatctcaaaggttatgcctttgagtacgtggtgggaagttataactggtaattcatacattaagttatgtacgtgtgcgcgttgacactggaagacggccatctgtcaaagtaggtgtccgcgaccagaccaaattccaaagtgcacggttcattgtttggttgacctttttctgtgtgtctgaaatacccatatttgatccgagtcatttttagtgagtcttagtttgtaagactgaaagagatgcttttcttgttaccagaccatattccaaagtacacagttcattgtttggttgacctttttctgtgtgtccgaaatacccatatttgatccgagtcatttttagtgagtcttagtttgtaagactggaagagatgcttttcttgttcagtatcatttgtgatggaccatttttccatttcagtgtggtttttttttttttttcatttgggatgttcacttttgttatacatttatgctggcccatagtgcagactaaaattttaacttgcttttgacaggttgttgaagtttccacttccaagaccggaaagca

SEQ ID NO: 91799 - DNA, 620 bp, Eucalyptus grandis
  Intron number 4 from transcript Egrandis_v1_0.019422m (loc us Egrandis_v1_0.019422m.g) derived from phytozome v7.0 (c hr-ID scaffold_2; pos 31610259 to 31610878)
ctccagcgtcaaagacaggtacaggaagatttcattttgacaaaaaaaaaaaaagattcttctccatgctgaactgctaatggctgtgcctttatatcttatccataccttgattcactgtgccaacctggatgttcttttcttagacaacaagatcagttggtcttgttggagttccatagtttggttggctcaactccttgccaaaatctactgtcaagtatagctatctactacagttatcatgtgtgaaaatggtccacaaaattccaagtcctttaaaaaaacatttattttgcttgggcaaagccttataggcttatagttgaaggccgctagaataaaagagtaagaaatggttatttccttccctcccattttctttgccatccacaatcctctctttatttgctcacaagtccacatcccctttctctcttgcatacatgtacttgcaccagttctagcgaacaacaacagataagttagaaacttgaaatatatttttttgacttgaaatttatttcttatctcatcattatctacaacctctagatatgtggattacttcatattctgagtctaataaggacttgtttgcctgcaggattgggtacagt

SEQ ID NO: 91800 - DNA, 586 bp, Eucalyptus grandis
  Intron number 1 from transcript Egrandis_v1_0.046992m (loc us Egrandis_v1_0.046992m.g) derived from phytozome v7.0 (c hr-ID scaffold_7; pos 16361831 to 16362416 reverse strand)
cttgccaaggcttgtgaagactgggcatcttcgtacgcatgttcctagcttgttcattatctgcttcatagtaattttctttatttagattttgtggcgagcatccgaagcaaacagttggtatcttcgctggtcaaacttgtttataatactcaaaaaaaggctaggaaaaatataaagtctgggacacttgggccgcgtttggcaactggccaaataatgaaaatttctattattttgtttccgtaagtagatttggaatagaaatctgtttggtaaaatttttgtttccgaaaacaaatttctatttttttgttctcggaagtagatttggaacataattgagaagtagaaaaaagtaaattctttgtttccgggaacaattcctttttttaaaaaaaggaggaagaaggtagccagtggctgagctccttttttttcttaaaaaaattgattttaaatttagtttaattattttttatattaaaatttgaattgtgctaaaacgacgtcgcttttgtgtttctttgctgagtcagtcttctggcaagccacgtaagcgagcaaaattaataaaaaatcgtca

SEQ ID NO: 91801 - DNA, 466 bp, Eucalyptus grandis
  Intron number 1 from transcript Egrandis_v1_0.045078m (loc us Egrandis_v1_0.045078m.g) derived from phytozome v7.0 (c hr-ID scaffold_2; pos 59278925 to 59279390)
ctgtccatccccatctccagaaaagaataagaaaggtaaggaaaaaggatactgatcactttgtgtttttcagcaatcgagtgctaattttgtatgaggtgggtggtacatataatatctcaatctgtattctatcttcttcaattgttactgctttcgatgcattgttgaccatttgtatttgatttccaaagggagcctttgacttgaagctggctcaagtccttttctaatttatttggcagcaatttttagaccatctactgtgcctctgaaattctaatattttgagtacatgtgtagcagttatcctggaccttgaggacccgtcatgttcatgaatatataggaacacagtgttaattgcagtcatgtgaaatttggctttcgcatgtgctttggagatgattaatactgttgatattcctcatggtggctaactgtggcatattttctacttcagtcg

SEQ ID NO: 91802 - DNA, 853 bp, Eucalyptus grandis
  Intron number 1 from transcript Egrandis_v1_0.040608m (loc us Egrandis_v1_0.040608m.g) derived from phytozome v7.0 (c hr-ID scaffold_2; pos 23023418 to 23024270)
tgctggtttgccgatcggtgcgtgttgcgcatgcactagcgttcttagcccttcaagcgcatgacacccacgcgcaacgccttctgatcgcgcgtgtaggcgtgttcggcgtcctccgacggcgctcgaccgatcactggactcatctcgacaagtacttttaccctgtatatttgaaaattgatttggccaaaaaaatatttcgaaaattggccaaaactgcatggatgcacgcgaccccgaacacgttcttcgcttcggtttgattttgagttttcagatggcaattccgaccattagacatctaaacaatgtggatttcatactctcgatcttgatatcaaatggtaaacaagaaaattcaataaaaaaaaaggcagaaatcacgaccatgctctaataccaatgatggaattcaagttggcggaagacgacttacctgattctaatgcacagacaataattaaccccggaacgatcgttgaattgcggatgaatcacgaacaacaatacctcacgttggtctggatgcaatcacaaggaaagcacccgatttccacggcgtaaatgcaaactgttcttgcaaaattgaaatggaatgcctactccctttgatggaaatggaacaaacaaatgagaggattttttgatcgtatgctctgccaaccgttccaacggttgtcttcaggaggcttttatacatctcccttcgtaccctttcaatagtgtctttccatcgtaacgtatcaagacgatatggtgcgatccaatcacaccccatcatggatgtaccagctaaagtacgacacgccccctgctcaacgcagttgacaagctccaaaacatcaaggtt

SEQ ID NO: 91803 - DNA, 976 bp, Eucalyptus grandis
  Intron number 1 from transcript Egrandis_v1_0.010615m (loc us Egrandis_v1_0.007787m.g) derived from phytozome v7.0 (c hr-ID scaffold_7; pos 15439833 to 15440808)
gttgtctccctccccacggcgctcgctcggtcgcagtacgttcttgtccctcctgggttcctgggcatcgtgatcttgttgataatgggcggctctgtttggtccaatgcttctctgtcgttgcctgtagttctgtgatctttgtgttccgtcggttcttgtagctttcgtggctgatggtggctcgagtgtctcctgtgcttttggtgtttgctttgcttcgaacctgtgtcggtgcgttgctttgaaggtttttgggtaatgggttggtgatgttctcgcttaattgggcacatcgaatgttttttaccttatcaattcctcaatcatttagaattaggagtcagctcgggaaatggtggacgtggttttctgttttgtcactagctttgtagttggtccatccttgggagtttggaaagtaaatacacaatcgaacccatttagcttgacttaattttgtcatcttggtctgcttgacttgataaaaaggccccgttttttttaacaagggatgagttggtttttgtctgaaaagaacgttattggagatgttggctcttgtccataaggtaacaaatcatgatgtgctttttgaagtgaccggtgatgttgatggcatgtgttcactctgcacagtcaacctgccttttttcttgttaattcccacgattgattgatacatcagcagtcatataggaagttgggaagagaacaagaagatctctggtaggcatctatatcgggtgcttctcctggtatggaatgctccaaactagttgtttgaaatgattgatctttggttcctaaattgttagttttgacttctagagagtggatgctgcgctgagtttaactagcttttgcgaatgtaccaagattgatgcttttgtccaagctaatcctcatggttaaaatctaactggccttttttcatgcagagtttccagaaactcaaaatcatccaacttgctgc

SEQ ID NO: 91804 - DNA, 559 bp, Eucalyptus grandis
  Intron number 1 from transcript Egrandis_v1_0.003403m (loc us Egrandis_v1_0.001935m.g) derived from phytozome v7.0 (c hr-ID scaffold_2; pos 58370602 to 58371160)
cccggcgttcctcagcctccacctggtgggtctatcgcccctctccctctccctctctctctccctttctctttctgtctgcgtgtttgtttagagctataaatgaggccgggcggttgctcagtgcaggtttgctattttacgctgcatcttttgtgtttttgtctttttccttgttagttgccgggagatgatcgagttatggatgtgtgatgagatttgagatagctataggcgtttcctgaatgtattggcgggtggagccagtgagcttattcttacagatagtatggtccatgaagattgtagaaacatgtaaaaagagagggttgttttgatatttggctacattggattcattccataaatctgcagaagtggaaagaaacctattgactcgcgaatagtttagaacgtgctcttaaatttgctgaatgaattgggtccgttagagaactctagggacggctgggagagattttagaccattcggtgttgttgtcagacaaggggtaccgatgacgggtttttttcctacagtgtcctctcgattgattac

SEQ ID NO: 91805 - DNA, 1012 bp, Eucalyptus grandis
  Intron number 3 from transcript Egrandis_v1_0.003403m (loc us Egrandis_v1_0.001935m.g) derived from phytozome v7.0 (c hr-ID scaffold_2; pos 58372568 to 58373579)
ggcaggagctggtggtatgtattgagcccttgttgatactgtactgcttttggccatcattgccgtgtctctgtttctagcgattgtaatgttggtgacctgaagatcagaggtgctttgccatcctctagtcgcttgacaatgcaatttagagcatctgttgtggtttattaagttgactgatgtttttgctagtaggaatggagaaggtaacttgtggtcacatgcaacaaccaattactcggtgactgtaggacattatattgttgattaactttttctacttcagcatgagactaaaattgttgtagtaggctgctggaggagagatttttttttttgttagtttttgccccttgtgtttgaggtgaacttttgtttgtttataggcgtgtttgcccaatcaaaaagccctttttcatttcttaccaaaattaaaaattgtttccaccttcaaaaaattatgtaaaaagttatggtgattttaaattacgttgtttaactgcttttgaggattaaaggtgctcaatattcaatagaagtctaatttccaaccctaaaagataaagaaaagggtaaaatatatgaatgttgatggttagactcatcttgaatttttcttagatattcagaatttacaattgtttttcccttggggtggcaaagtaaaatttcaggtggaactaggtaaatgatcttgtaagtttgcttttcatgacgtccttgattttggggaaattttgtttggaagttccctgcacaggtttgttttcttttaaatgatgtctaaccttggttaatagtcaatggtgtgcttgttggttttttgtattaagatgttgaagcatgaatgctagcaatgctttgtttgttttaggaacttcagagtgaatgcattctgccacctacttgtgcgataattttaccagcctttggcagaagtaaaattttaaaccatttaactgcagtttcttatggtttctgcattttttgtcaaatgattggcagttaa

SEQ ID NO: 91806 - DNA, 913 bp, Eucalyptus grandis
  Intron number 1 from transcript Egrandis_v1_0.010910m (loc us Egrandis_v1_0.010910m.g) derived from phytozome v7.0 (c hr-ID scaffold_2; pos 37913995 to 37914907 reverse strand)
accgggtgtgctgtgagtattgtatcaagttttaagattcaccatcaagaagccggctctgttttcttttgaaggttatttattttcacgtccccttgcccgcatctctattgaatcagaggtgaattttgcagtcctggtgccttctgtgacgattctgatgattgccaagtagacagtgtgacaatttcttacggaggtctactgaaaattttctgttaggaatagataagaggaaagaagcagattacttggtcaaagtttcctctgttttcttgtatgattggtcaacattttgtttttagaagaaaagtctgggtcttcagtttggcctttggtgtatggataaggcatccaagatctgtccctacaactcaggctaaatgcgtgtctacttcttcttttggcgcctgaaagcataagtaaattcttttctagaggcatctgtatactatgttcttgatcactaggctgataccacattaggttgacctggattattaaagaatgtgacaatttgttccggcaactcctttgtaacattttcccactcactacccgggagtctgatgcttgtttccatgttttcatgtaagaatttcaactcgaaccacgataaagcatgtagctgattaggatcactcgagtgcacggcatgaaactcatatatgcaaaaaagaagtcaaatgatcttcattaattacttcaatcacaattttgagaaaaataccattaaaaaactaacttttagcctgcatctttagtttgcatcctttgcagaatttgcttggcaaatgtgttgctcgctgcatttcacgacaagtttggtattatcaagtagaaggcaccattaactggcggcattttttacaatgcagactggttattcttcaccagccgagtctggcataat

SEQ ID NO: 91807 - DNA, 799 bp, Eucalyptus grandis
  Intron number 1 from transcript Egrandis_v1_0.038496m (loc us Egrandis_v1_0.038496m.g) derived from phytozome v7.0 (c hr-ID scaffold_11; pos 20966117 to 20966915 reverse strand )
ctaccaacgccgtcacctgcaacaatattactgatgtccacaacaatactactattcacgtcatcagcatgtctctttctccctcaatttcatgaattataccatcgtagattcctcgctagactttaatattaatcacgcaattgcacaccaatcttttctctttatagagtcgactctttgcaccatattagtatttcataaccaaaaaaaaaaaaaaaacattagccgtttttttggtggaaatgtagcaacgatatgtaatctcttatcatattaaaattactcatgaagtaattatgagcataatattaattgttcacggtatgattatacaaatttttataagtttaatcaatacaatcacatattatatgcttagcatttaattatataaatcatatttttagtatttaatgggaatgtcaaactcaaagatcatggttaaatatcaaagtgatgagagttatattccctctaactttaatcgtaagggtagtgtcagaattttaatgctattctctccttattacatatgttattcttactaatgcatggtagggttgtattttgagtgatgcgtgcttttcacattagctatatattcatttgctttaaacaaaaccttctttttcttaggcaatttttgaagaattttttcatttagaatcaattgagatttatgtatacatatcaattgatgtaataaagccattttgtaacatcattttgatgcctagttttcaagtaaagctagaataaagccttcgtgtcgttgcgaaaacagaattcttcagaa

SEQ ID NO: 91808 - DNA, 701 bp, Eucalyptus grandis
  Intron number 3 from transcript Egrandis_v1_0.016405m (loc us Egrandis_v1_0.016405m.g) derived from phytozome v7.0 (c hr-ID scaffold_11; pos 14089466 to 14090166 reverse strand )
ttgccaacaaggtctgtattttgatagcatatagttctctcatctttaaatttcagctgtaatagtgcatatctgagtcctgagtgtccaatcacgaaaagctgtgctgagtttggttgttttgcgaatttaggacatcttcttgaaaaaaaaaacagggcaataaccaggggtcgtatgtggaatattgacggacttgactgactctattgccaatgtaaatagattttagttggggtttttctttaattcagaatcaacgtggactatcggtgatgttgttggttctgacagtgttagctgaaagaaggacgcgacttatactggaatgccagagggcatggcatttgagttggaatgaggcactgccattacagtggacataatggttttgtgagtcaaacatgggtggttgcttgaagcattcatgaatggtatagtggaaacatgagagttagcaggtggctcataagtctcttatgtatggaaagttctgtgcaaatgctatgttaatggacagtgaatgtcaatcttatcataaatcaggttttcccattgggtttcctgtcttttgtcagtcttgttgccttagataaaatccatgttgaccccactggtccatttcatctttctacctaagccatatatttatctttgactttataggttggaaagagtgcttctccgttattgttgggagt

SEQ ID NO: 91809 - DNA, 847 bp, Eucalyptus grandis
  Intron number 4 from transcript Egrandis_v1_0.005581m (loc us Egrandis_v1_0.005581m.g) derived from phytozome v7.0 (c hr-ID scaffold_7; pos 38453683 to 38454529)
aagaaaggtacttgcttcttgtgttgtccattttgtttgctttgtgagccctgcttactctactggcctctctgtaacatcaagacaacatgccgtgattgtgggatgatcgtcatcaattgtcatgaagttgactgagcatatcctcctgccacgtttgtgtgcggcatgtctgataattggccacagtctggttgattaacatcatgatgtactacatttgtatggttgaattagatagaaatatttcatttcaacacattccttggcagcaggagttaaataactgaaataataagtttactgggatttctagtggtttatttatttcttacatcatctgatgtggttaggaacataactgatgagaaggaagaagtacagtaggtcatatgaggattgcatcatctaaatggtatgccatgaattcatctcattcattcaataaatggtgcttcttcatacttggaaatagaagcttaagtaatctactgcaaaaagtcatctgctctttgtgcaaaagttttgcttgagtatggaatttgagggcttaagcatggtatcatgtcttccatatgatgttagctggaagctgaggtacctttccaaaggaattcaagattgattcaaaaatgggctcattttcagtatagcattgatatggagaacaatcttgcggttatgcatagtgtttgttgtttggataaaacaggtcatacacattgatgcttgaaactatgtttttcttttttattttcatgagcacatatagtcaattattaaataattttgttaaatctttgttcctgtagtgatagctgtggacctcaagcaaactgtgcaggtt

SEQ ID NO: 91810 - DNA, 638 bp, Eucalyptus grandis
  Intron number 1 from transcript Egrandis_v1_0.019781m (loc us Egrandis_v1_0.019781m.g) derived from phytozome v7.0 (c hr-ID scaffold_11; pos 28382352 to 28382989)
accatttcttccgcgcaagttccctcagatacctggtattgtgctgaaactggaaatcgctatatttcccaccttgctgagaagaagagtgatggttttgtttttgattttttcgatctttggctgaagagttatttcttaaaaattgttcatgtttgcctgggtaggcatagttgcattatgtcctcattttcatcttcttcttttttccttttgcttttgtcttcttcaccactcatcttgtgccctacagaatgttaacaagaaccaattcatgcagactattttgctacctgaagtattcgtgtctgtcattatcttttcctatctaacctgtgggtatgagccatttcaaatcatgtgcaattgccatactgtttggttgcttcccaaatgtgcatgcacatgggaatgcttgtgtgagcgtttactagatcatcggttttgctcttgaggataggacatcatttttcctggtgttgctgtgaattatttggagataggcatgtttgttttgccaagtagcgtgctcactctcggagcttcataagtgggccagttatattattaagcgtatgtgctgaatataagtgtaacttcatatcttttgtctctttgccttcattttacagcctcgg

SEQ ID NO: 91811 - DNA, 1059 bp, Eucalyptus grandis
  Intron number 2 from transcript Egrandis_v1_0.014109m (loc us Egrandis_v1_0.014109m.g) derived from phytozome v7.0 (c hr-ID scaffold_2; pos 45055965 to 45057023)
cattgcatatagcaagcaggaagggcagagatcaggtaaattttactgcttctactacgttttgctgatccaaacataacaactggtcgtgacaaagtatgtttctgctttaaagtaagaaggcatggtgagctaaagcaggatgaattgtctaagctctaacagcacaacttcaaattttttgagctgctgcatttataatccagtttgctctcgaagtcttgatacagaaaaagaatgtaacttacaaattgcaagtaaatacatggattttggaagatgtcatccagtcgtttcagatatacatgttaggcaagactagattaggcggttcatctattattaggattgacttgagattataccgtaaagcctttccttgatccaaagagccaactttgacgctccctctattaatgacaatggaaatgctagctataaacacttgttactagtcagctagtttcttctccttcttcttcttcttcttcttcttcttcttcttccaattaagggactaaagccccccaattgcaatggtttgctaaaagcactttaatttcattgattgatgatacttatgtgggttggttcagggtttaactgctcattacttctgccaaaaacatttggttaaatcctctaaattaccaactcatctaataagtggacaggtcgattgtcttggtggcaaatcaaagctagataatggaaatgaacccatttttttatcttgattcggtagatgttttattttttcatgctgcattgcttttggacaagtatctgcaatattgtcagatgaaggaaaaaccaagcctgcctttcaaggtgacagaaaattagaaaatatgaccatcctacctgtggaattaagtcgttgggctagcattttgacaaatctttctatccttaaactatcgcttccacatctccatctttaactgccagatggtaccctttccatgtctaagcatatagaaagacaagcatcctaacaccttttatcttacaatacctgcagattgttcggttgctgctcagttgcagtgaaactaa

SEQ ID NO: 91812 - DNA, 640 bp, Eucalyptus grandis
  Intron number 4 from transcript Egrandis_v1_0.024357m (loc us Egrandis_v1_0.024357m.g) derived from phytozome v7.0 (c hr-ID scaffold_7; pos 24500060 to 24500699 reverse strand)
ctgccctgccgctccttgatcagctcgtgcaagatgtaagtaccgaaaagggctcgacaaatcgcatttggttttgttctgttaaattctatgctgcagaagtagcaaaattcatgcattcttaatcctaaaaacatgtctgcatgtctagtcctttccctagaaatggcccaaatttagcaatatttccaaaaatgctccaggcaaaatggaatgaccgtgggtcattgaagacagcgttgtcaaatacggaccaccaagcacgttttatctggcaagcttagaatctacataaagcaaaccaatttaatgtagcaaatgtagagtctaagcttgccagatagttgaatttaagttgactctccgaccaatttaattgtgtacgtctcttacaatgattaagcccgtttcttgtgagtcggaacgattttgcgggtcaattgcgtcgacgagaggagaaaaatataggttggcacaatgtctatctaactgagtgctcagtggccccactgcacattaacccaacgcatcgcagcctttgattcaagcagaatcgatgttgggtccacattacctgacggctaagagcaagcaccgaatattaaatatctctcttaatgtgaaacgcaggagaagaacc

SEQ ID NO: 91813 - DNA, 654 bp, Eucalyptus grandis
  Intron number 1 from transcript Egrandis_v1_0.011417m (loc us Egrandis_v1_0.011417m.g) derived from phytozome v7.0 (c hr-ID scaffold_11; pos 28473164 to 28473817)
tcgcgctcggcagatccccttcgcagagcttccaggtaaacttcgctttcctttcccgaatcggcattgcggttcgccgcccggcgttcgttctcggcgcgagcatcgttccgcgaatcgtttcgcggttctgactctagcagttcggtcggatcggtgcttcttttcttaggtcattttccgtgtggatgatgatgttgttccggagaaactggaagtttcttccttttttctttttctttttccttgtattatagctttaatggggaagacgaccgcgtgagaaaatggcgtttgtggttaaatccgatttgatcctggccatggcttcgtgggttcatggtgactggtcgctctgttagtcgtttactagcatacgtagctccgcagacgttttcttggaacggtgggtttgttgattttctctgtatttaactgtaagacttgtcggtcgcgttatgccgaggtcgggttgcgggaagtggaaggaatagaagggaaatgaaagatggggggtacttctaggatttgtaaagtggtatcagatagttgcgtggcgttaagatatctcttaaatcttttttttttatttttttatgtaacgtttggttttgtgttttagggttgtgattgattcctggtgaccaagtggta

SEQ ID NO: 91814 - DNA, 991 bp, Eucalyptus grandis
  Intron number 1 from transcript Egrandis_v1_0.024805m (loc us Egrandis_v1_0.024805m.g) derived from phytozome v7.0 (c hr-ID scaffold_2; pos 6712308 to 6713298)
tcaataaggtacggcgaggatgcgaatgcttagcttcggcttgcaatttctttcctggatttcgtgcatttctgttgagcaattggaggtagagtgtaagttcaattcaagcgtttgattgttcgggagtgtattcgtttgaatgctgcaatttgtttgtgatgtgtcgacgacggttcgatctgttggacttgaattggtcgaattcggaagctcttagtttctgaggttgaatggctatgaaatgatcgaacaaatttctcgcctttcgacgatttttgatgtcgggttgtcaatgagaagagaaggaactgggttttcttgtgaattgcatgacctcgctactgcttgaggcaagatcaatttgaccatccactgttctttctgagaaaaaagaagaagaaatctgggatttttgctgagggaagataagttgttccttgtacattggtcagctgaaagtaggcagtgttctccacttagatggagatctcactcgagctatgtggaatggaatttatttgagggtgacacgcaatagctgagcacattgttttcatgagtgctattataagtttggtttgcagggaagatttgtctggtaagcattaggaagtcctgggcaggttgttgtgctggtaatgtgcccaatagaagcagtatcttgatcatgcgaagggtaatgtacagatagaatctcttacctgcttgttaggtgtgtgatgcacatttttatcatgctagttacaagtgatcaccgcatcgactgactagcttgatttttgtgtccaagagaaagaatttaatcacatactgaatgattgagtcatacttgaatcatgtagtggattcagtcaaaccaattgcatgttacatctcaattttttggagcttttggctttataattgtattgatagcccatgctttatgctaattttttcctcccacaatgcagtacgagtacttgacgttgctggagttgattaagaa

SEQ ID NO: 91815 - DNA, 866 bp, Eucalyptus grandis
  Intron number 3 from transcript Egrandis_v1_0.043920m (loc us Egrandis_v1_0.043920m.g) derived from phytozome v7.0 (c hr-ID scaffold_2; pos 37292113 to 37292978)
tattggagctggaccattttgcagtggtcaggtcagtcctttatttcattattttgattggggttttaagcacgcatgaggtgaaatatctatcttttttttttgtgaaaagagattgcaaaatctattctaatgaacatttcaattggcttgtcgaaaattcatattaccagctgtaagataaaggtaaaggttttgaaagtaactacacgaatgtggcaggggattctagttaaatttcattggattgtggatttcatttatatttcaatctccatctatgttgattgtcctagtcaattttctcaggtaagaaggatcttctagtttgtttattgtagcacacacttctccaagtacaaggcgtcgacttaatttgaagcctggattttttggctctaggaaaactcttctaataggaccacattactttacttggagacatctgagcaaatcagcattgtatcataggaagacatctgagcttatcatctattgagttaagtttatttgtgaggttttaagggacaaatttttctcactcttatcgatcctgctccgcactaggaagaaataaagttgaaaacctaagggaaattgattgggggaagagttgctgtaacgtttagcaacattgggtgcagtctttctttctctaactgcaatgaatgatcaaatctgtttaggccaaattatatattgtattgcctatttccatcaccaacgtacctgacagctatgattatcttcaactgctttgatattctgactggctgtgtagcagcttcattcacaatggtactagactccaaagaaggggcatttaggctaattttctgtctctgatgcaggttctagtttatacc

SEQ ID NO: 91816 - DNA, 932 bp, Eucalyptus grandis
  Intron number 2 from transcript Egrandis_v1_0.040981m (loc us Egrandis_v1_0.040981m.g) derived from phytozome v7.0 (c hr-ID scaffold_7; pos 25581289 to 25582220 reverse strand)
ttattgctgccattacaatagtcgggaatataaaggtggtgctgtttcgaatgattttgtcctcgtaatcactgttcgtttagcatttgatgatacaggttgtgttaatttaattatttccttctggcataagtgcaacaccttctccttgtgagcttcgctttgatgaaatgggatgcattggctcatttatctgtagacttcacatcttttttcatcttaaacggtcatgactttgtgtagaagtccctgtgtgtttgggtttcctctaggtcagcaaagaaaaaaacgtaagaagttttgatcactcaatacggactatggacgtgtatcccagcgctttgatcatgaattcgcggggaacatgaactagtttaaccttgaaatggtccttttcaggagtattgttgttgcataaatgttaccccacgccacttactggtatagtacttagtagtaactgttgttgctgcgggtggttgacagccaacaatgaatgaaactcagcatgctcccaaaaggcgatggactttcctctgatatcttagcactcgtgaaagtgtccatccaagcaagcagcatgtttgcatattttctgcttgatagagttatctggctgccacctaacatttaaatcttcactttctatttcttccatttttctaatagcacttgggctagaatttacttaattgctcaatcttttattttacttatgatcattttttactctgttatagtaacatattgacaaaaaataaaataaagttcggtcttgtataagtttgttttgttttattttgccagaactcatataatgttgtcggataagggcaatgtgctctaaattttcatttctttccaatagaaatgtttcttctgatttggttatttttctttctagagattcttgccttcagtgtttggaaatc

SEQ ID NO: 91817 - DNA, 579 bp, Eucalyptus grandis
  Intron number 1 from transcript Egrandis_v1_0.040981m (loc us Egrandis_v1_0.040981m.g) derived from phytozome v7.0 (c hr-ID scaffold_7; pos 25582287 to 25582865 reverse strand)
tagttctggtgtgaagctattcccgcgcgatcgcctttgtttccgacatctggttctgcttcgaggaaccgaagcgtcacctgccgttaaatctcgttcgccgtcctgagatacgtcttcaacggtagaaccggagttgattttcgtctccttcgctcgctcgatcgagttgattggagtcatgttgtgatttggtgttgctctttgtcatttttcacactgcctgacaaatcatctcagcttcgcgtgttgattcgaacgagtgcattttcagacaaatctcacagaaacttccttatgttttagccgtttatgagacagctatagctaacgtagctgcactgacctgttcgtcagatgtcatggacgagaattctgtggatagtagcttgtttttttttatttggcatagtattttttttcttgtctgataaaggtcttgaagtctgaatctctccttttcttagtcttcctgccaaaacaggatttgttgatgattgctgatttcatcgatagtttattcatgctcttggtcatttgattatcagggagacataaacgatccaggtactctgttga

SEQ ID NO: 91818 - DNA, 608 bp, Eucalyptus grandis
  Intron number 2 from transcript Egrandis_v1_0.033255m (loc us Egrandis_v1_0.033264m.g) derived from phytozome v7.0 (c hr-ID scaffold_11; pos 32311333 to 32311940 reverse strand )
tttcgggtatttatttctgcagccgacaaatccatgcaagatgatatttgtccaaatctttaggtttctacatggttttgggaaagatggactttgcaactcaaacatgagtgctgaaagtatcaagattcttctttagtaaattatctactaggaattctatatagttttgtctttctattctgagtagggtattatatttcattttttagtggtttcacttttattttgcttgttgtttagaggtttcctacttcacctaggagtagagctttagagcgtccgcaaatatcgttataattctttcttttcaatggagttgatcattatttgaattttgcaaatatatgcttttgcattgtgtgatgcaattcttctgttacgcgcgatgcatgagaaactctaagtgtgatgcttagggagctttcagtgtgaagcctaaagatttattgttattgtgggactcagttgtcctgtcacttattaataggggaaatagtaccttaggtttttctgttcatttgcattttgctcaataaatgtatgtgtcaaattacttaattctttttccctttatttgttgtgtttttgcagtacaagcttagctc

SEQ ID NO: 91819 - DNA, 432 bp, Eucalyptus grandis
  Intron number 2 from transcript Egrandis_v1_0.021056m (loc us Egrandis_v1_0.021056m.g) derived from phytozome v7.0 (c hr-ID scaffold_7; pos 29876507 to 29876938 reverse strand)
gtgccgccgcctcaggttggcttaggttcaccgtttgttttttatcaattgcaggctgtcgagttttgttcgctttcgcacttattggacttctgtgtattgtgattgttcgtcgcctcgacttaatttggctatcctgtttttcactcggtgttttttgtgggtgtatggatgttcggcacgaatattatctaaatctccgcaccgatgccttgtgctcaatgtgctagttcatgatagatgcatgcggtggatgaattcagatttgttctgtgctaagtttagggctgcttccattgctgttttgttattttgagtggttattgtattccgggtgaggaagaacgtgctattctttgtttcaggttatgtgctgaccttaatgaatgatgctactgaatgtgcttgttccaggattgtccagtagaagtt

SEQ ID NO: 91820 - DNA, 807 bp, Eucalyptus grandis
  Intron number 2 from transcript Egrandis_v1_0.009446m (loc us Egrandis_v1_0.009446m.g) derived from phytozome v7.0 (c hr-ID scaffold_11; pos 26866467 to 26867273)
cattgctcggcattggagtcggcttcgccattcaggtaaaactccttaatttctgtgctatttttgtaccaagttctcgttattcatcgcatcagaggtcatatatatatatatatatatatacatgcgtatgtttttggcccttaaacgcttcattgttttcgctgacctaaattcgtcgttacttgaattatataaattttgattgtgaaaagacgactaattacttgactccctaattgacctctcaaaagaacatcccaaagtcctgtctatgatatattgagttcatctagcattcctatattttcctaatttgcttaaatcatcgttgtgcctgccgagtcaagaggtttagtttaaccatgtttcccatcagataaacaaaacaagctcaatagattaagatttgagccaaatttcttgaaatctcggtgcaaagatttgatgataatacctatagacttttagttgcatttttacaggacttaaattaaaccgtgactgcataattgaaattatgagttatgtgtgattctctcgttctatagctaattttttttcagtacatgctaaaaaatgtctgtacatatagctttggattacacgcaactatgctcttcaacttttcttgcatcataagcaactcaaatacttgacgacccaaaaagtagaattcagttaccgatttctatcattctatatctctaatttgttgaggaagtccttgagactgcaatgaaatcgacctaactcaatatggtgcttgtactcgaaattcagtccgtgccactctacgtgtcggag

SEQ ID NO: 91821 - DNA, 889 bp, Eucalyptus grandis
  Intron number 1 from transcript Egrandis_v1_0.010322m (loc us Egrandis_v1_0.010251m.g) derived from phytozome v7.0 (c hr-ID scaffold_11; pos 10681177 to 10682065)
gcgtcggcctgacgcgcgaacccgggtttcatcaggtacgtctcgtggctcagtcagattcgatagagtgaatccatcatgtcgttccgaaaacgagatatctcggtctgatttcgagatgataatgttgatccgatgaaccaatacgaagttaaaatatctattcaaaaagataaacgtgatctgattacctaatctaataatctagttccaactaactatcaatttcaaactcggtttttctctcaattaaatttggtgactaaattttaccgatcgtccgtgtcgagaacgacactcgagctcgatcacttactttgcaaggtctcaccgtcacgactaggctttttccataattttttttttttaacttcaatttttcaagtgttctgcattttggcagtatgtaatacgtgcatcggtggtaatactaatgtatatcgatgtcaaagaaatatagttatgtccgcatgacaaaacacacagaaaacaagattattatgaagaatttcatagactcgctgctcacgtgattgattcatggagttgataagatatttcgtcgattcagaatttattcgtcaaaataagattttttattatttaaaatatactagattagttactatatcaaggcaagaatctgacgcatcactctagttgttaatttaatgtgtcgcttttaacaattatagcattatttcccgttagaaagttagatgttatagttgattattttgatatttatatggacaagtttctttttccgtctaaaacggtcgcttgagccacagcattattcgttcgttgtcttgctctgttttcctgacgctgatcactctcgccggaaacagttcgacgtccggggcgacacgttcggcatcctcgc

SEQ ID NO: 91822 - DNA, 508 bp, Eucalyptus grandis
  Intron number 2 from transcript Egrandis_v1_0.021973m (loc us Egrandis_v1_0.019405m.g) derived from phytozome v7.0 (c hr-ID scaffold_11; pos 4529179 to 4529686)
atttccgaggattgggtttggttcggaggttggtgaatttgatgtacgtggtgtgcggttgaagattcgcgatgagctcgtcttaatgtctgtatgcgtgggattttgcttcttcttttttcaattcgatttcattgctttatagtttaattgatattttggtttcgggtagttctgctcctgtggaactgtggctagtatcaactgccctatcttaattttctattatttttacctgcaccaagcttattcaacggttgattaggaatagattcttcttttatcgacgcattgtctcttcctctttctttttcaactgtgcattcaaaggtctcctggttcttaatgatggtggaattacgatgtcatccgctcgatttcgtgctgggcatggttctgggtgttttgtttttggtgcttatattttcaaatgcaaactggaaaagactttgaactattacggtaacttgctgcagcctgaggcattgaaaccccgtgctccattccc

SEQ ID NO: 91823 - DNA, 809 bp, Eucalyptus grandis
  Intron number 3 from transcript Egrandis_v1_0.031923m (loc us Egrandis_v1_0.031713m.g) derived from phytozome v7.0 (c hr-ID scaffold_2; pos 58250642 to 58251450)
gacacaaatcccagcctctcgatcgcttccccgaggtaacgaatacttgtaaactctccctctctctctctctctctctctctctctctctctctttctggcatctccgtcgctctccgtctgagatccgtttgctttttcttttctcgtttccgttctcaggttagatcttcccgtctgtaaatctctcagatctgattgtttgctcctcgttcgctagatcgatctattccttttccatttcgtttgattctacacccgcgatagattagccctattgccgtttccaagtttacaggagtgtccgctctgcagatttgtgtagattgcatagtaataattgattattctcctcatctaggtgtctctaagcctatggagagagaatgcttcatgtgaagtttctgatcgagtgatgttgcaaggcccttgatttctcatcttactaggattacgtgggaaatgtagaaattgagttcacctacagtatcagttatattcaacaactgttaactatttgactccatttattatcggtgagttttttatgtttgggccttctggttgctattgctttgctcctctcattcctcacacattgtcaattttaaactttgaaaaggatatttccaaatgcagtaaaagaatttaggattgtctcgcttaaatgtccatcgattagaatcctattccttttattctagctcgtggtctcttgctctgtttgatggctattcatggtacaaacttgcacaacatttctagataatttacaatggctttcattttcaggtgaagcagaacagcac

SEQ ID NO: 91824 - DNA, 597 bp, Eucalyptus grandis
  Intron number 1 from transcript Egrandis_v1_0.019251m (loc us Egrandis_v1_0.019251m.g) derived from phytozome v7.0 (c hr-ID scaffold_2; pos 10389987 to 10390583)
ctctgggacctcgccaccggcgtctccgcccgcaggtctcccctctatctacatcctttcctgtggatctgttttgggttgagttgttgtcttattgcctcgattgatcagtaaaggaattgtttttatgtcattctagtgcccagtgatgctcttccagatctaaagttggtttttttattcagtttgatgggtctgttctttctagattttgatggcagttcgtagattcagcttcacacgactgagtttttctttggctaagtagccttgttccccactaattttggtaattcttggagatccatttgattgatgcgcattcctttatgtgctctgtgaagttgagtgggtttttttgattcctgagttgcaggtgctggcccgattgaatgtctaagagcatagctttgttctatttcacgctagtgttggacatttttggacattaatttcatgattagtccgttacgagctctgtgaaatttagttggtactttgatgatcccttagtggcgagtgctgtcctgataggatgactgagagcatgacttggttccatttgattctgtcataggttcgtgggccacaccaagg

SEQ ID NO: 91825 - DNA, 855 bp, Eucalyptus grandis
  Intron number 1 from transcript Egrandis_v1_0.018385m (loc us Egrandis_v1_0.018385m.g) derived from phytozome v7.0 (c hr-ID scaffold_7; pos 33334994 to 33335848 reverse strand)
tcgctgcgttccccaccgcctgcgctcttgaggtgagtgtgctggatttagctgcctggtgattttctatgttttggtggggatttcttgatgagttctggattcggaatggtggtcgtgggattaattatgggttgaggaggcgcttttggttctgtgcgttcgagggtcactttggtgggaggaaagttttctgctttaatgtaagtactgggtttcagaggatcttcagcttttggttctgtgtgtaggaggtcactttggtgagtgggaagtcttcagctttggtgtaagtactgggttttagttagagttgagcttcttggaaaaggtagttgaagtgttttggtggagacggagtgtatactgagagtttgaatggctgtgttagccgaaactgcatattcaagaagcagaagatcatggcagcatcaaatagattatgatttttcggtcttgcgatttgaggacgactagttagttagtcacgtttccgatgaagtcttaatcctccaaaacccaaggtgaaaccttacaaggcaaagaagtctgaattggggaatccatataatttagttcagtagtcattgaagcattagttttctgggcagaattaataaagatgcgtttgtccatcaaaggtttacagtctaagggctagatgttatcaacaaattaggactccaccaagcattaaaatttgagtgagacattagctgatttttgagagaacctccttttttgtctcagattatgtcaaattcttctgctctgagaaattatctgatctctgatgtcatggtcattcaacaatccatatttgatgattacaggttcacgcagcttcactcattc

SEQ ID NO: 91826 - DNA, 430 bp, Eucalyptus grandis
  Intron number 3 from transcript Egrandis_v1_0.032412m (loc us Egrandis_v1_0.032412m.g) derived from phytozome v7.0 (c hr-ID scaffold_2; pos 42374900 to 42375329)
tacgagcagaacgacaagccctcttctgcagttgagtaagttttttggctacttttcaggtttttgtttttgggtgcgcgcattgatcctcgtttctttgctttcttggtgtctgagcatttgcataaaccatttgaagatccattcttcatgagaaagttacgaattgcttttgcaaatatggaacttgaactacattttggttcctgaatatggggatcggagttgcatattggtcctttatcgaatgcatcgagaattgatgattacttttctgctgaatcataccaaactagatgaatgtgctatattgtctgtgagtttgatcagggaaagatcaatttttttcagattttctttgcttacggcatgtttcttgatgatggctgcaacaggttcatccaggacaagttgggtggtccaactgtgt

SEQ ID NO: 91827 - DNA, 792 bp, Eucalyptus grandis
  Intron number 1 from transcript Egrandis_v1_0.015527m (loc us Egrandis_v1_0.009957m.g) derived from phytozome v7.0 (c hr-ID scaffold_2; pos 60042869 to 60043660 reverse strand)
ttggcggccagagcactcaggttcggtatcgattgtgttttcgctcggtttcacttgatttctagcctttctggcaggtcagttaggtatgttcttgtgctttgagttcgttatgtgatctggggatggcttcttgcaatgatagatttcatgctttgttagcgtcttgattccgagctttcgggatggttcgctcgtggttcgggctggtgactgattttctccggacagtcgtgatgcttttggaaaaaggcctagttttttcatgtcggaagctctccggaggctgtgttggatttagggttggatctctttttgggtttcttcatgtgatgatttctgttcacttggaaagccctaggcttcttgcattagtgcttcctgtccttttcactggttttataatcaatttcaatttggaatggaagataaagaactctctctctctctctctctctctctctctctcgcgttcacacacgctcgcaactttaaggcaatgataattttaggaatgcagcattcttgcgttgaatatggttaagagcctatcattgattctgaggacttgcttagtctttcacttacacttacatttttaggtcgtttctggcacccttaggctgagcttctcttgtggactttgatgccgtttctcattttaatctcgttccatgctagtatgtaacaatggtcaaaccgttgctttgtgtaggaggtagtgaagctaaccgtttgtatgtttgcttcctctcagatttgggatttcaacttgggacggttgaggagtca

SEQ ID NO: 91828 - DNA, 787 bp, Eucalyptus grandis
  Intron number 4 from transcript Egrandis_v1_0.020101m (loc us Egrandis_v1_0.018416m.g) derived from phytozome v7.0 (c hr-ID scaffold_11; pos 36168900 to 36169686 reverse strand )
taagtgcgctgcgattgtatcccaagaactgattggtgtgctctctatctttgcttttatctactttgactgcagttggcagaattctgaagtgcagttctttaaatgtttggtcactacttagttttctgactttggaccttgtgtcagaattgtgtgtgtactgtgttgaggatactacttggaaacagttgtgtcgctaggcctgcttaacctggaaagatgcaatggaaggttgatacagggacattgttattgttatgatttcatcaggacaacttctcctggaaatgcaaaaatgtgcatttacgtctcgtaagcattaggtgcaaccgatatcacatagaattcccccattttcctttgcctgcattgacgcattgcatttgtataaatgttggctttggctcaaatattcaaattcataatgcttgggtcttgttcttctcgtccttttggccttaaaggacctgatgtgaatccccagttagattaaacatgttattgtattttgacaggtcttaaataactcacatgtattttgtattgtagatatgtaactttgaacctgaagagcaaatgcaacacagccggacaaaaaaatgttcatgatgtattgcaacattccagttattgtgttgtctaactgattttctttgtttctttctggttattttggtataataatgatttattgctactgttaagcgtctctcatttcctttaaaacattgatcctttctccatctaattgcatgttactctgttcattgaaagctttgacagc

SEQ ID NO: 91829 - DNA, 412 bp, Eucalyptus grandis
  Intron number 1 from transcript Egrandis_v1_0.052433m (loc us Egrandis_v1_0.052433m.g) derived from phytozome v7.0 (c hr-ID scaffold_11; pos 3053782 to 3054193 reverse strand)
accattcacgtcgaccaccattccttctagtaattcctttccttctttaatcaatagccacgctattattcataacttcgatcagatgcttctgaattttatctacgaagataaagcagttctttgtgatattcttaattttttcaatgtcaatgtgcaccgtgagagtgtggtcaattacatgcatatgttcttggtctacccaggatagaataggttcagcagagaatgtcaatgtcaagcatgggtttggccctgaatttgttgagatagattgaagcaattaattgccgactagaagaatctgcaaaaactagtagaggctaatggggtcgtttgttttttcaatggagaagacaattttttgattaattttcattgcatttcttatatgttagctacttggtggagg

SEQ ID NO: 91830 - DNA, 332 bp, Eucalyptus grandis
  Intron number 1 from transcript Egrandis_v1_0.045497m (loc us Egrandis_v1_0.045497m.g) derived from phytozome v7.0 (c hr-ID scaffold_11; pos 28504674 to 28505005)
cttaagaaggcgcaagcttttaggactctgctcaggtaaactttacacgatctcactgtcttttactgcagtagtcaatcatagtgtaggataagagctcgttgtaaattagtttccatatttgtaaactacttatactgtgcaattgtataatcccgtactctgggctctgctttgttgttgatatggttttttcttttctcttaacgcaggttgaaatagtacttagcttcttggtttcatgacagccactttgttctgtaatttgatattactgcatatgattgattttttcagggaaagcttctttcttggctccacttcccaagtca

SEQ ID NO: 91831 - DNA, 633 bp, Eucalyptus grandis
  Intron number 2 from transcript Egrandis_v1_0.019757m (loc us Egrandis_v1_0.019757m.g) derived from phytozome v7.0 (c hr-ID scaffold_2; pos 16103699 to 16104331)
tacaggtaggttggttcaaactttcaacttctgcaattttgttgtggcatgttttgagtgacctttgaatgtggtccgttgcaatttgagccctttttggacacttttgtgatgaatgtggcaagagagcatgtggaagtgagagtccctttccaaatatggtaattatctttacttcatgaagctgctggattgaaaaatcttgcgactctgaaacctttaaaaattaaaaaagaaagtttcctgctacatgaatttgaatttagctggtcgtgtcatacaagaagaaactgagactttcaattgcaagtttagtacataattagattcccttctggtaggaagatggaccaattgatacaagttcatgctgtgattttagctctcttttattgtattttatttatttatttatgataagttggttttactcaatacccaggatttcaattcacttgctctggtacacattcttgtcacaattattcggatagagtgattcaatgaaccatacagaggcacatcaatttgtttgcaccatttatctctcaatctcttggctttgaatcatacaaagttgcattttcaccattttcaggggggagaaagctttctgcagtggagactgccggt

SEQ ID NO: 91832 - DNA, 687 bp, Eucalyptus grandis
  Intron number 2 from transcript Egrandis_v1_0.015222m (loc us Egrandis_v1_0.015222m.g) derived from phytozome v7.0 (c hr-ID scaffold_2; pos 42746914 to 42747600 reverse strand)
gctggttctcgaaagtcacagcttgcgaactacaggtgactctacaaacaaatatattatgtcagcaaaccaccaccacgcccatctctttatttttcagctagattaagcattctctcctttattttttggctagataaagcattcaggactcgtagagcgttgaactagtcctttggcactatcagtccctttgtcatggaaatagcattgtatttcgtgggctactgtctgtctgtgatggtagtcccatccatgtgcattaattcctcaaggatatatttgaaccttagaattttggcttgttgaagtgcaagtgagaatcgaccttttgatttaagctaaccttgtcaagtcatgtgaagggttctctttcccctgtacgtgaaaagttttttactctccattcttcacctgtcatgtttcctgaagtgaagaactctggagacatgccatcttaatacttcggtcgactgagaattctgtgggatgtgaacgttgaaaagctttgtttaaatactgaaagaaagtgtgagatggacaagtatgtgtataatttaagtggattcctgcaaaagaaaagtttcagacttaccagttagacatttcatgaggtatccttaagtttgattaatcaacttttcatcatggaagtagtcttattttttaaattttattcttcttcag

SEQ ID NO: 91833 - DNA, 615 bp, Eucalyptus grandis
  Intron number 2 from transcript Egrandis_v1_0.007920m (loc us Egrandis_v1_0.007920m.g) derived from phytozome v7.0 (c hr-ID scaffold_7; pos 35641535 to 35642149)
attgagcctccgtctgatcgtctgagagagaaaaggtaaaaacatatagtaaattaatggggtgttctcatatatcactcttgctatatggcaaaggcccacattgccccagtttcgcaatttgaccgggtcttccctttgattgtcaatcaaacagattgttctctatttagtttgtcatgcttattcatagactgttgaaagtcttattcgaccaatctcatatttcatatactcatttatgcttaacagttagacctgttaattattactttagtttgaagcggtgtgaatctttttagctcttcctacccaattgatgtgacaagtcatatctctacttgtgtcaacgattagttccagagcccctgccctcacgaattgggagacttcaggcctgctggaggattagagtgcatgggatacattatgcatgcctttatcttgtgttgttgatgctttttcctataagtactttcttagtgtttgttttttcctttaatgctagaaaattgccatatcctttttcttttctttctcccccctaaggtaattcagttctgttgcgatccaattgcagattctcatcggatataaatctaaactccaaatcta

SEQ ID NO: 91834 - DNA, 1036 bp, Eucalyptus grandis
  Intron number 2 from transcript Egrandis_v1_0.025708m (loc us Egrandis_v1_0.025708m.g) derived from phytozome v7.0 (c hr-ID scaffold_2; pos 56586588 to 56587623 reverse strand)
aagaggagtccagaaggcagagtaagtttcttaattcatctcaactgtttttaactcttagtatatgtattgtggttttatatgcaattaaacgtgaaagaagaaattattacacatgagtgattgtaaggctgacactgtacatgggatgtgcagtattttggtgagaaactattaattggttaaattatagataactaatcgcaagttagtgatccagacattctgattttaatttgtcttatggcatgtctttggggactattttttggactattaattggttgaacttatgctgttcactcatggcatgtctttggtaccagaagaacactgtctgagattctttacatgaattttgggctgttcgcttcagatgtgtcttagcatacctaattatgttctgtacttgctgaacttgtgctgatctgtgttgaggtgcaactttctaacattctgaaattatactttgaacagtcatactgtcttttttagtattggagtgtctgactaaaaatttcaagtcttagagggcatccagctggaaatgagatgccattgtggtttttcttctcattgacactggaacttcacacttacctctacaagttctcttagaacttagtagcatttttttcagaactcaacctgctttattctcggaggactagtatgtctgatgtgtctctgctctgcattttctctattgcatgagctggccagtaactaaacccatgttcaagacaattgatcttttgtttatattggcacctaccttactgacaaaatcaaatgggatccttcaagatagtgatacgtttttattgtcatcttttgttcttttttgggtcggtttgaattgtcatcttaaaaattacttcctacagcttagtaccaagccatccagtgtcaagagtttcttgtttcttgagacatcatttagtttattgagtctccatttcatttctgaactccaattagataaaatcctgttttggcaggcagttctattggaccgaccccgagtaatatctac

SEQ ID NO: 91835 - DNA, 905 bp, Eucalyptus grandis; identical to SEQ ID NO: 91776
  Intron number 1 from transcript Egrandis_v1_0.019946m (loc us Egrandis_v1_0.019966m.g) derived from phytozome v7.0 (c hr-ID scaffold_2; pos 55913178 to 55914082 reverse strand)

SEQ ID NO: 91836 - DNA, 695 bp, Eucalyptus grandis
  Intron number 1 from transcript Egrandis_v1_0.048892m (loc us Egrandis_v1_0.048892m.g) derived from phytozome v7.0 (c hr-ID scaffold_11; pos 31056443 to 31057137 reverse strand )
cctttcacaggtactgtattcccaagtctctgatgaatgaacttagcaatgtcgtataatcagtcaaacttacaattaggattcatttagttgggatctaagtacgtacaaggctttcgcttttttctttggcgttgttcccaacctttacctattgacatgtacttggattaaattacaaagtgagggatagaaattaagataaattggagaacgaggctgtaacaccgtcatgttgatgcggacaaaaaagtggttgtacgttaactgaagagcgacactatcagatcatccaacattgacccaattaatgggatgtctccgtagatttgcacaagtcattaaacatcagtgatcaccaaccactgggacgcaatttattgcatctttagataagaagctatggaagatcagtgggtcttgatggagaaattaagagcattaacaactgatctggaataggcttttttgactacaataccctcgggtggaatgtttgcctcttaattttagttaatatcacgtcagtggaaggacatatatcttgcttctaatatttcatagaatttacaaaaaacaagaaaaacaggtaacataaaaattttgtttgattctgtatggaacacattgatggaccctttgacatttcacatctgataaaagactcgaattccaactgcaggagttacctagaa

SEQ ID NO: 91837 - DNA, 922 bp, Eucalyptus grandis
  Intron number 2 from transcript Egrandis_v1_0.040190m (loc us Egrandis_v1_0.040190m.g) derived from phytozome v7.0 (c hr-ID scaffold_2; pos 61435284 to 61436205)
tcggtacaccgtcaaggcctccgttcgccatccgagtccgttctcgatcccctctcgtttccgtttccgtttccgttcgcgtccgtttcttttggtgatgattgacgcgagcgaccgttcgattgtccgtgatcgactgattttgctttgtgatgagctctcgtgttgttgaacacggtctgcttcgtcgtcatttcgtgcaactctgttgtcgtagatgaaagttcgtaaatctgtagtttgagaccgtggccgagtagtttcggttttggatggattgttcggaagtcgatcgaggttttagcagctgagcggggtttatccaatagtggatgctttttgtcccgacggtgggccttgcagagaggttctccttctgcttctcttcttttccgagcatgtcttgagtatagaggagtcatctcgtgagattattgattaccagatgagtatggttagaggtaaaatcaatctggataatccttttttcttttggcatgctcaagccaaatgcattagttaggattgttttgccagctccgaagacattcatcaatgaggttgtgacgtgtggtgctctggttgtcttttatggcttgtatttgttcatatgaagagtgatcttgctgctgttactcgaactcgttcctgcatcggcaggtgaggcaaatgaaagagaacattcaggaatcttctaaaaagtttcaagatcttgggtttttgttctctcggtttggttatatgaggttttcaaatttcaataacagtaccatgctccaaatcatttagttactggggaagagacatgatgttgtttgactcgagcccttccagtttagtggacgagttatgttcattgaattttgtggctttccttatatccaaacagctcatttacagcgattgctcgtctccccaacag

SEQ ID NO: 91838 - DNA, 436 bp, Eucalyptus grandis
  Intron number 1 from transcript Egrandis_v1_0.007353m (loc us Egrandis_v1_0.007353m.g) derived from phytozome v7.0 (c hr-ID scaffold_11; pos 35686982 to 35687417 reverse strand )
tttcggttgttcgctgccagattagcgattccgaggtgaactcgatgttcttacctccgcatgtcttgagaaatttagtcgcgttttttactgtagatcacaagtttttagagggcaaagaagctacttgcttctgagctacttaatctgtgagaattttgggttttgttttgttcctgaatctaagaaatgtttctttgtattctctaaatttgatagtggtgacgattgaaatgggtatggatttgctactggctttctagacacataactttatgctaattcccagagtatgtcaagtacaaacagaaattgactggctgtcattccatgttctgtcctcctgatataagttgaattcgatagtctttctgtgatatagaatcaaatggcgcattatacttatgcctttgcttgctttgcacatgctagagtg

SEQ ID NO: 91839 - DNA, 575 bp, Eucalyptus grandis
  Intron number 1 from transcript Egrandis_v1_0.006307m (loc us Egrandis_v1_0.006307m.g) derived from phytozome v7.0 (c hr-ID scaffold_11; pos 10941862 to 10942436)
gtcacaaaccaaaggtaactcatcactctgttctttttaattctttctttttcaatacttgcattccttttaattttgtttgattttagtgcacaccaaatgaagatacttccagcatgcactcacataataagtcccctgcactgcacttcaagtagtcctgaaaagtttactctttcatttcaaaagttctttgggtggaaggggatcttttaggcagaatttcagagttctcatttgaaattccgagaaattacaaggatgatttgtagcatgaggcttgatcagaaattaatataaatgtgaggcataattgcttattttattatttagatgatttaatctaaacttcactaaatatagaagggcttgcatactgtttgtttttcttggtggatttatggaagtggttttgttttgaatcacatttgatctaaaagttcatacactgttacagattggacttgtgtccacagtttgatttaataaaatgcatgtcattcccatcttaatcctgcaccccttctttttctcaagcagaaatcagcacatccacctgttgaagctgttagtga

SEQ ID NO: 91840 - DNA, 687 bp, Eucalyptus grandis
  Intron number 2 from transcript Egrandis_v1_0.045847m (loc us Egrandis_v1_0.045847m.g) derived from phytozome v7.0 (c hr-ID scaffold_7; pos 50603825 to 50604511 reverse strand)
ctaacggtactcttttctctctttccttgattcagttatccaaggcatatgttgggctctctgtagttatccggtagttaattaatttgttaaactgtcaaaagtaaccatctgctcatcagaattgtttaagtttatatacccgtgaatgtgaaattgtgtgaaatttggattaaatctgttattttcttgataagaagttctgtgaaataaaggtctaagttgttgagttgatatatctcaggcatcagatcatttcgttttccgatcagtgctgtttatgtttgctctgtttttccttccttgtaaatttagatgtggtttgtctcttagttttttgtattggccaaaaaagacagattagctgatgtaagtttgtaaagttggaagcttaaatggggctttatgacttgaagaagtatccaattaagtcgttgttggaacttccttctaagtttcaacaaggttttcttttaatgttacttgtgtcggtgaatcaaatgttcaatgattgtttttaaaatgccaagtggcccatcaaagaagctggcccaagtctgtgttacccatgggagactacagttgcaaattgtgttattgctgtaattttttaaaagggcacaatggtaatcaagttccggttgatctccaggtttttagttgctttggtcagtatttttgcctgca

SEQ ID NO: 91841 - DNA, 1021 bp, Eucalyptus grandis
  Intron number 2 from transcript Egrandis_v1_0.000281m (loc us Egrandis_v1_0.000281m.g) derived from phytozome v7.0 (c hr-ID scaffold_2; pos 31648462 to 31649482)
cagctctgaaagaaatactttccactcttaaagatgtgagttatccatgaatatggcctattctgtctttaactttaaatttaatgcaaactactgccacgttagtttgaaccacttgattgccttccctctggagttggcattacctgactatatgtctggagtagagtgaaattccatcaccaacattccccccttcaactttcccatatctttatattctgccatgatattttgttctagcctctccagagagcaaacagttggcatatgtcttagcttgttgagctttaacaaagccacggttgcagtatgatgagatatattctagcaaacaggagtagagtaaatttccaagaaactctgccatcctaatttgttaatgtaagcaaggactgcttttgcaagtgagctgcaattgaataagatcgatgcttcaacatggatgttgccacctagtatctggttttttgttgaagaatagtgttttcatggggttctgtttcctgcactgaaattttattatcatgattttgtccatcatgtttttctcgttactgcacaaatcgctttagaaattcacgggaagctataaacatggagtcctctgcatcataagcctttgaccttcctggtcgatgtttaggatttcattaatgccacgatactgataaaagaaactgaagttggacaccttgctgatcaacgagccactataagtcttaaggaactgttggatttggcttgatgactgggtagagaacagaggcagggatgctaagtattcttgttaaaattttgaagtagtgactggaatttactacaatcttgtatgtgctagggattttgggaccttccttgtgtaactaattcttaatgtataagaagatataggaaacaagaacttcaataagaattgtagttgatcttcttactggacagttttgggtctttctcaatactcaaaatctaaaaatcacatttggaagctaacttccttttctccatgcagcattctgag

SEQ ID NO: 91842 - DNA, 1021 bp, Eucalyptus grandis
  Intron number 1 from transcript Egrandis_v1_0.039016m (loc us Egrandis_v1_0.039016m.g) derived from phytozome v7.0 (c hr-ID scaffold_7; pos 23146219 to 23147239 reverse strand)
gaacatcgctcgagcaaccatttccgtcaaatttggtcagtcccattttttcttaaattttgctggaagccattgtttgatttaaaaaagactaaagcaatgatcatgtgaagtcactgcaaagttgtcgtatctgaggaagcatccagaccatgttaagaatttgaagtccatgggactccttttaacttacttcgtttgactacaattttattcttagtcaatgcttaaataaaaagacgtttttgccgatgaatcactcagctggaattagcggcatcatctgcttgtctcgatcgtggaagacatcgcttctctgcagcgtgtaggccgatgatccatcgagaaatatatgaaaactagattaagtcaatgatctggtttattcatagcagctaatcagataaaaagggacattggattctggaatctaagcatgaaggattagtatatgatatatgacctagtccatttcagaacggctaccagcacattcaatgaagctgtcttctgaaaatatgatcaaggattcctccaggactagatctgaccttttcggaaggctatatttttctcttttttccttttagaagactagttcatgtgaaaaagcttctctgtttttcagtttaatagcattccatctgtttcttttatttctcttctcctcttttgccaaactgttttccagttgtgaacattgttagttacccgtatccctgtagattgtctattcatcaatacacaagtacttgagtggttataaacacgacataagtatttgaagtagcatatcatgtgctgttttgttccttaatcatcttctgtcacttttgaacatggacaacgacaaagtaaagttctgcacctctctgtatcgacataataaaataacgaattaacacggtgaccaatgattaaggatttcgactcacttcttgagccaaaatcttcgaaattttcataaggtatgtgctctgctgaatgcaggtaattggcaaagaaggaaatatataggcaa

SEQ ID NO: 91843 - DNA, 725 bp, Eucalyptus grandis
  Intron number 1 from transcript Egrandis_v1_0.002060m (loc us Egrandis_v1_0.002060m.g) derived from phytozome v7.0 (c hr-ID scaffold_11; pos 9148457 to 9149181)
gggaccgttgagggtgagttcggatttctttacccatttccacgttcagtaaaagtatgcacttttctttctcggttcaggatttcgttctcgcagttatgtgatttttaatgtgaaaaggactcttccggggacttcttattactaaactggtcgcttttgaggattataattggccggcgttgaccatggatgaacaactttctgattacttcgttgaccacgctccgcgttcttctgaatacattaagggccctgtcgttgcttttcctttgctttaaagttttaattttgctcgttccaattttgcttattctgtaatgaactttgaatgctcattgagccgttttaaagggggaaaagaaaactgtaacgaagatctagttcaagaactcgatatgcgacagaatgaacacagtcatcgcgatataatccattttgatgatttcatcattttcctcatttttggcttgttcggattatactggtttttgggttttagtttctataaacaaaagcaagcaagtcaggcatggatttgcatggtctttcacaagcgtagcaggttctttcgtgctctgaacttagttgcataggcctgttctttagtttctctctgttcaagaatttgtactctgaactctgttgcagagattatgacttgaaatcgggttgttctgtatctggcagcctttaaagtgattggcgaagaggtggtggccatt

SEQ ID NO: 91844 - DNA, 711 bp, Eucalyptus grandis
  Intron number 1 from transcript Egrandis_v1_0.017691m (loc us Egrandis_v1_0.017691m.g) derived from phytozome v7.0 (c hr-ID scaffold_11; pos 29594617 to 29595327 reverse strand )
cggccgtgagtactgtcaaatttgatggttgattagtaatctacctttatcattatggcatggtccgacctgtggttgtctactttctttgttgagggtaaaatttgccttgctaaaggaagtcttgaattgaatcgacacgccgtcattccttaatgggatagaggaattaatctggcaatactagactaactatatgcatgatagaaacatgaaagtgtggatggaatgggacaatcaagaaagagccatcattgaagatttgctatcataaaagagttttgaggaaacattacctacttatgctgcagtcagcatcagggtatgccacttttatatgttgtgaacaaaattaccacctatcctcatatactatatcattgagaagagaaggtttcaagactttgaatagggggtaacccaagtctgttctgccaataataagcagctgtagcatcataggcaagtcacttttttccttaaggtagctatataagttagcagtaacttcatttttcctgtgggatagatgttatctttgtcataggcacctctgagtcctgtgaatattctccgcatcatctggtctgagggataaagtatgtctaccgtagtgtatgtattttgtctcatggtgcctggtttttcttgatgacacttattttatttgtcgatctgagttatttgcaaaatttaaggttcttgcgctcc

SEQ ID NO: 91845 - DNA, 488 bp, Eucalyptus grandis
  Intron number 3 from transcript Egrandis_v1_0.013560m (loc us Egrandis_v1_0.013560m.g) derived from phytozome v7.0 (c hr-ID scaffold_7; pos 49768992 to 49769479)
caggaggtgagctagttggtttaatttctttgcgcttttcgaactgcgttccgttcttgagctgcgcgatttgtttcgatggagaaactgagctcgttctagtcattgggaaagaaaaaagactcttgaggtcgtactatgctgtgcttatgaggaggaaatagaaagaaagattccgaggctgcttctgtgttatgcttatgatggtgctgtgtttatttgtttgtttggggaaaattcacacaataggtcgtccttttatgtgcttggattagcttgtaatgaattgatggttaacttgaataatcttagttcttcattgttagtgctcatgggcttagagaaattttattggtcagcacaaaattggtggatttttaggtgctcagagtactgttcttgattttcagtgtgcagacgcgctggtaaatgtgttttgatttgtttgtttgattgattttggggttgtcaggcaattggagcggaat

SEQ ID NO: 91846 - DNA, 806 bp, Eucalyptus grandis
  Intron number 1 from transcript Egrandis_v1_0.020936m (loc us Egrandis_v1_0.020936m.g) derived from phytozome v7.0 (c hr-ID scaffold_7; pos 43122736 to 43123541 reverse strand)
agagcgccggtttccggtctcttctccagcacccggtacggctctcggccatttcttttttgccctggtttatgcggattgctctatggactctcgtgctgtctgagttagggttttcgagtgggtccttctctgtttgtcgaaactgatacgtggtcgatagttttttgcgatactgctttgtgtttttgggcgggatgcggattactggaaccgattggggagaaattcctgtcctttactccagtcgcaggtccttgttttttcttttttaattttcagaaatctggtgaatttttggtccgtaaacttggttgagatgtcctctgattcttatcaacccgttggcaattcagtatgtactgccatgcgtacaagatttgattttttaccctaattgttgtgtccctgttagctacaaaacagtgaagacgaatacgagctctgctcattggaactagtttagtgtttagggaactagtttaatccatttcgaacagaattgctctacagcaccattgccgtcaattaaatgtttatgtttaactctacatggaagttatctctctcttttaacgaattctctaagcagaagtcgaataatatctcctaaatgccattagacatagtttaatgtggtctacgacataaatgtcagtatcacttgtgcctcttgtttctagcatgaataaatactgcagagaaagcgaggtgtttgttgttgaagtgggtaaaagccactgatagtttgaactatgggcaggaagcacttctacaagaagacccatctaagcatcgattgatag

SEQ ID NO: 91847 - DNA, 480 bp, Eucalyptus grandis
  Intron number 1 from transcript Egrandis_v1_0.029849m (loc us Egrandis_v1_0.029849m.g) derived from phytozome v7.0 (c hr-ID scaffold_7; pos 35032348 to 35032827)
tcagctctgaccgagtggctgttatatctattgccgatccagagttagaaaaacagatctgcagcacatacggctgaccaagcctgacaaagacatggggtcggggtggttctctggtctgtatgacccatcctgaattggatgttagggaaacagtagaaagagtctaaattgtcatgctttgactgtggaccttgcccccactttcctgtcctcagccctaatctccaaaaacttcctccttttcccattcttcttttgaccactgctaacaccctttcccctcaatcctactttaatcatttctttatcacattcttatatttcccctccttcgtttacacttttctctagtgctttaatcacgtgtaccacactcggtccacgttctctctctctctctctctctctctctctctctcttcttatgacaatgaacaaaaagtccaaatccaagccccttcttctttgtacagaggt

SEQ ID NO: 91848 - DNA, 657 bp, Eucalyptus grandis
  Intron number 1 from transcript Egrandis_v1_0.001103m (loc us Egrandis_v1_0.001092m.g) derived from phytozome v7.0 (c hr-ID scaffold_2; pos 62674461 to 62675117)
ggctcaggtttgctactggaggtggtgatcacaaggtaatgcgatctcgtcttggttcactttttttgctctgtttgagaatgcaaaggatagagaaaagaaaagaaatttaaggtatttgtaccaggtctcgggtatttctcaccttccagcttacggtttgctcgaattccagctcggaagctttccttgtcataagttttgagtgtgtttcaaagcctccttattgataaatagcattgagcactgcttaatcatttgttttcatggtggttggtaattcttgtatacaatgatgagagatgagtaaaattggtcattgtcgtgattcttttgttggaaaagtgaggcctctttgagtcttgatctatgaatgtatttatctatggttttctgttagaattgtttgcttcaaaatgtgagatgaagctgttgcacattaatgagaaagtgtcatgcatgggaaattgtttattgttctcatgcacgtcagcttgttttaccatgcaattttagaggactaaaattgctgcaagactcccaagtgttttttttttttggtaaagtaaaaactttttttggtaaagcaagactcccaagtgttgagatatatatcttgacaattttctttctttggcattttatgtaggtccggat

SEQ ID NO: 91849 - DNA, 870 bp, Eucalyptus grandis
  Intron number 3 from transcript Egrandis_v1_0.001820m (loc us Egrandis_v1_0.001820m.g) derived from phytozome v7.0 (c hr-ID scaffold_2; pos 43526797 to 43527666 reverse strand)
gtccaaaaaacttgttggtaggtccactctatataaaatctatctaccttgatattgaggccatttgtattcagagatactgattttttattttattttttcaaaaacagagactactcttttggttgtgaaattgagttttggacgttcgttcgtttgtgatggaatagctttgtgaatggctattgtatcaaaatatagttttacctttcttcctataagacttccaaaatcattctagaggcattgaaaagcctgtatttcacattggtaaagttattctaatttggcaccctaatttcttaagtggcattgagggaatcttcatcaactctattattattattattattttattttatttttttaaaatttttcgttaatcccaacagtatgtgttgttagtcgctgaacattgtcaaaactggcaaatgggatatattccagttgttacacttgtagcacttgctactaatggaccaagccactgaagcaattttttcttgttgctcagattgcagcactctttaggacttagttttagcctgtgttacccctttgagctctgaggaatgttctatttaaaagtcttttatcattgcattttgggttaagctccattcaatttcaaaccgattcttaacaaaattaaaaatcagtcaggatcacaaagtatctggcaaaacaggcatatgaggactttttgaatggttcaaggctgtttgtcacttcattaatcaattttgtgtccacttacatatatgctgttgtaaagattacttcgcgaattgtgtagattcaccaagagaatacagtctgacttattgttatgtagaaaaaaggtgcagttcacttaagtccatctaagaa

SEQ ID NO: 91850 - DNA, 554 bp, Eucalyptus grandis
  Intron number 3 from transcript Egrandis_v1_0.006290m (loc us Egrandis_v1_0.006301m.g) derived from phytozome v7.0 (c hr-ID scaffold_2; pos 55266083 to 55266636)
cggtggaaggtaattgtttatgacaaactgtgcttgggtatccaattatcaagttgtatgcttcccatttgactaatccaagggaaacaaaaagtttgttcatttattactgcaaattttatttgtttattgatgtagtcattagttttttcttttcttttttttcttctctgggtgtgtgggggttggggaaggtttgtaaagtgcctggtggcactgagattagcatatgagggttagcaataatctaatgggaaatcatctagctgtacttgttttactactaaacagccaaactgttgagcgctttaaaggaatgcaaactttagtcatttgcagctggttgggaggaaaccgtgttcggtggaacctggaaactgcacacatttgatactccttttagttgacttatgcacagcctcatatatgttatgtttcagaggccatataaatgctgttgattatgcattctagtcttagtgtttgaatttttcctttcaaattttttatccttactgtaatttttgatttagattttcttgtattttgtagac

SEQ ID NO: 91851 - DNA, 953 bp, Eucalyptus grandis
  Intron number 4 from transcript Egrandis_v1_0.005817m (loc us Egrandis_v1_0.005800m.g) derived from phytozome v7.0 (c hr-ID scaffold_2; pos 47171852 to 47172804)
ttcaagtgagttcttgataagctcttttctgtagcatttctttcatgattagaagaaattgttaattcctctttcaatttgaggtcaactaaccatttaatgtgttggtgatgttgttaaagagtctaaatatcccatttattaacaaatatttgacccacgaaatcccacttgcatcatgggaaagctggttggggaactaaaatgtggtaccgtgatccaatatttcatttttgtttgcttaatgagtaatgtcattcagtcaaatctgccaaacagacaaatgagccaatatttcataaaaccggttgtggcatgatatcgagttttagaggttctattgtaatcatctatagttaagaagtcattctgttatggcgatgtcaattcttaactagtgcgattgcgggttgtcaggattggatatgctagatggttattggtaccacattcctccttccctccctcctccctcctccctccccccttccccttctctctctatgatattttggcttggaaaacatctcattccgggcttatgaaagtgatctgattcaggaggctggctggggtgcataaataaccaaagggcggtgtgtgctcgtaggtcacatcttatactttatttgtacacgtgtctttcccatggctgatgataatgctgtaactcatcatatttttgtctgcacgacaagcatctttgttaggactcagcaaaactgattgaaaaattagaggtttctcttctgcgtctctcgatttttactcttgatgagtttgtataagagaaatggagtgctgttgattgataaatgcatgcttgattttcaaagtcatggatctcttgtagtgttatcattaaacttacaatttacgattaattggttgattgatttttgcatccaatgatacttttttgagtattggtaacattttcttcttataggctc

SEQ ID NO: 91852 - DNA, 729 bp, Eucalyptus grandis
  Intron number 1 from transcript Egrandis_v1_0.049867m (loc us Egrandis_v1_0.049867m.g) derived from phytozome v7.0 (c hr-ID scaffold_2; pos 32188536 to 32189264)
cgtgtcgttgtctctcgagaaaggggtgctctgaggtagcttcttcccgttttctctcacttaatttctaccctttgagatgaccatcgtagtggttgatgctgggcgtgacccgcagtgttggattgttcttctttgacaaatgtttgtttcttttgatgctttgatcggatgggcttgttttcgttatgggttttgatcggtttggtcctcaaagatctggtcttgattgagtagcgaagacttcccttttctgattgttgcgagtactgcgattccgttgctgcggaaaaagctcggagttgggatggtgtctctttgtttgtgtgtatcaccagttgactaggttttgagttcctctatcgaagtgagagaagatgagtttgctcagatatagtttaatttgttctgatagagccagctttttggaacatcagatctgaaatttgcatattactggaactgggtcatcgatgggagttcgaaatttcttgtgtactgtcagtctgttgactttgcggcttcttttgaacccatattcctgctttaattgttgatttcatcacagtttctttatgcttcgtttctttgtttttgtggcttaattgtttacattttcaccatttcagaacgaccatttgtttatgtggtgtttctttctttgttcaagcttgcatgattgctgatctagctttttctgttttgtttctgtctagatcacaaggaaag

SEQ ID NO: 91853 - DNA, 158 bp, Eucalyptus grandis
  Intron number 3 from transcript Egrandis_v1_0.049867m (loc us Egrandis_v1_0.049867m.g) derived from phytozome v7.0 (c hr-ID scaffold_2; pos 32189526 to 32189683)
tcaacaggtatcttttgattacagtggtcttcttattaatgagaaagcatatagactagttcttcatttacataaaccaaatctttagtttattgacttgttatgatctttgaaaatgacattcacaggaccacactttaatccttgtggcaaagagc

SEQ ID NO: 91854 - DNA, 1058 bp, Eucalyptus grandis
  Intron number 1 from transcript Egrandis_v1_0.053655m (loc us Egrandis_v1_0.053655m.g) derived from phytozome v7.0 (c hr-ID scaffold_7; pos 16235552 to 16236609 reverse strand)
ttgccaaggcttgtgaagactggggcatcttcgtacaaatgttcctagcttgttcattatctgcttcatagtaattttctttatttagattttgtcgcgagcatccgaagcaaacagttggtatcttcgctggtcaaacttgtttataatactcaagaaaaggctaggaaaaatataaagtctgggacacttggagcgcgtttggcaactggccaaaaaatgaaaatttctattattttgtttccgtaagtagatttggaatagaaatccgtttggtaaaatttttgtttccgaaaacaaatttctattttttgttctcggaagtagatttggaacataattgagaagtagaaaaaaatagattctttgtttctggaacaattccttttttttttaaaaaaaaaaaggaggaagaaggtagccagtggctgagctcctttttttccttaaaaaaaattgattttaaattgattttaattattttttatattaaaatttgaagtgtgcaaaaacgacatcgcttttgtgtttctttgctgagtcagtcttctggcaagccacgtaagcgagcaaaattaataaaaaattgtcacgtaagattctcggtggggttcatcggatgtggcacttaaatatcccaattttttttttttaaaaaagacacttaagtgttactttttttaacttctgacactcaaatgtcttcttatgtcaagttttggcactttgggtatttttttgctgaaaaatataaattaaattggctgattcaacccatgattgttcattcatgccggagctaaacagaaataatgataaactattctcctgacatggcatgcatgagattgggcgctgcacgtaaatcaaaccagacagcttttgtctttttaaatctatcttttgtaattggcatcaaagctggagtcattcctcgtcatcagtatgacataaactctttatacatgatccgacagtgtgttgttcgctatgtattgatcatagcctttggttgtatatgtgagtagttgatcaaccacggagtgcccgaaagtcaa

SEQ ID NO: 91855 - DNA, 910 bp, Eucalyptus grandis
  Intron number 1 from transcript Egrandis_v1_0.048220m (loc us Egrandis_v1_0.048220m.g) derived from phytozome v7.0 (c hr-ID scaffold_7; pos 585355 to 586264 reverse strand)
cgatccaggttactctctctctgaatggatcttgctttcttccttccttttcgaatatgtatacctatgttttgacagtcaattggttctcatttatgggtttgctttgttgtttgtttttcttttccattcatttcacgaaatctcagatggatcgtgcttccctatctgtctatattctgatttcatgtttaggcgtgggcccaaaatatttcatcatactaagaaattcaaatggaaggtgatatcatcatatattacttgtgatcttttggtggctgatctaccaaaccggccatctacatagtcggacagaggaagtgcttcggaacatgccgagacattgactttagagtcttgatgtcattgatggattattgataagagacaccacttgatcgttattattgtacaagccagggaatgtggcatagatggctcatattattgagcggtgatactcggattctctcttactctgtctacaccttatcttatctgtcttgcattggtttcatgtatcgatgttctgatcaaaactcatgcttgcaaatctagtctagtctccaggggtttaatagtttattgctaatgtcccattgaaataactatgtgcaggaaatgtatctgatgataattgatgcctgattgtttagatttgatcataattagagctactcttcattgatctacctcttccatcttttccttctaacacacagtgttatatctacaaatgtaaaccatacatgaacgccaaatatcaggtcaaaagaggatttgagtattctctagcccatccgggtttaactggaacttcgaaatcagcaggggcgttgtgtaagttcagatatgttgcacattgacagtgctgatgatttgtgtttttctaccttcagaggaagagccc

SEQ ID NO: 91856 - DNA, 991 bp, Eucalyptus grandis
  Intron number 1 from transcript Egrandis_v1_0.014510m (loc us Egrandis_v1_0.014510m.g) derived from phytozome v7.0 (c hr-ID scaffold_11; pos 17007371 to 17008361)
cacccatctccggttctttttcttgatcttgtctcgtgagttctctctttctccgacccagatacgaaaaacacacaaaaaagctgatctttttatgaccctctgattctttttttctgttttacttgtttgagttttgtttcctgtgttaattgtgtctgcttttgtttttcattttctctgcctcctgcttaggtgggtcttgagctccgtttgtgaagagggatgatcgtgtagttttgtgtcttttttttctttctcttttgccttgggaattcagtgtttttgtggttgatgcagatgcttatgaattttgtggtgaattatctctctaatatatgttgaattggagagtttttgtgatttttgttcctttcgtttgtttgatttgcttgaagtggtgttgtttcaatttgatagtaaatctcgtgccatcacttttatcaagcttgtaatttgttttctaattactttgggtttgcttatctgctagatgagaaagcagtgttattgttattttgctttttaaaattataatgcagaacctgatcgttgaaaaagtggattcctgaagataaagtatatatcttcatgccttttttgcccttttatcttttggattctcaggtgaaaaaaatgcgtaccttttttgttaaaaactattacctctacattctatctgaagcaaacttttctctctctccgacttacacttccttcaaagttaagtcttcagttgttgcaggagacagaaactacttttcttgccttttatggtcaccgccacgtctaatttcagagtttctgtacatacgagaaaaataattgcaactgtcgatatgtgtgtttattggttaaagatgaatttgcatcgcaattggcatcatattgagtggtggaaagctaattgtcatgcatggatggttggaactaattctgggtttcttttcttttaggaaagcatcttctttggtaacagcatagttctcga

SEQ ID NO: 91857 - DNA, 1045 bp, Eucalyptus grandis
  Intron number 3 from transcript Egrandis_v1_0.013738m (loc us Egrandis_v1_0.013738m.g) derived from phytozome v7.0 (c hr-ID scaffold_2; pos 47548768 to 47549812)
ccggctttcaccttcgtacttgccatcatttgcaggtcactatagtagttttgattggcttagtgcttctttatcgctcggttcttcccccgtcatatgcagtgagctagtggattttcaagtagaactttggcctatctcatatgtaccttgatcattgtatgcttttggttgtaaccgagggacgggaaaaggagtggggagtaccgcttgtcttgaaagaggcgtgccgactgctaggagcgcattgtgaggtcgttaaccgtggagccagatatcattttaagcattccattgccttgttctttctttattttatgattgtaaaatgttctctttggtagttctgtttcgaaattgccaacggagtgcaaaattggctactgactaactaaataaagttcataatacaattacacttccagcttataacctggattcctaaagcctaagttaggttagagagtataatatgcccgtaatacataagatcaatttgttccaattacttttccttaatgtgctcccgaatttaggggtgccacttaataggtgaattgatgaaaattatgctcggaaagttatcttaaatatgtagttcctaagtagattgtcttcttttccagttccataggtaagctcttgtctacatagcttgcactgaaaacatcgaatcatgaactgaggggtcgaccattctgtgaagttgtttggcttgttgctcttggtttattcatgctatatagcttccatgtttgatatcctgttaaggattcttccgcctctcttggcttgaaaaaataaacagtccttgctaggtattcagaccgggaacaagtaatattgaaatttttatatgctagaatgcaaaaatggtggactggatttcttggagtaaccatccatgcacacttcccttagtagtacatgaaagattggtacacttgaggattctggtaatttcatgttgtcttgcctgctgattaataattatgtgattggtgcttcagattggagagattagactggagcagttcaagtagct

SEQ ID NO: 91858 - DNA, 752 bp, Eucalyptus grandis
  Intron number 1 from transcript Egrandis_v1_0.029571m (loc us Egrandis_v1_0.028089m.g) derived from phytozome v7.0 (c hr-ID scaffold_11; pos 42726739 to 42727490 reverse strand )
gcctccgttcagaaaggttcgatcttggtcttcgttttctttattctgggtatcactccattgatccgctcgtgcttgaaatgatctgcgcgaattcttgtagcctgatcgtgcggtttgtgtttcgggaatttactgaatgccctccgtttctctgtgcacagggagtgttattgtgatcatgggtgtgagcggttctgggaaatcgtaagtagtggaaaaacctcttcttctctagctttcttgggttgaaaacagggaaatttgtcgaccattgtggcgttttctgtgactttttttttatctaatcaaatagctggaatggaggggattccatttgtaggccaatacttgtccgtaagagacgttagtgagctggatgagtatgttcttgctagcaaattgattgagagagtctgtgttttgagcagctgcgttgaattaccacatcagggatgtatgaatttcagcagttcacctttctactactaccgtcagttaattccaacaagctacctactgtcattgttgtaaagttctttggcaatgcttcatgaccatcttcatacatataatcagtcatatctctgttaggggaccatttgacaatgtgtcaaggcatcacttctgtcgagtaaaaataattcctttctgatagaaggaagaaaatcaaaatgctttcgaaaaaatttctgctttgttacgatgcttgaatgtcaaatgtatgtggtttgaacagcacaataggacat

SEQ ID NO: 91859 - DNA, 788 bp, Eucalyptus grandis
  Intron number 1 from transcript Egrandis_v1_0.000894m (loc us Egrandis_v1_0.000894m.g) derived from phytozome v7.0 (c hr-ID scaffold_2; pos 26749441 to 26750228 reverse strand)
gggattacaaattcgcagtgtacgacctagctaaagttttgcagctgtctagattcttgcacagggttaaatgttgtgaaagcatatgctagagacatctagactttctggtccttgaatgcattgtctagcaatgacaacatatataagtatctcaaatgagattgatggctctaagcatgagtggaagttctaattagttttttgcgtcctatttctcttacctctttagttttcaatggtaaattagaaataggatgttaatcttgatttgattgtaaagctaaaccattagaggctgctagagggatgtctgtgcattgtgcacccactgtatttgtcttcttcacttgcagcaactgtagttgcttgaaaagcagtgacaacgctatatataagcttctcaaattagattaatggctctaaacatgactggaaattctagttagatttcgtatcccgtttttctttactttttaattttcaatggtaaaattagagataggatgttaatcctgctgatatagttatgaagctaaactgttagaggacgccagagggacatctgtacaatgtgcacttgtcttcaattgtggcgactgtggttgcctttttgcgtctcccataaaagtgattattgctaattctcttgatgagatattcaagggccatgtagtttcctctatgtggtcacttgtggtgctgcagaagtaccgctcttccctgtagaaagttctattcctctctcattattaaattttgaaccttttctttttcagagattgcaa

SEQ ID NO: 91860 - DNA, 599 bp, Eucalyptus grandis
  Intron number 1 from transcript Egrandis_v1_0.009107m (loc us Egrandis_v1_0.009107m.g) derived from phytozome v7.0 (c hr-ID scaffold_2; pos 17205664 to 17206262)
ttcggctacgacgttggggtttcaggtaaacataccactcgttcgttcatcgataatagccaaacagaaacctttgtgaatgtagagaagttcatgttctgacaggctgcgattgttcgtccggcgacgccggtcttgttcgggtcggtccagtttcatcctttggctccaccgatcttagagagagagagagagagagagagagagagagagagagagagagagttcagatcgaagtaatctatacgaaacttcatgagtttgagagaaacagagagcgttcgttaggtgggttgtgatggagggggtagttgccggtctctcccaaccactgacgcagcaccatgaaaaattagaattagaactcattaattttgattttcttctcatcattagtaaactttttcactctaattttaatcgataaattagccaataacttgtctttttgagcgacgaaaattatcacttttccccttattttatgtgatttctctctttttgatgacatttttggtcacgtgatgcgcaacttgttacctttctatattgctaatggaattcatcttactaaattttacacaggaggagtcacatcg

SEQ ID NO: 91861 - DNA, 534 bp, Eucalyptus grandis
  Intron number 1 from transcript Egrandis_v1_0.047388m (loc us Egrandis_v1_0.047388m.g) derived from phytozome v7.0 (c hr-ID scaffold_7; pos 25657186 to 25657719 reverse strand)
ctttacttcctcatattcctcctaaggtaggttcgttgtttgtcgcctcaatctctgcttatcttgcctcactcaaaaagagagagagagagaagggaaaactcattcagaaaatgagaggaaaatcataagggaaacgataatggtattgagcacttgatggaagaagatttgctttcacttgcatttaatgctgacactcggtatttatagagatttaataatgacatcatcattggctagtactatgagatttgcataatctatcttgatttataaagcacaagatgattgtttatcaattgaattccatcgttggagaaaccaaatttatctgggcaacattttccatagcctgtataaaagcatttaaagagaaataatttttctttttcgttggtacttttgatttcaattgcactaacacatacagtcaatggaaattcccagatgtaacttgtaactgttcttaagtctcattcatctctctacacaatgattttcttgtgcaggctgacaagtctaccatagtgg

SEQ ID NO: 91862 - DNA, 660 bp, Eucalyptus grandis
  Intron number 1 from transcript Egrandis_v1_0.008963m (loc us Egrandis_v1_0.008963m.g) derived from phytozome v7.0 (c hr-ID scaffold_2; pos 8027804 to 8028463 reverse strand)
ggcaaagaacagaggttttgccagcagtgtagtaggttggtctttttcatcaatccttattttcttgctagattttctatatcactagcattctttttcattcatggcaccacatctgtacattcaagcatctggctagtattttggccttttgtgtttacctttgcctgatctagttcttgtcagtgatcaaatagtgcattcataactctgtacttgtctcctttcaactcttttaacagtttgctttttgcagcatgagcatgaaatggacttctctcgcctttgaaattgatttctcttgcttgatcaaactatttagcgtcaattgcttgcatctgagctaaaagaatggaagacaaatctgacattcgaattcataatttggttagatgccactcatttgtgcagttggaggccttgtttctcacaaaaactattttttagctttctcttcactgagattctgcaaaagataatttctactgtaaaactaagccaatcattcaaaaatgcaattataagaaatattccatagggcatctccactttgatctaaatctctatgactttcccttgtccaattgcttctgtactttgttgctactataatgtgttcaagcttttgactatccaggttccatttgctggctgaatttg

SEQ ID NO: 91863 - DNA, 286 bp, Eucalyptus grandis
  Intron number 2 from transcript Egrandis_v1_0.014436m (loc us Egrandis_v1_0.014436m.g) derived from phytozome v7.0 (c hr-ID scaffold_2; pos 58875978 to 58876263 reverse strand)
ttctgctggttggagccactctggcttcgtctcaggtttcttcccttttctcaatggcggcttttggcgtttctaggtgattagcttttgttcttcatagactaattggcataattgaagaacaccaattcacttctgagctcgttcagtctcattaataaattcatcgaacgtgacgaggattctgtgttttccacgattcgattgtctatgtaccctgtacaggttcgagttttgatttttcttgaatttcatcttttgctctgtttccctgcatagataccgg

SEQ ID NO: 91864 - DNA, 796 bp, Eucalyptus grandis
  Intron number 2 from transcript Egrandis_v1_0.025825m (loc us Egrandis_v1_0.025825m.g) derived from phytozome v7.0 (c hr-ID scaffold_7; pos 45223452 to 45224247)
ccttcgcactcgccggccgatccgatcttggcattgtacgcgcttccatctctctctctcttcccgctatcttcgtttgaactcggcggtgttcgattcttcccgtcgatttcgccacgatgggtcttgtacttcccaccgatttgttatttgctccttttcctttcgagcctgactcggtttccgtactccactggctcttccgctgtctctagattacgcaagaagccttttttcttagtgcttctttgaccgaatcttttcgtgcagaagcttttcttttcgaactggtgattcttattgcttcgagatttggtgattctcttatactctaccgatgttcctgaggtggattcctaaattgttcctcatgcattgctcctagacaattcttctgcgccgacttgcagaatgtggagcttcaacgcaatcttcccctttttattttcttcttcttcttcttctttccggttattctttctcaattttcgttcgccgtggtgttggtttttgagctttttactatttcacgctaatttgaattttaataatgaaattccgcttgttatcgtccttttcaactactttgcttcttttcggaccaaaagttacctgtcgttttggttttccttgcatctgtgtaccttgatctgtccgtaatgaggctatgaatgacaaaattcagccctttatttgttgatacgtgaaaaatctaagcttttggatctagagattaaagctgatgtttgtaactaaagcctcgtctccttctctgaacagctagagcggggtttac

SEQ ID NO: 91865 - DNA, 934 bp, Eucalyptus grandis
  Intron number 1 from transcript Egrandis_v1_0.005451m (loc us Egrandis_v1_0.005451m.g) derived from phytozome v7.0 (c hr-ID scaffold_7; pos 39688430 to 39689363 reverse strand)
tcgcgcacgacttcgttaactccgcttccgctttcgtgagtcgatgatgctcctctctcttgttttgaattttacggcgggttgcatttttgacttcgggtttggtaatgtggttgcttgctgctacgaatcgatgcggtcgatagcgtagcgttcgagttgatagatcactttgtggtgtggtacggtgggaatgcagcattttgcgacattgtttgaaagatgcgatttcattgaattacgaggattgttagaataactgggtctgatttgaagacattggaggataaagagaggcaaaatcagagaagaatcgaaccttggccaccgcttgattatgtcttgccgaatacttcccattaggggcggtttatatgatctgaagagaggtgaaaagatttcgcaatcatgtattggaggctgtaaatgcgtgctgaaagctctattgaaatgaaaaggattagttttgaattgcaaagcgctccgtatatacataggaagatatatcagctgatgttttgtataatcaaaagcttatgtcgaagtgtctttttttttttttttttaatattttaaaatttggtttaatgatggagaaaaggtggctgtctgtatgctatgcatttgctgcaaatcatcgtggatgaaccttttcaatattttcaagttttccttggcctaattttggattcgaatagtgctctgcaaaagctggatttgatctgattgataacaagttactcagtttgtgcagtttgattccctattttttttgctaatttcgttttgggtttgtaatgttttgactgcatgctgttgttaaactagcttggctcttgctaggctggtgttgtatgtcttgattcttctctgaaagtgtggtacttactgattttaaggagggggaagcaaagaaaatcgcattccaatttca

SEQ ID NO: 91866 - DNA, 769 bp, Eucalyptus grandis
  Intron number 1 from transcript Egrandis_v1_0.011764m (loc us Egrandis_v1_0.011764m.g) derived from phytozome v7.0 (c hr-ID scaffold_11; pos 11059080 to 11059848 reverse strand )
gcgattcaggtcagttgatgatggtctggctctcccgtgttccttttcagttgtttttaattctcattatttggttttagtatcaatatcatttgagctgatcaaagtttctttttcggaagatctgtttgaaatatttacaaattcagtataataatgctatgctataacttgagctcacttggcaacacaggttgatgcaactcaatgagtcagaaaacaaagatagaataccagcgagtaagttataccatacagacagacataaataaaaggcagatattggattggagtttatgtaacgtgtacaaagataaaaagaaaatgaagagagtccaaggtttacagcaggatctcgtcgtttagatttaatacatatcacaaaaagtatagattaagcatcatgttgatgtgtgcaaattaacattaaaatgcagtttgagcttttcggtagaaatgatacttagagatgaaactgtgaaataagaaattgagaacgagtgatgtgtttaggagaaccggcagatttatgataaagattttgttaacaaatgtctctagggcactcgtttaacattcatataaagaaattgtcattttcaatatattatcttctgcgactatgtgtaatcaatatgcgagagcgataaacatacatccaactcaaaataccagctgtataaataaaaattgatctcgaaacttactgccaattttgttggataatgatttaggtgactctgtttccaaacaagggcatttgtattgg

SEQ ID NO: 91867 - DNA, 306 bp, Eucalyptus grandis
  Intron number 2 from transcript Egrandis_v1_0.018790m (loc us Egrandis_v1_0.018790m.g) derived from phytozome v7.0 (c hr-ID scaffold_11; pos 15396843 to 15397148)
ggacaaaaggcggtcaagaatagcccttatccgaggtttttgtcgctaagatttgtttcagtttatttggcaaaaaaagaagtagatatagacaatatgggaaaattttctataaaaattgattatctgagaagatgctccttctaactgatctttagaaaaacaaaagagagacttgtattcgtccaatgtcaaaagttcaataatcgacgacgcctcttgcaattctagtattattagtgatgaagctgagatttcattttgattgctcatttccaggagttactataggtgcaccactcagaa

SEQ ID NO: 91868 - DNA, 345 bp, Eucalyptus grandis
  Intron number 1 from transcript Egrandis_v1_0.042082m (loc us Egrandis_v1_0.042082m.g) derived from phytozome v7.0 (c hr-ID scaffold_2; pos 11526467 to 11526811 reverse strand)
gtcgactacgtgaggtaatggtatctacagaatggattaactatttatctgcttttgtttttcactgttgttttagctacttcctttctgggagagacgaaaggaaatagagtccattttgacccgataaactccctcagaagtcatcgactggaattaagtttgtacagtaagctcagaaaagaatggcatttgcaatcctgtgtatagctagagatgagtttcattttattttaatcctaaatctttgattattagtccatttcattgataataacggtcattttctttttctattacgcttcaccagaatttactatccgttatcttagtaactgctggagc

SEQ ID NO: 91869 - DNA, 543 bp, Eucalyptus grandis
  Intron number 1 from transcript Egrandis_v1_0.035223m (loc us Egrandis_v1_0.035223m.g) derived from phytozome v7.0 (c hr-ID scaffold_7; pos 17853170 to 17853712)
ttagagttcaaacaacaggtattatatgctatgtcaagcctaaaagatgtgatgtagttaggatgcttagcttttcttataaacttcatattattttgtgaaattgtagttggttttgttaccttttttatggataggtagaccaggaaataaggataaagtgttgccggatattgtcaaaatatgattgatgagctcatggaatctgcgcggcacataatggaatcttgggtacttgttgcatatccagcactacttaagtcattcaaaattgtaccaactctctgttttaacttggcaccttaacaccatgaaacttcttccatagaacattggagaggattgccctgattagtagaggcatccctttcccatgcattaggcctagttttgtgtttcgcatcaatcttcccccaccttgtgtaaccaatggagatgttggtcatctagcattttttctcaggtaatgtccagagtggcttttcatgtattctactctgtttgaatcttttacttggtgtttctcagaaaaggtggcaagag

SEQ ID NO: 91870 - DNA, 790 bp, Eucalyptus grandis
  Intron number 1 from transcript Egrandis_v1_0.045658m (loc us Egrandis_v1_0.045658m.g) derived from phytozome v7.0 (c hr-ID scaffold_11; pos 5743249 to 5744038)
tctggcatcaccgtaagttgtctctacaatttttgctcgcaatatatgtctgtataatcagttaggaacattttggatttgttcgtggacacgtacctgattgcttgcttgcatatatattttttttctctgtttctgcaatgtaagagtttggcaccttgtctttcattgacgtcgtttgggaatcagttcgatttcagtcaccacctaggaactaacatacatgcttcataatctgtgtattcaatccaccgattagctgttgagtggatcgagtcctttgattatttatctaggggagattgaactgttatgtgcagtgctatcttcagcgcttaatgttttgctaatctatgtcgattcctacttacaacaaattgccgaatgtgtaacacggaactctgtggaggacatattttgttttgcataattttctaaagccatccagacccatcgggctctttgcatgactgaacgatggactagataaatgatcacctcttggctcttcgtcattttcttgtaaagaagaaaaattagctttgccctgtaataggaagcactgtagcagctgaataagcttggttttggcttgttgtctgttctttagtttatttgtgacttgtgagagacaaagcccgtaatttctttaattcttgtctcctcacggttttcaatcgatggaattgtgatgttaagaactctatttatgcctgacctcgaccaatttgcaattgtgctatgtttgtgtgaaacagttagaaccagccctagcatcacagacgcagca

SEQ ID NO: 91871 - DNA, 622 bp, Eucalyptus grandis
  Intron number 1 from transcript Egrandis_v1_0.008694m (loc us Egrandis_v1_0.008694m.g) derived from phytozome v7.0 (c hr-ID scaffold_2; pos 4808555 to 4809176 reverse strand)
gagagagagaggagagagggcaggagagaaggagggttaaggtatagggggagtttcattgctgcttttgggttgagtaggtaagagtacagctattttacctggtagccctggcatatgctataaccttcttcgctttgttgatacatccctgtttcttctacattgtcttcctctcccgctgtagcccccatctgggcatagcaatctttgagccttgtggggttgcatctactaaagtcctcgactttattgatctccacttgattctgctcccgaaagattgattaaaaaggtgctttcctttgctccctcccctctttcttccatgttctccatcccatcgacctccacttcccactgtaatttttggacagtgcctttttctctgttgtttttatttgccctgtctccatcttttgggtcgctgtcgtttcctagtgtgtttctctgctctcactggcttggcttgggggtgcttgggtatgctatgagcaggctattgcttagatttctgctgggctagcggcttttttatttctttgattgagtgggactctttctttgttattgattaagaaggacagggctttttgcagaagcagtgattagtgagaagaga

SEQ ID NO: 91872 - DNA, 824 bp, Eucalyptus grandis
  Intron number 1 from transcript Egrandis_v1_0.054347m (loc us Egrandis_v1_0.054347m.g) derived from phytozome v7.0 (c hr-ID scaffold_11; pos 41007301 to 41008124)
ggtacccgaagggaaggttaggataaacatcaccggtcagaccggttgcttttggcctttcttcttttctttcttacttttgttgcgtttgggcaaagacgtacctggtttcttgtctgacgagttccaacccaaaccaccatttaaaaaaaaaaaaaaattaaagcaagggttgcgagtctctcctagctgtttgacatggtaggaatagtaatatggattagtagttgtttattgcgataattaagggggaaagacaccatgtaattataccaatcacgcttgactccattcctttcacattattgagaggacttcctgtgcaattttcctgttttgctttcgtctgactcaaagttgtcggtctcttatttgcattttctttcctgccctcttccttttctcaatcttctctctgctcaaagtatcaccgcaggccatggtctcgctttacggtctcccctccttctttctttcattttccttcgtttttctatcgcaattctcaaacttcattgacactcaagctcaagattatgattacctagctgcccacgatttcaactcagtgggtgaataacgtaatagctactcacgtcactcgacatgtagatggattcaggcaattctactccgaggcaaaggaggttcttggcctgcctacgcttgcagcttctactgtaatggtaattgcaacagttgcctctttgctgttttcatcgtcacagtttatggtagtggcgtaactgttgaatacactattccacaagcagtgtgatctgccaatagaaacaatcctgtaaagatcgaggcaacattgaagc

SEQ ID NO: 91873 - DNA, 448 bp, Eucalyptus grandis
  Intron number 1 from transcript Egrandis_v1_0.007467m (loc us Egrandis_v1_0.007467m.g) derived from phytozome v7.0 (c hr-ID scaffold_2; pos 52677051 to 52677498 reverse strand)
tggactcgccaaggatccgctcaagttcatcttgggtcagtcactttactaggatttcgatgatcttgctaaaatctcgaagctttgcgtttctttctttttatgcgaagtggcagttcttggaatgggcttgtcggtgattttcctttcgtttcgttgctaaggcgagatgaagaatcttttcttcgcatgtaactttacatccgctgagcagttatgtgcagaagattcgtcgttgggattgccagaaagctgggtattactttgtttgaagcgttgtactggttcagtatatgatgtagtgcattggcaggcctgagattctctgcactatgttactcgtatttgttttttagtagcttggtgcttgttccaattatttgcagcattgcagttggtgctttgtcgtctaatagtttgtacccgcaggtcaagagaatttggggcc

SEQ ID NO: 91874 - DNA, 899 bp, Eucalyptus grandis
  Intron number 4 from transcript Egrandis_v1_0.031016m (loc us Egrandis_v1_0.027959m.g) derived from phytozome v7.0 (c hr-ID scaffold_7; pos 48914031 to 48914929 reverse strand)
caacttgtggcaaaactgcctatccactggagaaggtacattttgcttgtctcaaagagtcttgatattggatatcaattatgaggctattggtttgatagtaatgctttctgtaagagtcatttcatgcagaatcctagttttcagttgttggtaatggcttgcattatttcacagtttttatctatcttgttctcgaatggacaggcttctacctttgtctcaaggtttttaacattatgggcttcacgacttcttttgctttatgcagtgttagaaagttaaatgtagcagtcctttccttactgtgttgcattcttgatctatttgtatgagaaaatatttgctagtccttatcaaaaaaaaaaaaaaaaaaaaaaaattgctagtcaggcattacaagtaaaggcgtgatgtgttggtgagtaatctttgaatgtggaaactgtggtggcatgaattatctaggatattctgtctatttgatgagggaatacagaaagcatggttgttcttctatagagttattttctcacctggaattccaattttccgttccttcttgtaaaactctaaagcacccaaggagaaacttctgttcgagttgttggacaccccgagcagaaactgctcattcactaatgttaaacttctgcttagcatgagtctttcttgcaatcgatttcacatcagtgtgacattgcttcttgtggagtgcttgtaggtgcttaaagttgcattataacagctttctagttgatttctttgttcctcagcttcaataattttttttttaggttctaatggcttgacttatatttcctgaagaaactgcgtggctaactctgtttattaacaaaattgcaggtaacagtggagagccagagctatcacaaatc

SEQ ID NO: 91875 - DNA, 588 bp, Eucalyptus grandis
  Intron number 2 from transcript Egrandis_v1_0.003337m (loc us Egrandis_v1_0.002652m.g) derived from phytozome v7.0 (c hr-ID scaffold_7; pos 44538536 to 44539123 reverse strand)
ccatacaggtcagttttctgtggtcacactgttatatgaattacacgttaattatcaaccatctgatgaatcttgtctaacaaatgattttttgcctgaacgatggtggcttgttccttatgctgctgttgttgccattttccttcgatacaatgtgatacttctactctttatcttgacacagtcatggtgtacagaatgtgactacagtatgtttcttttatgccttctcctgtgaccaagtaaattgtgggcttttgagtgtctgatggtcaattaagaattagaaatatttgaggaaatttgaaatcccttactggtggtctggcggcttatagttttgagttcctcttagcaataggtactctttgtagttcatcttctttcccagtgggaagaggtttcatatgattgctttcttcagataaatggatctgggcactgtagaaactgacccattaatgaatcatcaatttgcttggagcagtggccatgctaattagaatctgcttttcatcaatacaccccgtctaatattcattattgttttcagagcttgtctggacatagcagtggaattgattcagt

SEQ ID NO: 91876 - DNA, 400 bp, Eucalyptus grandis
  Intron number 2 from transcript Egrandis_v1_0.034252m (loc us Egrandis_v1_0.034252m.g) derived from phytozome v7.0 (c hr-ID scaffold_2; pos 4125026 to 4125425)
ggtgagttacaaagtcgtcaagctggacaaggaaggtgagtttctcctagcatcttgaaccacctgcatataatcttgatctgggtatataaaccatcttgttctttgctatttagaggctgattttgttgaccaagcaaagataccatttttaagcggatttgctggtttagtgttctattcatgtgtaaaagccagctgaaaatctcccctgcagttgctcgattagccccaaagatccgtatcttttgattctttgactgtgggtttttaactataaattgttgatatttgcgtgattgtgctaatgatcgctttatctacaagatgaagaactcatgttgaacatgatctctttaacactacgttgttcaaccatctgagtttccttttgaaggtg

SEQ ID NO: 91877 - DNA, 727 bp, Eucalyptus grandis
  Intron number 1 from transcript Egrandis_v1_0.046215m (loc us Egrandis_v1_0.046215m.g) derived from phytozome v7.0 (c hr-ID scaffold_7; pos 51589477 to 51590203 reverse strand)
aagcaagtaggtaactgttattatgtggaatcatctttatatcatgaggcaataaatcaaacatttatttctctctgcatattgatttgctcatgcaacttagtatgcattggttatttctctctggacattattttcttacaacctagtatgcattagtcagcacgtcttctggctctgtgcatgttctgcccccttgtggtgattctctgcctttgggtctgtgcacatttgtagttctactttctggtaactgtcatatgaacttctgtattttgttgatgaacataggttgcattagaaagttacaagaaaatgaaaggcaatgttcccgaaaaattggtctctggatctgatgattttactatgtttttgtgggaaccttctgttggtaagcatccaaaaacacgaatgaccgatcaccaacaggtttgtgtgtgcgtgcgtgtgtgagggaggagggagggagattgatttgacagctgcctgcttttgctgtgtgattgattccctaagtatttactgtatttagaagactgtttgtgctccagtatatactatcaattgccataatgatgctaaataaggacgtactccacattgtggtcctggtggcactggttcaatggatgagacatcctcctaatattttcttgaggctaatactttagatccttgttaggtgtaaatgcgggaaattatgctttttgtttgcagcttgtggatc

SEQ ID NO: 91878 - DNA, 552 bp, Eucalyptus grandis
  Intron number 1 from transcript Egrandis_v1_0.012772m (loc us Egrandis_v1_0.010867m.g) derived from phytozome v7.0 (c hr-ID scaffold_2; pos 37886732 to 37887283 reverse strand)
cgctgtgagtgtgctgcaccaaccatgcaatgcattccaatagcaatttatgagccatcacttgtctttatgaagtctttgttttctctgttatgtttcatctgttcaacgtcacaaagatgctttctgttggactacagtaaaagtacaggtcatattgataggttctttccaattcacgaatatctcttgggaagaagataaatacaacttgtttagcttgttcttcatcatatggcctatccccggaaaaagaaaatcattcacagttatattaatttggaatttggtgctcttgaaataacctgctcgcgtgggattgggactattacaactattggggaagtatcaggaaaaaagggaacaaggaaaagaaagcatgaaattaggagctgttgtttgggctgcctctccatttgactccacaatctctctgaccatattgtgctgcctcaatttaggctgtatttccttgcaaggttactcgcagtcaccaaggcaccttgacaatggcaagcaattactgtgcaggtgggttattcatcaccagct

SEQ ID NO: 91879 - DNA, 976 bp, Eucalyptus grandis
  Intron number 3 from transcript Egrandis_v1_0.043251m (loc us Egrandis_v1_0.043251m.g) derived from phytozome v7.0 (c hr-ID scaffold_2; pos 37699227 to 37700202)
cgcggaatgtagctaacgacattaactttgaacttcggcaccgaaggaagagcaagtgagaaaaataagaatgcgatgcttgtttcacgtccaagaggtttctgcaactaaagggtcatgcctttctgtggaggacctcctatgatcgctaagattcctaataagagctcttccggaacgttccaagggtgagcgatacagtaattgagccaaagtttagaattctcttgtcattagtgtcggtagttagtagatttggcggtgcgatctcgtccaccaaacgaattctcgattattggaggtaatcaaagggcttctagtataagaaggggtgtcctcttcctcatttgtaagcatccaaccattaggcaatacaaaggctcatttctttctagagcttctctctttaggaactttctctctctgcgatctgggtgagcaagcaagtgttcgatcaatcaagcaaggcttggcttaggcattcggacgatccatgtcgatccaaaagtacctgagtcgtcacatggtcacgatcccaatcaatcggcttgtgacacttgcatgtcgtagatgcggctcgtactaatgaattgtagagggtccatgataacgtcgctctatatacagtaatcaagctttatcaaagcataaattaataacgtgtttcggctaaattttgatatgcgagaacttgcttgccacataattgggaccaaaacaagattggtcgcaatctaagactagcaagaaaaacttgacaacctcttaaattacgattcgacattgcttatatgaagccacttctacattgttcaaagcatggtgggaacacattttacccacttgtctcggaaaaggaaaaaaaaaatcttaaggataagccatattccactacatgagaaatgattgagtgatagtttttattttactatgaaaataacagtatattctagacaaaaaattaaatagcaaataa

SEQ ID NO: 91880 - DNA, 747 bp, Eucalyptus grandis
  Intron number 3 from transcript Egrandis_v1_0.012397m (loc us Egrandis_v1_0.012397m.g) derived from phytozome v7.0 (c hr-ID scaffold_7; pos 47354565 to 47355311 reverse strand)
ttgtgaaaatttttaatccatctacgatttctttggtaagagcgagatagatatgatcattttctctgctacattattatgctgatcatttctttctctggatatcttacaataaatgactgaatgatcaaattacataacctcggggtggttgtcatctcaaaattccaggcgacataaaaaaatttgtgtcaatcagtcataactggaaattgctgtgtttagtatagcaaaagttcaattgtgcaaatgaatatatatacatagatacgtacataaatatatatcctatcattttcatgtttttattttcttcatataagtggcttttggaagatcattagtttttcccatttgtctactggtaaatttcagagtttgggaggggtagtttctcgaggagcatcctcatggtcattggaccagctactagctaacatgtgtgctttggatcagggacatctcagaggataacactgaggaatttaaacctaaaatttcagaagaactagctgtctaataaattgaacacagtcgaatgtcttataatttctgtgatcgagagttatgaaatgcaatgtagttataatgacaatgattggaacatactattcctcaccttggatttctctgcaaatatatatcaatgaagtacaacttagtcaaggggaaatgacaacaagctgacaaaggattctttccattgttttaggtgggtgagataccacagggcctcccaagcttttc

SEQ ID NO: 91881 - DNA, 411 bp, Eucalyptus grandis
  Intron number 2 from transcript Egrandis_v1_0.003957m (loc us Egrandis_v1_0.003957m.g) derived from phytozome v7.0 (c hr-ID scaffold_2; pos 23932494 to 23932904 reverse strand)
gaagaactggtaacatcaacagcgtcactcttcaggtctgcttcagctcgacatttctcccgtcgctaagattttggtattaagacagcgtcgccgcctgttgttcctgtgttcttttttcttttgcgagttcatacatgcgaagttccttccttttcttttgattcgttaggattagctcaattttgaatttagcatcggccccttttgtgcctcccaaaggtgactcctgtttgatgagtttctctgctttagttccagagtgaggtgtcttcttaattattcttaatttgttatcatgtagtaattccaacagttgtgttcttccaaatgaaaattcttttgtctaccctgtttacggatcgatttgttcaaggcaggggagcggaaacacttgtttgtgggattgga

SEQ ID NO: 91882 - DNA, 879 bp, Eucalyptus grandis
  Intron number 1 from transcript Egrandis_v1_0.012744m (loc us Egrandis_v1_0.012744m.g) derived from phytozome v7.0 (c hr-ID scaffold_2; pos 21533190 to 21534068)
cttccgactccaactcagtagcatttaaatttttctttttcttggtttgtattctgaaatgttttcgatcattatgttttctaaatacaaaaagcatagaacgcaattatcttgaattattttgcaccatcctactacatctgataaagaaacagaagaagttcccgttgaactaaatttaagtgattatcctctaatttgttttgaacttacaattttatatttgctgtagcgtcctcatgtcatagcagaggaacgaattgagagattgaaaggagaagtggggaagatgttgacaagtgcaatgtataagcctgcggaaaagttgaacttgattgatcagatccaacgcctaggaatcacctaccattttgaacttgagatagataaggagctggaacaaatccgcaaaggttattttgagtatcactgtgatgataacgacaatgacctagacacggttgctcttctctttcgattgttgagacagcgtggttaccgtgtttcatgtggtatgtgatgctcaattctcattgatcgatcaattggcaaaattatattgctgacaaaagtttaatgatttattttattgatcatatttaaaaaaaacaaacatcattaacatttttagtttactctaattttgatttgttcatttgttaacctttatctctatatgattctcatatctcgagttcttcaattttgctttaaaaggtgaatagtccctccttctaatttcgtttagtatgtaaatttttcatcatttctagttgatctaaatattgaacaagatgtttttcatagcattttatgatagcatcttttcccacaccccatttggccatacagaaatctttaacaagttcaaggacggtg

SEQ ID NO: 91883 - DNA, 658 bp, Eucalyptus grandis
  Intron number 3 from transcript Egrandis_v1_0.048680m (loc us Egrandis_v1_0.048680m.g) derived from phytozome v7.0 (c hr-ID scaffold_2; pos 46850730 to 46851387)
gtggaagttcttcggaaacagagtcagtgatcaaggtatggattgtacgaagtgtttgcatttggatacatcctcattttgtcctagttgttggcaaaaaggaaaaaggtgctgttagtttttacttggttttcacgcatcctaaagtgaaccaattttggtttgtcacagttgttgaaattgttacttttaccatacagttaaattggtttttgagaaaccttgaagccagcacttgtgccttcccatgttcacccttattccaccctcttgtgttttgattttcctttaagagtttcttctgttacgttgaaatttgttactcatggttgttttagtgtccaatctcccttgttatgcggtacgatatttgggtgaaaaattacctgtgctttgaatgtggctagaaagtgacgtgagttgtcactcatcattagtagtccacggacttggtagaacccgcaagtgtaccttttgaaattaacggatttcattcttgaaaaataaaggaactgtgagtagtttcatgtcataccatcatttctgctttcgttgacatattttttattttacttgcttacctattttctttattcttttttaaaattatgtgttgttcttttatcttttggttggcagtgtcaggacccaagctgcc

SEQ ID NO: 91884 - DNA, 1026 bp, Eucalyptus grandis
  Intron number 1 from transcript Egrandis_v1_0.021204m (loc us Egrandis_v1_0.021204m.g) derived from phytozome v7.0 (c hr-ID scaffold_1515; pos 5280 to 6305 reverse strand)
ctcagaagatcgagagggtcccagtgccggtgcaggtgccttcgctgtgctttaaatctctgcatgcggtttcgttcctcgtggccgcggtgccggttctgttcttctttggtgatttcgtctcgttgcccggtctccggctcgcgccttgcctgaaaacgacgagagaggtgctcatttcgtgcgcaatgttaacgattggtgttgctgaaaagttagtgacattgctcgtgaaggctggcatttctgctcgtgattctgttgttgttggcgtactgtgtgttctgtgtgcgatttgtccgtgcattgcagtcatctcgttggaccagtgaatggacccctactacctaacccacgtgatccccgcgacaaagttccctcttttcaagccctatttcgcttcacctaatattttctccacgttgaaataatgtggttaaatagataatatctattataattctgtagatggggaagaaatcacggtagtagcaggggaaggaagagggggtttagattgcagtaaaagctttcttcttgtcgtgcgatattattgatcggatgagtttcagcctgtcgacgctgtacgcgggcatttgaacttgggcaagttttctggcttctttctttttcactttcggaaatggataacatgtagatgaaatgtagacggaaaattttcctactggtgagtgttgagtggcagcctgtcgacacttcttcaaaccgaaactaaaatgaacaagagatagaaaagatgatgtggtgaaattgttagcttaattgcagtgatggggccaatattagttttatttttgcagggttgcaaactgtaatttggctaaaattttgggtggtgtctgtgatttaaacaaacctatctcagagctgccgtatgatagacttatcactcgggccctgtgcttatttgacaggacaaagtgttcaaaatgcctgacgtcaaaagctgctgtacgatagacttatcattttaatgcttgtcacacttgcagattgaatcgtctg

SEQ ID NO: 91885 - DNA, 882 bp, Eucalyptus grandis
  Intron number 1 from transcript Egrandis_v1_0.045102m (loc us Egrandis_v1_0.045102m.g) derived from phytozome v7.0 (c hr-ID scaffold_2; pos 2205588 to 2206469 reverse strand)
aattaattcaaagtgagtactacaatgatacagattctcggttactcttcttttttcgctttttttgttttttaatccatatgtaagatatcatattgagcacagaacctatgtgggtacgatatccactaaaggtcgcattttccaagtcaatcctacaattatcccaaaagaaaatttctgaacccaaagaaatataatgtcctgaatcacacatgaaaacctaataaccccagtaccctcacacgatgtcccaaagactcaaatgtctccaaggatccaaccagactgctccaagaccatagccacagagtacttcaacatgggagcaacttcaataatcatcccaagataagcaggcaaagatactccccatctagagcaaagatccttactttgtgcagtcaaaaccaagtttttggcaagtaagagaatagacattttagtacaaataacaaatagcactcttgagtactcgatcaaccgaaggatgaatgccactatggactgcatcttgtctctccctccaaaggtgatagattgcttcagtccgtgcccatttcagaaatatcttgctcagagctttctccttagcagttttcagcatccaagaaagttcaacattcctgtcaccaagttaatactgttctttccgaccaaaaaaaatttaatattgttctattgtactttgatagctatctgtttctctagttgtaagcatttctctaagagttagatgacatagtgacatagtagtactgtcctccttcagtactcacctgcgaaggcgaaattccatacaccgaccgctaaccgagatctgaccttttcttgttatttaatgtaggcattgagccacttgtaacaatttttcacttcgat

SEQ ID NO: 91886 - DNA, 561 bp, Eucalyptus grandis; identical to SEQ ID NO: 91725
  Intron number 2 from transcript Egrandis_v1_0.016925m (loc us Egrandis_v1_0.016925m.g) derived from phytozome v7.0 (c hr-ID scaffold_2; pos 62623846 to 62624406 reverse strand)

SEQ ID NO: 91887 - DNA, 587 bp, Eucalyptus grandis
  Intron number 4 from transcript Egrandis_v1_0.018299m (loc us Egrandis_v1_0.015594m.g) derived from phytozome v7.0 (c hr-ID scaffold_7; pos 29699418 to 29700004)
gaaaggcaggagttactcagtaagttcttctcctgagcaacaatgagctagatcttcagagtacacttaattttattagcacctcattttctagcacatgcttttcattaaatagacaattacattccgaaattcattaaatagctaaactcacttattctttttagagggatagtggtgttctttgagtatacaaataaattcaatgaaatgcaagtgtccaagtggtcacaaatgggtttgctgtattttttagctcttggttattatgggtttaaaagtgctgacattgcttgcctcgtagctgttttgagtaatagcctcttaaatttgacagctgatacagtaagttaaataattttacctgtgtggataatctctaatgagtaagtgttttcattccttttaatctagactttttctctagactatttgatttccatgtctgtttatgccagatcatatgtacaaaaaggaatttcatgattccttctggtttcttcccatttagttcttagaaggaagaaaaaggaaacggaaaaataaatgttggatttcttaactatatttcgtttgtcagggacacc

SEQ ID NO: 91888 - DNA, 746 bp, Eucalyptus grandis
  Intron number 1 from transcript Egrandis_v1_0.005332m (loc us Egrandis_v1_0.005332m.g) derived from phytozome v7.0 (c hr-ID scaffold_11; pos 38142432 to 38143177 reverse strand )
gcctctgcaattcggcgttgatttgcctctccgaggttcgtgctcctcgtcccccccttcgcctcttccgtcggtggatttgtctgctgcgcttttgggctttaggtttttcgctctctcttttttttttttttttttttggtttgacggcgtctttggcttgccggggggacctcggttgtcagtgattccgcgcgggggcgggtgggaaggagcgatttttaggttttccgttcttttcgagtgtcgctgtgcggactgctcggcagcggcggcagcgtgtgcgtgcgtgggggagggagattagtggattggtgaagtgttttttttctctcgaatgttgggtcgcgagtgaagcgaatttcttcctctgttttctcgtgcaagtttctgccttttctccccttcgtttcgaaataaccactgggcacgcctttgccgtctaaggacggcttcctgttttctcctggtgctatgacttcgtgctgggatccatctaattgtttgggggcatttccctttgtgtgtgggtatttatttatttattttgtgttttttttctttgggcagtttgcctggaatatgtccagggatgcttaatcatgggctttcatttcaataataagtaggctactcgtttgcatactttctgatgctgctgcttaagctaagcttacaaaattttgatcttttcttgtcacgggcctgcagttcctggttgctgaagtggggagctcttactggag

SEQ ID NO: 91889 - DNA, 427 bp, Eucalyptus grandis
  Intron number 3 from transcript Egrandis_v1_0.044507m (loc us Egrandis_v1_0.044507m.g) derived from phytozome v7.0 (c hr-ID scaffold_2; pos 3689764 to 3690190 reverse strand)
aggtgatcttctggcccaaaagtttttaagtattctagtattttgtttcaggtgctcctctgttggtgattgttgattttgaagataccattagtattaccaatcaaaacataatagtacttttcctctgcaagttctgactatcctacaatagttgtatgcttattctgaaatactgtaagaaaattttaatgtgaggatgatgtataacaagaagagttgaatagttagacctatttggattagaatatgatagaaaaaaatcgatgcaacagtaactcgcgaacagtgaattttatctcatgttcttatttcctgattctggctttgtattttaacatttagtagtctactctctgttccacatatttagagttgtgtgatctgtttttcacattcaccgtttgcccgcaaggacagatccaaa

SEQ ID NO: 91890 - DNA, 640 bp, Eucalyptus grandis
  Intron number 1 from transcript Egrandis_v1_0.052360m (loc us Egrandis_v1_0.052360m.g) derived from phytozome v7.0 (c hr-ID scaffold_7; pos 6725082 to 6725721)
ccaaaccacgtaaatccctgtcactgttctgttctcatataatttattttctgcttgatcatttccaatttgcttgtgattctgcacacagcaaaggacctacacaatgcacatgtccaaaagcatttagtaaattgcttatggggcttctcatccaatcaaatgtccaatagacagtctttaacttttgccaatttcttccacactcttcaagatccaaaatgacatactagaactctttggtcaataaagcagttgacttaagctttggatgatgtgcaaatacctatatttctcaaatactttgagagcatagcagatcatcaaagtgtggattagcaatccagcatctttgataggagtgttttgcgtaaacgaaggcttgagatttatgcggagtgtttggactgtcaaattattaatctttgcctgccttttcagaaagattaaccattgtgcaagctactgtatgtaactgctgaaacgattgtgggaaacccatcatttcttgagatattgtaatgcttgcatagaaagggattgtttctgatgcaccataactttttatgaaaggttctttgtaaatttattatattcgaccatcatgcattgcaggcacagctagctggttttgttattg

SEQ ID NO: 91891 - DNA, 410 bp, Eucalyptus grandis
  Intron number 3 from transcript Egrandis_v1_0.001262m (loc us Egrandis_v1_0.001259m.g) derived from phytozome v7.0 (c hr-ID scaffold_7; pos 31482073 to 31482482 reverse strand)
agtatttggtcctaagacattggtttctttttgaagttccttgtaaagtagtatgaatgaggtgcttggtttggttccttttctgcctccccaataaaaaatggaaaatttatgtaaaactttgattagatgtaaagcttgaatgttaatagtagatgtttaaaaattgaggttcacaacatataatgaactttggcttcacactttaggagttaaaataaaagccataagctaataatccacagtgcacctaattgtgactgtgccattactttcgttgcttacaatttgttagaagcatcttgatcttccataatttataagtcaaaaaagtgtcgatgttttcactgaagtggtagacatgtttgactgcagataccaaggcttgggaagtggacactcttagaggg

SEQ ID NO: 91892 - DNA, 806 bp, Eucalyptus grandis
  Intron number 3 from transcript Egrandis_v1_0.012472m (loc us Egrandis_v1_0.012472m.g) derived from phytozome v7.0 (c hr-ID scaffold_7; pos 48212736 to 48213541)
gcgaagggttattgaatctgtggaaagtttgagaggtaatgatttctgttgcataccctgaaaccaacccacacaccactgaagatttatgaggtgtggagggcaacaatttttacgagaaggcaacctctttctacctagttcccattgcatgcctttgatttaaagggaaaatgaagcggtattttgctttctcgttcctcagggcatgtggaaagccactgaagaacagataaccactaaagatatggagttgcaaaatagaaactgaaacgatgagaagctgctttctttttgaatttgtattcaaaaaactttcttcagctaccgtgcattctatttctgatgaaaatatttgaaagagacaaattgctgtcctctaaactgtctgggtttatgtcagaaactgtggattaggtgcagtagccttgctttggttccgctgctgctagactgtagtcctaaagcaacaaatagttactgtaaaggctgttggcttttgtctttaggaatcaagcacccaagcacttaacatccttcgaaggaagcagagctttgtattttcttctagtgtgtcatatccttccaattggatgagcatctctaaagtaagcagtacaatcatcatgctagagggccatccatcagctgtgtgaatggccctgaaccgttaaaagaaaattagaacagggataatcctggcaatatctcatcagataacacaagtcgagattcttcagtgaaatgcggtttatcttgtgattttaacaggtgcaaccgtggaaccatttgggtcttttgtgtct

SEQ ID NO: 91893 - DNA, 909 bp, Eucalyptus grandis
  Intron number 2 from transcript Egrandis_v1_0.023888m (loc us Egrandis_v1_0.021148m.g) derived from phytozome v7.0 (c hr-ID scaffold_11; pos 30513422 to 30514330 reverse strand )
tgagattgcccgattccgagccctgcactagccaggttcggtgattttctccacctcttttcgaatgaattcgaagtcgtttgtgtcgtttgagttgtttttttgacgagggagtccgctcaaatgatccttcttttgggtatctttttccacttttgatggactctttattgagtaaactgcgttgtccgtggttctccatgcgtttcgacttgattcgtagctaagtgtaatgttctctttttctcaaagtcctgaagttgaactgatcaaataggacgcaacgtgtagagatttttatagggtggtgactgcagattcaaatgattggcgaatataagtccagacggcttggtcaattatgtggaggaatttaggggtttaccgcattctggaatttatgcattgatggactactgcaaattatgtgcggactagtgtttggaatattgctaaatatgaggagtgggagagtctaggttcttgccttgccaaccagaattccagtaatcatgtccaatgagttaaatatttccgcgtcagaatttccttgtcaagcagtgaaccaaggattgtgcatatgctatgggtcctaataaaggatgtccagtaaccttcatctgattgtttgccccaggttgaggggttgatgttcctaacttgaaagtgaaggaactcccagtaaagtcttatatgcatattgcagtagttccctgccataacaaccaaaggaagcctgcttaatttcccttgtaccagttgcagctaactcgttttcactcgatgggaagctaactatcaaatcgaaaacaatgttcatgcctttataataagggggaaaagaatgttgtttatccagtggttgttcttgcaggaatatataaaatctgcttttagggacattgtctc

SEQ ID NO: 91894 - DNA, 765 bp, Eucalyptus grandis
  Intron number 1 from transcript Egrandis_v1_0.053890m (loc us Egrandis_v1_0.053890m.g) derived from phytozome v7.0 (c hr-ID scaffold_7; pos 44116153 to 44116917 reverse strand)
ctgcgtcgtggcctcctcggggatcgcgtttagcagtacgtttcattcattctctacgccagacgtttatctatgatccatacgtagattcatgcaaacgcatgcgcatctcgagctttgactttgttttctcatgatcatcgtttcaatgaccttgcatatagtttctcaaatatcatatattccttttatggaattcaaatattagacttcttcaagtacaatctttccatacagtacaaagaagagagatattcaaacagtctccatataaggtcttatttccatgcaatttcaatttacctttgcgtacttgctgatgatgttaatcagttaactatatagacaaatctcccatattgtttagaactctttcctttatgcttttttcatccaagcgtttcctatgtggaatttctgatgcccaagtggaaaataaacgtgccatgagagatcatctgtgcaccagatgaatcaaatgtacgtagtgttctagagtaattttgaaacgttaattacgatgttcatttatcactaatcttgcccaagcaatgttgcaaacctaaaaccgatctagaaaattgttttgctaagcaatcatgtggcaaattgcatatttatcaaacccgttttcacaaactttggtcttcttgctgtccgtcgcattgcccattacacatgaatctcgtatgagacgctttctaataagatatctgtatgctaaaaataccaataacaggtggtacagcgagctatttgttggga

SEQ ID NO: 91895 - DNA, 870 bp, Eucalyptus grandis
  Intron number 2 from transcript Egrandis_v1_0.055193m (loc us Egrandis_v1_0.055193m.g) derived from phytozome v7.0 (c hr-ID scaffold_11; pos 36341565 to 36342434 reverse strand )
agaggttcgaggtacttgaattctgtttcccaagctgagtctttatcttcatttttgctgttgcactgtgtcaatagatcaggcttcagtatgcattatgtgaattttcaattccttttgtctaaatatgatgacaaactgatatctttctagtaccttgaccccttttgggtcagctgctagtggtaaatgtcgcctgttgaggtagccatatctttatctcaggaggttcagtatgtttgtttccatcatggttagcctaactactcttgtgctatgcttggggtattaagtgcccgaatcttcatgctgttccctttatacttgaatcttctctccctttttcctattcttttctttttgatggagttggatacattcatatttatagtagtttacacattcatccttgttatgcatatgaagcaaacaagatctgctagacgtgataatgcttagaggctcgaacatgtggtacgagatttagtaaaatcttttgatatgaccatagttactgcttcatgcaatttccatcatgatcctccttgatgttgccattctttagtgacaaccccagtttgattgcctacacttcagctgcttttctccaaatttagaactcaatacatatgtaaatgtaatatgcgaaatttttttaggttggaatatatatagagttggagcattaatttgttaactttgtcagatgactgtcccacacttattttccatctcagtgagaggatcaagctaactttgttgatgatgattgtgttcctcaccttattttcactggttgctgactttagcaattgatgtttggacctgtgccaaccatctctcttaaccttctgatatgtctttttcagg

SEQ ID NO: 91896 - DNA, 495 bp, Eucalyptus grandis
  Intron number 3 from transcript Egrandis_v1_0.027669m (loc us Egrandis_v1_0.025774m.g) derived from phytozome v7.0 (c hr-ID scaffold_11; pos 4447531 to 4448025 reverse strand)
ggcttattcacaaggtatgcttcaaacctgcgtttgatacttgaatgagaatccgtttccttttgcccatcagttgccacttgctgggttgtcttcttctagtctagtcgtgtgatcacaagacactgacaaggttaatggtgcacttgtttctgctactgaaaattgctatttatgctgcatttcgagcaggaagagtttcagcttgcacttttccggaacagaaattgtagaaatctttttgccgacagggtatgtaacatagggtcacttctatttgatggatatcttttcacttcatttatcttgtgtaatctgatacgattaaccgtcccacttagataaaaagagccgggatcccaaatatttttgatcttacaaagtgccactcacaactttttgtgattttgctcattcattagagtaatgccttttttttcctgctgatacatgaactgtgagtatcatattttgcagatatttgatttgttcgat

SEQ ID NO: 91897 - DNA, 875 bp, Eucalyptus grandis
  Intron number 3 from transcript Egrandis_v1_0.047928m (loc us Egrandis_v1_0.047928m.g) derived from phytozome v7.0 (c hr-ID scaffold_7; pos 1075043 to 1075917)
tactttgaaggtcgggatcactattgtctttttgtttaattggattatatgcttcggttgtccacttgcctcttaattgggttgttgtggttgcatgtaccaatgtgcatctgaacttttagtaagtttcccttcacgttctcatggtaaggttgattgtgatatttcaagtaaaatcaatgggaaggccaattgtgatatttcaagtaaaatcaatagggaaggtcaatgatatataaattaatattcactatctattattaaagtatttattttgatttagttaaataaaacacattgactatataaatagacaactatcgtttgtaacttataagcttttatggtagcccaaaatactttactggaagctagatccatcccctattcgattagggacatattagatcggcagtatattgcttcacctacacgaaatgggctaacttgttacattgacgatggactatacaaaaaacttgtcccgtgattatttgccactttaatatgaggaactagacatttcttactggaggaagacagagccgtgtcggcagggagagagagggaggaagggggtttgatcaaagcgagagttttttctattagataatttctttcaaacctacaaaaacctttaaaaaaaacaaaaaaaattggagctgcactaagaagataaaaaaaagacactactgatctttgaatgcgttcatgctttttttgtctacatatagcatgcaatgcgaagaatgctatatgtagacaaaaaaagcatgaatgcatttaaagaccagctatgtctttttttaccttctagtgcagctcaaattcctttttgttttttgtaagtttgagacaaattatctaatagataa

SEQ ID NO: 91898 - DNA, 810 bp, Eucalyptus grandis
  Intron number 1 from transcript Egrandis_v1_0.025381m (loc us Egrandis_v1_0.025381m.g) derived from phytozome v7.0 (c hr-ID scaffold_11; pos 18376089 to 18376898)
gctgcgtatcgaccatccttgcattgcaacaacaggttcacaaaaacactgacttttgtgcaaaatattgttaaatctctctgaatcaatgatgcagaacaaacgcagctccgacagcaaataagataattaaactttggggtttgaattacctttccctttttgctccgcttgacttgatggctgattccatagagattttctaccaggaaatttagcagagaaaattaatcctttgtgaccaatgtattcattgcacaaatccagcgtatctgctaaggatttaatagttttcaaaactcttcaagtaagatagaacggctggccgatcccaccataagaatcgtacaaaaaatcaacctttctatctgtaacagcaaaagctctctatcctccgaccatttcacgccttgatggaaagccgatcagcaaaaacatgagaaaagatagtgaggattgtcttaaaaaagtaagcgaaacggtactctgacccaggttctaaactttgtgttggatgctttagatgaagcgcttggcaattcctccttggcaaaatgctaggctaaggatctaggactaatccagcaaagggagaaaagaagagaatagaactcaaatgggttcccagcgttcatttctctctcttgaagcctgactctcatctgtttcccattgattgcccagtagcatccgcgtgttccgcaatcttttctaaccaccagagaacaaactaacgagagcgatgttctccacaaagtaatgcttacgtctgcaggtggcgaccctccaagcggagctctcgctggtgca

SEQ ID NO: 91899 - DNA, 650 bp, Eucalyptus grandis
  Intron number 2 from transcript Egrandis_v1_0.016518m (loc us Egrandis_v1_0.016518m.g) derived from phytozome v7.0 (c hr-ID scaffold_11; pos 44608971 to 44609620 reverse strand )
cgtactccaaagggtgagcttcaatttgatgcaatctcaaagcaagtagttatgttgagtggtgctggtgacgtcctttcccttttcttccctttttcggagttactgttttgttcgtcgattcacatctttagtgatggtgtcaaatctcgcaagttagtgggaatccgagctttacttttgttgacaccactggatatatgattaggtaatacaaaagattgccaaacttgttgtgatgcattctcttcggcgagcttaggtacagtcctttagttttttttttttgcttagattttggctgctccatgtatctgttcgcctgttatttactgttgaatacagatcctaagccaacttatctaaacacttaaaatgttaattgatgagtggttaatatctaaatgctctaaagctgtctcctatgcgctagctaggcttttgcttaagactgatgtgtggaagttgagtatttacacttgttcatttaactgtttaatccttcagatcagttagcatcaatctcacaaatattacccagacaaagggtgttttccagaatgagattacacatttttttcttttcactgaagtcctgtcatggaaggattgacttgattttccttttggcaatgcagggagaacaccaa

SEQ ID NO: 91900 - DNA, 737 bp, Eucalyptus grandis
  Intron number 3 from transcript Egrandis_v1_0.023192m (loc us Egrandis_v1_0.016742m.g) derived from phytozome v7.0 (c hr-ID scaffold_2; pos 1692187 to 1692923 reverse strand)
ccacaaaagctgatctcttcaggcaacaggtgagactcactttgcggttttggcaacatttaatttgagtggtgaccatttatcttggtggcaagttgtcatcatgtttttacaatgaccaacaccaaagtgatcactttttaacctgctgcatgacgtcgtttagaggttatatgctgactgggcacatcgatgagccatgtaggattgaaaaattaataaaatatggctacgtcagatttctggggacctaaatcggagttggcacttaagtgattgtttttttaaaaaagcagcacttaaataattcgaaaaaaacttttgacattaaagtgagcgccatacataatttttggcacttctagtttcattttcccttatttcattagagagtagattcctaggtcctgcaggagaaaatttcttcatgtgtggataatgcgtataggcatccttatgtatctaacgcttgttttactaaaacaatagatacccaaggcttgaggcctttagagtagtgttctgtggttttactttgaactgtcaacttttatatctgtgaacagtaacgatacgctgttactccttgatgcttatggcttttgccacaatctgaaatgcttcctgccatataactgtttgaagttgggattcattagggactgaaaatatcatattataaatagacaaaatggtgtgattgtttgggaacttaattattgcagattgaaggtgga

SEQ ID NO: 91901 - DNA, 246 bp, Eucalyptus grandis
  Intron number 2 from transcript Egrandis_v1_0.023192m (loc us Egrandis_v1_0.016742m.g) derived from phytozome v7.0 (c hr-ID scaffold_2; pos 1692943 to 1693188 reverse strand)
gattggcccctttgtttcgtatccatgtagagccctttgaaagcatcttcataatcatgcaaggacaatatttttcatgggttttgatgtttttatatgataaactgccatttacctttctcgaaaatgacattctggttatccagcgatgtcttgtttgttgcatttcctctagaaactctggctacacgtcttttctttgacatgatagcggttcatagattggatcgccttgtctcagggctc

SEQ ID NO: 91902 - DNA, 353 bp, Eucalyptus grandis
  Intron number 2 from transcript Egrandis_v1_0.010433m (loc us Egrandis_v1_0.010417m.g) derived from phytozome v7.0 (c hr-ID scaffold_11; pos 20204517 to 20204869)
aggtatttaagtctacaattttgctgaactttgtactgaatacatatagaagttgtccaaatttgatcatattaatgaatttgatattgtgctagacctttgataaattatgccccaactttatcccggtattggcattagccttgttccattggagtttaccacgtaaggaaacttgaattggtttcttccaattggtttttagaaaagtcttctgtgttttttatttatttattattttaatttttttatttttcgtcctggaaatttatcaactttccagagagttaccgttgataaaactttgctgtatatcaggcaaaactgagggaagaagttgcctctttggaggg

SEQ ID NO: 91903 - DNA, 959 bp, Eucalyptus grandis
  Intron number 1 from transcript Egrandis_v1_0.020006m (loc us Egrandis_v1_0.016494m.g) derived from phytozome v7.0 (c hr-ID scaffold_11; pos 23878082 to 23879040)
tactctgaagcgttcacagttgctggttgtaagtacttcaagattgttttattttctatttttcttttttttgcggttgtttcttgatgatcgtatgttcatcgggttgccgagtgattctagcgtcatccgatcctttttgagcaggagaattctggtgttccccaagggaaacaacacggatcatttgtcgctgtacatcgatgtccccaatcctaaggtgttgccgaacgggtggaccagaacagccaagtttatcctgagtgtgatcgatcagaccaatgatggtcgctctgttaaaaagggtttgttcttgaattggattgatttttttttggaatctcttctttttaatgtaagtgtatgatggctttctgtccgactggttgcgcatcttgattttggaaaatcggcgacttggagaaggagggtctagatgagaacagaacaggttaaaagaagtagaaagagagatattgagctagcagagagaatatgctttcttgatttttcgtccgttaggcctcttaaggccgggtgagcttccatcatgcgcacacagctaatcccgatgttaccgattaaggaatttagcaaagttaagtttgtacgcaactggtcctgtggatggaggagttgaggcttgactgcatctaatatgatccaaatgttgatctagataaaagagaggagccacagtttgagtttgagatagttacgtctggtggtgttaaaatgttgagcattgtcattttatcgacttttgtatgaatttcattacttaagctgatcatatggaggtgtttgcttcttctgttgctaatattttgctggacgcacaatacaacattctagttcttgatggtctccagtgtttcctccacatattatgctctggtgttgtagtaaagaagtttttgaattcgtcgccctgtctcctgattctgcagggacgcaac

SEQ ID NO: 91904 - DNA, 888 bp, Eucalyptus grandis
  Intron number 1 from transcript Egrandis_v1_0.053022m (loc us Egrandis_v1_0.053022m.g) derived from phytozome v7.0 (c hr-ID scaffold_7; pos 20924897 to 20925784)
tcatactctccaacgcccttgaatccggaaagcttgtgagttgatcacatcttcatcagtgttttaagagtttctcgtgctctgtgccgtgtacccgtggtttgtgggttcggtttggaatgaacttttcgcttccagcttaaaaaagaacacgagggtattggctaacatggcctgtttatcaaacaaaatctctcctttttgtatgcttcgatgatatgaatgtcttcatcggatgtgcgaccggttgtcctgaatcgtggtgatggtgggcctcatgtcctcttggctgctgccatttcttctgctaaagtttgcttttttgtatatttgttttacgatttgggtcgaaatgggttttcggaatatagtgaaatgtgcatggttcaggtttccacaacattctttggacattgctatccggagagtaatttcttgggtacacagatttaactgaccaaaaatgatatgacaaagtaatgggctttttctaatgtgccttgctcccttgggcagccgatctcagtcgtgggagaaaagaaaatcgatgtcagctgttgtatgacaaaacgtcttggccatgggatcaagataaatttatgtcaactgtttgatttggcacggcaatttcactaatcttagtataaacgaattttggattcttgagctttatgcttgtccgatgaagcaactgtaactacaaatcaatccacgactattctgaagtacaattgtggaaactgatcattcatccatgttgcagaatttaaagtttcttagttttcttcctattctctgcactacaatttgactatgttgagttattatcatggacctttaactttaattttttgcataatagggaattccaaagaatttcttgcgaag

SEQ ID NO: 91905 - DNA, 998 bp, Eucalyptus grandis
  Intron number 1 from transcript Egrandis_v1_0.025892m (loc us Egrandis_v1_0.025725m.g) derived from phytozome v7.0 (c hr-ID scaffold_7; pos 35910151 to 35911148 reverse strand)
caccaagaggcccgtcttctgggccttcttcaacggtgagggctccccattctttctgacttgtctttgtttaattgctgtgtttcttttttctttaattattcgtgtgataagcgtgttcgttcttctcgcctttcgttctaaaatgtgttcgattacaaaatttggatttgccctaatgatcatccggcaagtgtgaaataagagagtgtcgtattctatgagtttggtctgataaaattggactaaaagggaatgatgcagagggaacttgattgttttgtaaaaaatgaataatttataaaataaatttcttaaacgtaatattttttcattttttatattcgtgtatgaaaggaatggtacggattgctaaccagttttttttttttttttgctaaaaggtaagtaggattgctcaccagttcataggcactcaagttcattttttcatattaattaagattaatattatgaaaaacgtcaaattgatatatctttaaaaaagttacttttcattaattttcgttaaattgtatcatcaaattgctaaattgattggtaaatgataattgacctagcttggagttttgctctccatttgtcataagtagatagtaattcaatttaacaaaaactgatgaatgataaatttattataaatgtattaattttgaatttttttaataaaaaaactagtttgagataaatttattataggtatattaatttaaaataaatttattacagatttactaatttgaagtttttcatactattaatccttttcttaattttgaagagtcaacttattagacgttggtgccagggtgtattcattttgagccctccggatgccggtgtcatcgctagcggcaaatttacgataaaagttgtctacttcgtcgcctccatcttatataattgtcggtaggacgatattgactaaatagttaacgtgggttgcggtgtgttaatgtgtgaagggatgacagctc

SEQ ID NO: 91906 - DNA, 405 bp, Eucalyptus grandis
  Intron number 1 from transcript Egrandis_v1_0.031012m (loc us Egrandis_v1_0.031012m.g) derived from phytozome v7.0 (c hr-ID scaffold_5068; pos 91 to 495 reverse strand)
ccatttcagtgctaactatctcagcaaaatacaaggtaaagagtgacgagataaagagaaacaaattcaaaagattcaaaggtttttttatgcttgaatatatttttcatgtgacaaggataattagcatttacatgtatttgtctaacctttctctcctcattttcttttggttaaagaaagctaacgatatcgacaattacgttgattaagtgctacccatgtccaattgtagaattcattctattataacgatttctgacatctagataacgttaattaagaatattaatttcttcattgtcggtgcgcagaactaaactactttagcctctctctctctatataggagatgaaacgaaattttgttaaaatataggtgataaggaagagttcaccggtgtg

SEQ ID NO: 91907 - DNA, 784 bp, Eucalyptus grandis
  Intron number 1 from transcript Egrandis_v1_0.011138m (loc us Egrandis_v1_0.011138m.g) derived from phytozome v7.0 (c hr-ID scaffold_7; pos 6093077 to 6093860 reverse strand)
attgaacgagttctctctgctctcaaggtttcgatgtgaattcccaaatgtcaattcagtttcgtcgtaatcagcgccgaggactgtgtacagtgggaaatttcatgatccggctgctttcgataacttttttcatcaggagttttgtcgatcagcgctgagaataagagcggacccacaagatgatgtcggattgcgtggtcctttgatttagaaggctcggcttactatgttaatctaggtttcttaaaatgtagtagagtggattgttcgaagacgaaagcgttcgtgctacgctacttagtagctgtttagagactacctattgctcgtcaaaaaaagattttgcccaaccttttcttacgttttttagagagctgttagagtggttgttccaatgaaacagtgatgttttaaactctttaccaatttagtgcggcgcaggggtttatgattttcttatcctttttgcaaaatgggcagggtaatgccacttttgaggctgctcttgattggttatgcttgaatttgcccgggaacgagcttcctctgaaattctccagtggggtctcttcacttgccagtacaggtaaatataacatgaccagtgaactcatagctcgtggagtttttgagtagattgagtctgtgttaccgcatgggcgagctagatcctgtatgaccgaatgctgcgctgtgtattttctgttaggaggatctgtcaatgtccttgtatcagcacgggaagattggacaccttcagtggaaccatcttcgagggtcg

SEQ ID NO: 91908 - DNA, 784 bp, Eucalyptus grandis
  Intron number 2 from transcript Egrandis_v1_0.025220m (loc us Egrandis_v1_0.024442m.g) derived from phytozome v7.0 (c hr-ID scaffold_11; pos 42731922 to 42732705)
agaagatcgagttcctggagagtttgactggaggggtgagtgcattgagtgatgtgtggatgcggaattcgagcgtgaatgtgcggtttttggttgtcttcgttgtttggttgtcgattgggatctgttgtgtgttgaggctagttggttaatgcagttcaatcaaacgctcgcaccgagcaggtgagaagaaaccggccgattgaatgttaaagattccgattttaaggcttttgatccagaaaggtgttgactatgagctagatcttgcatagagacaattatgattttctttctacctcagcatatagtcttatctactcaggaagccggtgttcttcatctataaacaaaccatttgtttcttttgttttctttcggttaaagcttactcttttcaggcccgagtacatattgtttgccttttccgtggtttaggcccaataaaagggggaaaaagaagaagattgtgaatgaagtaggctgtttatattgacaagtgatgggtgattctgctgcacatatgagatgctctcttcatgttcaaaaggtttttgcttgcatacttcggaatgaccttatggaacctcatttaattgctatccatcataatcccattcctgcttcagggtgttcattcacctgtttactgtaggttctttaactcatgcaaatgtatatattgcaatccttttgagatgtgaactgaacaggatctgtcgaaacgtatgtctgagaaaacctcatgatgatgtatgtaggtaagcaaccggaggtctcgaag

SEQ ID NO: 91909 - DNA, 797 bp, Eucalyptus grandis
  Intron number 2 from transcript Egrandis_v1_0.027215m (loc us Egrandis_v1_0.027215m.g) derived from phytozome v7.0 (c hr-ID scaffold_2; pos 6490901 to 6491697)
tggaatagggtggggagcaaaggtaggctcgttttatcgtatccctggattttgatttcatcaaccttaagggccaagcgtcgaaaccaacaagtgtttttggctttcatgcaatctgcagattaaccacgtgtatcaacgtgctcaaaatgattgtttagataataaacatcaatttgattttttactccatccggaatgcttgacgtattgtttgcttcatttccatggtctctgtgagaattttcctttgtaaatgtctggtctgtcatccttctatttcatggaatgtgccatttgtttctcctttctggaactctatctaagaacagtatttctcaggatgagatttggactttttgtttgattaccatgttgccattgagttttcaagttcctttctgcatctctgttccctttctctgaatttgtgttttgctttattgtggaagtgggagaagtccctgagccagagattgcccttgtgttgcttataatcgttccctttctgttaacatgtctatcacattaatagcttctgcttgtgtggcttaagctcgagcaaagaagtcttgcataaaacataaaaatcaactaaagaaatctttagtcgattccccttcctcccgaaatgataacaacaataatagtaaaaatcaaatacataaatgaaaagattatccttgcaagaaatgtttgattttgtgttatatttttatgtagagatatccttattccagtcaatagtaaccagtcaagggtgattgcaggctggaggagaattgacagacttcgtt

SEQ ID NO: 91910 - DNA, 899 bp, Eucalyptus grandis
  Intron number 1 from transcript Egrandis_v1_0.051338m (loc us Egrandis_v1_0.051338m.g) derived from phytozome v7.0 (c hr-ID scaffold_7; pos 39868226 to 39869124 reverse strand)
ttcccagaaaaaatcagagaaaaagttccgtttattttatggctttcaaatctcaaaatgttcacaagaaagtagatccattgagggaaatatacgtgagtgttgtggttcgtccaatgatcatggctagagatgattattgggaaggcccggcctagcaagccgagtcctaagattaagcctagctttttatccataccttaatcattaatttaaaaaaaaaaaaaaaaaacgatgcataatatcttcaattaccgacgctttttcaatgcgagtcgacaatttcagcattgttgggtaaattctaaagcaacaccccttaaaacattgcataagtcatatgattaagcaaaatagagaatgtaacaatttggaaattcaaaccttggaccttcaattaataaaagagggaataattagcagggttaattaccaggccacaattatctttttattcaatcttgcaatttctaatgcataaatgaaaataaaaggacgctgggatctttagtttttaacaaatcgaagatttgaatcttgtatgaaacaattctatccacgttttcttctttcattttattgcaagcaatgaaatgttattttttgtcagtagccaaaaatcattacaaaaactattcgagaactttttacctaaacttgcaaatatatgtttggagactagtgttatagtggaattcctaaaatttccaaaagcaaccctttccaagccaatgtttttttgccgtatttaaggttacgcccttcgctgtcatggcaggaagaaacccggttcttctctcgatcccattttgtttgactgatccaatcttgtgatgactcgtgagaactgtctttaaactttagggttccttccattgaactaagcagctataggggtt

SEQ ID NO: 91911 - DNA, 991 bp, Eucalyptus grandis
  Intron number 1 from transcript Egrandis_v1_0.026826m (loc us Egrandis_v1_0.025955m.g) derived from phytozome v7.0 (c hr-ID scaffold_11; pos 45349317 to 45350307 reverse strand )
gcctcagtgagtccttccgattattctcgagtccgtccgtttctctggttcgaacctgcatttcttgctctgatctacccccgatgggccctgcttctggcccggtcgacgcgagcgcatggttagagagaagttttggtgatcggcgggggttttgttagagtagattgcgaaatctgatttgtgttgggggggggggggggggtggagggatgggttggacagattgaccttgaatcatgtctctgttatgtgattggattttatagatggttaaaatacctaaagcagatgcgtccttcagacgtatctgtggttattattatgacaagctcgagatcgagggagagtgttttgctaacagaaatagtttgttgaggctgacaagttctaaaccacctagtacactgggactcagagtctccaggagtaatctctcgtgttctggaaggtgctaaactttgtcgcctggttttgctcaggtgtctttgatgtgcatttctgtggctggtttccctacaacatgggatctagcattattgtaaaattatgtgaagccatgtgccgttagggtactttcatttcgaagatatgtacttattcacaccgcattgagtttttgaattacctgatattaaaacatcatgctgtgaatttcgtccttcgtaagataacattactgtgaggaaataacccattcgtttacaattggggagttcactcataatcatgcagtacctggctgaggaacctggagcttctctaagccagaaaaagaaaactgatatatggcggaccaatttccatggtcaccctttgttgatgaaaatgagaaataagattctgtgaatgtgttaacttttgttagacacttaattctctccagttaccagggtcagatcaccttctttgtggtcgtgcgatgatgaactaactttgtcacttcaatgttgcagcttactgtgtggttgcagttgagtctgttgggcgc

SEQ ID NO: 91912 - DNA, 584 bp, Eucalyptus grandis
  Intron number 1 from transcript Egrandis_v1_0.021723m (loc us Egrandis_v1_0.020043m.g) derived from phytozome v7.0 (c hr-ID scaffold_2; pos 24670646 to 24671229)
gcgtcgtggccgacgctgtcaccaccgccatcaaggtccttttttttttttttttatatttatctctttttcatgttcttttgctcctgtcttttttttattttcctgatctttctccaggaattgctgggtgagtttagtgggtgcatgaaccggttaagagtcgattgaagtttgtatcttttcctcgcttttttatgttttgtggtgcaatgatctgcttgtggaatcggagacccgagatctcgagattcaaatatgaattgcaacactatagtgaaaagcgattgagttgctttcattttgttgaccttctttgcttggagacaaggaaatggagctcgctttgtgtcgatcattgcttacgctttgttcacgagtcatgggtgactgtggttttcgcaatttgatggctaatttttgcagttcttagttttttttttttttttctgaaatgggttcgatttatttgatgctgtgttgagctgcaaaaatgtctgttttggcatgatttaggaggatgttaattggagtgctctgcgtgtgcaggttgggtacaggcatattgattgtgctcaagctta

SEQ ID NO: 91913 - DNA, 400 bp, Eucalyptus grandis
  Intron number 1 from transcript Egrandis_v1_0.025443m (loc us Egrandis_v1_0.025443m.g) derived from phytozome v7.0 (c hr-ID scaffold_7; pos 22408979 to 22409378)
ccatttcagtgctaactatctcagcaaaatacaaggtaaagagtgatgagataaagagaaacaaattcaaaagattcaaaggttttttaatgtttgactatatttttcatgtgacaaggataattagcatttacatgtagttgtctaacttttctctcctcattttcttttggttaaagaaagctaacgatatcgacaattacgttgattaagtgctaccaatgtccaattgtagaattcattctattataacgatttcttacatctagataacgttaattaagaatattagtttcttcatgtcggtgcgcagaactaaagtactttagcctctctctatataggagatgaaacgaaattttgttaaaatataggtgataagggagagttcaccggtgtg

SEQ ID NO: 91914 - DNA, 286 bp, Eucalyptus grandis
  Intron number 1 from transcript Egrandis_v1_0.052039m (loc us Egrandis_v1_0.052039m.g) derived from phytozome v7.0 (c hr-ID scaffold_11; pos 21359678 to 21359963 reverse strand )
agggacaaggcaaacctaatcatgtaatcaaaaaatgttctttgcaaagcaatataaatcaaatgcgaagaaaataacgaccccctgagttttagttatcgtaaaaatatgaaaaaacatggattaaccatcaaagggcgaatttcttaccccgaaacattacacagccgggagaagccaccgcacggcggcgatcgaagcatccgccgccgccgccatgaagccacagaagcacagacaacggaaacaggaagagcgaccctcgttgcttcaacaggatcaacag

SEQ ID NO: 91915 - DNA, 824 bp, Eucalyptus grandis
  Intron number 2 from transcript Egrandis_v1_0.052490m (loc us Egrandis_v1_0.052490m.g) derived from phytozome v7.0 (c hr-ID scaffold_2; pos 32948600 to 32949423 reverse strand)
aaggtacattcagtgacaatttccaacttttttctctctgcccatttcaaggtaccatttgagtctcctgttttgtcactggaaaaaagccaaattcgatcccagtattaaatcattcctagaggctgagttgaatatcgtttgattgtttttttggaagacaaatttgtgacttttgcaccgtatcatacaaatggatgcgtgaactgatttttaaggtataatttcaactgttgaggggtgggtaactgtgagttactcgcacttctatttattctttctcagggaaacaactttgataactggaatggccaggatgtaacatcagcattaattatttcttaacctagttagtaaaagttctactttgagtgtggtgcaaccagtgcggttagtagttacagattcttcgaaacataattagcgaaaaccaagccattggcttactggttaaagaattgaatagtgtgtgtgggataggcccaaaaaaaagagaaaaggtttgagtccccatacaactagttcaaacgatcccatgtttggtacccatccggtcttaggcttgcatctcactagatctattggattaatgggtgcatttaatgtgcccaggtttaccaatccaaagtaagctccttaggaaaaaaggaaatatatgtttttttatactccatttcattcatgactggtcagctggacataaattacattcactgaactgcgtaatttcttataactattttccacttctagaacttctgttgatgatgatcatgtcttgtttaccaggcaattgcgctcaaaggacttaaaagaaccctcca

SEQ ID NO: 91916 - DNA, 827 bp, Eucalyptus grandis
  Intron number 1 from transcript Egrandis_v1_0.031928m (loc us Egrandis_v1_0.031928m.g) derived from phytozome v7.0 (c hr-ID scaffold_11; pos 2944474 to 2945300 reverse strand)
gaagaccgcaacctcgtcatcgtcatcgtcttcaggtgaaattgaaaaaaaaaaaaaaaaaaggaaaaatcccccccttttcttgccagttttggtagccttttttttaaaaaaattttaatttgtttttttttgcttgaattcactctgaatcatccattcttccaataagagggtcgaaaattcggattttccacctttctttaaagcgttagataacttagttgaagcttcttcatctaatcaaataaatcgattaatttctataattaaaatatcctctcaaagagcgaagtttccaattacgcattaccttcaattcgtgactttaatgcatggtaatctcttaactttgtattagggagaaactaatcgtcgaatcaatttcttcaattaaaatgcgattttctgaatgcattgctcgattactccagggaacaaaaaaaaaaatgcaatataattagtcaatgcgacaatttttattaattcctttaaactagatcttttttaattaaccctttttttagcaagtaattaaccctttgacgggcttgatttttctttttctcttttttgtcctatttaatttccgacaaaattacatgaatttttttgttgtctcgtataccgagaatcgatcgctgccccggaagaatctacggaaaatgtcgaatatgccacgggggcaggcagatatttgtgccttttcctgttcctccgcttttacgttccttttttccccgccttctttactatttattttgctttttttactgttttactcatctgggtttttttttttttttttttttcgagcatcagacggg

SEQ ID NO: 91917 - DNA, 769 bp, Eucalyptus grandis
  Intron number 2 from transcript Egrandis_v1_0.017163m (loc us Egrandis_v1_0.017163m.g) derived from phytozome v7.0 (c hr-ID scaffold_2; pos 10929942 to 10930710 reverse strand)
ttgggacttggcaggttttcaggagacaggacaaggtcaactctcttctctctcgccactgagcgattctttgttctgtggctctgtatgtctgcgtttcggatggtttccgtctcaagctaatgcggctgctactagcactactggctttcatcagtttatggggaattgctggttcacttcagtagtttgcatcgtcggttgaataaatgacaaagctttggcgggtggtttctgtggcatcgagcgagaaagatgaacaccaaatcattgcgttggcccttttgggaccactcgtgattcgttgttcatatgaaaagtggtttgcatccagttcaacatattccgtgaagaaatggtcttcctaattaggccaagtatggattttgatagttcagatcttagagtattacatgttacagggaattgagctagattctaatgaaaaaatggtttctttgagacaactatatctaataggtgaaggcttggttgccgttgggtttttgtatgtacgctatggctctatctggaaattgggggaaatggggagaaaggagattggagaggaaaattttggacatttgattttttttttttaaattgtgagaattttgtttgcatttttccattccctcacactcccaagcatagtgtaacccacttaatacaatggtatgcgttaaagaaagcaggactaaaacatttgccaatgtggttgaggcactttataacgatcatcttttgttttttactcttgcagattaac

SEQ ID NO: 91918 - DNA, 778 bp, Eucalyptus grandis
  Intron number 1 from transcript Egrandis_v1_0.013204m (loc us Egrandis_v1_0.013204m.g) derived from phytozome v7.0 (c hr-ID scaffold_7; pos 51498317 to 51499094)
tgaagacgagtgtatgacatcgtaggaggagattctgtcggagtagtttgagagtcgagagcattgattcaatcccaggtctgctgcttctactttgacctccattcccaacttctgaaagaaaggagaaagtgcaggtgcaacttggattgagagattcacattcttcaagtgaaagtcaagagcctgcgtgaaccagagcaacttctcagctgacacgcgcgggtgtcgtcagttgtgagttatgaacatgaatttcatgtcatttctttcgatcatgcacgaattctttctcacttcgtactcattccttcctccattttcacatttcgattcaaaactagcagagttcttgaccatttcgagccggaagttaatcagacgtcgacataagaagaagcatgcaatgcgaattggtgagctacgaaatttgtatagcattttatataagcagatttcctgtgtagaattttggttctcctcaatagaattccaagttctaaaccactaattccatcacgtcatacaaggatgagcaacacgactgacctttttaagcgagaagccttttgacatgccgtttctttcgcataaatatcaaatttgaatgaacataaatgattgtcagctaaaattcactcgaaataataatattccttttctaacaaaaaaaaaatactgaataaaaaggccccaaaaaaggaaaaagataaaaaggaaggaacaaaggaagtaaatttcagtgtatacagagagagaaacaagataacagctcctc

SEQ ID NO: 91919 - DNA, 1000 bp, Eucalyptus grandis
  Intron number 1 from transcript Egrandis_v1_0.006343m (loc us Egrandis_v1_0.006343m.g) derived from phytozome v7.0 (c hr-ID scaffold_7; pos 43547497 to 43548496)
ctataggtgagagatctgatgggtccgcgcctttttggcttttcgcggcctccgatttgaggtcttgagttttaggaggtgttgccttggtcagctcgacgggttccctcctcttcatgttgcatattgttagagttttcggccggctaaggagccggggaactgggttttctttgtcaacttcagttttttcttctttatatcttgctcgagctcactggatgcgagtgggtgtcttgagcttatcgtcgaatcgatgaaggatcccgatttcgcaaaatgatttcttaattttgtcgggacttaagcagaaagaatagttcatagatggaacttagatttggagtttcaagagctgtgtgcatcggacacggacacaagcgaatgctaatgcgaaaactacgttaacctgtctcttggaatccgtcttaatttaatatgtttccctaggtagccgtgtgtttgatttttcctcgtgtataacttgcgttatacatcagagccattgccgtactgattgcgtactattcaattttctagctcatgatgatcagtttttagtatttagaattctttctctttttctcaaacatcaatataacctggcatgtatgctcatctgttggatttgactactcaccaccttttctgttgaatatgcgtcgttaagtatgcgaagggaattgttttagagaaagaagcaaaccccgacatctattaatgacaattatctcattttcttactgaatttctctaattcgaaaagtaatgctgctttcgttgttggtctggattctggaaagccttgcagttttagcagtttgttgatatacaagccatgcaagtgattattaatgtaaatggtgaatttgcctcatttaaattgagaaagaaacatactcgttgctcttaattgctgaatccagtactgaggtttttgttctccttttctaatttgtgcacgtgtattttggacatttggctttctttcaggttctca

SEQ ID NO: 91920 - DNA, 349 bp, Eucalyptus grandis
  Intron number 3 from transcript Egrandis_v1_0.022159m (loc us Egrandis_v1_0.022159m.g) derived from phytozome v7.0 (c hr-ID scaffold_2; pos 1232794 to 1233142 reverse strand)
tctcgtttttcttcgagggtacgagtctttcttccatttttctgtgtatatgatgtgaattatttatcttggtcgagaaatgatgatattaattgattgatttgtcaattaccattgtcttgaacttttgttttttgggttttgctgtacatggtagctcttaatgttaccaagactagtttttgattattgtggcccctctctgtgcttgttgcctctggagagttcgtggataggactttaatgggataggattgtgatattctgtcattagtgcacgtaccaacatcattgccggagtatcgcttttactaatcctggtgaattttgacagagaaagcatttggtg

SEQ ID NO: 91921 - DNA, 489 bp, Eucalyptus grandis
  Intron number 1 from transcript Egrandis_v1_0.022421m (loc us Egrandis_v1_0.022419m.g) derived from phytozome v7.0 (c hr-ID scaffold_11; pos 28826643 to 28827131)
agactggaagtaagttagacttgtcttcttctttccattttatgcatgttctcattctcgagcaccatgcgacattagttttgtatgtacagacgaataatttacagtttaaaatgtcctctttagtggcaagaattagtaatgtcagaaatatatttcactcaaaataaacgtaatggaagctttataagggagaaaaaagaagaagtcatgtagccatacaaaaaaggctggctgcagactttttaaaaatagattttttagaccccattcttggtagagagaatttttttacacataccgttacaccactatctccaaacacaaacacacatgtcacccatcgacggtccacgtataaatttttttttacatgatcagtgggcgcaataataatcctttaaaaattaaataccacaagactcaaaagttaccataaaatgcttatgcatttctcctttgcaggtttttgttttatcgaagagatag

SEQ ID NO: 91922 - DNA, 865 bp, Eucalyptus grandis
  Intron number 3 from transcript Egrandis_v1_0.031746m (loc us Egrandis_v1_0.029684m.g) derived from phytozome v7.0 (c hr-ID scaffold_11; pos 1532874 to 1533738 reverse strand)
agagacttggagagactcagcgttggtgtttcttctttacattggattggtgtttgcagcacgtacatcgactttgtgtatctttcttttttttgattcacctagttttagaaataattatatttggttggatgccttttttccctatgataagtgaatctcatttgatacgggtggaaatttaatgatgataaaaggaggaaatattctcatattctaagagcagaaagtaccacaaggtggatggagccagaaagaaactcttttgttgtaaaatctatatcagatggagctttgagaccatgcttctgctattccgcctaaattctaaccagagtctccacatcatgcatgataaaaaacccacagaagtcgtcctgaaaatataccttctacgagcgttcttctgttcacatatgcattaagaagtgaaagattaatgaagcaggaacttgtctcctccatccttcttgggttactgtgaagccttgcattgtggatttgaaaacttgttgggttgtatgctagttgcagacttacgaatttgggcacctcataataggcttttaaatggaatgaagtacactctttgttttgatgtcattctatgctgttgtggttttgcctgtactctccttgatatggtgacttgaaaaatagcatcatgtcctttgtttttgtcattagcatgttcatttgggcaatagcagtagcacagctgttgtatttctcctagctggtatagctgcccttctcagtgttgaaatggggtatctcgttgcggtgttctctttgcatgcgatcacattatcgactggctttgactagtatggtgattctgcagggagacataggtgggttgagt

SEQ ID NO: 91923 - DNA, 918 bp, Eucalyptus grandis
  Intron number 3 from transcript Egrandis_v1_0.043745m (loc us Egrandis_v1_0.043745m.g) derived from phytozome v7.0 (c hr-ID scaffold_11; pos 22517963 to 22518880)
gtttcgatttcgtcgagcgagatcagcagaatcaggttggccatgctttctctctctgtctctctctctatctctctctctctctatatcgaagtttgtagtttgtttgattttgaaaaatccgagctttatgtcacgaggtggaattacccgtttgacgttattcgttttctcgtcttcagggcttgtcgtgggttgggtttgtggtggtctgaaattgctcgctgtgttttgggtgggtttggtcgtgacgtcttagggtaatcgggacgtattgctgaagcggctcgtggtcttgtttgggggttttttggctgagttgctgactttggaggaatagtttgtgttcgtgctattctgggttttggttctgattgttctgctgttatgcggtcatttaggtggcgctgctcttctctgtgtgtgcatgcgtgtgtgggtgtctgtctgtctgtctgtcttttgcaatctggggtactagctgccttaatttttctcagcatcactagtcactccctttgatatgtcctttagcttgatggttacggatggtgtctaggcctttttttgattgttaaaagttttctcttgacttgccggtgggtttggggactgagaatagcaaaatgctcttttggagcagagctgtggaaccgagaggtccttccgttttagtccaccgttggtgggtatttgaggaacgaagttttgagtgtgatttgaacatctcaaaccaactgggttggtgcttttcacaaaattttctgtacagtggtcgtgatcatttcctgtttgtgcgaattctgtttgatgtatatgtgcttgcttactttgattggtgaatattccgggatttctgtatctctgcttttgtatatatgagggattataggcagtctttttcaggagatcaggaca

SEQ ID NO: 91924 - DNA, 1058 bp, Eucalyptus grandis
  Intron number 1 from transcript Egrandis_v1_0.006453m (loc us Egrandis_v1_0.006430m.g) derived from phytozome v7.0 (c hr-ID scaffold_7; pos 41944696 to 41945753 reverse strand)
caacaccgacgagtccagcatcggcctccgaaacggtattttccagccccttcgtctccctctctctctctctctctctctctctctctctctctagattccccgtcggtttcgttctctccctcgcttgcaacggacgcgcggggttccgcgcggggacctgggtcggcgatctgggatttcggtcggagttggattcgagatgatgagacggaggagctcttttcttcgtctcgtggtcagtgttgagaaggagcgagatgtcgtcctcatttctcgattttaagccgtcgtgatgattcgcgtgctggtgtgttttggttagagaatcgttactgagtgactgatgcattgagagggaatagagaatgttcgctgagtgaagagctgtgtgaatgacgtctgcgcgattgcgctgtttgtcggagctcgcttttgaatctgcgtggctgtgcgctgtctttccgaggctgctttcacgtcggatgggcgggcgttttgggagtaggaatgttttccggtttgaaaagaagctgacagtacggtgcaatgtccgtttggattttgctatatcttattcgatttggaagatgatggggttatattcttgccccatatcacggcagtagcttgagttgcttgccgatgcattgcgcacgccctacgtaatcgtatggaattgtggtatcgaggcgtgtcatatgagtcgctaatagtggttccattcctgatggaagcagtagatgatgcgtgacatcattattattattatttatttattttttttttttggtatgtgtatgtttgtttgcagttgcagtagctgaatttactgaaagtggccaacactctgatattgaggatttaaatattaggatgtctataccatgtgtttgtccctgtaactatttgcatctataacgttttagcgattaatggtttttgttcccgataaatgctgtttgtcaaatttgcatggacaattatttattaatgttaagttattcatttccctttttacagtacgatcatttggaacggaaggacggaaaaaggat

SEQ ID NO: 91925 - DNA, 299 bp, Eucalyptus grandis
  Intron number 1 from transcript Egrandis_v1_0.037542m (loc us Egrandis_v1_0.036126m.g) derived from phytozome v7.0 (c hr-ID scaffold_15; pos 408965 to 409263)
gctttaagtctaacccttgaggtaagtggttttattcaccatctgcctgttgcagttgaatggggtttggctgacattcatggatatcattgccgtatataatgtaccttttatcacagattttctgtgtcgaagactccatctactagttggaagtacaagtttttatatctgtaattttccctgtcatataatacaaactaactccgagaagaatatttttaatgttgggggtggttgacaagctctctgaacgctctcatggatttggttttgtgacttttgatgagaagcaagca

SEQ ID NO: 91926 - DNA, 831 bp, Eucalyptus grandis
  Intron number 2 from transcript Egrandis_v1_0.012529m (loc us Egrandis_v1_0.012529m.g) derived from phytozome v7.0 (c hr-ID scaffold_7; pos 50111690 to 50112520)
cttgttggttgtgttcattcgtcagcatttgcaaggtactcaaatcagatatttctatagaatatctcttttgattttatgagagtgttgctcatgtcattgctgttcaaatacgatagggtaaggggattttgaccataaggtgatgcgaccgtttgtaataatcgttggatatttcaaactgcaaatataagcacaaggagaagatttatgggttatgacacaatataaccgcttttgatttttgttatgataggaatgcatgacgtcactggcattatgtctagattgtctagtcatgtatcatcaagagtcgtcatgttatgagaaggacaggcctaatgctaaggggctagatgagaacacaaggaaaggatacatggtggggagagtgattagggttccccccccccccctttttttttctggggttggggtggggggttgtttgaaatctgcttggttctagtagagaggggcacctcatctgagatatggcacagtaaacacactaaacacttattgggagttttcattcatactgtgattcatcaccatctggctggctacttggggtgcctggaaataaattcctctcttcaggcagagcataaatttttgggctgctaaagtcagggttggtttatcgttaaggaggttgcagcgaaagctaaaagctccttaatttatatggctaggctgctctgtgaatctttcttgtcatcagatatcaaatgtaactatgagtttctggtgtatatgatattagttggatactcgcaattttttgaaggatttctatgtattcaatgcaggcttctttgttacgat

SEQ ID NO: 91927 - DNA, 1002 bp, Eucalyptus grandis
  Intron number 2 from transcript Egrandis_v1_0.025306m (loc us Egrandis_v1_0.025306m.g) derived from phytozome v7.0 (c hr-ID scaffold_7; pos 6095613 to 6096614)
gcgggttcggggtcctgctccggtgccaagacgaggtgagatgagaagcactttgtatagaggccacgaatatttggctaagcttattgattatagaaacaaagcgcgtccaataatagcgagagaaattctgtgccttccgattgaatgtcggtatgttcatgttatatcgtgtcgcggtaacagtgggttaggttggccatctcgttcactgcataagagtgagaggagagagaaccttaaggtttgtttcctcttgggttagtgaagaaagaccttgttaaggtctgtcagttacttggacatatcagtgaatctgcgaggttttgtcaattttggctttaggtcgtgtttaatgggcgctgcggttttgacaggagaatgaaccaagtgtttatgtctatcaagatgcaacagagaagtctgccttactaatttatgagtatgggtgctcccgttgaggtacaccgagttttgatttgactggggaagttattttttggattgacctcatggtaattcaattagagatctatgaagatcttctagttgtcttgccagataatagaacatgttgaacagttttaaggggtctgccacatttctcagcgtcgtccatatttgccaacataaggcctactgatagatttggctgtgcaagatataaatttataggtcctttcttcacttttatagtttaagcatggcctatttgattttgaactgtcttcttctatggctctaccaacccatacgtctgtgcccatctcttcttatcttcctttgacaatctttgagaggtatcttctggaaatgatagctacagagggagccatactactcaatgctccctatttaacctcaacatcccattcttgtttctttatctggggcactcttttttcggggaaaaaggattgtgatttctgtggattttgctaagttatcctcctctcttgacatgtagttgtgaaggccattgctacacccgattcaacggtg

SEQ ID NO: 91928 - DNA, 758 bp, Eucalyptus grandis
  Intron number 1 from transcript Egrandis_v1_0.025476m (loc us Egrandis_v1_0.025476m.g) derived from phytozome v7.0 (c hr-ID scaffold_11; pos 20130543 to 20131300 reverse strand )
aagctcgtttctgggctcagtttgctgacgacaaggtgactcttttgactttctcccctggtttttgttttttcgtgtgttgtttttgcagtttgctgatggcaattggcaaggtgactttatttcctccatattctgagacaagaatatggaggagaaacatattaaggtaaaggcgcgacgttggagtgccatacttgcttttcttgaacccccctgattccatctatggatacacagcacatatcaaagctaaatgccagctcctgaatggcaaactatggcagaattgatacggaatatggatggagctctttggaatcggttttcttgcttatatatgctggacaacggaaaatgcaatattgcaaatttttctccatgaaaaggttatctgatgccgtgtttgcaactgagaaaattgcattgaaaagaacgagcccttaaattaaatcgatgtagaaaatcaaccatagagctggctttgccaaggggatgcttacccatgtactcaaagagttaatgttattaaatcctcttagtaactcttctagtatgtcttatcggttagattttcttctggcacccaaatatataattcacatccttcagaaacaccgactttatattatgcatgtttttggctacagcagaataaatgcccatcgaatcaaacaattcttcttgatgacaagcttgcttgttctttttttcccatgtcactgagaacagtgtgtctttggaacttggggagcagc

SEQ ID NO: 91929 - DNA, 771 bp, Eucalyptus grandis
  Intron number 2 from transcript Egrandis_v1_0.012601m (loc us Egrandis_v1_0.012601m.g) derived from phytozome v7.0 (c hr-ID scaffold_11; pos 45285398 to 45286168 reverse strand )
gcgggcaggtcagtgcagtaactactctccgttaattcaaacagtgacttctatctgctggatctacaccgtccactcggatgacgcgaataataaatttctggccatttccattttcagctttctttctgacacgaacgaaatacattagattagctcattgtgcaaatgatttagtcacttacaaaacaactgaaccagaaaaaaagattatcttctcgtgattttcgtattgcatgcgttcaacggaatctttaatacgatctagatagttaattccgttatcattacccccaccctcgagaaaaggttcatgtgaaaccgttccccgttcagatctatatcactttcgtagaccctgacctttgacatgcgagcagaagttttcccgggaccaaaatgcccctctctgctccccttctctcgtgcttcgcgttcgccaattctctgcaccaatcacggtgcaatacccaaaacgagaaaacgagaattcttacttttcctctgttagtacattttgctgatcttgctgaagcatcatgcactcgccgatgtcctttcaagcctgaagatattcgggcagtctagtgaaaatgacaacaaaatcttttaagttgggtagatcagaccatcaggaatacacagcaggccgttagtccatttggtttctcttggaaattaattgcttttctcgatgttaccactttctggtccatgacatttccggcgtgcctttcaggatcagcgttgaacggaacgagcacgcagtcg

SEQ ID NO: 91930 - DNA, 492 bp, Eucalyptus grandis
  Intron number 1 from transcript Egrandis_v1_0.002683m (loc us Egrandis_v1_0.002683m.g) derived from phytozome v7.0 (c hr-ID scaffold_11; pos 25286737 to 25287228 reverse strand )
gacaaagcaaggtactttcttcttcccttgtaaatgcgggctgtggttggattctgtttattcgtttgtagaatcgggagaccaaactgggaattggtttatttacttacttcctttggcaatagctacggaaagggttaaattgcaattttcgaaagttgatttttgcttcgtgaggtaaatttttacctttgagagttttgtagcctctcaagttcggcaactacctcgtgggggtccattcatttctgtttctgcagtgtctataactgtcttttacgttactatggctgatatcgtcggaagttcctttcttgattggcagtataaagaattgttcatgtgtaatttagtggagactttagattaatgagggcgcgatgacgggaacttatcttgattaagcttcattttttagcctttgattggttttctgagcttcctactctaaattcaggcacaggaacacttctcgttctggtgggagctcgg

SEQ ID NO: 91931 - DNA, 1059 bp, Eucalyptus grandis
  Intron number 1 from transcript Egrandis_v1_0.014781m (loc us Egrandis_v1_0.014781m.g) derived from phytozome v7.0 (c hr-ID scaffold_2; pos 57707209 to 57708267)
gccccccctcccctcccgcgcgcgtttttctccaggtgcgttcccccgattcccagctcccttccccttcctttttatagccgccgccgccgccgccgcgagtgatcgcgggcgattcggcttcttaagccgagaaacggccagcgtttccgtcggaggttttgatcctggcgcggccgggcggctggctgcgggacggcgagcgaggtcagagctcgctccgtcgcggcggttttgagacggccgggcgtgtgtcggctgagcgcggcgggagtagagtcgagtgcttcttttgtgtacggatcggctcgcgtccgcctgttcgtagttgcttgtgcttcttttgcgtgatggaattcgacgaaaacgcatcgttgttcggtcgatgtttctggcatgtcgacttcgccggcattgtggtccggtactgtacggtacggtaccgaggattttcattcgagggcggagctgaggctcgtacttaggatttcatcggttttctcagaacgagcagcatcgttctatcgttcgtcgtctagaacgatattagccatttcaggacctgcagattgttcatgtgatctgattcttgaggtggattggatccttgtttttgttttttcgcgctggctgagaggacatctaagtgtcgcttggcatgatgacggtagagacgtatggcgtctacgctgaatgtgaagtctgaagcaagaattcttatgttatccccccggttcatgagatgcagatggaggtggagttgtgagttgtgaattctttctgtttaggagaggcgcggcttgctagcaatgtcttgtgtgctgctcatccgagtctgtgcccccgatggtgtgccttctttagctttttagtggacgctaaattaatctaactgaagccatgacttgcgcttcctcgcccctctccgatttgaccaaacataattgtccagcgacagagtggaatctacaagtgttcttgaagtagttttgctgtttaattatatcttcaagctgcttttcaggtctactgcacttttgtcgggggggtcttttcaac

SEQ ID NO: 91932 - DNA, 640 bp, Eucalyptus grandis
  Intron number 3 from transcript Egrandis_v1_0.052250m (loc us Egrandis_v1_0.052250m.g) derived from phytozome v7.0 (c hr-ID scaffold_11; pos 42137797 to 42138436)
gaggacgactgcaagttcgccaagtactcggctaggtgagacgttccttaaatttttcttgcacgttccttaatgtctctcgaattaaattatcaaagttttgtcgccaaaaattaatattttctttgttttatagctgacatcttctgtctatttacgtgtcaggatacattttttttttctgaatttctattgatgccaaatgagaaattgacacaaataatttataaattttgactaaatatgcaatgtgatcttaaaacttttaatttattcaaaatggttttgaacttttggtacatgtttaatttctaaaatattcactactatccctaacattgggtattttcatataattcaaggtctaccatgaatatttatcaaaagtttagaaaccacaaattaaaagttcaaaaatgatatgatacattgagataaagtttatggattatttgtgtaattatctcatgtcaaataaataaataaaacctgatgaacttgcaatattcaattaggattctctttaatgcattgtcaaactcataattaccgaattcgaacgtgcataataatcgcacaaaattgatacatttttttatcattagggaacaaatcctgacggaagtgaagcgcctgatcg

SEQ ID NO: 91933 - DNA, 865 bp, Eucalyptus grandis
  Intron number 2 from transcript Egrandis_v1_0.025761m (loc us Egrandis_v1_0.025761m.g) derived from phytozome v7.0 (c hr-ID scaffold_2; pos 37312284 to 37313148)
agcgtggtggtcgcttccaagttcatagacaacgcgtaagtgctttcgccccctgcataaactcgtcttccatgacaccgcacgctattcttctctcattttcttttttctcttgatagcagaagtgcgcacgcagagcttgacgtatatgcatcgatcgactcccgattagtagtcgcaatactagtttgaatttgatgatcagttagacctgttagggcagatacagaaacgtccaatttagtgaactgtcgggtctggttggattaagaagtttgaaccacctgtattcgaatgcaagcatcgatttctctttggaggatgatgctttgtgtccgcatagtagtacttcataccctttccccaacatcctcatcaccatcgaccgcaatgctcgcctcggctccgtatgtcggcaagcgtaataggaagtcattgctcttggctgcagatacttgcaactcttgcaagtttacttggaaccttcatccacaagttgtatttaatttgatcttcttaggtctcctttcatctattaaatgcagaacaagcgagctcggttgagtgatgctcattgaaaatattttgagacatgtctggtcgagttcgaatttggctattttttgtgatttccgtgcttccgcaaatgtcatgatgcttaaatttgaaactggagtcaaaattaatgattagatgcaagcttttcaaggaccttttaccgattagaggctcgttaccaaatgccattgactgatcttcgttctatgatattaccatctccgagcctagttcaagatttcttacgttcatgcccgattcacaacgtgcaggggtgccaacaattcttattttgctaaagtgggag

SEQ ID NO: 91934 - DNA, 848 bp, Eucalyptus grandis
  Intron number 1 from transcript Egrandis_v1_0.054084m (loc us Egrandis_v1_0.054084m.g) derived from phytozome v7.0 (c hr-ID scaffold_7; pos 18889064 to 18889911 reverse strand)
ttccgcctcggcatcaacttgttcgacacctccccgtaagccaaattcgaaaaacgttttcgctttccttttccctgtaccttttgtcaatccctgcgagagagagagagagagagagagagagagagagagagagagagagaggattcggcgaattggggacattttgttgcctgaatctcgagaatggatgaaggtctaggatagagaaaggggcaggttttgcgttcttgagctatgtctggattggtgatgatcatctgtttgttgctgagaatgtgggaatgagtggcttagcaatcagagtgagctaattgtaatttgagagaggggtcttggagacagttgaaagattttgagatggtaccataatgtctgcaatgcttcattgcgggaggatcgtggagtaaggggatttattcttttgttcgaaatcttgatgagaagatgagatcactggagttaatcacataagaagtggactagttgaagttgctgagataacggtatttataattctttgatgatggagaagcaattatttgcattaattttgttaaaggtggcatgcatagtagattgtcattatctactcaatttcttcttttcctccaaaacccatccaaatttactactatgcgtgagcattgaactgatgagaagtgaagaagttgatctgggctcagtgactttaggcgtttgttcaactcatttgaggtttctctatgttttacctgcttttaaggaggctctggctgttgtttttgcaccatgcattttggacttgcattatgcactggtttgccgcttgaaaatatctcctgatgtatcctattgttaaaggtact

SEQ ID NO: 91935 - DNA, 840 bp, Eucalyptus grandis
  Intron number 2 from transcript Egrandis_v1_0.009617m (loc us Egrandis_v1_0.009617m.g) derived from phytozome v7.0 (c hr-ID scaffold_11; pos 1634293 to 1635132 reverse strand)
ccgccttgattcgcacccatcacggtaggttaatgattctttttttggtaaataggttaatgatctttttcatctgcaaaaaaggactatgactttttccacacgagccttgcgcatgatagaattgttcatgatgaaatcttaatatcatcagtttggcttatcgttaataagtatgtgccttgtttcaggtcgagctctagaaagccatgtccctgatttgtcattggaaaacataaggcgcatcatgcgggatgggctgcttagcttatacgacggactcgcagggagatttcaatcctgtcaaattggtaagattagtccttttctgatagacaatcaccacatatttccatcaactaagctacttcatgggtcatcacgcggtggtagattataaatttgtaattcattggacatgcactatcgagtcacccttaccatttaaaaaggaaaaaatgaagatgaggagaaagagggaggcaagagacgggaaaatgatatttattctcctgtttcaattattaggttttgagtctgtccatcctcaagagaagcccattgatcaaccggaattgactccacgaaacgagtcattttatttaatttggagaaaattcattcctctaacatctcgacaacttcccagaagatagcagggaaatttaccatatctaacgactttttctccattctaacttagacaaaagtttgcctttcccttttcttgttttgtctctagtatcccccatagtgcgtgtgtttgtattctaacgatctctcaccaaactcaaatgttttctagatatcataaaggtgcttgtgaacaagtggccacta

SEQ ID NO: 91936 - DNA, 864 bp, Eucalyptus grandis
  Intron number 4 from transcript Egrandis_v1_0.010780m (loc us Egrandis_v1_0.010780m.g) derived from phytozome v7.0 (c hr-ID scaffold_11; pos 10667434 to 10668297 reverse strand )
gagctgaattggtaaaggtaatatttcttactgagctcatggattttgtttttggatagtatggagcgttctgagccctttttcccccatgctttctcttgtgatcaatctatttgttagtaattttttttttctcttttgaaagtctcttgtgatcaatctttgaggcacctgttgaatgtattgctatcttgccgaaaaaaattgatacttgtgttggttatgcttaggggtgctcctatggagctgaattgataaagatagtaatatttcttgttgagctcatggattttgttgttggatagtatggagcttcctaagccttttttccccatgctttctcttgtgatcaatctatttgttagtcaattttttttcttttgaaagtctcttgcctttttttgattcatcaatttgcctaacatcctttcttatccgttctcatccttattgtgggaagcaaatgtcaactcggtatggttctgcttgagcaattaacaaataccgacatcttttggctcaatttgcttcgagaagtagccttttctattaatagatgcagccttcttaccatgcactgcattttctttgtggcagtattcaacatattctcattgatgcagttggctttaatattgtgtcggcatagtagtattgtaaaattgagatgctcgaacgtgagttctcatactgataaacataaccttttgcgagtagttgctagaaaatttaagtgtcgtcactcggaaacctgtattaccctctctctctctctctctctctctcacttcctcattctctgagttttctatctttgttggatttccaggtactattattcttcatttggggtttcatttgttg

SEQ ID NO: 91937 - DNA, 785 bp, Eucalyptus grandis
  Intron number 1 from transcript Egrandis_v1_0.027208m (loc us Egrandis_v1_0.027208m.g) derived from phytozome v7.0 (c hr-ID scaffold_7; pos 26890588 to 26891372)
ggtggcctcgtttgctgcgatgtgagggctcgaattcccggctctgcctctctcgttgtgctctctgtttctcgtcgatgatcggaagtggtcgtgatgttgtaaagtctttatgttaatttggcatgttcttgctcgatacccgtgatttgttcttgttgcgtgcggtgcacgatgaccctttttcagttgtttttttgcaaccgatgaggtcggtgtgcgggtcttgggatatactaaattgtgctctgtttatgccctctttcggttaattgtcattttgagtttagtcattcagtgtcagattcgccagtctgatttagatgttgtcctgaggattggtttcttaactgagctttttgaactgctctgcacaaatggagattggacattggtgtttttttttttctattaattggtttcaactgtcctcaacactgagcctgctgcttttttcgcttaatctttgcaagaccatttgtggattcgatagaggtattaaatcccacatgaaatttcatgtatatgaatatggtagaacttccttgtgtctaccagggcatcataacttcagcctttccacctggcagaagcagcacgctgagttttcgatagataggaatttgggtcataacccaaaattgaagtaggaaatgagagtagatacagtgagcaccagttttgtaattgaaactgatatggcaatttcggaagataatggaagtggccttttggtttttgttggtgcagttatttgttggtccttgaccgaacaaattggagaa

SEQ ID NO: 91938 - DNA, 836 bp, Eucalyptus grandis; identical to SEQ ID NO: 91492
  Intron number 1 from transcript Egrandis_v1_0.025842m (loc us Egrandis_v1_0.025836m.g) derived from phytozome v7.0 (c hr-ID scaffold_7; pos 50345378 to 50346213)

SEQ ID NO: 91939 - DNA, 729 bp, Eucalyptus grandis
  Intron number 2 from transcript Egrandis_v1_0.003725m (loc us Egrandis_v1_0.003725m.g) derived from phytozome v7.0 (c hr-ID scaffold_11; pos 8846288 to 8847016)
gattccgctgtttacctgaggatctacctgcttgggtatgcttgcatggatcccttaatatgccttttgtagttgtcctctgcaatatgtaattctctgattaagagtgacagtttcttgagaaatcaatcgattgtttcacatgcaagcttactgttgaagagttaaaataggagttgttcatccgtgtcaacttgtttgatgtcatcgatatttgtgtctttttgagattaatttggcattgccatacgtagcttgagatctactactattaattatggcatttgcagtcgaatgttattttggcaacttgtttttttagcacgattagaagataattttctaatttactaagcagacaatgtatttggcaggtcatttgtggatttatatccaatgcgaatttttctttgtttcttgatccaagctgattatcacattttggtaggaattatcttgcatcttttaaaatttggaaacaactgagtgaaaacaactgcaaacatcaactacaatgctttctagtgttcagaaacggtttggaaatggtcctgaaaatgaccctctaaacaagcttatagagttttctgtttgaattttaaaaaaaaagaagaagaaataaaataaagccattttccttaggagccttatttttttgtcctcatacagtgacgttattctattcctgttgcaggctgaaaatttttgttcccataaccattcttgcat

SEQ ID NO: 91940 - DNA, 618 bp, Eucalyptus grandis
  Intron number 1 from transcript Egrandis_v1_0.007600m (loc us Egrandis_v1_0.007600m.g) derived from phytozome v7.0 (c hr-ID scaffold_11; pos 42189668 to 42190285 reverse strand )
cttacagtgccagagaagagaacttaaaaagagaggtaacattcttggcagtttaattttccttggtggagagctggaagtaattagatgaagtttcgaagcatttgagtttggttgtttggtttgaatttgaacgatttagggagaccctgaaaagttgcttctagcacttctaatgctttcgaatcactttccctccaaaaacctttaggtgtacatcaaataaagagcttggttgtacttattgcacgagatatctgattgcttattctcaaaagactcaaattcctctctcgataagtgccggtcgaatcatgcgagaaaagaatgacaaatatctactagcatctcggatgttgctaggaaacactaaattatgttgatttttttttttttttaatatctgtctgacctaaaggacgatggctctggtgtgtagataaagtaatgagtgttcatttcattggagattcctcgtgatcaaggattgtttcatgataaaatccctctctagaaactgtcgcatgtggtcaaagtgaaccgccgtctttgcatcttcatttctgagggatggcttgactaaattctgcaggaggaagcaggaagactcaagtttga

SEQ ID NO: 91941 - DNA, 818 bp, Eucalyptus grandis
  Intron number 1 from transcript Egrandis_v1_0.003648m (loc us Egrandis_v1_0.003648m.g) derived from phytozome v7.0 (c hr-ID scaffold_7; pos 51169042 to 51169859 reverse strand)
aggcttcaggtaagatgggcaaccaatgacttcaccgtttattttcgggtctcccccctctccatttcatggagaaactcattgatttcctgatgaaaatagaagtcgattcaacacgggtaaaaagccgaagataaataagatgtttgtgtgaaatattgcacctaatcgtaagctcacgcttcaatttagtttatcatgtaatattgcttactcatgcttctgagtatgcttgacccaacccaaatatcatctaatccaagagaatgggtcgagtcgggtcaagccagtgccatttagttgggctcaaatctagggtttcgtcttcattgcacacatgcaaagagagagaaggagtgagagagggagatcgggttgtgctctgagtgtgtcaagaagcccacgtcagccaacccaaacccaaccccaaccccaaccccaaccccaaccctaaaaatatcaacatctaaaaatccctacctgaagaatactagggccaggccccaaaataccctaattttagggttgggacaggttgggtcgggctgggtaggcttttttgatatccctaattccaataacatgttgatattttctgatatatgattcacaagacttatattgcaagaaaattgggtatccgtttaatttacttgacaatttggtttggagcgagaagtcacatgcatatgatggatcgataaatcttgtccttatgaagatctaaattactacaaaataattgttgtgagggatagtgctaatgctattggcaaattacagtttgcgaaagagaagtcgagagcggaagaggtaga

SEQ ID NO: 91942 - DNA, 819 bp, Eucalyptus grandis
  Intron number 1 from transcript Egrandis_v1_0.008700m (loc us Egrandis_v1_0.008700m.g) derived from phytozome v7.0 (c hr-ID scaffold_11; pos 4051679 to 4052497 reverse strand)
atatcgtccggggaggtgtagttactataactccggtaagcgactttccctagagcttttctctctctctctctctctctctctctctctctctctttcttcttcctcctcctttctttctttctttctttctttctttctttattttttattttttggtcggtaattcctcctcctttcttaaatgctagctctatcaagagatttttccaaaatttaatcatccagttacatagcaagtttcaattggatactgtaatacgtaggacccacacattacgtcattaaaatctttaaatgacccacgtgaaaaattgccacatcacttaagtaaaatagtttgataaactttgagtagattgagcccgcactgctcttttatcgttcctcaacccatggagcttttctagatttggttactttaaatttgactggggaaaaatgtttgatttgatagtagctcttgtctctggcgttggtttgtaaatcagaattacgtgaccggtggacttaatcatctgatacatctaggagaacaggagcaaaatcgtccttctttgataagaaagatcatgctatggtgacatgatttcccccggcgaatagaatagaactggatctaggcgctatataggagagtgaaagtcaattactcttctttactctagacttctccacttgcgacttttaatgaataaaagcctgtctttacacttatacaatgattgtatcgatttatctttgacttgatttatggcttaacctgaattatttgtatatcttaccgctaaaattctcttgccttttacagatagttcc

SEQ ID NO: 91943 - DNA, 645 bp, Eucalyptus grandis
  Intron number 1 from transcript Egrandis_v1_0.005626m (loc us Egrandis_v1_0.005626m.g) derived from phytozome v7.0 (c hr-ID scaffold_2; pos 60026486 to 60027130)
tgtctcaactggacgaactcgatcaggcttctcgggtacggcttctctctctctctctctctctctcgcgcgcgcgcgcgcgcatgagtagctttggtggccgcgacaatctggaatgaagtcgagagaaaaacagctggtgcagtttagttttaggtcggcgaacgtacggccgtctcgcggcccggtgagcgagtatcgcgacgaattgaacgaaccgagaaaggaatggtttggagaggtgattactcaaaggggcgacggggggtgtattccatcaaaagtttgtagctatggatgttgttctactcggagccatctaatttctcagtgtttgtgaagacgggattacgtaatcgggatgcttgttttttcgctcttattatcaaaaaattttccccttttgacagtatttgcttgcattcagtctatctattttgagtgtttttcttggcacgtgattagggttgtcgacatctcataattgattccagagaccgtcgcacttcgacatacgatttgcagctgattttttttaataatgaagatgcagagtttcaagtgcattactttccgtttcttgtgcaagcgatgcccgcgcttctgactctcctcctttgtcatttgctgcaggacctggacgat

SEQ ID NO: 91944 - DNA, 971 bp, Eucalyptus grandis
  Intron number 2 from transcript Egrandis_v1_0.005626m (loc us Egrandis_v1_0.005626m.g) derived from phytozome v7.0 (c hr-ID scaffold_2; pos 60027182 to 60028152)
aatagtagttgtactctttcttttcttttttggggatagttgtgcttgtggtcatcagtaggacgagttgcgtataacttgtccagtataatagtgagtatctaactcgtcgatgatgtcgttctgaattcaaatgtcgacattaatattcattgctcgtattctatcatgctaatgtgagagagatttgtgctgagcatgtcaaacggctttgaaatgccatttgatgtcgggagatttgagctataaatcagattagcctgtgcactctgagtagctgatgttgctgtgtatttgtttagttcaaatataactttgagttcctgtggtggctaaaaattgatccgttgctctataataagcacagataatcaactttgtcgatgcagcttcaatttattttcctttggattcagtgtttttaatcatattggtaaaactgtgccataaaatgatgtcaggagcaagtgcatttacatgccccaaacgaagtttttatgggaagtgatgccatttggattgaattgtagttttgtcccctatctactgtcccaatttatgtcaaaaccaataatgtcatcaaaactttgctgtttcttgttaagtcaatttcttgactgattttcaagtcaacttctcttggagtacgctgacattatcgctaatgagttcgctgagttttcatttgtataaagtgtgcttggatgctggtaacttctttgagacgaaatctcttgatctcttttaaagctggcttctagctgatggagaatgtcaagatttttttggtgtgatgcattcaattgtgctgaacgtgcttggctaatttgcttgaaccttcaactgtgtttatgtgccaatatctcatctaacttctgctcatgctctgccattttccaaagatcttaagcaatgttgtcgttactgtactttcagagttctcggagtctttgcgggaattgggtgattgt

SEQ ID NO: 91945 - DNA, 983 bp, Eucalyptus grandis
  Intron number 1 from transcript Egrandis_v1_0.015658m (loc us Egrandis_v1_0.014209m.g) derived from phytozome v7.0 (c hr-ID scaffold_7; pos 33006787 to 33007769)
aattctgggtatgttgtgggttctgctttcttccttgttttcgtctttctgcccttttcttggcactgcttggaaaagtagggagctgggaagatggtgatcggtattcgttcttggagatttctgaatcagtgggggttcttgttttcttcttttcccctgtctagagagtcaagaccttctggatttcctagaggctgaccgaactcttccccagctagaaaatgcgactttgacttctgcatttctttttttgtcttttgtcaaaacctgacctcttttatcttttcctcctatgggttttcagttgattcccttttttccttctttcgtcccttaactgctgttttatcacgctttcgtctttgacggaggaaatgaggcgtgtcttgccggttgtgattttttctatcttcgcttaatctgcagctgcagctgaaatggaagcaaaaacatccaatcttggacttttctttgacgtctcaagctaaaatttctcaattgatgacctactagttcgattgcattgctgactttgttgtgcgcttgcagtttatatgccttgtgttgaggtgggctgtagaatcttttatgttactttgagttccagtagattatggctatgagaattttaagagtactaagtcaaaagagggtctgcgatcaatctgttcaatttgatttcacctgatttctattgatgtatggagcgttcttattttgtaatcaccaatcttttgcttgggggaagcaccataaacactcctcgcttttgattcaaggaccacttacctctatctttgtaaaatatcattcacacacctctaagcgtacctctattttctctaaaatccaagagtgcaggtataatgaaaggtgaggtctgctgttggtattatcccttttgtttatgactatgatgacatggttgctatgctactcttgcagtgtgaatttattgacgtgatcagaacttggaaata

SEQ ID NO: 91946 - DNA, 853 bp, Eucalyptus grandis
  Intron number 2 from transcript Egrandis_v1_0.006408m (loc us Egrandis_v1_0.006408m.g) derived from phytozome v7.0 (c hr-ID scaffold_11; pos 37968606 to 37969458)
aaaagaatatcatcctcactcgcatcaatcctaaggttagaagatacttttgctgctattcttgtttaggttttttacgcgttgtttcgtctttttatgtgtcatagcataagctgtctctaacggatggaacactggctctgtgggggatagttactctttcaatcgatgtcctcatgcaccataggcgtgtgtattgtggcaaatcagaactaggacttttctcttgcatcaaggataactgttttgaatgggtcaaagggtttgaagtaggaaaaaattgactgctgactcatttactcatagaaagaatgttggctccccttgtttagttcatttatctacagtagtggctcttgccatgatgttttcttttttgatttgctggcatctgacaaaagttgggagttctcgtgggcctttctagtgagcaaagacatactgagttcaaatggttatgagcaaggcatgttttatattcaagtgtatgctacaatctaggttatggctttcaacagaagttgctgattaaatgtttttgcacattgagaacgtgatgtacataatagtgggctaacttcttctgtcatcaaattcaattcgtctgtccattattcagtattatgttatagtaggcaggttttgattgtagaggttccacttcttgtttctatttgcaatgtcttgttcacccaactaagaaaaatcgtgctcaccagataatgtccactgatgatatttttagctgaattatacgtttcaagatatagaaagccatgtgtatgtttcttgtcagcatctttatttcctttatgcagatccgtgacaccagtgtgctagtgagattacgacc

SEQ ID NO: 91947 - DNA, 514 bp, Eucalyptus grandis
  Intron number 1 from transcript Egrandis_v1_0.002077m (loc us Egrandis_v1_0.002077m.g) derived from phytozome v7.0 (c hr-ID scaffold_7; pos 51742852 to 51743365)
gggagcttctcatcgggtaactttcgtaatagcgggtatttaagagaaaagcaagggggaataagaaaaagagaaaattgaaaaataaggcgaaagggggatcccaaaaagattttcgggagagcccccgttgccccccacccccccaatctctcgctaatcgtccctcaaaaactcgaataattcaaaatccaatatctggtctctccctccgcttatggcctttcatgtagcttgcccaattacatggtacgtgctctgcgctgtggctgcggcgtttcctcccccctcttatttgcctcctccttcttcccctcccccccctgctgctgctgctgctgctgctgcttcccccttccctctccccctcctcctcatctcctcggcttccgtttccgctcttccgttcgccgcccgtcggtctcacttttccgttctgttgtttgtttgttttggtttttttggggtttccccggcagtcgccgaatctgctactgctcgctagggtttccca

SEQ ID NO: 91948 - DNA, 848 bp, Eucalyptus grandis
  Intron number 2 from transcript Egrandis_v1_0.014092m (loc us Egrandis_v1_0.014092m.g) derived from phytozome v7.0 (c hr-ID scaffold_7; pos 10034648 to 10035495 reverse strand)
cggctgataacggtctcgcggtatgtgggctaatcttttttgctttcgcttgtcctcgtgcttcttgtatacgagtgtggttagattttggacggaaattctagtgtgcctcacgttttgtccgcccgtgcccgtgtgttggaccctttggttgtgcctctggtgggctggacttgtataaggctataccgactgcagtggggtgggatgaaagagagtgttacttccagctagtttgtcctactgtattaaaccagcaagttcgagcttatgtctgggaaatgcgatcatctcggccctcctacttgtgcttgcttttttttttctggttttcattagcattggatcgagcgaagaaagtgaggtgaggatgtatcagtggatatgcaggtcttcaggaaaaaggaggggtgagggaccctgtggggagtgaggggaggagtagaataagaaacttggaggggtggtgtctcctcattgagaatagataagatatatttgttttaacattggctgaacacgttatacttagacattgacttcaaagttgattgctctagtgaggaatatttcacatttcgttcctattaatcaggacttcaattttgcagtgactctttggtcatttaatctatgatggtttgagacaagacctgtttctaaaatgcaagctggagattttgcttggttgggtctttaatttattgttaagctgaacatatgagcagccaattatttcctcttcattttgtgtaattggcatttttttctctgttagatttgattcattgatacatacacatgatgctctaggttgtggatttgtcgcattttggacgaataagagg

SEQ ID NO: 91949 - DNA, 726 bp, Eucalyptus grandis
  Intron number 1 from transcript Egrandis_v1_0.046839m (loc us Egrandis_v1_0.046839m.g) derived from phytozome v7.0 (c hr-ID scaffold_2; pos 2811570 to 2812295)
aaccagagcacaaaggccagaaaaaaggtgccaaaatgaactaaaggtttgtgattatagagcacttgtgctcgttcatgcttagagtccatacatgccatgttgagtcatgtgatccgaaccatcaaatgtgtggggctctacactcaccccaccatgcaacagatggagttcgcctaaacaaaactcatcatatttgactgctcatcacactcactcaatcaagtgaaactcgtcatatctaattgctcattaccctcatccaccatgcattgtatgtagataggtttttcacttcagtatttaaaaaaaggaaaaaaaaaagaaagacttttcataagaagatattgcacaaaactgtagatcaagtcaatcacatatgtgaaaacaacactttatctcacgagaaaaatgcatactttgcgaagatttttgcaatgtgattgtccataaaccgagcttatccaagattaatccacttcaattggttgagtggtggaaaggtgaccaggtgagtttcatgaagaactgacactggcccaaatcatcggcgggcttgctggaatgagccgaacttgggccggcgacagtacaggagcaaaaacctgacagagcatgttcgcaacccgacacggcattgtccccgaataacgatgcggataagaaaatgtcatcgttcgcttctctcaagcaaacaaggacagagtcgaaggaagcaaatcttcg

SEQ ID NO: 91950 - DNA, 211 bp, Eucalyptus grandis
  Intron number 2 from transcript Egrandis_v1_0.052276m (loc us Egrandis_v1_0.052276m.g) derived from phytozome v7.0 (c hr-ID scaffold_7; pos 26046653 to 26046863 reverse strand)
acacgaaggaggggtttaaacgtaagaaaataaaatatggaaagctgggatttatgttctgtttctttctttctaaataattcaaagaggaaattttcagacgaaagaagagtagtacaaatccattattgtttataagatactctgtgataacaaataacggctattttctggtttttagcccagctgaagagaagcttgaagttgtgga

SEQ ID NO: 91951 - DNA, 618 bp, Eucalyptus grandis
  Intron number 1 from transcript Egrandis_v1_0.031429m (loc us Egrandis_v1_0.031429m.g) derived from phytozome v7.0 (c hr-ID scaffold_7; pos 48134565 to 48135182 reverse strand)
ttgtgaaggtaagtaaatgtcgaagttcattaacctctcgtccattttcggttgcttattcttgttatttagtccatttagccaagcgtgctgcatggtgtttgaaaccagcccgactggcaattgcttcatgttgaacttctgtagcaagaacctgattagtttctctagttggtgattacaaacatccttgctaccacgtgaaattgaatagaagatgatgacgaaatcatggcccaacagaccattatcgacccttcactgaaaaatacaaagccttttgtctactgcctgtaaatttagattcagacatgctctaccgcacaaactccagatagatatcaattttggagtatattaacctcaataaatgggaatgagacttccttaactgagacattgaaggtgggtcatcgctatcaagccagaaaaattaaatatccaggaaaattcatagaaagttctgaaccgaaaaaaaatttccatgacaagttccaaacttaaatcagttactttcaacaataatgcaacctttcgaatattcaaaaagaaaaaatcttacatgttctattcatactaataggtttctgtgccagcttcaagtactgctactttcga

SEQ ID NO: 91952 - DNA, 978 bp, Eucalyptus grandis
  Intron number 1 from transcript Egrandis_v1_0.043804m (loc us Egrandis_v1_0.043804m.g) derived from phytozome v7.0 (c hr-ID scaffold_11; pos 43525507 to 43526484)
actccccgttctaggcttgttcaacttctacttaggtatctctaccttgtagatacttctatgctcaacgcttggttcaccaattgatagagaactcacatcctttagagattcctactagaatatcatttgcataatggcttatgcatctttcacatggttactcaatttgattattttgtcatcttcaaatcatcataactgattttcctaacaatgcatacgtacatatgtacttaatcgtggcgccaaagttggaaaatctattgatccttgaatgattgcgtgttggcgccttggagattgcattctcgacttaggctttatttcttggaataacatatgatcttaaaggacggtcggtcattccaaagacatttgctgcacatgctgctgaagcttcctatcgttttggagtttatagcgaggaatcaagagagaagacggagaaagaacctttgcaaactttaacctcttccacttgttttatatcattgtttgattgttgctcgccatatggagacggacgatcactacaagaacgttgttagggaagttatatgaatttgtcttgttattaaatttccatcccatacttaatttgtatgtcgtcgtggatattgatcttaatttgtatctcattgctgatattgattgaccaaatgaataggcattgccaagtgcgatccattcattgagaggactagactaattgtaagatcgtcagatatttggtgaccttattttttgagattgccacaatatattcacccattgtctagaatgatgaattgaactccatctcgactggccgcaacaagagttgaaccctcaggctatgtctttcacttacgtttttttttttggtcgtgatgtctttcacttacttaattttgccactttccttttagcttcaattgtcttgctgatcattttctcagaggacccaaaaaacaaaaaatctcgctaaaggttctc

SEQ ID NO: 91953 - DNA, 1016 bp, Eucalyptus grandis
  Intron number 2 from transcript Egrandis_v1_0.047718m (loc us Egrandis_v1_0.047718m.g) derived from phytozome v7.0 (c hr-ID scaffold_7; pos 1189008 to 1190023)
gcaacgagggagcttgaaagatcacctctttgaaagtatgcgcacttgtcctttaacatgtgcttggtgcccttaatgacatgtcctacattatgttcgtactatataagtactcacggtaaaacgacccacctgtagctggatatggaagtcatgtctcccaagaaaactatttgattgctactagaatctagataataattttaaggaggaaaaaatgtcacttgtcgttattatggacgtctttccagaagatagtagggttcggaaccataatttcctaaataatttacaatgctcatactctgttgaatgttcttctgccggatttttttttttatatgtaaattgcttttttgatgcgccagcgaccaaaaggatgcaataccagagactttcaatgttatcatatactcagaggacgttatagttcgatgccagggaaaataaaagaaatagcggaagatcatgtgatatgctcatgaaatgtcactttctagcagcttcgtccgtgtgtgattttagtaacgttttatcatctttgtctctcagtagtacatcttagggaatccagaggcttaattctctctaacttggtcatttaggtgcaagaacaccagagttgcaccatattgaggatgaaacttagtacaaagcttgcaagtaggctagtaacgatatttaatggaagggacatgcttgccaattgaacaactctcgaaagatactaaatgtttttaatagcagggcatattcctttgcataagcattattttcatttccacgagaaaagaaagggaatcctgctgtagtttctaccatattcttgtcctgcctactaattctcagcagttattttccaaaagttggtatcagttttaaccaaactatctttgattatgctggcttcagaaagggaatattgatttatctgtgatgacaaacattttattagttaattcttgtgttcttttgtgggttgagtagggaaattgcctcttacttggtctaccagg

SEQ ID NO: 91954 - DNA, 595 bp, Eucalyptus grandis
  Intron number 1 from transcript Egrandis_v1_0.031131m (loc us Egrandis_v1_0.031131m.g) derived from phytozome v7.0 (c hr-ID scaffold_7; pos 10677070 to 10677664 reverse strand)
tgatttgcaaggttcatctgtctcctccgacatcagtaagtagctacgtcctcccttttgcaactctcgttgctgggtatggtgtccgtgtagtgcgtctgcttgcgttcttgcttttgattcgccgttctttgattccgggttgctcgttttcttgcattcccagcgctctgacgtaatgggtcttgcccttctcttcctaatttttgtgtttccgaacgttaacgcgtggggtggtctgttccgtattgctccggtgcctcgcgggttgtttttgtttccttctgtttggagccttctcatgctcactacgtgtttgtggaaatgtcgggtggttagttgacgcttctttcctgtatggaagagacgagcgtgggtgggtcaagggctcctctttcttgttgcaaatttcttggagtaatattctttcagaaaaagcgcccctcggtattggtggccatcaggtttgaacgtcttattctctttttgattcactgagctagttaagtggattcatggacctcgtggttgtgccaaaaataactcgtgattttgttggaacttcatggcagctgaattggcaaaagctaaataa

SEQ ID NO: 91955 - DNA, 296 bp, Eucalyptus grandis
  Intron number 4 from transcript Egrandis_v1_0.038517m (loc us Egrandis_v1_0.038517m.g) derived from phytozome v7.0 (c hr-ID scaffold_11; pos 34766688 to 34766983 reverse strand )
aaaccgtctgaaaaaataagccactttgtacacaggttggtttgagctttgcacttgctatgatctccttatgaaacgttgcttttcaagagtctaatctagctatgatatatccctttggctgcatcggcttcttttccttagatttcctttctatacctttttttttttgtttcttaaggcttctttattctttcttcatccacgagttgagaattcttatcttaatttacagatttttctagaagtttcagggtattctctgaatttgcattaatcttgataaggttgtaggc

SEQ ID NO: 91956 - DNA, 423 bp, Eucalyptus grandis
  Intron number 3 from transcript Egrandis_v1_0.029597m (loc us Egrandis_v1_0.029597m.g) derived from phytozome v7.0 (c hr-ID scaffold_11; pos 19869750 to 19870172 reverse strand )
acacagattgctcggctcgcacacaacatcactatgtatatttcagttctatcaattctcattcagttcgttgcttcttaaaaatcagacgcttgcacttaatgtgtgtatgcgatgatgctacatgaagcaatcaaacatgtttttctcagtaactgcttgttgcaacttttcaaccacttcaaacttgattagtaactttgtagaggcaccggatcttctgattaaagtagaaactccttcgacctgcaatgcctgcttcttgcataatcgaagcaatgacgccctttttgcatatttcttgtttgtagcataggattgggtgccttagcaacttcacttaattggaagcgcaacagcatgattattttgtgaggattttctgtccttctcacaaatcggtactttatattaatgcaggag

SEQ ID NO: 91957 - DNA, 955 bp, Eucalyptus grandis
  Intron number 1 from transcript Egrandis_v1_0.045105m (loc us Egrandis_v1_0.045105m.g) derived from phytozome v7.0 (c hr-ID scaffold_7; pos 46584140 to 46585094 reverse strand)
ccggctcggacctctctgctcatctctccgtcccggtaattacgcaatattatttccatattctagcttactgtatacgaaagactgatttgaaaccaaaagcttgataatgacgaaggatttcggccgatttttatatgatcaatccgcccttttgcgccacgtcgcctcaacttttttcaatttccggccgttggatcggcggtggatgaccgaatcttggcggttgccaggctggcacggcgtgtcgagttgtctcaagtagcacgcttgttccatacaccccggggtaaaaaattcacgacgcgggaccgacttttatcgaatctcgtgaataaaagaaaaaagtaaaagaaaaataagttaatttttaactttcatttatcgatacgctgactttaggtggccgacggtgtcgttttcggggttaaattaaaaacaattggcggaaaaatcagcgtcggtgactctaccgtgactgctagagagagagagagagagagagagtggagtgcagagaggcacatgatgaatgattgacgcattaactggcggcatgtgacttcgcggcgtgccttgtcgctgcctcgccttttcattttcaaaaatcttccgaggtcgggccccgaccttcatcaccacaccagccacattgcaccattcaaatgggcggctgaaatttcaaaataagaaatcgaaaggtggttctttcaagtgtttgttgatgctaaacttcgtaaaatacacattggggaatttggtagttttttttttaacctgctctgtcttctgtggcgttcttgatggtcaacggttaaaatttgtaatggttgcgcattaggattgtcctagacgactgaattttagacttactggagtaggtgatgagtggggaagtgcgttgctctttctggtctgacggaggtctttgttttcgatgtttttcttatgcagt

SEQ ID NO: 91958 - DNA, 650 bp, Eucalyptus grandis
  Intron number 3 from transcript Egrandis_v1_0.021248m (loc us Egrandis_v1_0.021248m.g) derived from phytozome v7.0 (c hr-ID scaffold_7; pos 49894044 to 49894693)
aagccgtttcccaccggggttccaatctcgtcgaggtcatcgtcgctagtagctactgcccttttgctctctcttcgtctctccatgcccacttgtgtttacagtaatgaacatgttgattctcgttttgtgagtaacggatttacgtggaaatggtgttttcctatgaatagttttggtgataatcagtttgttgaataactacttggtaaagggaggatttgttgaatgactttttttgggttgatgtcttttgcttcaaaaagggttatttcatacaatttttcgagggtggtagttagccgccgcacgggcagcggcaactgtcatttgattaatcttcggaaccgacttacaaagtatcaaaacagaagttgttttggagagttcgacagtatggttgtcaaggcatctgctgtatgcaaaaagtgtggctttctcgtgtaagagtgcttttaagttttggtttgtccagtgttgtctgttgagtttatgggtttcacatgtaagagtacatgtaccgatttctctagtacttttttatcaggcttttttttttgtctgtcattctgtcctctattcctctctttttcctttcctctttaaatttccaaattactgattatgctgtcattttttctcttaaggtg

SEQ ID NO: 91959 - DNA, 931 bp, Eucalyptus grandis
  Intron number 1 from transcript Egrandis_v1_0.032837m (loc us Egrandis_v1_0.032837m.g) derived from phytozome v7.0 (c hr-ID scaffold_2; pos 29084238 to 29085168)
taaggggcagcaagcctaacaaggtaattgctaagtcctgtttgtcctcatcttcatatgcataatatcttgaaggttttatatactcgctgaaaattgtctttgtgcctttttgttccaaacaaattcattgttgccagaaaagaaattaaatggtttaatgatcaagagttattatcaagcttttggtgattgccactatctttcttacgtttcaacagccatgtaatcaactatgaagcatgatattcagcaatggcatcctgagaacaaaacttttaagatgatttcagatgtgctgtacttgttatatagtgcgcttccttttaaaaaaattgatgagggatatgcttggccagacgtaggacctgtttgaaggctccatttggaagaatcatgtaaaagtctaaagagtatctacatgccttttgatatttgttaaccactatcagaatggattaaatcagacaaggcagatgtagatggtataggactgcagtgaggagatggcaatacaagaagacaatggttttgtctccacttctcaccatcttatgtgtggttgccattggcatggctagtctcaccaatcaatgtccctactgctgtcggcttagctctcttatcgtgtgttatttggttctaagcagtgacttggtctcttcagccaaattacagcagctgcttgctctgctgacgtgatttagaggttttggttgagcaagttgtggctgcaatttggtggagaagaccaaggcaccgtcaagtcttgggttggcaacttcgtgtcaattgtcatgactttttgtcgcctttgtgattggctcattccactatgacctctctgtcagcacaaatatcttaaaaggtcatccattaatgtcagaaattaattaagtctgatgtttattttgattttcaggtgtccatc

SEQ ID NO: 91960 - DNA, 577 bp, Eucalyptus grandis
  Intron number 4 from transcript Egrandis_v1_0.032837m (loc us Egrandis_v1_0.032837m.g) derived from phytozome v7.0 (c hr-ID scaffold_2; pos 29085968 to 29086544)
gcaactgggagcaacgacctttgaatcaaaattaggttattttacatgttctttttccgtttttttttatatattgcctcagaaaggaaattgccggaaagatcacacaatttaatagcagaactcaaatggttgcagtagcatactataatgtgtggaatgcatctggaagaacgatatcagtacacagaacttcatggagacttccaattatatcttaatgctccaaacattcgagagcctagggtcagtagacatgataatcatttgcttaagcgaattctcgagatctttagtgcaacaaaaattctcgtggtgtctatttaaaacaatgtttatgctgatattttttaaaagaagttttccttttttttatttttatttttatttttatttttaacaaacaccatttgctatttcaactccaagaaagagagagaaaaataaagtatattaaggagcaaacacagcaaagaaaagaaaaggagaaaagttaactgttggtgtttcctgaaatatgattagagcagtagtcctttgatgtaactgtaacgatcgcaatgtttgcagctggaat

SEQ ID NO: 91961 - DNA, 707 bp, Eucalyptus grandis
  Intron number 1 from transcript Egrandis_v1_0.026437m (loc us Egrandis_v1_0.026470m.g) derived from phytozome v7.0 (c hr-ID scaffold_11; pos 28536076 to 28536782 reverse strand )
agtctcgtccttttttcccgattcgggttctcaaggtgcgatctccgacctccttgtctatcgtcatggtttctgccggctcttttttttttttcttttttcctgatcttttcgttaacttggtctagggattgggcggtgggttggggtttggcggtgtttgatttccgcctgattgatttgatgccatttgctgtccgattctgttttaacgttttttttttttttcggcctcggtttgggattcgtctggcgacagtagatttcgaggaatttcgcttcgcctctcgccgattgttgacgggagggttgaaaaacggagcgatggtccgtaaaggaggcgcctttatgcccgtttccatgaaataatcgtatttcagttccctttagatttttttttttttttttacttgggatttcggatgtatgggatcccgatttttgtacgctcctttatctatggggcttcttctgaatcctttgacgtccgtggaagtggaatatcggtgctcttatttgccctgacgttgcagtgttaacaaatgttatggaattctgagttagttgtgattggaccgattttgggcggatgaatctcgcttgatgtcttgtgttggcaatttctcattttttgtgcttttttatttatttatttaatctacgtgccatttgagcagtagcgttctttgtgtaaagcaaattggaga

SEQ ID NO: 91962 - DNA, 867 bp, Eucalyptus grandis
  Intron number 2 from transcript Egrandis_v1_0.043836m (loc us Egrandis_v1_0.043836m.g) derived from phytozome v7.0 (c hr-ID scaffold_109; pos 25698 to 26564)
tgctccatattaacaggtgattaaatttgaatctgctctcttttaatcgtgtttcatataactctaacctgtgaaaaatgcaagagaaataagactaccctagttaatggcatgcagtaatcttggccagaaactaatcataaactgatggaagaaaattttgggagatcaatgaatcatataagagttaaaagaaaattctaatgttcataagaaagacaaataaaatttgataaacgataacaaaaattgataaattaaggaaaaagaaccaaatggatattggtaagtaacgtgaatgagagttcgtaatcaaaatagttcgtaagtcactcatataaaaattggtaatttcatagagagttagtaaatttaaggcattgataaggaaacaaataggtgtggtaaaagataggaaaacaattagtgaaatggagaagagatggtgatttcataaaagcattgttgagttaatcatcaaattgttggaatatcagtttaccgatgatatatttctaccgacggtttttgacacttacaactcactgaaaattatctggcacgaaaaaattcaatttgtcttatggaacaattagattatcctatgaatatgcatacatataatatctataaatatacacacacacacgtatatacagatatttaagagtcatgggtagacattgtaattaatgaatgttttgggctaagtttgacagttcccacctattttatcaagattagaaatgccttccataagcaaagaaaactcattaatatacattttaatcttattatacaaataatctctgatattactcgaaccctctaggacattggagctttggagcaagctactacaagaaa

SEQ ID NO: 91963 - DNA, 947 bp, Eucalyptus grandis
  Intron number 1 from transcript Egrandis_v1_0.054250m (loc us Egrandis_v1_0.054250m.g) derived from phytozome v7.0 (c hr-ID scaffold_7; pos 25327036 to 25327982 reverse strand)
aggagtggctgaattcttgtgccaatctcaagaaggtgatctctctaattggcttacataaaatagtaaatctggggatgaaactcattagttcatagtatatttagcgtttgtttggaatagctgcaggtttgatatatttatattgcgttatgtacttgtgaagtactatatcttctatatttggtgatacgttttaaagttatagcacttcaaaattgagtgactaaaagctattgcagttgctgtataaaatggactgatctcgacgactcttgaaaataggttcattttcatcgcctcattctactaagataggttgaagccaattatcagaaaaaaaaaaaattctgtttgaatttgtctccattttttttttaaaaaaacagttacttaatattgaataaatactatagaaaaaataaaaataaaggtgacttcaaacttcgacttcaaacttcaaagttagaacaaaaaacctcaaggtaaagataaagtcacacaaaaacttgtttgatagaaattcttaagatgagtttcgttataaaaattatttgtttcatcaagggcgccagattgtatgttcagattgcaaaatggccttttggctgggcggtggagatttaaaatttgtcattaattaaatataataatgttttataaatctatcatgtatatagtgatcggcggcatgagttttctcaaatagttgaaaaacaattggaccaaaatttggaaatcgtcattcatttctggtggctcagaaacatgtttgatatctccgaactgttgacatttttctcttgttaactgttcatgacaggttcctcaagcaatgagtttgcacaactaagaaaattctcctctcttgttatttaatttaactaacccctttcaataataaattaataggtgtttctagccggagaaagcgccggcgctaacat

SEQ ID NO: 91964 - DNA, 723 bp, Eucalyptus grandis
  Intron number 2 from transcript Egrandis_v1_0.012515m (loc us Egrandis_v1_0.012515m.g) derived from phytozome v7.0 (c hr-ID scaffold_7; pos 42868938 to 42869660)
ggtacgtcctgtcttcttcgttctgcaagccctttgcgcttctcgtgctctgtacttcttctgatggtcgtctcatgatttcagtgccttttttgcttttgtttggttgggttaatcctcccttgttttcgtgtaaaattttgcggtgagtgctgctcgtggtgggcattgtcttttgtccttggtcattgttccattgccctgtcaactaattccatgaacccttttggatttatggtgtcaaacgccagatttagttctccgctttggctttggagtcctttttaaggaactttccagccgtcctgcatatctgttatgtgaattaaaaatctctggtttttcgccgtttcgtttttcggtttttcgttgagcgtagcgggtttggtgacgatttttatgttataattttctctagattttggagatgttgttgaatggcctggtctgtcttattaaacaccacctagtctttaaggaattttctgcgaatgtctcttttcttctgtagtgtttgtgggaagctcacaaaagggtatctaaatctctgattcctcggtatcttttctctgattggtgttgggggattctagtcaactgccttctcttttttcacttgacttgattggttctttccattcattagtatctgcttcacctaaggaagtaactttgaaatttgcttccttttttcttgccgtttctgcttctacagacatcaac

SEQ ID NO: 91965 - DNA, 814 bp, Eucalyptus grandis
  Intron number 1 from transcript Egrandis_v1_0.043464m (loc us Egrandis_v1_0.043464m.g) derived from phytozome v7.0 (c hr-ID scaffold_7; pos 33573387 to 33574200 reverse strand)
gagtacatactctgttggtgttttgcggaagcgtgtgtgtgtgcaagtgtgtatgtgtgaaatatgggctacaaaggcaagggtgtatgggttaaaaaaagaacttttattatgaaaacttttattacaaaggaagggttttggaaggagtgtgtgtggtttttctacaactcaaaacacacaccccaacccctatttataggcatatcaccgccattctccaccgacattgagcacttctagttgattctccatttttctgtatttttctgttctctcggctgcccacgtactctagatcattctttattcatggtcaagcagccattttttactttcatacaagatttcccatgcacgtacgagacttctctagtttgttctcctttagctgctattcttgacttttcttttgctttttgctgtccacgtggtttgctgcccatgtaccagaaaattctccagcatgtgagagtcttctttaacttgttgctgccgactttgctccttctccattaaacatgagaagtctagttagttctagagttttcacaaaatggatcatattttaacactcctccttgatccatttttgtgatactccaagcatgtttctcaatgtctcgaattttgctgttggtagtactttagtgaatatgtccgcaatttgatcttcagtcttacaatattttagctcgatatctcctttgctttgcacttcacgaatgaagtgatattttatatcaatatgttttgttcttccatgaaagactggatttttattttgtacagctttcgttggacacctgtttag

SEQ ID NO: 91966 - DNA, 986 bp, Eucalyptus grandis
  Intron number 1 from transcript Egrandis_v1_0.037731m (loc us Egrandis_v1_0.037731m.g) derived from phytozome v7.0 (c hr-ID scaffold_7; pos 1351953 to 1352938)
ggtcgcaaagcaggtcgttttggggaagatatcttcttgacaattactatttttttggctttgttgtgatttccattgcattaattaaattattcttatctacctagctgcatgatcatcttttatatgcacctctattttgaatgctagttgttggaagtagttaggggtgactggccccgatcaatccaattcggttgtcgggtaattcagtttcaacgtgcaaaatattcaaacttcactagtatgaatgtcaatcacacttcgtgtgttttacactttaccttaaccatgaaggccatgaacaattcggctaagagttatgtttggcttagcttgtatagacaatctctcttctgctctttaaatgtttagtcgatgtaggactcttggaggcttgaagtgtcttgtgggtctcttggagccttagttccacatccaacatcgagtggaagatgaaactaacaagtagattttctctataaataaataagtaacaaaaagaattttaatggtcttttggccacataagaggttcctatctcaactgcaatttcggttgcaataagttatgatgtttacatattttatatgttacatatataccaaaaaaaaaaaaaaattgttcggtccggtttggtccaattcccacttggaactgggaattggaccgaccagccaccggttctcagttcgggcggttccggttgcacacccctagaagtagtacaggaattcaaagttgaagaaaaaaaatctggagatttgtactcattcgcatcgtgtgaatctttggctagacagaaattgaagagaaggaattattgttgctttttgacaagctttaatgctctagggtttggctattttctggcttctgtttctgcatcaccttttctatgcttcgtcttttcttggatagtttcaccgtttaggtcggagcaatggacgattatttatcaaacaaattttttttttgcaggtgc

SEQ ID NO: 91967 - DNA, 770 bp, Eucalyptus grandis
  Intron number 1 from transcript Egrandis_v1_0.011153m (loc us Egrandis_v1_0.011153m.g) derived from phytozome v7.0 (c hr-ID scaffold_7; pos 48061211 to 48061980 reverse strand)
agccaccaaggaaggtgcccaagacgccgcataaggtgaagaaattctgctgctttaatgtggcgttgttgagagtaatctcgactccttttgttaaaatatcctatagcctgcctacgagcttgtatgctctctgtatctccctcccctataagattaagtttttggattagactttgtctccgttcatcacattccacatatcgtttataatccgctttgcacatgagagtgagcttgtttatggagtttatatgacatctataaatttaagcttttgcatcgaacattttaacacttttgatcattttttctttcaatggaagatcgtgtcaaggttgaggatgaaggatatagctgtgtccattgcctaagaatgagttgatgaactattcattaatgctgaaatcggtgaagaaaattgatggatcatagcaggcgtttctcgtaagcaacttgtattagttagacagcaaaatagtttagcaattggactaatatagcaaaactggcaatcttgtacaactccagttggaatgctgaactaaaatggcccaaaggagtgggaacccagggaagggtaatagctagctcattttgtaaaccgccaaactagtgagtgcaaaatagccagaaatgagccgaaaataaatccgcagctggtcggaagaaattagatcaaatgtagtgagcttaattgatggctgtagtaggtattaagcactaaagaatgggagcagacaaataattgtttactatgcaggttctgg

SEQ ID NO: 91968 - DNA, 716 bp, Eucalyptus grandis
  Intron number 2 from transcript Egrandis_v1_0.030341m (loc us Egrandis_v1_0.027058m.g) derived from phytozome v7.0 (c hr-ID scaffold_7; pos 756372 to 757087)
tggaggtggcaaggaggcagctgcttctgttgtaagttttccttagcaagagatgtccttctcgagtcaatctagcactgtctttaacagttccatctgtctggccttactgattacgtggtaataatgatatacccgttatgctgtgcaaaatcatattttcttcagtggttgagattattattcttgaaaggcatttggtgggacatgttttcctctttgttttagagctatgatgaggtgatgaacgaaacagtaatgaagtgaagccataaaatcaccattaattcagcaagaaatatgtgttgtctgataattcctaagtgctgtatcaaaagttcattccagaaccatcagtaccccttaggtaaaagaacagggaaataaagggactttgttgtgggccttttttccaattgcacatacattccttcattttttggctgataagaaagatgaccacatttagtttcaattgtgtccttatctagtcaccaaatgatgcagagtgtattcttttactggaattttagtgctccaacctgtgtttgtacttcctgtttaacatgctttttcatacttcgtggccaaccattttgaatttaggtaaccgagacccttctacagataattcatgaagtatggcatgtggttcagtgtaattctatcacacactgatggtggtaaaagactttgctatgttttgcagagcaagg

SEQ ID NO: 91969 - DNA, 639 bp, Eucalyptus grandis
  Intron number 1 from transcript Egrandis_v1_0.045711m (loc us Egrandis_v1_0.045711m.g) derived from phytozome v7.0 (c hr-ID scaffold_7; pos 40533572 to 40534210 reverse strand)
gaaaccgaagccccctgtggggcgggccggtcctggcccccactcaatgtgacagagcggccctcaccaacctggccctggcttccctcattgatggctggcagaggaaaacgaaaggaaaacgaaagaagaaatggaaaaacaaaagaaaaggaataaataaataatttttaaaaatatgaaaatattatcaaaaattgtcttcattagcaaccatcgtgtgccacgtagaacggccagcattcatataaaaaaatttcggccaaaattgactagattaactcaagtgaacaaaaaagtaaaacgatttaaaacttaattgataaaattgaaaattttatgattgaatcagtaaaaatataataggtttaagactttttgaacaattttcttgatttattttctgtttgttttgcatgtgcacagcatggggacatataatagatggttgtccccacttagcataactaacgatgcaccgtccctaacttgatctctaagcttgggctatagtatgctttttctttttcttagtgcatcaacctcagcacaacatgaccgtcgctaatcaactgtcgaatgtcaaatgtcttcttgtggattgggttgtgttggagtggttaaggtagaaaaagtctg

SEQ ID NO: 91970 - DNA, 827 bp, Eucalyptus grandis
  Intron number 1 from transcript Egrandis_v1_0.026566m (loc us Egrandis_v1_0.026566m.g) derived from phytozome v7.0 (c hr-ID scaffold_11; pos 28099847 to 28100673)
tcaaccagttgaggaatcgaagccaaaacctcaaggtcgactaagttctaagtaactgggttgcctacgggtaagttattttaatcaaattttcatacaatataaatctcattaatcatacattatcaaatttttacatgacacatacacgttccaatccatattactaaaatacatctatgtttaatcaaatttagaaaaatttaaatctaattgaaaaaaaaacgagttcaaaattaagtgagaataaaaaaaaattgaagaaaattcataaaaataagttgaattcaaatatgttataaactcatttgatacttatattactattggttttataattttaaatttatttataattcatttaatgaatatgattaacctatgaaataacttaacttatcaaatatggtctatatgtccattttggtagtttcacccgtcgcccgtcacatcggctctggccacgtcatccctgtccatgtcctaccctaccccacattttaaatcaatcctcgagacgacctacgaggctttgaccgtccgatttctttaaccggacgacttggcgcagcggacggctcagatcgcccagagaggaagcgtccgggtgaagtcgaaaaacaaccacgctgcacggcacgggattcatagctccactgtttggccgccacgccaccaatccgaggttcgttttgccgcgtacagtttaattaacgccaatttcttttactcaacaagaccgagaacgttaaacaaaaacaaaaaacaaaaaaaaaaatccacaaaaaaaagaatatccgtttattcgtttatctcgtgcgcacaaa

SEQ ID NO: 91971 - DNA, 801 bp, Eucalyptus grandis
  Intron number 1 from transcript Egrandis_v1_0.032427m (loc us Egrandis_v1_0.032427m.g) derived from phytozome v7.0 (c hr-ID scaffold_7; pos 51543199 to 51543999 reverse strand)
ggaacaacttcacttgtaagtctcctcttgttataaagatggttccaataaatttgtgtatttcattgaatcaagtgccatcacatgtatcgccatttgtatcagtttaataagttccatcctgcatatcttttgtccattataaaatgaatcaacatatatatcctcttgacatttgcttgttaagttgtggacaaattactgagcacaaatcgtgtaaaaagtactatttacgaaattactttacttataaaaatcctaatctcatcagaataaacaatataataaatttatcagttacttgagactattatttatgaggttgagaaacatttctgtgctgagattaaacgaagattgtagtaggggacctatgacaaacccaggatgcatcatgaacaaatcgatccccttctctcttccaaatctccatgctgcctcttcggctaaggttttcgaaactgggtaccaaagctgaaacagaaaagcaagaagtgcacaatgaaatcaatttgagtagttgatgcatgctagctcctctgtgatgatttaaagttactaggaagaacttgcgacagatccaagatatatctctgagtagaattattttttatgcagttcatccaaggaaaaacaaaaatgggaaacgttctgcgtttctgacattttctaagatttaattgatgatgcaagaaaggtgaaaaagggcatgttctaacgacttacgtgaatttagaatatcacgcataattacctctgatttctgacagaatactggatcagaaaagcaagactcatcta

SEQ ID NO: 91972 - DNA, 736 bp, Eucalyptus grandis
  Intron number 1 from transcript Egrandis_v1_0.010438m (loc us Egrandis_v1_0.010438m.g) derived from phytozome v7.0 (c hr-ID scaffold_7; pos 33146393 to 33147128 reverse strand)
gcaggggcttctcgtaccggcacagggcttcggaggtccgatcgtcgatgcgctttctagttttacctttttttttttctttttttttcttttggcttttggggttcttgtcggttcgattgagcccttcttttgggtttgatttgctgtggttggattgagtttagggtcggatttgattcgtggatcgttcttcgagagattagagaggttgctgctggacagtgttgttttcgtagtcgttattgttggctcccctcgacaggctatgttaagcactcggaacgagcttgattaagcgcacaggcgatgtgtttgtcgttataggcttcttttcggtgtggctgtgcgtgtgctctggttctctaagagcctaaattgtgagagttgaagtgaaacgtcggaaatttattcatagctggatggggtgaatgggagagagatcagaatgaaagcttgtaggatttgattaggagggtcgatttaatgcgggattcatttcttaggggattaagctgtagtaaggttcttcatatcgctaaaagtttgatggaaggggaagactctgtacgatagacgaccatctgcttaagagggatactcgtgcacttttggcgcttcatcaccaaccccacttaggataagctaaaccttagctgttggattgattgattcacttttcttgtttctctatatttcaggatcttgtgctgcgcttcgagatctacaggaagct

SEQ ID NO: 91973 - DNA, 618 bp, Eucalyptus grandis
  Intron number 1 from transcript Egrandis_v1_0.044936m (loc us Egrandis_v1_0.044936m.g) derived from phytozome v7.0 (c hr-ID scaffold_7; pos 34993320 to 34993937)
accaactgaggaagcaaaaggtgcactaaaggttcaagttcaaaatcctgctttaagtttcatgggttgtgttgatcaatctcccaagtcgtccatcagatttgtaagcatttccatggtacccaacttaagatttccaagaaagctaaaaggacccatcttctttgtaatgttgggttttatagaaagtggttgtctaatctgtgaacactgtccactctgaaatatgttaaatcttgatgtctctttctcatattgggagactcagtctttcttatgcatatcacatgtatgtccaaaactcctcaataacaaggaaagcatgtataaatggcaaaacaaataatttgtacaaaataaaggaaccattgcgtaagtttcagtcctttttcttacttaatttatggtttactcataaaattaatgaatgcatgatatcttcttgttgatgcaagtggtcccttttcaactaaataaagtgcttctgcttctgcttctgctttttcacaatttgatttcccttttgaggcccaccgagcccttcagttcaccagcatttcttacctttatttcactaggcaagtggactgattcccgttctgttggcacattggaagc

SEQ ID NO: 91974 - DNA, 950 bp, Eucalyptus grandis
  Intron number 1 from transcript Egrandis_v1_0.029876m (loc us Egrandis_v1_0.029876m.g) derived from phytozome v7.0 (c hr-ID scaffold_11; pos 17034867 to 17035816)
catttgttgatccggagcttctcgcttggctttctgtaagtggctcccagtctctttgctgtttccatctgaatttggttgcttcttgatttgtggctctttgcttggggggtcttctcttcttgttcttgttgttcttgttgtttgatgggggtaactgatgtaaagggtggttctgctgttgtttgtgtggataaggaagttgatttcgtattgggtaatgggttcttcccgttcttgtggccgggatagatttagaaaccttgattggttttttttattgcatttcatggtttttgggatcttttcatctttaagcggtggaaatcttgtttcattttattttattttatcatgaattccccgttctcacatgcaccagggttgtattatgaatgagcttgtcctgtgatgatatgaagggatttcctacaggaaatatagatgagtggagatccatcttcgattaagaatccttgtttaggcagaaatttgtttaaagcgtcgttttcttttttttcggttgaatctggtgatctagtgtctgtatgttttgggacaattatcaatttagattttttgaaagatggtaggttttcattccgtgaaaaaattgtttgtcacagctttattgtgctctgagtactgagtcttccttttgatgttttgtctttatgatgattatagaccctcttcccttcaagccaaaaatcgagtcctttttccaggataacctttgatagatggcatttttgctggatatgaaatcggttgtattgaagagtagattgtccaaaatgattgaggtagctttagggctattcttgctgattagaactaacccattattcagtattatctcctttcataatttgtttgattagttttctaatattcctattcaatgttaagcagattgatcaagcgtcaagatcaacctgacaactacc

SEQ ID NO: 91975 - DNA, 846 bp, Eucalyptus grandis
  Intron number 2 from transcript Egrandis_v1_0.012313m (loc us Egrandis_v1_0.012313m.g) derived from phytozome v7.0 (c hr-ID scaffold_2; pos 24013055 to 24013900)
acaagatcagactactctctgacttcaaaacacaggtctggactcctaccaaatctgtcttctccactgaattgtcgtgttgagtaccatctattttgcggcaactgaattgttgaaaaatcagcccttttgccatctgccactaagaattcgagctttttgtgtttctgctttcatttgtagtggtgctgtcgagcgtacattaaagggaaagtttctcattgacttgtggttataccttccctctggttttgcagaccactttctcaccgatgagtttgtcgaattcaaatttgaaatagcttagggtcaggaactgatcatggcaaagatacatgcatttttggcattaaaataggggatagaaaacaatagttttgcaatcaacgttgatgattatcgccattgtcatggatagtggcatcaggttaaatcttcaattgttgatgaggggcttctgaaatttggcattttgtagtttgaccttgcagattgattgatttgtttgtatgcaaaacaattttccgtagataatggagattcagtgtattttggtgtcccttggagaatttaagcagtgaaaaggaccttctgaagttgtatctcggtttagtagatctagtgtaaatgcacaacaggtctagggtttgcctcttatgatccattatgcttatgctgaaaaatcattagcatcgaagtgaaatttgaaaaggagacccttttgatgcagatcgttccaaaaagcttcaattaaatatgttctagaaatggagatattttcatttggaacacgtgctctctaaagtatgcactcctaatcaggttgaagaggcagaaactgtagtc

SEQ ID NO: 91976 - DNA, 836 bp, Eucalyptus grandis
  Intron number 1 from transcript Egrandis_v1_0.014661m (loc us Egrandis_v1_0.014661m.g) derived from phytozome v7.0 (c hr-ID scaffold_2; pos 26034252 to 26035087 reverse strand)
aacaagaagcttcctctgcaagagcttctttacaggttattttactttttagctatcttactctttacatgcaaacgacatatacctaaaaggtggttaagcttcacatgcttaatctactataattttggcctatggagtctacatgttgcaacattttggagaatttacttccagtcttctgaatcagtaatgcttgaggttcatgtttgattatccaacctaggatgagtgttggttcatggttaagatatacttgctgaaggaatattctaaagacacaggcagtgagtgactcctactttctttcaaaagtttgtttatgcgacgtatttgtttttttttggtgaaaataagagatgtgacgtatttgttagggaagccttaatcttaaaagtttaggcaactagggatatgtagacaatgtatgttgagatctaccgtttcccctcacagaaaagctatagcttgcgagtgagacagtggatgtaatcatgaaatcaaactattgtagagctggagtactgtaacaggagaaataggaaacaataagcaaaagagggagcaacaggagagtataagcaaaagcagaatttgatcagattttaaatcttgcagtgaactccaatgttgtgtcaggagacctttatctgaattttttgtccagtctagtggtcagggtattgtgttaagcatgttctttagctatagcttcaggacgaaaattcaaaaactgaatactcgaaatttatttggctcttcaacgcatcatttgattagattcttgtcttttgatcataggaactgtcttcaaataagtccagcctccaacagga

SEQ ID NO: 91977 - DNA, 986 bp, Eucalyptus grandis
  Intron number 3 from transcript Egrandis_v1_0.003186m (loc us Egrandis_v1_0.003186m.g) derived from phytozome v7.0 (c hr-ID scaffold_2; pos 44233231 to 44234216)
tccaaaaggagataaacaaaaatcagagtccaaaggtagatttttttttctccatggtacaaatttctatgtgtgcattgaaatctttgttttggtctgcctttttgtcttatacccttttcattgaattgatttgtctattggtttcattccgataatcaggtatataaaatttcacatttggggtgaccattcactgtcgatctttgctacatcatttgttgtttgatgaacaatcgcctggcacttaactagagtatgtggtcatgctggattgtttacatataagccacattctgtagtttcaagttgggctttctgtctgttgcaacattggatttgtttctttatatcctatacgtatgtcttatgtgaagtttttgtctcgcttgggagggtgttgatgtgaaagtttaggggattagttctagcttctcaggacttaacaaactgtctaatgagcatgctaaagacataatgttggtggctgcttgccttctaggaggtgttctcctagaccattattttagttggacaattcctttcctgcttgtacccttaagcactgttatgggaaagtacctatatcatgggtagagactgaggcccttttggctaaattggttgagattgaggagtcgttctaagatggacccgaagaatggtaacttaagtaattgcagtaggatgaaatttggttgagtgaagaaatgagttcgtttatgtaggcaattttcgaaccagattgttctttcttgtctggaataggaaatgcatgtttgttatttgcccctcagttggtattccttacaatactaacattcacttgagtttagatgcaaagatggttatatggatcgcaaaatgaattatatgcacacttccacgcactgcattgtagttctttccagctttccactcaaataaatctatgtaaggcagttcccttaaagtttttacccaattttcaggggattcgaacacag

SEQ ID NO: 91978 - DNA, 871 bp, Eucalyptus grandis
  Intron number 1 from transcript Egrandis_v1_0.024411m (loc us Egrandis_v1_0.024411m.g) derived from phytozome v7.0 (c hr-ID scaffold_11; pos 1493895 to 1494765)
gcggtatctgctcgtcctttctctgctatcgatctgcgtcccaattgctcctttttcgcggttcaaatatttttcactcgggggtcattgtcgtaagagtcgtattataacttgcccctagcatatggagggctccaaaaatcggatgcaagcacccatgtttggggtggagagatcagatttgcttattgatcagattgatgatagacggatcttgttgaaagctgttgatttcatctgtgaacctcgtatctacccgtttcacatgtttatgtttccatgtacagaatcttgctccaaaaatcggccacctttttcatgtcgcatcccattccctctggttttgctatattatttttttcaactgctgggctaattatcattttcttgctggatatatgtgctggtgtctgggctgaatttacatgtggcgtgtttcctcccaggagggcacatagctgtttttctaagatcaaacctaagcttcccaaaatatcaatttccttttaccactaagctgtagctcatgatcggtcgtttgtatgtttcgatgaatacccttaagttcctgggaattggaagcgaaggcaatcatagggtatcgtaattgaaagagctcagacaaaaactctgtcaccttctcgcagagtctcctcaagtgtttctctcgatgaataatttgggtatctgaccttcgcaatgtacttgtcacggataggatttctcaagtttctgaagaagttgccactttttgaaatacgctttagattcttgagactgtctgtcttatttgatctatcgtgtcctcaatttaattgatgcccgcgtggttgcagataaggacggtgaaagtcaataacctttccttgac

SEQ ID NO: 91979 - DNA, 493 bp, Eucalyptus grandis; identical to SEQ ID NO: 91315
  Intron number 1 from transcript Egrandis_v1_0.007927m (loc us Egrandis_v1_0.007888m.g) derived from phytozome v7.0 (c hr-ID scaffold_2; pos 5547372 to 5547864 reverse strand)

SEQ ID NO: 91980 - DNA, 1013 bp, Eucalyptus grandis
  Intron number 3 from transcript Egrandis_v1_0.024127m (loc us Egrandis_v1_0.024127m.g) derived from phytozome v7.0 (c hr-ID scaffold_2; pos 52914004 to 52915016 reverse strand)
agttttcacgtcctcttcctcaggttcaagaatcggtatgcgctactgctcatgttgatgcactttttcttaaaccaaagcttgtgcatatgttatttattttcttggtttttgggttgtgccttgagtagggtagatgagggctttatctctatgttaatgtgttgtgcaagatatactttaataggcaaattttacttaccctctcatgttcatctgttcatatgttttgtgctcgtgtcattcttgatatatcctaaggtgggatctgcgaaagtagctcccttagatatttgctctttgccaatttgccaacgtgagtcaccaatcactttccagaaacaggaaggcataaaaattaaaatgaaacaattaagaattttatcgatcaatttgtgggagctaggcatcaaggcaaaaaaaaaaaaaaattctgaaatccatgattagttgcagggtagatataagcaggctattaccttagagattggtgaccaattcatgatgaattagcacttactttgtagtatcggttgctttgatattgttcttgtcttttcgtttttggacacactggttttgtattagtaagctatgtttaatttgatagacatcctttagtgcatctgcttaaagcgcacagtatcgattgaggttatttggttggaactcgattggatgagaatttcccttgaacacttctcttgcaagcttagccattcacttgacttgatactttctttgatagtgcatttcatattgtctctccattgtttgattctgtgaccaactgcacctgcatctgctgatgtccggttttgttatgtgttatacctctaggcggagatatttttatttggtatcattagttgtttttccaagttctcagattgggatggatgttctctctcattgagcattattgagtttagctggtctgcaatcgtttgtagttcacttcacttctatttttgacagttgggaagatttcaaggagagtctccctggtccac

SEQ ID NO: 91981 - DNA, 811 bp, Eucalyptus grandis
  Intron number 1 from transcript Egrandis_v1_0.028221m (loc us Egrandis_v1_0.028221m.g) derived from phytozome v7.0 (c hr-ID scaffold_11; pos 36609194 to 36610004 reverse strand )
gccggctcaagctcctcctcccgaggattcatttcgtaagatctcgaatctcgaatcctctctcccctcgatcgcattccctgcttttcgagctttctacgctgatcgctgtcgaggatcatcgccgggacggcgcccgcgatgaaattccggggcgatcgatctggttccccgcaagttcttctttcgcttgatttctcctcactatcctgcttttcgttgtccttttttttttttttttttggttttttgctgctgttgttaatctgttggcggtgatgaatggagcttgaagctgtgaattgagcggtagcattgtcgataccggaattgtgcgtagcgcgcgctttgattatgacagacttgtccaaagtcgatgtagttcgagaatgtccgtgaaattctagcgcatcctcctcaatccaggggcgggaagggtgcttttccccgccgaaatgacaggctcaaatggcatttgagatcaacgtgtcagcggcgaagcttttccatatgttgtttgaattgattggatcggccggagtgagtgtagaatccatccactgggatcggctaattggacaagttatttctgctgtacagtgacagttgagataatggcattctcaatgaactatggtcgcttaattggcgtatatgttatatttgtgccgtgtatactactgctgctactactacttgcgtttgcatacagttgagcttcaatgttgctctcctagcttgtcgctttgaaattgttagtactaatatctccagtccaactattgcaggctttgagtactaagcaccgaga

SEQ ID NO: 91982 - DNA, 291 bp, Eucalyptus grandis
  Intron number 2 from transcript Egrandis_v1_0.023582m (loc us Egrandis_v1_0.023582m.g) derived from phytozome v7.0 (c hr-ID scaffold_2; pos 50266305 to 50266595)
agcgggaagctgtactgctcaattgaagagactttgtaggtgatgcataatgcgttgtcagtttacgttgctttggtggatccttgattttctacttctctattccacattggagagacttgagtttcttctcttgtcaactaagtggtcttttaaactagaaattttgatttttagattcatagacacctattgagtaacacacatttgcataattaagaagtagattttcccagataacttgatgtaccattgattgattatttctccttattattttgtaggttcttg

SEQ ID NO: 91983 - DNA, 618 bp, Eucalyptus grandis
  Intron number 2 from transcript Egrandis_v1_0.029179m (loc us Egrandis_v1_0.029179m.g) derived from phytozome v7.0 (c hr-ID scaffold_2; pos 40975814 to 40976431)
aggcaaagggtgatatacagctcattgaatacctggtattagtctaaaatgctttgttccaactgtggcatctttctttagatgagcttgaagttgtatggttttaagttgcaactttagtagatttgtatcaatcttttgaggttggcagtttggccttctacaggggttcctcaaatagttttatcagtcctgtctttcttaggatcgggtattggcagaactgtttcagtaattccacatttaatctcctgctattggactttggtgcaatgtctaatggttcttggtcctttccatagagaaatgtgattaattttctggtcataagtatgtcttctgatgtaactatagcatttgagctgtggacataaatgacatcttgtggcttgagcaagaaattcctgtggtgccacctcctcctctgtgatgaacatttgtcctattactgttgttttttcctccttgcctttgccttttccctgaaggtgatgtttaagttttgaaataacatattaccagtttgtagctgtcgttagacataaagaagggagactttatgtgcttttgtttgttctattaagattttactcttccacttgaaaggtctatttggca

SEQ ID NO: 91984 - DNA, 716 bp, Eucalyptus grandis
  Intron number 1 from transcript Egrandis_v1_0.047356m (loc us Egrandis_v1_0.047356m.g) derived from phytozome v7.0 (c hr-ID scaffold_7; pos 41290032 to 41290747)
aatatttttctacgttgtacaagtagatcaagaaggtagattgacaaatttattttggagagatagtttgtccaaattcgattacgattgttttggtgatgtgctagtgtttgattccacatatcgaactatagatatagtttgatttgtgcaccttttgttagggttaatcaccattggaaaaatattctatttggttgtgcatttttgttggacaagacggcggaatcattcatttggttatttaatgtgtttttggagtttatgggagataaggctcctaaaaccatattcactgatcaagatcaagccatggcaaaagccattagaatgatgtttccaaatacacagcatcatttatgcacttggcacatcatacaaaatatcattaaaaacattccacagctttaccataagccatattttagagataagtatttttttttatgcttatgtatagatgcaaatcggaagacgaatttgaatctacttggatggaaatggaagaggagtgggatacttagaacaataattggcttcagagattatacgcccttagacataaatggagttcagcttttggtcgtgatattttttcatatggtataaggtcaagtcaaagaagttagagcactaataatgtcttccagcatatttcgaagaagacgtcatcccttatacaatttgtctactattatgaagagcaactgaagctc

SEQ ID NO: 91985 - DNA, 505 bp, Eucalyptus grandis
  Intron number 1 from transcript Egrandis_v1_0.031750m (loc us Egrandis_v1_0.031750m.g) derived from phytozome v7.0 (c hr-ID scaffold_2; pos 44183287 to 44183791)
gaaacaagaacaaacgtatcaaacggaggaccaaagtgttgaatccgaatgagttttaggaccgacctgtcggagaagtagtttcaactctaaatccgagtacgcacatgttttaggacccgtagcgtcgttatcttcaccaaaaaaaggaggaggaggagccccttcgatgtataaattgtatggaatgtgcaaaaatatattaatttgaaatcctttctgcgaattacgactcgtccctgtccaggaactcaaagagtggaccacaacaggaggtcatcttagtgggggcctacgctcgcacatgaaaacgacgcgtcgtttacttcggcgatgccacttctgcttcccttgtacatgccaatgcccttagaaacacacagcacttaccccacccccttatctcccgaacacacaaaaaagtagaaaagaaagaaaacattaaaaaaacactaacaaatagaaagatcgaatcattctattcgagttgcgccaataatgcagc

SEQ ID NO: 91986 - DNA, 906 bp, Eucalyptus grandis
  Intron number 3 from transcript Egrandis_v1_0.046790m (loc us Egrandis_v1_0.046790m.g) derived from phytozome v7.0 (c hr-ID scaffold_2; pos 61538852 to 61539757 reverse strand)
gcaccgtggtatggtatcttttgatgttgcgtgtcgtctcttcagcttcaattgaatgattagttcatagatatatgcatgtgcggttctgtgatggagtgtcggagatttgaagtaagcattgccgattgtgtcgaaatgacatttagcaccattccttctcatggccggagtagtgatttaaggttacctccttattagttaaagtgtctgctggtagaagcatcgagccacttaatctctatcagaagaagcatgtgtgcctacctgtggtcaagtggcagtgctcagagcacgcggtctcaacttgatgttgacgaatttccgattgcttagtagacagtcttttatgcacttgagagcaagtctcttgtcaaagaatcttagtacagtctggaaatttttgacaagagacagaaagacatcctgcagaactatagccacaaaatgttttttgcatatagcaagggctaacttattgtgaactgatgcaattttttaattcatgagtgtaagttggttttggatgttctaaactgtttgtgccccctttgcacatacctgatccattctgccgccaatagaagttgtaggcttgattgagcctaactatcaaattatcagcaaattttctgcctgtaagctgaaaagtggtatttgcaattttattttgcatatgctgctatgatgcttcagtttgttgacttggttgagcctaattatcaaattttcagcaaattttctgaatgtgaccccaagaattggtctctgcaatttatcttgcgaatgctgctatgatacttctgcttgtccagaatagtgactgcttttaatgaactccctgccctcttctttttcctttttctcctaggttggtttgctgaacttggcaaacgaggacttcgt

SEQ ID NO: 91987 - DNA, 524 bp, Eucalyptus grandis
  Intron number 5 from transcript Egrandis_v1_0.034593m (loc us Egrandis_v1_0.034593m.g) derived from phytozome v7.0 (c hr-ID scaffold_7; pos 13225074 to 13225597)
tttcttcttagtaagggacaattgttgctaaaatatacccctgacttgtttaaattgacagcttgtccagatgcatagcagtactggttaagtgtaagtgacaaattctgacattccactaaagttccatccagaaaaaagataacatcgttggcaaaaagtaagtgagatagcttaggacaaaacctgttcaactgtatgcctttgatgctgccttctgcaattgcttttttcatcagccatgttaatacatttgagattaagatgaataaatatggtgaaagggggtcgccttgcctgagtcctctcgaggggttgaaaaaaggggtgggttctccattaatcttcacactgaatgtcactgttgatatgcattgcatgataagggacacccacttggcacagaaacccattttcagcatacaatcccgtacaaaatcccattcaattctgtcatatgctttctgcatgtcgagttttaataatgactgacattttttctttctctttgtaatgcgtagctg

SEQ ID NO: 91988 - DNA, 977 bp, Eucalyptus grandis
  Intron number 9 from transcript Egrandis_v1_0.034593m (loc us Egrandis_v1_0.034593m.g) derived from phytozome v7.0 (c hr-ID scaffold_7; pos 13226654 to 13227630)
aaaggtgattctccattccaaagaacataaagccctgtctagtcgttttttaaccaaattctccccttccctgttatttgcccatgtataagcacacccatgactatcaatttccattaaagataactcatttagcatatttctgaaggctgctattctattattatcagcttctctcttccccaccttctcccatacatataatatctcattaaaatctcccatgcatatccaaggaacagaactgcaaggtttaagagtctttaatttttgccataatgtcaacctctcttcaaagtttgtagaggcatgaacaaatgttatctgcatgatagatctgctttctggatctgtgcattccacattgataaactgcttggaactgtctttcacctgcaattttactccctcattccacattaaagctaatccccctgctatgcctgtcggattctctaggaataaatgctggaattgtagttttttgcacacactttccaccatcattgctttgttttttgtttccataagaaaaactagactgggcctttcaagagcgattaaagctcgtagttcctggattgtcagggggttgcccagcccctgacaattccaactaataattttcatgttgttgttggtggcttattagggctagccaccaaagcccattatgttccatttttaatcaccttaacaggagtctctagaaggtccgtatcatctatgagaagaggaattggctcaaggacgcacttctgcttctttgctttctgcaccttcatattctttttattgctttttccaactttcagggaagtctgtttgggagattcagggcatattatctgtttgccatgatctttgttttctttcttacttgctgcaatttcttccattggctctcgttcattaaaactttctggtctctttttgctgcagtctgcagttcgcatatcaggggcttgctctccaac

SEQ ID NO: 91989 - DNA, 940 bp, Eucalyptus grandis
  Intron number 1 from transcript Egrandis_v1_0.001476m (loc us Egrandis_v1_0.001476m.g) derived from phytozome v7.0 (c hr-ID scaffold_2; pos 62228695 to 62229634)
aggagctccatcgtcagctgggaacgccggaatcagtatgctgtgactttctgtgtggcttttgtcgcatctctttcgcctgtttgatctagtgttgagaatgcctcctagctgcgggaagcaatgagcttgttggcgtatggatgccatatttatttgcgttcgaattctagtttagcgtttgatgaaagttaattagttttgcttgccatcacgggcatgagtgaaagttttctttgtgtttgtcatcgaagcatcaggcttgagcgttggcattttgactttatttatttagtttttttgaaatcatcgctagtgctaaatcttcatgttctatgtgcctgggactttttttttttttccagattagttatgactgagtatcatatgcaactcatcttatgtagtaatatagtagtcgatgtgttactgcattccgagctctccatgacatccttgcacagagtcattctatttctcttaggatccaagaacatcatgtcacatctttattctttttgttaacttcctttagtttcttcatgtcaccacccgtgttcatgtgctcatttaaaagtgctttgtggtaatgttacttatgactctcgagatgcctatgtactgaaatttgattagttatggaaagaaatgtgcatgacatttttgttctgtatagggacaagtgatttttgttgagtccttattggttatagtcgaaaaaagaaaccatggaaattgaggacctgcattctaataatcctgtaatttcatgtttaagttatattgtctattaatgcattggtaagcaatatgctatagcgtcttatgggcgagacagttatttgtgagaaatttcttaatccaatttcgtagaaatgtttgtgctgtgaaatgtaatgaccatttctgggggttgcaggacttgctggtgccactgctg

SEQ ID NO: 91990 - DNA, 909 bp, Eucalyptus grandis
  Intron number 2 from transcript Egrandis_v1_0.030648m (loc us Egrandis_v1_0.028047m.g) derived from phytozome v7.0 (c hr-ID scaffold_2; pos 36225632 to 36226540 reverse strand)
agtccgacgatatctacctcaagcttctcgtcaaggtccgtcggtgacttcgtagcgcgattttgtcttctttttcatcattagtttttagttgtggggcggggattcggcattagcgcgatcgaaattgttttccggaactctgaaaatcatggaaatacacgcgtccgcaagctgagacttttagggtctcatttagtcgtcgatatctcttcgtgcttgcattagctgtctcttgattcgaccaagtttgatctttttaggtttaattgatctttacgaacgtagttcgccgtctagcgtccgtgggtatgggtagcagatttgactattgtggagaattgaggttgggatgttgtttttcgttacccgaatcgagttatgtatagtgaggttagatgattccggctttgtaaatctgttggagaaaaggcgtgtgtattgtggttgatgatgatgtcttggcgtcgggaaatgggcaccatctctttggtcataggatctgttgctataatttttatcgtagcaagtctgatatcaatgaaaatatcttgcctgctatatgatttgctagatttgtcctcctgaggaggctagacctcgctcttgactattgaattgtgaattgaacagctgtaccggttccttgttcggaggactggaagcaagttcaatgcggtgattttgaagcgcttgttcatgagcaaagtgaacaaggccccgctttccctatcgaggctcatccggtacacgcaaggaaaggttgtcaatttttctcggatttttgctctgttgtggatgatgaacttgaattgagttaaacattatgtttttctgcatctgggataatgtgcgattcttctgtgacctgcaggaggataaaattgctgttgttgtgggcactgtgac

SEQ ID NO: 91991 - DNA, 971 bp, Eucalyptus grandis
  Intron number 1 from transcript Egrandis_v1_0.044926m (loc us Egrandis_v1_0.044926m.g) derived from phytozome v7.0 (c hr-ID scaffold_7; pos 2443981 to 2444951 reverse strand)
ggtcgcaaagcaggtcgttttggggaagatatcttcttgacgattactatttttttggctttgttgtgatttccattgcattaattaaattcttcttatctacctagctgcatgatcatcttttatatgcacctctattttgaatgctagttgttggaagtagttaggggtgaccggcctcgatcaatccaattcggttgtcgggcaattcaacaaaactaactacacatgtttcaacgtgcaaaatattcaaacttcactagtataaatgtgttttacactttaccttaaccatgaaggccatgaacaattcggctaagagttatgcttggcttaggttgtatagacaatctctcttctactctttaaatgtttagtcgatgtgggactcttggaggcttgaagtgtcttgtgggtctcttggagtcttagttccacatcgaacatcgagtagaagatgaaactaacaagtagattttcttgatggtctcttggccacataagaggttcctatctcaactgcaatttcggttgcaataagttatgatattttcggttgcaataagttatgatatttacatattttatatatatatatatatatatatatatatatgtccggtttgatccagttcccacttggaactgggaatcggaccgactggccaccggttctcggttcgagcggttccggttgcacacccctagaagtagtacaggaattcaaagtcgaagaaaaaaatctggagatttgtactcattcgcatcgtgtgaatctttggctagacagaaattgaagagaaggaattcttgttgctttttgacaagctttaatgctctagggtttggctgttttctggcttctgtttctgcatcaccttttctatgcttcgtcttttcttggatagtttaaccgtttaggtcggagcaatggacgattatttatcaaacaattttttttttgcaggtgc

SEQ ID NO: 91992 - DNA, 756 bp, Eucalyptus grandis
  Intron number 1 from transcript Egrandis_v1_0.021221m (loc us Egrandis_v1_0.021221m.g) derived from phytozome v7.0 (c hr-ID scaffold_7; pos 44075715 to 44076470)
gaccctcttgcagtttccgggtgatcgattgctgggtgagtccgaattctccattcggcttcaaataatgttgattccattcgttctttgatttcttgaatctcttgagttgatgggatcggtgttatggttagccgcgaagggaaaaacgtgtccttttgcttttcttcttcctcttttcgtttcaattcaaggcaatcagctgtatcgtcggtgagcttcacttgccgtgattaggcggatacatgcacgcgggatagcggtagagctaaagcaatttccggattgcatcgtgattatgtgaacagagggcagtttctaagaagccatgaaatcctttgaattgcttcaagaaaatgtctgagatttgctttggagatatctcccagatgcctgcgtgttcgagatgtttttttagtgacttgagacgaccaagtccaactcgcttcctcttgtagagggtgcggcacattgtcttttctaaccggaatttttgggcagctttggaaattaattctgcccaattcgctgctgtgaataataaatttgtcgggtttctggaaatgtcgctttcctgcaactttgcatcgcaactgctggttttccatagggttttagttgctgtgccgtggcattttaaactgaaatgcgtctttcttgctcaaagatagttcaaaattgggttaagcataagtttgagatgtccttttattcttgataggagtcttgtgagaattatcccggtgaagagtaaag

SEQ ID NO: 91993 - DNA, 686 bp, Eucalyptus grandis
  Intron number 2 from transcript Egrandis_v1_0.021221m (loc us Egrandis_v1_0.021221m.g) derived from phytozome v7.0 (c hr-ID scaffold_7; pos 44076919 to 44077604)
ttagtgttgaagatctcgtgagcattgctgaagaggtaattttcttcatttcttccctcgaggattactcttctttgcccatggtctaggatattttacagtgtaggaagttgctaaacaagtgaattggtcatgcttcttctttccattctattattgcaaggaattgcattccagactgtcatatgtgcagaatataggctgcagaatcaagcatattttcttgcaaaggagtcattcaaggacctatacttttttgtatgtctgaatgcataaagaaaaattgagagcatatcagaagatgagacgcttcttcagtgttgtgcctaattagctctgcatcttcggttagttcaataatgtcagttctttagggtctttatccatgggtcctgggcctctcgcaatccttttaatgttggcttttcaagtgatgtctccttaacaagtgagggcacaaactcaaatttaaattcgttgtagttctcctcatctttagggtccaccaaaacatcttcatcaccctcgcaggacccatgaatcttagcctctctcactgcattccaacagcataaactgcaattcgataagaaacagaagaattctaaacatcatgtaattgaatgaatgaaatttggaaggttaatgagtggatgcctttttgcagatcattgcatcaaataagg

SEQ ID NO: 91994 - DNA, 685 bp, Eucalyptus grandis
  Intron number 1 from transcript Egrandis_v1_0.003702m (loc us Egrandis_v1_0.003702m.g) derived from phytozome v7.0 (c hr-ID scaffold_11; pos 42690708 to 42691392)
gggcggtgttgccacccggagtttatacgctgcaggtctgatccttgatcggttggtcggtttctgtcatttgtgttgagattggcattctgtgatctggattctggatgattgtgattgtgattctcttggtgattccctagtgctttaggatgtttctctatcggttggcacctgtacgattttgagtaagcttttgtgtctgaagattgaagagggcagtagactttgaactgaccgtgtgctgatacctcttttgattttaaggaatcaaatttgcatcttgacgtgtttataatggttcaaggtacagttttggtttcaggccattgtctttagattttgtaccttatgttataggcaattattcagaacggtaaccttttaattagttatttcttgtttcatgaacaaaatattgcgaacgcttatttgttattaactcttcgcatcttgtaatttttactcgttttttctttgtctgacaaatgctctgcagactttgttaacaggttttatttaatttttgcattatgcacatatatttttgcctttctggtatttggcctgtcttctagttaatgatctcccctaactcttactttatatattgcgacattgagttgaagctaagccgcatactgctcttgtggcaggatctgagggcctttggcaaacagaaagg

SEQ ID NO: 91995 - DNA, 618 bp, Eucalyptus grandis
  Intron number 3 from transcript Egrandis_v1_0.021095m (loc us Egrandis_v1_0.021095m.g) derived from phytozome v7.0 (c hr-ID scaffold_11; pos 29155427 to 29156044)
gaagaagaaacgtaagttgacttctcctgctgctgacaaaatggaaagaaaaaaggatgtttctttgatgggcaggatgacctttatgttgtgatttcattttcaagtatctgataatcttctgatccatataaaatctggtcctttttgagtctgtatttgtccatccacctttagttgtcctagtcctcatcatgtagcagttccgcctcgatgagatttgggaggtacttagaatcattatgatgcaggcaatatatgcatccaaaatctgaaaggaagttcaatctctcatcctcagtgttagaaatcctcagtctgcatggaaacgcccgtgaagttaaagaactgtgaatgaaatatacaaaaaaatagaagaaagacatgacattttactcggagcatgaaaatcaaagctcgattctaatagtatgttagaaactctaatccaaaatcttataactgttagataagggaagatcacatgaacatatgcccttataaatcctaagcaagcaatgtgccttgaacatatgctcaacacttgaaattgccttgaatatgtaaatttctatctatttagtgagcggttaatttttgacttttgacagaggatcg

SEQ ID NO: 91996 - DNA, 285 bp, Eucalyptus grandis
  Intron number 3 from transcript Egrandis_v1_0.045009m (loc us Egrandis_v1_0.045009m.g) derived from phytozome v7.0 (c hr-ID scaffold_28; pos 304752 to 305036)
aagagagtgagtatttttttcaaaaaaaaaaaaaaaaaccttatcattactattataattttcgggtttcatttttattgatttgacctttctgataatcccaaagttattcattacgacatcaagtcctctaatattcttttgggctctgattttgacgctaaggtgcgaagacatgataatatcaataagttgtttattgaattcaagttattgttatgaaagctaacattttgattctaggtcgcagactttggactcgccaagttcacttttggtacgaat

SEQ ID NO: 91997 - DNA, 845 bp, Eucalyptus grandis
  Intron number 1 from transcript Egrandis_v1_0.016164m (loc us Egrandis_v1_0.016164m.g) derived from phytozome v7.0 (c hr-ID scaffold_2; pos 5128320 to 5129164)
ttctcccgccacctcctcaacgtcctcctccgcaggtcggtccgccgccgccggcacctcctcctcctcctcctctgccgtccctttccgttcttcccgatacgcgcgcgccgcgtcgatgttcgcttcgccgtcagcctcgctttgagagtcgaatggttttggcggcgcggtcgctcgatgaacgcgtttcgcctcctgtcgtgctaggctgatcgtacgttcttcgatgcgttgattagcgctagtgcattgcggtttggcgattttttttcgcgaatatttgatttagcaaagcagttttagcagctgcgattcgatgcgatggtcgcatggttcggtttcgacttcatcagtgcatacgtttgcttaccaacgcgttaagctgaacatgtaggagctagtggtttcataagctaggaaaggacctaaaaagatcttattgatttggcaatcgaatcttggcggattacgagtttcgtgctcgagtttggctggcacttttgatgcgcccggttatcagttaagcagcctggttgagtttggcttgcattaagctgaacgtgtatgagctaatggtttcataagctaggaaaggagctaaaaagatcttattgatttgactatctaatctcgagggattatgagtttcatgcttgagtttggcttgcacttacggtgtgcctggttttcagctaagtagttcagctatgtcaatttgttggtttttgtatatttgataagttgaattcgacgtgtttttctcttccaatttgtatgcttgacgttcttctgagctgctcttcctctatgcagatataaaagagtagcttatttggatacgg

SEQ ID NO: 91998 - DNA, 910 bp, Eucalyptus grandis
  Intron number 1 from transcript Egrandis_v1_0.021895m (loc us Egrandis_v1_0.015525m.g) derived from phytozome v7.0 (c hr-ID scaffold_2; pos 57678908 to 57679817)
gtactctgacggccgcctcgtggttgactttataggtaccgatctagatgcctctctcgtgatgttttattttttactctgctcaaaattaggctgcttcctggatggacagactttctttaagaagtcaaatgtacacatttattgtagtaagaaaaacaagaaaacaagtcgtgatattggttccccgtgtgacatcatagaatgattaagattcaaagaagggtggatgagatttaaaatatggttctattaggcaacgtgaatactatgcgattccaccaaatgaaggcatgaagtccggctttcgcgtagaacaggccatcataaatagaacatagccaaaagcaatttagcagaaagcgacatgggtagtatgtagaaaaatcaatcgtgtcctcgcgggaataaagtaatgatcacacgagcatgttcaagcaaagtagatgcacaaaatccaccgacgaatcttttgtcaggacatgaatccaaagtttcccttggtccccatggtcacggaaagcgacttgcagacattgatgttaatggcgtagtgcagagcacttcaatagtgggcctgaggaaattattggcatgggatttgaactagtatttcttttatcttccagtttttggacaggattcccggtttttttttttttaattattattattattattattattttatttttattttggcgatataggtcagatggagtttcatgatcaaacagaggattcttatgtgatcctccatcggctaacttacaaatgtgttgattcagcattgaattgaattttctccagaagaagtaatgaaaggtgtttgtgtgtgtatgtgtgtgtgtgtgtgtgtgtctggttcttttcagctcaaagctttggattgccctatttgagcgcgtac

SEQ ID NO: 91999 - DNA, 914 bp, Eucalyptus grandis
  Intron number 1 from transcript Egrandis_v1_0.038064m (loc us Egrandis_v1_0.038064m.g) derived from phytozome v7.0 (c hr-ID scaffold_11; pos 12676289 to 12677202 reverse strand )
caatcgaggtggcgtattgttctctttctctggtttgtaaacattatactgtctgtttctctttaagaatcgtgaatggtaattattattctgaccattttgagccttaatttgccgtggagatgcatcgggattctaactttcgtcgcacgcgagactcagcatcaccctaggtcagtgagtccttggtctggcggctaggtgaatttttgcaggcatagtctggttctgaattcgtcgctgaagattcttgtatgctgttttgaagagagaattcttcatgatatttcagttctagagctgttcatatatccgaactctatttgtttaaatctgaatttggaatgctgttgtacttaaaaaagaaacagcctcctggaatgaaattcacagtcccgaattaattttagctcgatccgatcgatccactgcagccgtccttttgatatcctttagggacaagttccttgatccatccaacgaataatcctattaaagtgtaccaataatgggtactgactttgtagataagttaaaagatgcataataaacaaatatgcaatcagattaattcacccccaagtccaatcagaaaacatagttgactaaattttttgtagtttcttgcgttgtttatactaagaaggcgaccctttattactttattgtttgtggatgttgtacattgtcctttagcagttagggatctacgagtgaggaacaacacacttgtttgttttccatttgcagcttaccattttttccagctgctaaaaaggaaaaagaagcagcctgtaatacctattttgattcatttaagacgaaacaagcaaaacctacgggagcaacagtttagatatcaatgactataccttttaggagtctttttctctctctttcttgtgggcttaatc

SEQ ID NO: 92000 - DNA, 394 bp, Eucalyptus grandis
  Intron number 2 from transcript Egrandis_v1_0.027768m (loc us Egrandis_v1_0.027768m.g) derived from phytozome v7.0 (c hr-ID scaffold_2; pos 18092655 to 18093048 reverse strand)
aaagctctccaattactgctaacaggtagagtgccctaatctgaagaaaccaatgaaccagtttgggtatgcacatgctaaaccgtagttagtggttgcttaggatcagtgcagtctatttggggtgtctaggtggtattgcaatgtctaatggagtattacaattttttttgttttctgaatttactttttcttttgaaaactcacaattcttgcatgcaccagcagtatgtatccctccatgtatcatggatctgagctttgatttgaaattaatttgatgcaaagatacctgtattctaagctttatcttggaaaagttgaaagtagattgctgatgcagcagagttgattatcaattaacttgcaggttctattccctctgtgcatatat

SEQ ID NO: 92001 - DNA, 846 bp, Eucalyptus grandis
  Intron number 3 from transcript Egrandis_v1_0.046476m (loc us Egrandis_v1_0.046476m.g) derived from phytozome v7.0 (c hr-ID scaffold_7; pos 33141167 to 33142012 reverse strand)
gcaaagcctgattccatttattttgttgttagcaggtgcctccttcctctcttctctaggattcttttttttttctctttcattttgatttctacacacgtctttttttaggaggtctacagccattatgtggcatagggttacatcacgtacaaaacttaatagtataccacttctacgaatagctcttaatactgcatctcttctgagaccaggaccttttatcatgacttttgctcgttgcataccttgatctactactgtccaaatagcatttcttgctgtggtttgagcaacaaatggtaattgataattattaaactcagttttagtatttttattaccattggtatcgatatcaatccttgactttatttcgaagacaaaaatcgaaaattctccaatccaaatattttttatctgtaaatttatctagatttaaaatatcatcttctaaattaatagaaataatacctcctggcatattaattaatttaccttttttatatatcttgttgtaattataagaaatctcttgtttattgtcatcgcgtttgtcataattttgaaaagaatggcgtatggaggctttgtgcataagaatagaataaataaataaacagcttgactgtagtttccctccctcagtacgtttgagcttgatgccatctgactataagtttttgttttgaattgagtctctattttcctacataataaatgtcgctaatcgataatcacatagaagtttgaatctttagtgccgaagttaagaaacaagctattgatgtgcttttgggattgtcgaaagggatactggtgaagtcgatcttattctcctttccc

SEQ ID NO: 92002 - DNA, 880 bp, Eucalyptus grandis
  Intron number 2 from transcript Egrandis_v1_0.005340m (loc us Egrandis_v1_0.005340m.g) derived from phytozome v7.0 (c hr-ID scaffold_7; pos 31173825 to 31174704 reverse strand)
ttggacgaggtaagcaaatttgttcatcttttgcttaccttggagactgatatgcattatctgggcacttgtagatgatgttaattgcgatttttagctctcaatttagaggttttcttgttctggaatgatagattaattaaatgttcatctttctaatgattgcaacgtcaaaagcttgttgttgatcagtggattaagattaattatttgttagatgttgttaaatgcaatctcaatatatgctgattcttttgtaaaactacttggctactagagatcatttgatagcaaggactcgtatactaaacaacaaaattttaataatgcgggagacacaagaaaatgtctttcattacggagaattctaagagaaaagagctgtaaaaaaggggaaaaaaaaggttaaatggctgactgctagttcttgtcgtaaagatttggcaggcctactctgttaaaagaacccagaatttgaccaacctgttgatcttaaacaggtgttcactgacactttacaccacaaaatgtcaaccatgtctgcatatgatcagtacataagacaataaagcgttgtgcgaattgattagtacgtagtgtagagcagtagttagaattgtctccaacatcaaaacaaagtttctttttagttcgccgcttcattttgcacaaaaagcatgcggttagtgatatggacctgcattgtacaagtgcgataatctttaagtctctaaatcaacttaggatgtaactaatcacttctctttcaaaagtttagattgtggtgtcgcattcggatgatagtttgacaaaagggttcactattttgcccgcaatgctcacaggttgataaaaggtacaagcagtactatcaccaaat

SEQ ID NO: 92003 - DNA, 694 bp, Eucalyptus grandis
  Intron number 3 from transcript Egrandis_v1_0.037244m (loc us Egrandis_v1_0.037244m.g) derived from phytozome v7.0 (c hr-ID scaffold_7; pos 18550208 to 18550901 reverse strand)
tcgctcttcatttccaatctccacacttttggttggtaagcaattattttattgatcatttgacgtcgtggtcagatctcgaattctttgtatttaattgaagtgtacttgacagttctttgcaattataggcactgatgagagatttattgtcaaaggctaaggtgctcatgtggttttgacagagtaggttccatggcctttctattgttgttgcacatcacctaaatccaaaataaataaataaatccaacacctttttgatttcttttctggttgagcattttctttagggcaagcttccagatgtcttgggtcaaactccattttggtgcatgtattttataattaggagaatcctgtttagtggctttttaaagtcattattgctaatgaggcttagtcagtttgttagtcttgcatggaaaagttattgcttgtgatgtttaacaaaataacttgggtaactggatgtcttcatctatatgtcaccttgatggtgcacttggatgaagttatgtcaaaattaatcttttcggttgtttgcttaagtgtaattttggcaccttcaattttgcagatattgcattgatcactgtttttcccatcatgaatatagggtgttgccataacataagagaactcgttgttggacaatactgcgcggattgagggctggttggctagatttcca

SEQ ID NO: 92004 - DNA, 298 bp, Eucalyptus grandis
  Intron number 2 from transcript Egrandis_v1_0.008016m (loc us Egrandis_v1_0.008016m.g) derived from phytozome v7.0 (c hr-ID scaffold_7; pos 51341291 to 51341588 reverse strand)
acccctccgtacctcgctccacacctactcctcaggtaaatgcttcaccttgatatcttcaagtctagctctctgtgtgcgcccgcgcgcgtttgacaaatctaaggggaagatgcaaaagtacagcatttctatttctttgaattctggtggaatttctgaatgaatatgaagagttagatgcttctgttcaatttatagttaagtttcctaattaatttatttatttttggttgccttttcttttggtttttctggggcagtccataacaacactgaactcaagaaaatacacaaa

SEQ ID NO: 92005 - DNA, 594 bp, Eucalyptus grandis
  Intron number 3 from transcript Egrandis_v1_0.039409m (loc us Egrandis_v1_0.039409m.g) derived from phytozome v7.0 (c hr-ID scaffold_535; pos 11472 to 12065 reverse strand)
gtctcagaagagtacaagatccagaagatttcctggtaaactttgtatatgcattaatctaacttaactctctctccctccctttcccgccccgccccgccccgtcctgcgggggaatgagaaagtcatgctcaatggaaaactagtttagtggtataaattgggatttgaaagtaaatcgaaatatcaatcaattattaatgaatcttggctttttattttgatccatgaactagttgttaagtctcaagtattaattactaaagtggagaatgaaggagatcggtatgtttggatgacacgatgggaggggtctctatgttttttatctcctgagaaagaaacacgttcgaggcacacaaggacctctctttcagaagtttactgtttacttatcaatttatggagctcccctcctgtgtcttgggaaaaaattagcaattattgtctcttacttggggaatgaagaaccatttagattgtctgaaggctcttcataggataatgtttctttagtttttcgctcttttggtaaaattcaaatgcaattgatgcacaggtgaaaagaagaaacattgcaaagaatcgattgct

SEQ ID NO: 92006 - DNA, 618 bp, Eucalyptus grandis
  Intron number 1 from transcript Egrandis_v1_0.038376m (loc us Egrandis_v1_0.038376m.g) derived from phytozome v7.0 (c hr-ID scaffold_2; pos 23712899 to 23713516)
tctccgtcctggattccccactcttgctcattcaggtacacatcaaagtcttcttctaagtcaaaagagaaatataatttacctaacaacgattcatgttggagaaattgttcggaccaggacatgtgtatgcaggaaacagaggttgcacgacatgtggctttccttatactggaaaaaagtgagttttaaagagagacgtcatttcacttaacacaaggaatcttccatccaaaccgcaaagcacctttttccattttcacgcccgcgaaatgagtctgcattctccaggggtcggtccaaggtttctttcttaaagtcaaaacagttggttaatgatcaccatgaactctgaatcagctgcacgttgcatgaaaacttagcaatacgccattaatggcacggttagtggattaagtgcatgactaatagtacagaactggcgatgaaattgatgatccataaccgaagactagtctttctctgctggtctttcgaggaccggttaatggaaaaaaaaaaatcactaaatgatatcatatggttttattagtgggccgtaacggtgggatggcaaaagcaggtgactcgcctcaagtgtgggggcttcatcttcgc

SEQ ID NO: 92007 - DNA, 829 bp, Eucalyptus grandis
  Intron number 1 from transcript Egrandis_v1_0.013346m (loc us Egrandis_v1_0.010579m.g) derived from phytozome v7.0 (c hr-ID scaffold_11; pos 35491178 to 35492006)
ccgtcagagcccacccgcttgttcttgggctcgaggtacttggttttcttcgttcccttctctctctctctctctcttccactccatgttccatcgttccaagtttcgtcttctttctgtgtttcgagttcttcgtttgtagctaataatatcctcgtgcaagtgggtcgtgttctggtcagctcacggccaaacaagaaagaattgggtgcttgcgcttctcttaaacactcgagtagagaatggtagatttgcaaattgtatccagttccagtcttgtggggatcttttgagacttgcttcacggaacgcgttttaggtccatttccatgggaattccagaggtcaacatggagtataggtgttttgattgtaaaagagaaagctatttggttcttagaacaaaaacctgtatagagaaggtgcagactttggatcagcagaaaggaaggacgagtgtataattgtttgattaacttgagatcatcaattcaaaattgtgttattttatcttaaattgactggtgctgataatgcatattgacccacatacagaaacctacttttcaataggctgatgactgatccagataaagtccgacttgtcagattagtctgatacgcgacaacccgtgtatggtggcactagatcggataaagaagattcctctaatatgactttgtcaccaatcacagaccttgttcacttacttggtcatgtttaatttctggtgaaaatagtgagcaaaaccttacatcgaaatgtttatatctgtgcgcacccttctgtctagggggaagatactgagtgggttgtcgtggactttga

SEQ ID NO: 92008 - DNA, 715 bp, Eucalyptus grandis
  Intron number 1 from transcript Egrandis_v1_0.006147m (loc us Egrandis_v1_0.006147m.g) derived from phytozome v7.0 (c hr-ID scaffold_11; pos 28812659 to 28813373 reverse strand )
ctagccaagtcttcgaggcaaagatacagtgagtaccttcacttcttcttctcctctctccttttctttttgggttcatttcttcctccttcttgatgctggaagcttttgtaattttggtgtagtgttgattgttgagtagaaaacttgtagcgttgttcatgttattgctgtgccatgagaacatgcactgagagttcttcctctcatgcttgtgtttatggtcagagtaagcgtctctgtatattaagtgggtttagttttacaagtttccaccatgtcagggctcgctgatgcaatagcagagagcttgctgggcctttttcttttttctcgaggaattcttacttcgcactaaaattccgaagatctatttaccccataggattttgaatgagttcccctccttactgtcggagatacagttctctgtcgaaggaatatttgtcttttgctacttagcttcattttgtgcctcagttgtgatcctctgactgaaactacaattggtagtgtccagtacaaaaacattgtacggataccatcacaataaaaaccactgtcttatctgccagtgacaattggaagacacagatgggtaccgtttgaatgatttcctcaatggtatagaaacagtcaccttaggtttcaattttgtgccattactcctaagttttctcagtgtttgactgtttcttctgtaggattttccgag

SEQ ID NO: 92009 - DNA, 884 bp, Eucalyptus grandis
  Intron number 2 from transcript Egrandis_v1_0.039355m (loc us Egrandis_v1_0.039355m.g) derived from phytozome v7.0 (c hr-ID scaffold_2; pos 42524382 to 42525265 reverse strand)
accatcatccaacttcatcaagttctgggcaacaggtaattgcatgtctggggatatagtatagtttaaatctttgtggtccgatactatgttcttcctctgcatggcattattcttgcaaactatattgaaaatggtacgaattcgaagttacaatacaaaatgaagcttcgtaatttaacgggagaacggtcagtgagtcgtgctattttagttttggtaatctctaccgagtgaatgtgagggattgctaaccaaacaaacccacttcacacctggaaatgcattcttattatagaaagaaatgcttacacatcttttaatccgaaatggctaaggagaggcaatgttcttttctttagaaacagatccgatggagacgggatagggtctatacctcagagagttaaagcacctggctacgaaccacggctttaggaactcaattctcttatcttggtaatatccttggataacgaggtagaaaccttaatcccaacagatgcagcttttaacatcttgtgaaatccggtatgttcagtcctatttgtatatgcctccattggcatcccaatagaatatttagtaaattaaaaagagatcaaatatcgataaattactcaaatgagagttagcaagccaaaactagttggtaaattaattgcaaacaatgaattttcttcttcttttttaatgttgattggatacttgttgatctttgttttagtagtaattatttcgatacatattaacacgttttgaaatttaccggtatgggaaaatatctgtattttttggacgaaaacgatagaattctacctatgtttggtccattctaaagttcatatttctcaatatcttctccttttctgttggaattccag

SEQ ID NO: 92010 - DNA, 773 bp, Eucalyptus grandis
  Intron number 1 from transcript Egrandis_v1_0.054639m (loc us Egrandis_v1_0.054639m.g) derived from phytozome v7.0 (c hr-ID scaffold_2; pos 55586950 to 55587722)
gttctggtgagtgactaggtcaatacatgcattgcagtgaaaacatctttcatcgcacatgcgccgctgacgtgatatcacttgcgagtttatcaattcatacatcttttcgctttttgaaataaatttcacttctatatgctcgacaatttttttaaaccttgaaatttcaatatacatatcaaatatctagctagttcgattcgtcacatcagttaatataaatgatttaattatagaagaaatccaagggccaatcgaaatgagttcttttcgtggttgagtgatctagcggagtgaatgcaatgcatcaggattcaaatgggattgtctgactttttaacttttcttacatgcttatcattccgtcaccgcaatgaatttaaatgagaagactactcctcaataagcaattgcatccacgatgattggtagaagtattctcgtctatttctttttttctatgtttcttacatatgagttagagaggaaattagatatattcagttcaatcaaacactaatttaaaaacaaagggcagcaatcatgccttatttttcaagttcatattctttaaattgaaatcgactggttctctatggatttagaaagcccactatatttagaaagcactatctctatctagagagagtagactagtctctctcctgttgagcggcgaccgaactaaattggacctaattacaaaacgaacatcaactattgtggatgcaacagttcaaggaaaaccccaagaaggtgatactattctg

SEQ ID NO: 92011 - DNA, 535 bp, Eucalyptus grandis
  Intron number 1 from transcript Egrandis_v1_0.038022m (loc us Egrandis_v1_0.038022m.g) derived from phytozome v7.0 (c hr-ID scaffold_7; pos 44573240 to 44573774 reverse strand)
gctcgtgtcagtcaggatcatcgtgctttgcacaggtaatgagcattatagcattaacttttcttttcttttctttttatgtcgaggatccagcttaactcaccttatgagagcacagcaccaactatatctcaggagagactagcccagcaacccaccggccgaagcccccgctttaacgttgttcataagcttctggccaacttttgggtttttttttttcttgggttcttttaacttaccaagtaactgtgcataatgactagaatttgcatgatatattggaattaatttgtttgggataattcagctgttgatatgaagttaagccgatgacgatattgcatagtgatggagagtatatctccagatgttttatttctctggtgtcgttatagctatgacattaattcgttccataatttgatctttgacacttcgaaaagatgtgcttgtagtcacataattactgacctgtgtcctgtcctttctctttccagcactgccaatatcatctctattcccattcctttac

SEQ ID NO: 92012 - DNA, 587 bp, Eucalyptus grandis
  Intron number 5 from transcript Egrandis_v1_0.023855m (loc us Egrandis_v1_0.023855m.g) derived from phytozome v7.0 (c hr-ID scaffold_2; pos 28411668 to 28412254 reverse strand)
agaaatatccttttcttcttcaagattgaggtccagtgatttgcttgcatattttccttttgatatctgatcactgtgtcaaaatgcaaatatctttatcttgtcttcgcatatgaaaacacttttaagagtttgaaaagaagatctgtatcatttcaaggtttagtgacgattatagtttgaaataggaaatagctatgcttgatttaatcctggtttttggtaatatccttttacttgggaatttgattacgatgagaaacagtgaaacttcccggcatgacaatatcattgactttgacttctaaatcagtcctaaagaattgtgttctgtggttcaaggaaacgaggtgttaaacaacgtacaatttgaactgctaattgttaaaagatcctcagccagttctcgcttttccagtgtgagttaggactgcctgttggttgctcaaagcacattgctcagcaatgttattaccattgatactttctattggcctcatatatgatgctctgtagcactgtgagttccactacgatgcccttgactggctgtaagctccagaagataaatacaaggtcgctaaaag

SEQ ID NO: 92013 - DNA, 494 bp, Eucalyptus grandis
  Intron number 1 from transcript Egrandis_v1_0.008260m (loc us Egrandis_v1_0.008260m.g) derived from phytozome v7.0 (c hr-ID scaffold_2; pos 21551416 to 21551909)
tcgtcggcggcgttgagctcgccaacgctcaggttcgtctgttttattgctttttcttctcttttcttttcggtattcatttgattccgttgtttctttgtcttgtctgcgtttgcttgcggagcggctgttcggcaatgaggagaaaatggtgaattgccgcaccgcattgtgtttgcattctgttttgaagggatcatgactttttcggttctctgaagctgcgtgttgaagtatatcctgcaaatttccttttattcaatctccgtgctggactgttctcattggccagcttaaatataacaaggaggattgctaatgacaactaagctagcattggttttgaaatggagtggctttgcagtggtgatttagatttttggtaaaatcttgagtgctagatagatttcagcctgaagatgcttatatcattgcttattctgtgttttttgttcccagatttttaagctaggcccggtccagtcaatttgcat

SEQ ID NO: 92014 - DNA, 991 bp, Eucalyptus grandis
  Intron number 1 from transcript Egrandis_v1_0.006111m (loc us Egrandis_v1_0.006111m.g) derived from phytozome v7.0 (c hr-ID scaffold_11; pos 17736384 to 17737374 reverse strand )
ccaaggtaatatacttcatgctaacccattctgtttttaagggcactaaacggagaagtggcttgttcgttcccagaattttctctgaaaagaatgcattgaaactgtttgatgatcacgtacatgcttatctgccttctttttcttgttttactgctcaatattacacaaagtgaattccaaacaaaattgcatgaattataatgataataatttactggaaacaaaggggagagtctgttggttacaagcataatatttcggctatggagtaaacaattcaagaggaaatgcgacctactaatctctctaattttactcaaggacatgggtttcgctgctaatatgtttgttttatcacctgtcatcagatattaatgaatgtgaagatcgaaatgtgtgccctgggatttgtgtgaacaaacggggaagctatcactgcgtcgctagtagaaagacagctatcattattggtaagtagatattttaacttagaattccagaccgcttcttgttctttagtattgttttaccttaccgtttgttctaacatgattgtccattagtttattgaggattatacgtgagtttcaatcaacagtatctatcaaaacaactgagaaactttctcagcaccctaatatttgatagataagaaaacattaacgaaataaataaataaaaattcctacttattctcgtcatattggaaatggaattattagaaaggaacttttccactttcgtcaatggtttgaaaaattactggacaaattaacttttcatggttgttaacataaatccatatgaaaggaaagtcaggtaatcgcttccatgtatactcctttcaatcagagtcactataatttataattcttgatgatcagtgcctctatagttcttgacaagaaaggggtatttttaacgctattaccccttaaatttttgcgatgcaggggttggggcagcctttggggcactagttttgtgt

SEQ ID NO: 92015 - DNA, 1059 bp, Eucalyptus grandis
  Intron number 3 from transcript Egrandis_v1_0.018292m (loc us Egrandis_v1_0.016126m.g) derived from phytozome v7.0 (c hr-ID scaffold_2; pos 47593022 to 47594080 reverse strand)
ccggctttcaccttcctacttgccatcattttcaggtcactatagtagttttgattggctcagtgcttctttatcgctcggttcttcgcccgtcagatgcagcgagctagtggtttttcaagtagaactttggcctataccacatgtaccttgatcattgtatgctcttggttgtaactgagggacgggaaaaggagtggggagtaccgcttgtcttgaaagaggcgtgccgactgctaggagcgcattgtgaggctgttaaccgtggagccggatatcgtttgaagcattcccttgccttgttctttttctattttatgattgtaaaatgttctctttggtagttatgtttggaaattgccaacgaagtgcagaattggctactgactaactaaataaagttcgtaatacaattacacttccagcttatatcctggattcctaaagcctaagttatgttagagagtataacatgcctgtaatacaaaagatcagtttatccagatacttttcagtaatgtgctcctgaatttaggggttccccttaataggtaaattgatgaaaattacgctgggaattacgctgggaaacttatcttaaatatgcagttccgaagtatgtctccttttccagttccataggtaatctcttgtctagatagcttgcactcacgaactgaggggtcgaccattctgtgaagttgtttggcttgttgcccttggttttttttttttttttttgtactatatagcttccatgcttgatatccggatgaggatccttccacctgtcttggcttgaaaaaataaacggtccttgctaggtattcagactgggaacaagtaacattgaaatttttgtatgctagaatgttagaatacaaaaatggtggactgaatttcttggaataaccattggtgcacacttcccttagtagtacatgaaggattggtacacttgaggattctggtaatttcatgttgtctcacctgctgattaataattacgtggttggtgcttcagattggagagattaaactggagcagttcaagtagct

SEQ ID NO: 92016 - DNA, 877 bp, Eucalyptus grandis
  Intron number 1 from transcript Egrandis_v1_0.014881m (loc us Egrandis_v1_0.014881m.g) derived from phytozome v7.0 (c hr-ID scaffold_2; pos 61877907 to 61878783 reverse strand)
gctgcagaggttctcaaaatgttgtttttttaaatgttttcatataatctgttgtagctttcatataatctgttgtggcttttggtgcttgtcttgtatgtcttttgctgcttctgaaatgttgccgtagtatctcgcaacatctttgacggcagtggttgggaacagtatgatttatatatcagataaagtgaggagtcaaaaatagcaaaaatgattaatcccctggctaatatatttttttggggataagagatggaatttggaacattgaattactgtttacaatcttgggagttatccttctagctagtttaagttggaggattagggggcaagttttcactaaattggcacatttgtttttcctgcttttgcaatggtgactttgtgcctctcattctatatcatgaagccttctttctggaaatggtatcttaatgaatttcggacaggtccaatagacatgatttttattctttgagtttttggtcaaaacttttgcaatcaccgtctttaaagtcttgttatatctgattattttctaaaaatgaatcaaaatttgacagtcatatagcttggaataggatatgcgcaaaagaattcccctctgcatatttctttgttgctgaatataggattagagatgtgacctcgtgtttgattgattgcgtcttgtctcttggatgatgtggcattttgaaagttaccatgtccaatctcttgctatcattggtgtagcagagcatgagtacttctatttatgatttgaaaactaatcttggtcatttgaacaaatagaaccttctattcttgtcttcttatcacgctgattgatttcttccctccctctttcagttacctggacgtacagaca

SEQ ID NO: 92017 - DNA, 438 bp, Eucalyptus grandis
  Intron number 1 from transcript Egrandis_v1_0.029929m (loc us Egrandis_v1_0.029929m.g) derived from phytozome v7.0 (c hr-ID scaffold_2; pos 2771693 to 2772130)
gaagtctggtaaacatatgggttcttaagctatacaaacattagcgttctagttttgattcctaactgaaactagagctcaaaactaccacatgacatgaaacttgtgctgcaactctccattgcctgtttgccatggtggaagtccatgaaaccgaaatgattcaatgaagttcaccaagaaaaatgaatataccacccaaacaaagaaagcatcaatttgttacgaagatctttgtttttcaaaagtttttgattatttcagattacaagatctaggaacagcaattgccacaaagtgcaaccggaaatcttgtggtaggattacaacacaataaacatggcgaagcagaagaaagtccgtgtttttacagagtgaatcagacgtacttgtctatcagtagcatccaaacgcaacgtcaaccagtcgcgggggttg

SEQ ID NO: 92018 - DNA, 399 bp, Eucalyptus grandis
  Intron number 2 from transcript Egrandis_v1_0.047197m (loc us Egrandis_v1_0.047197m.g) derived from phytozome v7.0 (c hr-ID scaffold_2; pos 10855498 to 10855896)
caaaacgtgcagcttgttcatttgacctcaagtttcattacatcttggctgggtgggaaggctcagcatcttaattgcgagtcctacattctgctctcacaaggcataacaaattgcaggtcccggaaggtactttttacttgaaaggaatctgtggtttatttactagtttcattggacaacctgtggttacatttacttagaagaaaacaatctcagtctcttgctttacaggatattttaggtcgttcttattttatcgacatctctccaatttaattttcatttctttttttgtcagaggtgtcttgttggtacgtttgattaagctctggaccttgtcatgccaatttgactaatgcaggcaggcactacctggtggacaccaagtctgtgaat

SEQ ID NO: 92019 - DNA, 958 bp, Eucalyptus grandis
  Intron number 1 from transcript Egrandis_v1_0.001256m (loc us Egrandis_v1_0.001256m.g) derived from phytozome v7.0 (c hr-ID scaffold_7; pos 24485257 to 24486214)
ggcttgactctcggtggtggagtagtagtgaaagagtaagaacgaacgcagagcgactgcttcttggagtcgttttgtgcggctctttttcgtttctgcatgatcggagcttgagttttctgctgatgggttcgttcaagaacgtactctggttttgttttgtccatgtctagatgtaatttagccaaacccatgtctgcttttctcgcgctgtgatcaactgagcgtggttctttttcttggttgttgaatttgatgtcaagtcatttcgcggtcgtctggaatttcctttgtgtgagacagcagttaaaaaaaaatggaatatgttagatatttcttagattgagtgactgattggggatgagaagcttcccagtgaatcatagccatgaataattggattctggggtcaaaagtttgtcgggctatcagtttattcgcggtaatttgtcgtgttgcttgaatttgaattgtgtttatgtactgtttgtttatcttacaggtccttttagtacgaggcatcgctttatgggatggaatttagcttttaattcgtgtagcatcatcatctgtttgaatcgtttagttttaatctgtgcttatcatgatatgaaatgagcctactacaggatgcagttcggatcatgaccttcaaggaagcggtgcatgaattcaccgctgcttttgctcgcgtggtatccacaatgtcaagctactttgaactgaaattgtcttgttctgtgtcattctttggcatagcatttttttaacctggctagttctctttttgggtgattcataagcatgtgatttgaagagatttagtcatgtaggaggtctagactccagagaagaagagatgtctcttgttttgaattgtacatcttctttatgagagtgtgatctaaatttagttgacattggattttcaccttctatattagaacaaggaaagaac

SEQ ID NO: 92020 - DNA, 718 bp, Eucalyptus grandis
  Intron number 4 from transcript Egrandis_v1_0.049525m (loc us Egrandis_v1_0.049525m.g) derived from phytozome v7.0 (c hr-ID scaffold_2; pos 24153463 to 24154180)
tcagtaataacaaaaaattggagcacctgtaagttgtctaccaattgatgaaagcatttgcaactaatagctccctttggttattctttgagacaaataaaagatgctaaaacatatatcttgtcgttccctgcaagaattagctcattttgaatcccttattttgctgttgttcccatgaaagggaatgtttatttcggctttaggccaacaaactaagccacgtcggatttcctcctgaaatattttgtaaaagatgaaaaaatttgggttgactttaaatgctaagatactggtcttcgtaaaatatacaaggtttaacacataaataaatccaatttcactttctaaaggttaaagaaaaagtgaaatattaaaagcaaatgtcccaccagaaacccactaagctaactgtttagttaccaaacataccatactgtttttatttatttatttatttatttatttttggttgctttctggggaattttaaatgaaaccttaatcaagcacctctttttttatttctttatttttgtcacgctcaataatcaaacactgttctgtttaataagatttatttccagcggtctcagagttttggttgacttacactgattctgatagattgattccacctgcaagaaaatcattaaatttttctcatttcttattgacaatttttctccttgcagagacttaagcttcaataatctga

SEQ ID NO: 92021 - DNA, 790 bp, Eucalyptus grandis
  Intron number 1 from transcript Egrandis_v1_0.012589m (loc us Egrandis_v1_0.012589m.g) derived from phytozome v7.0 (c hr-ID scaffold_2; pos 7820412 to 7821201 reverse strand)
ctgccagaccaacgaggttcacgtctttgacaccggtgggtcttcgagtttatcttctggagattctggttttccttcgaagtttgcgtttttttggaggatgtcttcgatatagattgttatactctgcttggtgctgagagaaagatcggttcttttcttttcttttgttctgtctgatttggagatcctggtgtttttgggtgcgtgcaattctgattgttgggatttttctttttttggttgtgttataacttgctgatgccttttgcttgttgttggctttactttaatcaatggcttgggtcttgaatcggtgatttgtggctggttttatgcgttgaatgtgtgggtgggaagagaatatttcatggcactatatgtccaatgattggtatatatggcactgctatgatcaatattttcctgtacttctttcatcttgaacaattactagagatgtttttgactttctccccatttgcatttttctgctgtttatatttactgctgcaatttcataagggtcggcttttggtgtgcttccaactttgttgccttctactttttgtgtcgtgatcttgtgttctgttggagcatagcctgtgtggcatgtggaagttgttgaactatgagaggtgatctctttaccatagtcttaattggtgacctgggggctaggtgagagagagagagagagataaatctgccattgtttgtctctgtatgtcatgattttcctttttttcaattgataatttggttttttctgacttgcagtggagcaaac

SEQ ID NO: 92022 - DNA, 1046 bp, Eucalyptus grandis
  Intron number 1 from transcript Egrandis_v1_0.049772m (loc us Egrandis_v1_0.049772m.g) derived from phytozome v7.0 (c hr-ID scaffold_11; pos 40875055 to 40876100)
ttttttaagacacttcgttgctttggcttggattagtaagttcttcgaaaggactagaaaaacctagtggaaatttccaagtattatgcaaagaatacaatcaattggtaaactttttggtttagcacatcaatttctaaatcttccgtgaggagaaaagttcaacgagattttcccatcagaaatttgccattgttgctataaaaaatcgctttagtgcacgtatgacaaattaaataaaatacaaccgaaagaattttctgatactctttctaataaaaaaaaattcaagattcaactaaactaataaaaggtttaaagctcgatttgcatttttcgtgtaagattttggacatggtacttttcttttacgtcaccgtatcgtaccaggtacaaaaggaaagaagaagaaagataggcggatgcgtcacgcacataaaggtggccaaagggaaggttaggataaacatcaccggttggaccggttgcttttggcctttcttcttttctttcttacttttgctgcgtttgggcaaagacgtactttcgtttcttgtttgacgagttccaaaccaaaccacctttttttttttttttttttaaattaaagaaagagttgcgagtctctcctggccgtttgacatggtgggaatagttatatggattaggagttgtttattgccgtaattaagagggaaagacgccctataattatgccaatcaagcttgactgtattcctttcccattattgagaggactccttgtgcaattttcttgttttgctttcgccttgactcaaagttgtcgatctcttatttgcatcttctttcctcctctcttccttttctcaatcttctctctgctcaaagtttcaccgcaggccatggtctcgctctgtagtctcccttctttctttccttttcctttgtttttctgttgcaattctcaaacttcattgacgctcaagctcaaaattatgattagccaacagccacgacttcgacttagtgggtgaataacacaacagctactcacgtcactcgac

SEQ ID NO: 92023 - DNA, 803 bp, Eucalyptus grandis
  Intron number 2 from transcript Egrandis_v1_0.005215m (loc us Egrandis_v1_0.005215m.g) derived from phytozome v7.0 (c hr-ID scaffold_2; pos 57038273 to 57039075)
ggcgctgagtggcaacgctacgccgctggtctcaggtagattcgacgtcgcctgggcgtggatgatgttcattacgactgcgcttgcagtcgcttttgatcgacctcttttacgttcccctcgtgttgtactgattttgatctgctaaggatagcgagtttcgcatgatttgaggttaatagctagtgctcgggagatgaaaaatcaaaaagctgtcctccatcattcagattagttgccggtgcttggtcctaatcaagagagaatcttcgacaattgtattgctgcctctgtgattattacgagataaagataattcatttgagcttgtcgaagattgagttcactttaaacggttctactgaggctttaattagcttatcatgattgctctttcccccccttccatgcatacgtcgatggccccgctgctggtgtctcatgctgtgtttctctaagtttaatgatgattaacatgatagcgtgttcgatctcagggttttgtagttgtctcttgtgagtccacaaaaatgttcaagtggcagcatgacgttagagagtgaaataaaattatcctctgagatgcttttgtcaactagatctccaacatttacaattctagtgtctttagcttttttttttctttttgcttggctacaccatgctaaagttgcttatgaacaatcactcgtcccttagcctcttatcttgctgctgctgctgctgctgccgccgccattgttgttttgttgtcttggaaaattttaatcgccttgtcttgtgcttccatttggtatgttcag

SEQ ID NO: 92024 - DNA, 889 bp, Eucalyptus grandis
  Intron number 1 from transcript Egrandis_v1_0.046502m (loc us Egrandis_v1_0.046502m.g) derived from phytozome v7.0 (c hr-ID scaffold_7; pos 44738920 to 44739808 reverse strand)
tgcggtctacacttacaagagaagaagatccaaaggtttgtgcaaaattctaaattttggagggtcgttttctcattacaccttaggaaagttagaaaaaatgcccagaaaatcctaaatctactatacaatagccaattttgtattaagcttttcaatttgactaatttagtcaaacttttttgagaatttgccaatgtaatccttcaagccaaaattagcccgaaattgttaatatagatgccagccgtcctgacaaggttgattctcattttatgtttaagtcatttgattagtatatattcatttctagagaattcaggcaaaagcgtaaccttactgtattttataccaatttactagacaagacatcgtccgttggatagaagagtgtaaacacagttcggataaacctaaaggtctgtttttctattatgttgaccagaacatgcaataaatattccaatagcaaaatagagaggaacaaatcaaatttttacaaaggggcaaatgctaacttgtccagaggaataagacatattttacaatcaaactctatctatcgttgttaattatttctggcccaactttatatgtcgagatgggtccgcgagacttgatggtctttttccctcccagcaccctaaatatatctcaataactcaatgagaaaaaggaagggacgattgaataataggatagaacgagtgtggtactattagtatctctcagtcgtcatcgttgatctcatcgaattaacctatttgaccatcttctagtgtcgattatattttagccagaaattaattacggataataacacaagcttccgaatttttgtatggttcactaaggctgcttagaccccacggagttcaaggaattcaga

SEQ ID NO: 92025 - DNA, 646 bp, Eucalyptus grandis
  Intron number 2 from transcript Egrandis_v1_0.006979m (loc us Egrandis_v1_0.006979m.g) derived from phytozome v7.0 (c hr-ID scaffold_2; pos 37995238 to 37995883 reverse strand)
tcaaaggtgagcaacgtcatctagcattttcagcagacttgttgtatatcttgctactagtatgtagtttttcaattttgtctgtatcatgctttcacgtgcacctgggatcttcttggttctttttgatttggttgtcacagaagaagcaaataacttcttcttcttctgcgtatgcttatgcttataaaatttaggacatcacagcatatgatgtacacattaatggttgatctctgttatttgtgtcttcataccggtgtgttgctggaattaacttatgactggaagactgatctgtgatgcagaaaacacttttaggacagttctttcttatgttatgttagtttctttttcacttgtgtgcttcatatacaggaaatgtcttctgccaatctttctgttatatcacttcagttcatgtccaaacttgcatatatactcttgatcaagtttcaggctatgtgagaaactgaagtaatattgttaagtagctcataattataataaatgactgattccaggagatttctgcatgtttgtgtttccacctttctttgccccccaccccacaaaaaaaggaaaaaaattcaagcttgcttaaagtttctgaactttgatcaattgattcttgcagagtgaccca

SEQ ID NO: 92026 - DNA, 829 bp, Eucalyptus grandis
  Intron number 1 from transcript Egrandis_v1_0.006979m (loc us Egrandis_v1_0.006979m.g) derived from phytozome v7.0 (c hr-ID scaffold_2; pos 37995891 to 37996719 reverse strand)
ctcgcggtcaacccgttctcttctctcaaattgaggtttgtgcctgtcgcctgcccatgtaatcatgcatgcgcgcttttttcgctgcagaatctttttttcttttttgcatagcgatgcgcttcgttctcttgaggcctgagtcaatgttgtcacctgtcggtattttactcttgtcgtttcgcgcgaaccgatgatgtggccagaaaaaacctgtctttcggaggatggttcgcagaaaaactgagaagcattcacaatgtggattctactcaaacctcgctatctgaacgacatgatgttaaattttgcgcgtgatctaaagaaaacatggtcgtctaattggagttttcttcttggattcctcatcagacttgacttcagtaaatctgatttgttttctttgaaccaaaattttggtctgcttcttgagccgtggccttttggaactcatgcattgcatgctgcaacaagtttaattgggatttttcgtcagtttattcaaaaggggttgctaagacaaaaatctaactaagccttggacttatacgcaattgcattgttcattctgcagaaacagttttttaactatctgaattgtgtgttgccttatgaaatttaaatttggtgttgctgattaagcatagcagggagggagccagtacaaattaagcatatgaactttccaacaacaaacttcttgcattacattacatatggtgttctgcatgagtatcaatcttgaaatatagtgcccacaatttgtatgatgtgccatactgtctttgctgcagttatccttatccgcttcgaaattacgtgatcgaga

SEQ ID NO: 92027 - DNA, 840 bp, Eucalyptus grandis
  Intron number 1 from transcript Egrandis_v1_0.052288m (loc us Egrandis_v1_0.052288m.g) derived from phytozome v7.0 (c hr-ID scaffold_11; pos 17914398 to 17915237)
tctctaaagaaggccttggtcaacaacctagaactgtaagaactgcacacttgcattgtccttttgcacggtgttaaaaagaatttgtcctctcctggtgggacataaggttaatttggctatatatacaaaattctgaatataacccttttaattctagtagatgagcttcatgattattactgggcatttgttttctgtttttggctaatctttgaagaattaatcaccttttgtctacttgatgcaatctctttctgaaaagaaacgaacttgacaaatctcaaaggcattggctgttttaagttttgatgaatgtctgttattaccacaatttttactcatatgaaaagaattaattcaggttgaaaagaaggggttactagtaatatggggaaattgctgtcgaactaaatttgaagaaactgcgtagggtattctgtttctttattattttttacaatacttcatggcagttcctcttttggttgctatatagataaggatgcttgaaggacatgtttgatgttcaagtctcttatgctttgtccgtggaacatggagagtaggaaaggggggagaatattcaaaatcatcctcattttctcttcctagaaatcttaagattttcccattttctacacctgcctcccatttttctgcccctcccctccttcccaaacaaagcattgatcttacttttcttggcctcctacattttgacgagattggacattttattgcttaattgaagagccccagtaatattagtgtgtttgcttgcctattcatcttcttgcgataggatccaaaggagaaagctaagtcagagacaaggga

SEQ ID NO: 92028 - DNA, 883 bp, Eucalyptus grandis
  Intron number 1 from transcript Egrandis_v1_0.019177m (loc us Egrandis_v1_0.019177m.g) derived from phytozome v7.0 (c hr-ID scaffold_2; pos 7470712 to 7471594)
gccccccgctcctccccctccttcctgtcgcccgagtaaacaccacttcctcctcctcctcctcctcctcatctctaatgaactcgctttctgtccggttcggtcagggctcgtaggtgctcgagagcgattcggtccgcgtcgcgtttcgcggtgatttagggcagggtagctgccggcgatccccgattccggctcgcgaccggcgcgagaaatgtcccttcgtctcgcgttctcggttcgcgatttttgctccggaggttcctctcccggtgcttattatcgatctgctttgccgtatgtgtggagatcgcgtgccgagagattgggggattttgattctcattttttgtggtgtatgtatgctgcgggtcggtttctttctggtgaaatacgaaatctccggctttgttatcgtttcgagaaagattgtgcgaatgtagtttgttgtctggagaatgtcgtgaccgagcaagcgaattttcgattctcggttgaagtaggactttcgtaaacaagccatcgtcacgtgcattgctgtgttgactgacattccaatgaagtcggttttctcatttgtttcttctgctctttttctttctcagaacacgtttactgcttgatgcttccgctctgctcatcgaacaccgtccccattttagctggccaggctaaaataatgcctttgatcatattgcattatccaacttcggttatgtagtgtctgagatagtaaacttcattggtttcttcccacacctgtctttgcaaaggaaggactgtataatggtctcttgattacagttgttgcgtggacaataattagatagagctttttcttaagttgtgtagcttattgagctgtattgggttggcagggaag

SEQ ID NO: 92029 - DNA, 549 bp, Eucalyptus grandis
  Intron number 3 from transcript Egrandis_v1_0.007494m (loc us Egrandis_v1_0.007494m.g) derived from phytozome v7.0 (c hr-ID scaffold_2; pos 51287049 to 51287597 reverse strand)
ttctggtaagcatggccaagaatataaatgctatagtgtgttctcagatgactgcactgcaaatcggatgcatttcgatgcatgcctgtctatgtatcaaaatcaactggataattatggtacagattacatgttacaatcatgaatatttcttctgcccaaagaagaccacggagattttcttagcgaaagaaaaaaaaacaactctaagatttggtataggtcccgcagttaaaagaaaaagaatcttattttgaagatttactcctaatatactctttatagactataaagatttttcttctcttccttctagctgtatcaaggtcaattgaaatgcttccagtgtctgtgatggcgtcatttggtcaagcatctttgctcctttgattgggagaataacttggcattgcgttcagatggacagattatttgtgggacttgtatagatgatgaaggctgagatatttgaagcaactttacatgtgcttttgccccctcttttgacaaagagttcctaaaaagatgttcttctaactcgtgcagggg

SEQ ID NO: 92030 - DNA, 908 bp, Eucalyptus grandis
  Intron number 1 from transcript Egrandis_v1_0.007494m (loc us Egrandis_v1_0.007494m.g) derived from phytozome v7.0 (c hr-ID scaffold_2; pos 51288056 to 51288963 reverse strand)
aggggaagcgacgtcgttcgccgtccgggatcgaggtgcgtccatggcgtctctctctctctgtgtgcgttagttggtctccgttctttacccgcttcgaatccgtcgccgggttctcggcacgcgaacggggcgcgcttccgtgccgtgttatgctaacgtcgcggcgtccgaaagtcgtggttttccgctacgtgccgacgtttcttttcggtcgtttttatactcggcgagtgcgaggagtgcggatctggtgcacctttgggcttgtcgccgttggtctgaagaatggtcgggtcgtttgcgcttgtctgcgaactccctgggagcgtggtttgcgccttgcggttaagctggccgtccgaaatttgtcaaatttttggtttttgtcggtttttgaatcggtctgtgagatggatttcgatgctggagcatgtttggtttaggtagtgaggaatcccatgatgccgtcttcttgaacgttttgcttaaagtagcatgaagtaatctaaattttagattgttttgaattgggaggatctgattctttagtatataaatctttgtacggagaatatattatttatttaattattctttgttattcctctgtgggccatcaagtttgagtggactcgtcttgtggactactcattcctgggtgaaattcgcaacaagtgccgtaattgatgtcaaaagataccacacgctagtaacatgaaatatttcttggcttttcagaatagaagtagcattctaccgataactggagttatccatgttcgatgagaaattattgattctagagtcctgacatgatctgttttagatcgacatgcttatcgagatgttgacttgctgagttttcgggtgattcttttgaagttgcataggggtttgagagtttg

SEQ ID NO: 92031 - DNA, 339 bp, Eucalyptus grandis
  Intron number 2 from transcript Egrandis_v1_0.053351m (loc us Egrandis_v1_0.053351m.g) derived from phytozome v7.0 (c hr-ID scaffold_11; pos 34955926 to 34956264 reverse strand )
cgtctgaaaaaataagccactttgtacacaggttggtttgagctttacacttgctatgatctctttatgaaaatgttgcttttcaagagtctaatctagagatgatatatccctttggctgcatcagtttcttttgcttagattccctttctttaccttttttgtttcttcaggcttctttcttctttcttcacccacgagttaagaattctaatcttaatttacagtttttttctggaagttttagggtattctttgaatatgtgttaatgttgataaggttgtaggcatgagcctcctgtgatgagccatgtgtctccatcctacagaaagaaccgg

SEQ ID NO: 92032 - DNA, 1018 bp, Eucalyptus grandis
  Intron number 1 from transcript Egrandis_v1_0.032774m (loc us Egrandis_v1_0.032774m.g) derived from phytozome v7.0 (c hr-ID scaffold_11; pos 34763869 to 34764886 reverse strand )
ctcgagaaggaaggagcgcagcggaggtgagtatccactcaaagccttgttaattcaacctttatctgagtttacattgatatcaattgccattttacatgaggccatggaaatgaaactgagcatcggggtgttggagaagggtcttgaaatgatggctttgtgataatgcttttcaatgaaaattatgtcatgcctcccttgtgtgttgatttcttcttctttctttctttttgctctctttccttcattgagtaaggtttttgtgactaatcgatatgaattcattatgggatgcaattttgaatgttatcagagtgctataaacggaagctaatgccctttcttaacattcttagggaggcatataaaaataattatatatttttttgtagatttccatttatgatggcctgtcaataatttttaggaacatgcatacttatgagccactgtggaccattatctaggtgatgcacaacatactgtttaaaatggaattgagaagtaatgtgtgatagtaagccgaactaaatttgtcagaagttagaactctgaggtgatgacatagtgctggctgatgcaaaatctgtgaaccttggtatatgaagccaaaagcaagaagccacagttcccttatttattagcagatatgctgcctcatgttacgagctcattccgatgtaatagtaagtgatttggattttatacagatgagttgtcatctaaaggctcttaatctctaaggaaattaaaaatggtgttaggttgtcatctgccacccttctcctggtccagttggcatggtgtgtcacaatgtgtgaccactattaaagctttccttttcttctacatataaaatgcatctgtcctgactgtttcatggtcatatcttaatttcaaccagtacattagagcattggcagtgaatgtaagaatgtgcttaatgccactgatctgatcattgtcacctctttgtacaggcaggtgaccctacttgtgatactgccctcttgaa

SEQ ID NO: 92033 - DNA, 699 bp, Eucalyptus grandis
  Intron number 1 from transcript Egrandis_v1_0.010250m (loc us Egrandis_v1_0.010262m.g) derived from phytozome v7.0 (c hr-ID scaffold_7; pos 19998442 to 19999140)
ttgattttccgctgctttctttggtgtttcctggggtattggtttcctttgcatacgtgagaagttagatgctgtgtttccccgagtgatcagtggaattgctgctgcttgtttgtgtcgatgatgatgtgaatgtgtttgcttacgtgtctgatgatttttggggtgtcacttgcctgcttggttgtgtcggtgatgatgtctctgccgacccaattcgattttgggtaggatttttcctgggtttatggtattttcttataaatatgtcagtcttctccgctgccgcataagcagtcttcgtctgtcgagggggctttgatcgactgtgtagctttcgcaaggccacggctgtttcgggtgaagctttagtttcttgtagaagttctgcggttgattttccactgctttcttttttactttctgggttttgatttcctttgcatgcttgaaacgttagatgctgtgctttccgagtgatcagtggagttgctgctgcttgtttgtgtcgatgatgatgtaaacctgtttgcttacatgtctgatgattttgggggggttacacactgattttggaatttgggtcgatgggtgatttcgatttttttcttttgttctttttcggtttgtttgtttcgatttgaattgattgtaatgtaatcggtactgctgtttgtgttgcagagatagattgcgcgc

SEQ ID NO: 92034 - DNA, 570 bp, Eucalyptus grandis
  Intron number 1 from transcript Egrandis_v1_0.046506m (loc us Egrandis_v1_0.046506m.g) derived from phytozome v7.0 (c hr-ID scaffold_2; pos 42518787 to 42519356 reverse strand)
tatgttcgcttgaaacgaactagaatggacatcaaaatgcagaatgaaaaacactatattcctatacctttcgttaaaatgacaggaagtcaaaattgttatacctaaataagagaaaaactgtaatctcaaggggtgattaattgataatttgttaacgagtgcccctattctattttctacttcatatttaactatttcaaattaaaattcaaaaaaccaaaatcaacactacaaggataataccaatttagagggacgcaggaagagagaatttaggatatgctggttgtatataccacaagcactggactcctcaaatgtaaatgcaacacaagtatatggtaatattgcggtttaacttcctactacgagtgtctgtgttccattctatgttccaaatttcgctgcacttgtcataaatcactttaacgacgacgaccgtggatatggaatcatctaccgtacttcgaatggtactgacgacatccattttttctgtcgctgcaagctggtcgcgaggcgatacccataacttatgtccagatcactgataatttgccttgcgga

SEQ ID NO: 92035 - DNA, 815 bp, Eucalyptus grandis
  Intron number 1 from transcript Egrandis_v1_0.038875m (loc us Egrandis_v1_0.038875m.g) derived from phytozome v7.0 (c hr-ID scaffold_11; pos 21565464 to 21566278 reverse strand )
ctaccaacgtcgtcacctgccagaattccatcgacgcccacgacaacaccatttcccacgtctacagcatgtctctttctccctcaatttcatgaattataccatcgtggattccttgctagaatttaaaattaatcaagcaattgcacaccaatattttctctttataaagttgactggctgccgaactaaatctctttgcaccatattagtatttaataaaaaaagaaacattaaccgattttttggtcgaaatgtagcaacaatacataatcacttatcatattaaaattactcatgaagtaattatgagcataatattaattgttcacggtatgattatacaaatttttataagtttaatcaatacaatcgcatattatatgcttagcatttaattatataaattatatttttagtgattaatgggaatgtcaaactcaaagatcatgattaaatatcaaagtgatgagagttatattcactctaactttaatcgtaagggtagtttcagaatttcaatactattatcttcttattatatatgttattcataccaatgcatggtagggctctattttgagtgatgcgtgcttttcgcattagctatatattcatttgctttaaacaaaaccttcctttttttttttgtaggcaagttttgaagaattttttcatttagaatcaattgagatttatgtaatacatatcaatagatgtaataaagccattttgtaacatcattttgatgcctagtttttaagtaaggctagaataaagccttcgtgtcgttgcgaaaacagagttcttaagga

SEQ ID NO: 92036 - DNA, 635 bp, Eucalyptus grandis
  Intron number 1 from transcript Egrandis_v1_0.000393m (loc us Egrandis_v1_0.000393m.g) derived from phytozome v7.0 (c hr-ID scaffold_7; pos 43373738 to 43374372 reverse strand)
gtcagaaggtgagttccgcgggtcctctcgtttcaaattctgcatttttctttgtttatattggtaccgtctctccgtatcgtatcgtctcggcgttctctttaatttataacttcgttatgttgcttctgggatgttcttttccgtcggtcgttaatggcatgttgggtaatgatgtttcggcccttgactaatggattgggcaattatgcacgagccgaactacaggatttaaaggaaatacaagtttagtttctgggaatttcgatcacagaattccgtcgggataatctgtacagcgcaggtttgaatggcaaagaatggcgcttgtcagattctgatgttttctgaagaggagcgcccgattcagaggctcaaaaatcggttttttactagattctgtaactgggaatgggacctttgtgatgattttactgttgttgtcactttcaatatggaattttgattggtccgaaagtcatagaatcaccttgttgttttgttcacgatattttcctatgcttgagtttccttgaattagaactgcttgtcgaaggatatgttaatccaagggactttaaacttgtgtaacatgaagttctgttgggtctagtcttatcatctatagttttcag

SEQ ID NO: 92037 - DNA, 435 bp, Eucalyptus grandis
  Intron number 1 from transcript Egrandis_v1_0.034330m (loc us Egrandis_v1_0.034330m.g) derived from phytozome v7.0 (c hr-ID scaffold_7; pos 28409445 to 28409879 reverse strand)
accgtgcatcgaacgaggaacttccagcgaagtgagttcagctgtagcctcttgctcttcgaaatttctcgctccctctttcctttccgtttagggtttgtttctcttggttcttttaagggtttggtgtcggtttcccctccgtaaagtcgcttgaatcgctgcattttccagtgcatctttcattctaagttccttcgatttgctgtaaaacgagggacaagatgagcacacaagagggtcgtctgcgttttgatgtttgggggggttattataggtagaggtgaacatgggatttgccacagatttctttgttcatgagccctttttttttgtcctaaattggcgtgcaattttgtttcttgtccattgattaagtatgattatggatattcctgtttcaggtagaggaaacaccggttgagtattaggagg

SEQ ID NO: 92038 - DNA, 731 bp, Eucalyptus grandis
  Intron number 1 from transcript Egrandis_v1_0.021807m (loc us Egrandis_v1_0.021807m.g) derived from phytozome v7.0 (c hr-ID scaffold_11; pos 23499238 to 23499968 reverse strand )
tttgaacaccttgtgctgctcagtggatctccaaggtaggctctctctctctctctctctctctctctcgctctcgctctctgtgtgtagaaacatctgttgtaagttgttgatttaatgaacggagttaagaaggaagaacattttttgcctttcttgacaacctttttccatgcatttatgttgcttgcataaactgcagtcaggtatactctgtagattcacatgcacatagaaataaacactgtatcccaaatgtcatgttagggttaaaaagaattaccattggagaaatacttatttaactattcttaagttttttgccacaaaaaaacaaacaacgaataattagacattattgtaaagtctattccttcaagaatttacaattcataatatgttgttaaaaaattaccatttgagaaatgcttacatgactattcttatagtttgggccacaaaaaaaaaattaattaaaaactattatattagtaaaactcttattattttgcatcacacttatttttttcaaaaaagaaaaaaaaaaggaaaaatcgatgtagattgtgttaaatttacgacacgtgtcaccttgagttatccgtatacatgttcctcggcaactagcttgagcgctacagaaaagctgattgatcttgtaaaatcattttattaacaaatatttttgaatcacaggtacctcaacgccgaaggatacgtcggaggcctcg

SEQ ID NO: 92039 - DNA, 658 bp, Eucalyptus grandis
  Intron number 2 from transcript Egrandis_v1_0.009549m (loc us Egrandis_v1_0.009549m.g) derived from phytozome v7.0 (c hr-ID scaffold_7; pos 33652834 to 33653491 reverse strand)
ccactagtggagggttgaatcaacaaagaacaggggtaagttacctaagctgcaatcttagccatacctgtttttacttttcttttttcataatcttagttttctttgacatgagttcagtttatcattgattttgtggattatcaccttgagaagtggttgtatttccctgcaaatgttttggagaacctcaatatgaagcaattttggaaaatatctgtattaatttgctgcagctctggtataataacagcgtctggtcacttcagcacacagaatgttatatagtatataaccttgttagagttttgataaacagtattcctgagtgttcaatgattgctagcttttatttagatatctaaaccctttgccatgtagtcgcttttgatgagatgcttcccgaaattgtgatgagatatgctgttttgaacttgagcagtatttgaatcttttgtctcgctttctgtggttaagtgcaatttcctttcacatgttcaatgatcctgggaacggacatccctattgttatctattccagctgtggaagtgatattcttcttttgatgtcataatctgtccagtttagttacatctgacttactacatatgtactcccagtatgaactcctcctatttgtgttaatgcagataacag

SEQ ID NO: 92040 - DNA, 543 bp, Eucalyptus grandis
  Intron number 1 from transcript Egrandis_v1_0.020062m (loc us Egrandis_v1_0.020062m.g) derived from phytozome v7.0 (c hr-ID scaffold_2; pos 24655459 to 24656001 reverse strand)
gcgtcgtcgccgacgccgtcatcactgccgtcaaggttctctttttttcctctgttcttttgcttctgtattcttttatttttctgatctttctccagaagctgctgggtgagtttagtgggcgtatgaaccagttaagagtcgattgaagcttttttttaccccttggattttcatgttttgtcgtgcaaaatatgccatgcaaggtggtttcacgtcgaatcggagaccggagatttatagattcaaaaatgaattgcaacactatagtgaaaagtgattaagtttctttcattttgttgaccttctttgcttggagacaagaaaacggagcactctgtgttgatcgttgcttacgctttgattaggagccgtgggtgactctggctttcgcaatttgatggctagtttctgtagttcttagtttttctgcaatgagttcgatttatttgattctgtgttgagctgtaaaaaatgtccgtttcggcataatttaggaggatgttaattgtagttctctgcatgtgcaggttggatacaggc

SEQ ID NO: 92041 - DNA, 694 bp, Eucalyptus grandis
  Intron number 1 from transcript Egrandis_v1_0.051131m (loc us Egrandis_v1_0.051131m.g) derived from phytozome v7.0 (c hr-ID scaffold_11; pos 31470116 to 31470809 reverse strand )
cctttcacaggtactgtattcccaagtccctgatgaatgaacttagcgatgtcgtataatcagtcaaacttacaattaggactcattcagttgggatctaagtacgtacaaggctttcgcttttttctttggcgttgttcccaacctttacctattgacatgtacttggattaaattacaaagtgagggatagaaattttgataaattagagaacgaggctgtaacaccgtcatgttgatgcagacaaaaaagtggttgtgcgttaactgaagagcgacactatcagatcatccaacattgacccaattaatgggatgtctccgtagatttgcacaagtcattaaacatcagtgatcaccaaccactgggacgcaatttattgcatctttagataagaagctatggaagatcagtgggtctgatggagaaattaagagcattaacaactgatctggaataggcttttttgactacaataccctcgggtggaatatttgcctcttaattttagttaatatcacgtcagtggaaggacatttatcttgcttctaatatttcatagaatttacaaaaaaacaagaaaaacaggaagataaaaatttagtttgattctgtatggaacacattgatggaccctttgacatttcacatctgataaaagactcgaattccaactgcaggagttacctagaa

SEQ ID NO: 92042 - DNA, 850 bp, Eucalyptus grandis
  Intron number 3 from transcript Egrandis_v1_0.045786m (loc us Egrandis_v1_0.045786m.g) derived from phytozome v7.0 (c hr-ID scaffold_11; pos 18747550 to 18748399)
cagtggtagggttgacccggggctggcggtgaagcttggagagcatgagatatgggtgaattattggaagtttgtttgtaaaacaaactaagtgtgtttttccttgtctcacataggaaaattagtaataggtgggccagttaataagtgtgaggcttctttaatgtgtttgaagaaaaagatttggtgtgggtagacctcactataactgcatgtggatgcgtgattattagatgcactttgaaaattatgaaaatgtgaaattttatttattaaaaaatgtattattttattattatttatattattcataatttatatatatttttattattttgaatttttatatttatgtcttttcaagacaactttgaaatttatactcgttcaatttgcaacttttcccgttcattttccaacttctttcgaagggacaccttcgttcattttgcaacttcttccaaaatgatgcattcgttcactttgtaacatttcacgaagagttccctatgtactttaaaactgatttgtgtgtgtgtgtgtgtgtttgtgtcaatttttgggtgaacgataaagaaatcatttttagagttttctttttgaaactacgactattttttcgattcttttaaagagaccctggaaaaatactatagtttgttatctagtattattatttgaaattttgttgtatcccaaatgatatttgtcgatgaccattagtaatattgtggagtaaataaatctttaaaaaaatgatattatatttcaaaatccgacttgattgcgctattgatttgaaatcatattttccaacatgaactccgtgtccccttatgtggtctcaagg

SEQ ID NO: 92043 - DNA, 788 bp, Eucalyptus grandis
  Intron number 6 from transcript Egrandis_v1_0.007117m (loc us Egrandis_v1_0.007117m.g) derived from phytozome v7.0 (c hr-ID scaffold_2; pos 2366319 to 2367106 reverse strand)
acactctcagagaagtgaggttggttgacggtttcttagtcaataccttcagaggtcctatactcttatgatttcataacgatgtgagaaataattttctatatgctcggtttgatatgatgtcttcttattcatcagttgtactgtttcctctgtgaggagatgtcacactacttgtccattcacaaaataagagctttttggcttctcgttaaagggcctttgttgtcttaatgtcttgatgttgtatgaactgattctgcttctaaactgtatctcttttaaggagaattggttatatgaaaattagaaggctgcctcttttattgatattgcccttgaatgaagaagtggctctttatttataaagaacattagaagatttttaaatatcaggaataatttttctggcaaattggttggaactgatcatgttattgctcctgagcaaaagctatgatttaactgcagctaaagttgcagtttaataaagcagatgaaatggcatgcacttcccatttggcctcatactctacattaatataaacaatttgagtctttcatccttttctttttatcatggcctggaaagtttattaaatcaggagaatccacacattgtttcccttttccgtatcctatggaatgtttattaaatcagggagaattcaagctttatttcccttttccgtatcctatggacttttaatcagcctttcagacttgcttttttgaaggtttgcaaatcttcttacttccatttctcccctatatgtgcaggtattata

SEQ ID NO: 92044 - DNA, 827 bp, Eucalyptus grandis
  Intron number 1 from transcript Egrandis_v1_0.010934m (loc us Egrandis_v1_0.010934m.g) derived from phytozome v7.0 (c hr-ID scaffold_7; pos 50153680 to 50154506)
acgcccaggagcggttcagaaacattcggttgcaggtatagtgtcgagggttcttgttatttccagtttcactttttttttcttttttttgacttgctaggtctttatttagtgggggtgtctgtctgaatgaggatttggagactttgtctgtgcttattttgctttgaaggtggactgtgagttacgttaaaatttaggcttgatccggtggtgttggtatgaactagagttaactcgtggaattatgtggatatcaatcggaaatttggtttcttgacgagagtgaatgtcaacataacttggattttgttgaggggaggggaaggcagtgaagctttttatggtgagtgccaaaaatttgaaattgcaagacccgatgcctttgatccttagtcgacaaaaggcaattttttggagatatagatattatacgtgcaaaatattcagtttaatgtatgggattgacttttggatgcgcgcttttgcctcattcaggcttttcatgtaatgcttgtatcatttatctgatcattgatatgattaggagatgaaaatttagtttctgaataaaagttacgccaaatgttaaaaaatgtatctactggcattacttgagttgcgtatgcaagtgtcttgccacatctttatcagtcagtcaaaagagtttcttttcttgttaaaatctaggatgtgggatttcaactcaaagatgacaaatgttccattttatgagattgatgaaagcctttttatggggatagtttgcatatgctgattgtggttttctggtttggatgattgtgggacttgttcacaggaggaat

SEQ ID NO: 92045 - DNA, 703 bp, Eucalyptus grandis
  Intron number 1 from transcript Egrandis_v1_0.049427m (loc us Egrandis_v1_0.049427m.g) derived from phytozome v7.0 (c hr-ID scaffold_7; pos 42589482 to 42590184)
ctgactctccagttgttcgatagtgtgtgtaaaagaaaaatttcaaagtctgaaacttcctaattctttgctatttcattcaccgagctctccagttgttcaatagtgtgtgtaaaagaaaaatttcaaagtctgaaacttccaaattctttgctatttcattcactgagctcaaagttgtatacaagagagaaactcatagtgagactttgtgagagattggtagtatgagactttgtgagagattggtagaaactcttcacagtgaagtcgagaatatcaagttataaaaactcttttgattcttagtggaattcagctagtgggctgtcagcgtgggagaatggacgtagacttgatctaagttaaactattataaaccttgtgtccttattctcttctctaaactcatttattttgattcgtaactctaattaactgtataagtttaaacttctttattttgtttgaagttttatcttgtttgaagttttatctaatcactaaagtctgaatttatctgtgattttttaaaggcaaattatttctactaaactttgcaaaaaatttttcacacctattactagccctttcaactctgacgttgattcttagacttaaccgttttggggtagaaatttgactattgatgttaaaaagtaaattggttcgctgtcttggcagattgcaccccttgaaattc

SEQ ID NO: 92046 - DNA, 893 bp, Eucalyptus grandis
  Intron number 1 from transcript Egrandis_v1_0.024026m (loc us Egrandis_v1_0.024026m.g) derived from phytozome v7.0 (c hr-ID scaffold_7; pos 48483814 to 48484706)
tccagtgcgccgaggaggccgacgaccacgaccgggtgagctgacgatcccttatgtcgtcgcttgattatgcctcttgagcggtgtttgcttctctaggaagtgtgaggtaggaagaaaaattgtcggcgcattcgatgtgattctgataggaatgaagatcattttgccatagcaggctgcttaatctagttttggcgggataaattaacatatgctgacgaacacgtaaattcattgttcggcatgagctgccgcagccttgattctgtgctaggcccgtttattatcaaatgaactttgtaggtgcaaatgtagctgaggtttttccgtccagatatgtgtaccaaacctgttactttgggatcattgcggaaaaaaagaaagagagagagagagagagagagagagagagaggttcatggagaaatttgtgtcgtctagttaaacagtagctgagaacggggcagagaaaaaaggatggaattcttttaggcaaatgatgaaaccttctttgtttgcagaagagtaaacctagcttaaggaagagacaagttcctaaacctaagtggctgttaatttgccattaaggatcatgccattaaatatgctttggctcctgttgtggttatgcgaaactgtgtagaatgtgcttagcctgctctgggagaaaaactagctatactaattttgagtttcctctttttgagaaactccccatccgcaccgggtgacctaccaatcctatcttttgcggttctacgcaaaatacaatttatataagaactgcgatgatatgaagtgtcacttaggggagattcaccttttcatttgaacttatgatgatgtggtttataggttgaagacgcaccaggtggattcccctttgaaat

SEQ ID NO: 92047 - DNA, 976 bp, Eucalyptus grandis
  Intron number 1 from transcript Egrandis_v1_0.031434m (loc us Egrandis_v1_0.031434m.g) derived from phytozome v7.0 (c hr-ID scaffold_11; pos 39244219 to 39245194)
agtggttgaatttgattgggtcaaggtagaagcatgactgcttttgtttggtgcattagttactcttaggaggccattgccaatgaatgtggctaaaccacatacgctaatatttgcttaccggaaacgtgaaactgctggtatcgtgagctagtacgaagttcgtcgggggagaaactgccagatcaatcacaaagaacatgttcagaaagtggagaaattcgctgaacacactactgagaaaatatcgtttgaatctcctaggatcaaatcaaaactaatgcaatttcaactgtcggtaccctaacttgtgttactaaattccctatgaataaaaaattcacgtgtcaatttaaaattcgcgtgttatatcacgcaagcattaaaaaaaaaagtaataatccttataaaaggtggacttgctcttatactctggaggctgaccaaaagggaaaaccaaaggaggcaatttaagttgatgcatacattcctaataacatgtaagtatatactgcagaaatcggttcaatccatagaatcttaaattactgtttacatatactcacaagttgcaaactacgagtacttgatgcataagaacactagtttgataattacttcgatctatgaaatgtgcttttaatttatataacaagctcaagattcatcttccactagagaggagagaatctgcgacagaagacatatgtgaaaatgccttgtccgatgaagatggatcagacatgatagacctactaaaaccttcgtgatacgcaaatgtcaatccattttttgaaataccaagagatgataactcctgcatcgcaagatccccttccaagtactgcactatttgacgcatgcttggtctcgcagttggctcagattgggagcacaacaatccgagttgcaatactagctccacctccttcgccacaaagtccacccctaaattcggatctcttgcctctagaat

SEQ ID NO: 92048 - DNA, 826 bp, Eucalyptus grandis
  Intron number 1 from transcript Egrandis_v1_0.032049m (loc us Egrandis_v1_0.032049m.g) derived from phytozome v7.0 (c hr-ID scaffold_2; pos 4180580 to 4181405)
gaggtcgcctcgtcggctcccgtcgtcgtattcaggtcgctccttccctcctcctcccttcccgctgctcgtcgatcgagcgatctgctcctccggaacggtcgaatttcgatttacccgggtttccatcccgagtcgtgttcttgaatgatcggccgttgacttcggtatcggtgtcgttcgcgatgcgattcgctgctgggtccgatcgcgggcgaaattgtatcggccgatggctttgaacggttgaattgatgtgctaatttgatgcatgggagagagtatgtattagctgaattggggagaattgatttttttggggtggaaaaactggcaatttttcagtgggtttttgaattagaagcttgtggctgtggattttgctatcatctcgtggtgctggttgctgaattgattgtacaagtcattaaccttaaactatcatgtgtaaggagagaagcgctagcaagactagcacttacagtgggttttgaattttgagggaaaaaagtggttttgaattagatgtttgtggcagtggattttggtatgatttcgtgccggtcactgaatcgataatgcaagtcactaacgctaatctaccacatgtaatgaggaaattgccagcggattgaagagattactgttgccggtgtggtatatttctgttaggactcgattgttgtggaacccaaagtggcagcagctcaaaatgagagttttggagattgtttatatagggtcagaagcagggaggtcttaatcttactgaccttgtgcttcctgtgcagcaaaacttactgtggctactgccaaagggtcaagc

SEQ ID NO: 92049 - DNA, 635 bp, Eucalyptus grandis
  Intron number 1 from transcript Egrandis_v1_0.023285m (loc us Egrandis_v1_0.023285m.g) derived from phytozome v7.0 (c hr-ID scaffold_2; pos 5411399 to 5412033)
ccatatttgactatcgtctccatccggttaggtttttgctttcctccagtctttccatttgctggaggtctcgatatcttattctcaccacgcaattttgatttctagttttgctctatccgcgattatcaacacgctttagggttttgccctagggggcttccatggtggaaaccatggccaagctcttgctctcgctctctcatccttaggagaaaatattgcacagcacgagagagagaaagaggacgtagacatgttgaggcgtttcatctctagcgggtgcggtcaaatatggcacgtgtcgcgagtgaattgtgtaaaaatgactcgtcactattaggatatccaatatttttttgaacggaccggcgtcaataatgacatggagggcccggtctatgcaataatttctcccaggtttagtgccctccacacactttcgctactgcccaaggataagatatttttaaggaatctcatggacttttctttgcttgtttctgacgtccactagagtagtctagattgaactaggatcgccaattttctacagtagcctattaccagagttttgttttccctcagccatatctctgatcattttttggttctcgctttgcatacggaaaggg

SEQ ID NO: 92050 - DNA, 809 bp, Eucalyptus grandis
  Intron number 1 from transcript Egrandis_v1_0.009885m (loc us Egrandis_v1_0.009885m.g) derived from phytozome v7.0 (c hr-ID scaffold_2; pos 17087175 to 17087983)
ggtaaatttcattgcgtcgattttttcttacccaatgattgttttcgccaatttaccccaatcgtggacgcatttgttttatccttgaggaatttatggtgtttgattgagcgtaggtggaagatgatgcttgaatttcggatgtttgtttggtaaccaattatgggttttgcttatttgggtttatgttggtctgaaggacttgtgagtctgcttgacgtgacggtggcaacgaagttattgtgggtttaactggttaagtggtggtgggtataattcaattcatgctgcggtagattggtcctcttggccgatcatctttgctcgtgctcatctctgattcaagttgagctgatctgttacccgtctggtctagttgaagttgctcaagtagagatgaaagtgttctttgagcattgtaaaataccgttcgagtgaagtgaaacctgctgaaatatcgattttatgggcaaatatgtgctgcttcttggttgtgtggagaatgcaagcgcatcatctcaactgctcaatcttttcgaacatgaaaaatgtgtcggcctgtgaagtgatggagcttcacaacttacgttggaagtggactcctctgtgaagggtcactgacctgaagtggcttttttcctcgttattcattttggcagctgtcgaattctagtcaggaacataattagcttgttgcaatcatttctcaaacattatccataaaagtgtgatgctgcttccctaatgccactactgctctgatgctgttttttccttatctgtttccgtcggtaattcaggggcaggaa

SEQ ID NO: 92051 - DNA, 751 bp, Eucalyptus grandis
  Intron number 1 from transcript Egrandis_v1_0.000218m (loc us Egrandis_v1_0.000213m.g) derived from phytozome v7.0 (c hr-ID scaffold_11; pos 43614511 to 43615261)
tttcactatcttacattgtgagttcttttctaatttgtattcgtttctgttacattctctgaaccagttcatttattgtggggagtttcttgtgtttaacaagtgctggattttaggatttgacttgccatatttggtccactttacctcccatttgtgggctggagacacttttataggtggttatgtttaaatgtgtctgtatggcacagagatttgttcttgctacggggtttggatgctattggactgagtttcttgttcaccaaacgtgttctaagcattctatacgaggctaagtcttaagaatctggaggtaatgaagaacacttgatgcaacgatttaatttgagaaggagaaagatatgttggcacaggatattgtctagctgttgttggcgttctcattttcattcccagcagttttatgtgtgtggggaaaggtatttagctggaaaagggtttttacttaagcgaagtttttgatcttgaaaaaaatttagtacgaagagaggaagaatggtggataggattatgaagtaattttcctcttcttcatgagacttttgggtacagtatgggtatggctatatctttgtataaaccgatactctgtctccttcattcttttggtcaattgtctaagtgtcttcaggattggtttcctatgtatccttgtcccctttaccgtgtaattactggggaatggttgacgttgctcttttaattttgaagggagagaaacttcagc

SEQ ID NO: 92052 - DNA, 349 bp, Eucalyptus grandis
  Intron number 1 from transcript Egrandis_v1_0.003921m (loc us Egrandis_v1_0.003921m.g) derived from phytozome v7.0 (c hr-ID scaffold_7; pos 34283005 to 34283353)
caactattgctggtaattttgctcttttcttggtatctcttcatgctacttcaccagttctattaagttcttgaagttccacaatctttttatctttctttcttcaagtagtgattgtgacttgagaatcttcttagatttcagagtgattctcatggactgtaactggctcctatcgtgcttgaaaaacttttgctttgttttaagaaattatcccatgaaatccctatttataaactcacttgatcatctttcaaaagcaagagattcaatactaccaagaaactaatttcctttttctgtttctgaatcaggtgctgttttgtacataaagagggaatttgattta

SEQ ID NO: 92053 - DNA, 702 bp, Eucalyptus grandis
  Intron number 2 from transcript Egrandis_v1_0.032780m (loc us Egrandis_v1_0.032780m.g) derived from phytozome v7.0 (c hr-ID scaffold_7; pos 45800458 to 45801159)
caaatatcaaacctgtcattacctccaccggtcagcttcatattccttcctcttcttgtattatttcagaaaccatcctgattttttcttcccctccctctctagatacatatatattttggccctgcaggtaattgaatcttaattcatcatcggagcttactgataagaaagaaataaagacagttcagaatcatactaacttaaaaatatcaaacgaaagtaaacgttattgaaaagatttattaaaaaaagagtccttgtcgtgaaaccaaccgctcttatacttcaaacacatatttgttgtgtatttcgtccttgttcattgaaatgtctgatatcttcagctcctagggtttcttgggaaataatcttcactaacctccatagctaatagcactgtcatcatggtctcttttgcatgaatatgctcttgctcaactttaaaatattcttgcacaatatacaaagacgaagttcttgagttttgcatcgatagtcagatatgttgaggataaggaagcttgctaaacacttgattttgctaaccccccaagcaagtatgaggaaaacctttgattttcaaagttttaacttttcttgaaactttctattgcaaaagcttgcctaataagtaagtattcgtagatctaatgtgatggattcaagtgtcacatgaaatgctaatgaatgcagtgtgga

SEQ ID NO: 92054 - DNA, 595 bp, Eucalyptus grandis
  Intron number 1 from transcript Egrandis_v1_0.036388m (loc us Egrandis_v1_0.036388m.g) derived from phytozome v7.0 (c hr-ID scaffold_7; pos 11877874 to 11878468)
tcacactctctccccgcatctgcatccgacaaattgtaagttcatgtttcttccgattttggtgtcttattgcgagtaaattagggctctattcttcaaattcgttctacattcgagtctaaaattaggagttcctcaaactagcaatttattgcccttaaatctacaccttctatgcttccctcgcgagcattggcgagatttctgcgtgtttgagctctcatagatggagatgatatgttgtgttcaaggtctcatgttgaaatttctttgggtagagatatctttgtaacattaggtacaaatttctaccaggaaaaagggagaaatcacggaacttgaaaataatccgagaattccacgccttgtcaaaaatatgaaaagtcacttttacgccttgtttgcaatatagtctagactgtctgaggaatcacttgtaatcttgattggttaagtgttgctagaaggacaaaattttattttcaattaatgctaaatcttttcatagcaagtcaaactattgaagtgtacttaaactatctctaaagtagtcattttttaagtataggctagtccaagcattcaagaagattga

SEQ ID NO: 92055 - DNA, 716 bp, Eucalyptus grandis
  Intron number 1 from transcript Egrandis_v1_0.012036m (loc us Egrandis_v1_0.012036m.g) derived from phytozome v7.0 (c hr-ID scaffold_2; pos 5276414 to 5277129)
tcagcagaagggccattttccggttgacttgtcaggtgcgccttctcatagtgtcggatgcaaaggagttcagtgtctgtagttgtacgcgattaatatttgagaaacatggggtgcttccgagatcccgtgtccgcacgactaaaacccaacatcacagattgtacgaagatgttgaggcgttcgcgttactcagtctagcggagatttttacttgtaagctcaagaaaaaccatcagaaaagatcaatgaaacctgctaaagaactgataaacatatgtgcacgcctagtccattgtcgcgtctttataatacgctaaagtccaaggaaaaaaaacctttaaagttcaacctccaaggcaaggctatcgtaattagagaaaggatcgcctttcgatgcgcagtaggtggtttgattataccgagattatatctgtgcacatgggcaatctttctaaatcggctatgggctgggttcgtgcacctggttgttttgatcgatctatcggcgatgatggcccgggaaagacgaaatctcctcaccacttctggactggtttctactgctaaggaacgcaggaagcataggccgagtgtaaggtcatttttcttgattcttgaatgggaaaacagtgattgattcgcccgttctctctctcttttttctctgtgtgttggcagagaggggagaagaagaagttgactacattccagga

SEQ ID NO: 92056 - DNA, 963 bp, Eucalyptus grandis
  Intron number 1 from transcript Egrandis_v1_0.052106m (loc us Egrandis_v1_0.052106m.g) derived from phytozome v7.0 (c hr-ID scaffold_7; pos 1766855 to 1767817)
ccttcctacattcagcacttgtacaactattttatgtaagtatgctcatgacatctgtcctttttcacttataaaaaaagtgaacacagctgctgttttatggccttgtgttggcatggcgtgagcactatccaaagctgtagtttctttttgtggaaaaaaagggacgcttgttattctttttttattcagactatatgacagtacttttgaatgatattcttgcatatcctaactaagggacctgtactattagattggcgcttttattcagtgatttcctcagatcctttgatgctagacaaattatgtatgtacataaatacaattcacattactatctgaacaaactcagtgaacaataccatgaggacacgattttacctacagttgctagtttgttgtgactatctgggttgactttttttaacctgctgttctctggctattgcggacaatgcccctattcaagtggcttgggtccatgcctaagtagctttcagaattatgatggaatttaattagtgcatgtgtgcacaaactttaccatggggaagaaaggtctaataaataaaagatcatatgctgtaagttgtatctagaccaaccgcataaaatggcaatttgtcctcaacaatgcagttggggctttccagatgcacggtagcactcaccatttctcttcttttagtgatcaagaaatggaagagacaatttagataactttgcttctgtacaagttcctaggcgatcaagcatataattccttcaatgttgaaccccccactaggcaatagaatagaagctcaggagtacaagagctgtattcctagattagcactcaaagttaatctcatcttagatgtttgaatattgattgatttttacaaggaaagaaagaatttttacctggatgttctttttgcaggttttctggttctacccgttgtacatatttagcat

SEQ ID NO: 92057 - DNA, 569 bp, Eucalyptus grandis
  Intron number 6 from transcript Egrandis_v1_0.005790m (loc us Egrandis_v1_0.005790m.g) derived from phytozome v7.0 (c hr-ID scaffold_11; pos 23951767 to 23952335)
atcgacctctgacaccccaagaggaagcacaatcagtaatgacattttagtgctgaatcccattctccaattccatgaattgatttaggtcatttgggaggttccttttttaagtacgtcagtttcttcatagaatgcagaaaaggtagatacatgtaaaattcatttaggtcactttccttaacggaagttatgagttctctctaaactctctcttacggtatctgctatctaccatatgaacttattccttatgaacaaaagcatcaaatattactctatggcctttaccttgtttgcatggaaattgggatgctaggtaggcaggtcatgtcatgcactgaagtcttcaggagatattttattttcttgacaagaatttgagtgggcctttagtgatggtggtgcaaggaaaaccgctgtcatctttgatttttgtttaatcggctcaggctcatcataagaatgaggacgaattggagtatgtagaatgtgtaattgcttctcatgtatatttgatcatctaatgattgtgataacctctgacataggttggacagttaagggag

SEQ ID NO: 92058 - DNA, 695 bp, Eucalyptus grandis
  Intron number 1 from transcript Egrandis_v1_0.051979m (loc us Egrandis_v1_0.051979m.g) derived from phytozome v7.0 (c hr-ID scaffold_11; pos 31268177 to 31268871 reverse strand )
cctttcacaggtaatgtattcccaagtctctaatgaatgaacttagcaatgtcgtataatcagtcaaacttacaattagggactcatttagttgggatctaagtacgtacaaggctttcgcttttttctttggcgttgttcacaacctttacctattgacatgtacttggattaaattacaaagtgagaagaaagaaattaagataaatgagagaacgaggctgtaacaccgtcatgttgatgcagacaaaaaagcggttgtacattaactgaagagcgacactatcagatcatccaacattgacccaattaatgggatgtctccgtagatttgcacaagtcattaaacatcagtgatcaccaaccactgggacgcaatttattgcatctttagataagaagctatggaagatcagtgggtcttgatggagaaattaagagcattaacaactgatctggaataggtttttcttactacaatacccttgggcgaatgtttgcctcttaattttagttaatatcacgtcagtggaaggacatatatcttgcttctaatatttcataaaatttacaaaaaacaagaaaaacaggtcagataaaaattttgtttgattctgtatggaacacattgatggacctttaacatttcacatctgataaaagactcgaattccaactgcaggagttacctagaa

SEQ ID NO: 92059 - DNA, 685 bp, Eucalyptus grandis
  Intron number 1 from transcript Egrandis_v1_0.018345m (loc us Egrandis_v1_0.018365m.g) derived from phytozome v7.0 (c hr-ID scaffold_2; pos 33255540 to 33256224 reverse strand)
ctcacggacatcttgttcgagtcagacacaggcaggtctctctctctttctctctctcagttccctcgctttcttgttcgattgttcttgaagctctttggctgtctctgctaagccagaacccataaagaaagcaagaaaaaagagagaatgaatccgtcttgggctttcatcgttgagagcaagcttcttgtttttctactgtctcgtgatcttatatgatgggtgttcgaaatcgtgtccaggagctctgaagagagcttgggacagcctgcacatgcttttggtgcgtacttcagtttgttgattaaggaagtgggaatttcgttttgttggtgatcagcaacatggacgattcttggagacggaaatgctaaaaacgaggatagatcacgcgagagtctctctccgtgctgtgattttttggctcgagttggcacctggtccttgtcactgtataatttcgtgtcatctttccagcttcgtggaagcaactggaatttaattcacactcaactaccgttcacgttcacatgcaacctgcggagagagagagagagagagaagctttatatatctctgctattttttaatctttgcatggtcaaactcaaactaatcacatgccaatctatacccacgctgtgcagcacccaacacccgagaggaggaggaggaggaggat

SEQ ID NO: 92060 - DNA, 888 bp, Eucalyptus grandis
  Intron number 1 from transcript Egrandis_v1_0.054355m (loc us Egrandis_v1_0.054355m.g) derived from phytozome v7.0 (c hr-ID scaffold_7; pos 43689062 to 43689949)
tgatcacagcctccggcacatcttactcggggttagtccaatgcttcttaaagaaatatcatttagtaaatttatttgaatttgataggacgttattttgagttggtcatttaataaaaaatattgaaatatcctacattgtttgattatgtgatttatatactttttacatacgtgtgatttccttttacctattagcttaagtgtttgggttggaatttctaatatagtattagagtcagttttgctcaagttgatttcgcttgtgcgtatatttcgtcaatcaaatttcacgtctgttcctaatctgacttgcacataaagataggtggttgcgaaatgtcacatcacttgaactatatggatttatatgcttttttattttacattttagtctatctccatctattaaatttaatcttttaaggctgaaccttcctaacccaagaaacataggttcaccgttgatggagagagaaatttacacaagcatctacaccatatgaatcttttcatgtgcttgttcatggccattggagaaagattaatcatcagcgatagatgttttgtgaatcgttaatgagaagtctagcgtggatcatactattcttttttattatgatttgcttaattgattggatgagtctcgactctacatagtgtaccgtattgtgctccatattttggcacgtcccaagaaataattattcatgactatttaatcagaaaatgcaggcagagtggacgaatccaagtcaatatttatcacaaaactcgaataatccaatatattcatgtacggatttgacttgcgtgcaatttggtggtcagtggtctcatatctcttccatttgactctctctctctctctctctctctctctctcag

SEQ ID NO: 92061 - DNA, 986 bp, Eucalyptus grandis
  Intron number 2 from transcript Egrandis_v1_0.001072m (loc us Egrandis_v1_0.001072m.g) derived from phytozome v7.0 (c hr-ID scaffold_2; pos 51541420 to 51542405 reverse strand)
tatttcgtcacacctttgagacaattgcgatccaggtactgtttatttttttttcctgaatagttgtgcggtggatgttgcgattgcgacttgtgacttgtgtagtgaatggaagctaattccgtgattttattatgcggtcgaaagctatgcttttctgaaagaggtcactgggaatcggttgcattgacactgcagatattgtcttggcctagttgttggtgattactttttcatgctatgtgctgtcagtttccattgggtaattgtcgtaaattgcaatcaatattaccagaggacctcctagagaacctctcaggtcagcttacatggttgttttaacatccttgatgtttcttttcttgtgagaagcaagtcaaatatgtgtgatggtgtaatgaccccaagagatggggtaataatcattttagtttagacagtggaatgaagattaatttccttcaatcttctatgtttgtggtctgatatttaaaatttatttatgcacatgaagagtgattttgtcagtcaatcctcggtcttgattatagaaccatagacatgatatggatgtagatctttgctacatctgtaagtgcaaatcgtgctcattaacatgaggtggcatcctcatggatgtagagggcactagatgatacccatggccacctcaacctttcttctctttttaactcaggtgattcaagtcaaacatctaaagtaattttctctaatttgttgttagcttaatgggttgtttctatctatttccctcatgaatttgctggagttaatacttttttttttcctgatttttttttaatatccttttgctgcgttatgatggtgtctcttcttgctcgctgctctgccttggcttcctaatacctcatgcaaacacctcatatggatagttaggagactttcgttcctaaatggctttgttgtttccgagatgtttcagggactatatacaagtgatctag

SEQ ID NO: 92062 - DNA, 540 bp, Eucalyptus grandis
  Intron number 3 from transcript Egrandis_v1_0.011373m (loc us Egrandis_v1_0.010970m.g) derived from phytozome v7.0 (c hr-ID scaffold_7; pos 968393 to 968932)
tttcgagtttggaggagtctaattctgctgtgaaggtgagatttcgcgttctaggggttgagattattgttcatcgacgtaatttttgcgttcttatgagagaaggattggatgattggtatttgcttcattgctattggagtccttggcataattatcccttggttctttcgtgcataagctttcactgataagttggttgcatactacttcttgtggggtgtccctgatgcttttacgtctatcggtttatcggcccaatgggtttatgtcctgagagagatgtctctcctttggatgctctgacagatgggaaaaaagaagttccttttattaatgcttcggagtttctttttgaatgaagagggactattgagttttgtagattttgatgtctacctagtgaagtagttttttaatggatttggcttctcttcctattgtttctaaacagagttctttgagtgttactatgctgctaagctgaatagcttctcttggatactccgttgatctatttaattgcttttaggaaacagg

SEQ ID NO: 92063 - DNA, 761 bp, Eucalyptus grandis
  Intron number 1 from transcript Egrandis_v1_0.021439m (loc us Egrandis_v1_0.021439m.g) derived from phytozome v7.0 (c hr-ID scaffold_7; pos 36830097 to 36830857 reverse strand)
agcaggataaattgaacgaaggcctcaggaggtaaatttattgtgctctatctcttttcgaaacgtatgtgatttttctccgttgctttgcttatcttccgctcgggttttattagtcaggaagctttttgagcttggtctatcagccatgtagttctttcactcttctgcgcgattgaaagagaagaaagaggagagacatattatagagctgcctcgtaggcttgtggctaataacatcatgcttgagcttgttattctgaatattaagcggagttatgaggaagagagcacgcactctttgctgttccacagacgcaaatcattttaaacctgatatttgaattctcttgctaggtaaaagtccatcttttgctgctcagcggagactcctgtttaagctacatatatttaatttctgatttagctgctgcagctcttctgcttctgaacattttgtcctcgataactcttttggtcgctgataatgagtttgataagcttttataggatctcatgaataatctgctgtctagacttttattctagggtgtaatttccataactgtgcctgtttgtaccacctcaaagtgtatccttcatttcctttgttggctctcatgtttccacttatggtatatgtactttaactgaagtcttggtgcatgtgacattaagcagtttctacatcaatcatgagattatcttcttttccgctttggaaatcatgtgcctttctcccttcaattatagatacgctg

SEQ ID NO: 92064 - DNA, 1034 bp, Eucalyptus grandis
  Intron number 1 from transcript Egrandis_v1_0.003888m (loc us Egrandis_v1_0.003888m.g) derived from phytozome v7.0 (c hr-ID scaffold_7; pos 51651868 to 51652901)
attcacgcagcttccaattcaagatcgtacccaaggtcttctttttcattacgcacgatgcttgtccatttcattgtctcaaatcctcaggagcgaagtagaagctgagcctgtgctctctccagtcaccgtcgagccacggctgatgaactgcggaaatgtgaaaaagtccagtcttttgtgtgacccttatcgaatcactgcatttttctcatttccaatttagcaataattaaagcttcaagaaaaacagtaagttagttggacccagtttatagtgtgttgacaataggatgttgttttaggtgttgatggaaggaatttgttcccttcagtgacggcgttaaaattctcatgtgtcccttacaactcgctctagtgtattgatggtctccgtaaaatttactcacttaagatattggcatcgaactgtctttagctttttcagtttaagattatatctctagcttctgtagccaacaaaaagtagttcagataattgctctgataaattatctattagcagtaacaattcgttgaacagtgaacatgaataatttgttctcacctgaagggcatagcatatgatcaggttaagaaactgttccttcgcaaagttttttttctgatacatcatggtcacatgagggtaactgtcagtggtttctgctcaccttctttcagctttgcctatcaggatgtttgcggtggaaagaactgctttttgatcgaaaattacgaggagaaggatgggcctgagatattgtatgtagttattcttcttgtcaagtggagcagcatgctttcatttttgattgggtgaaggtggattcgccagttttagtttgtgagccatgcattgttgaagctctttcctgttgtctattttcctgcaggattagaggtaccacagcagttgaattagcatctggcttgcattggtacttgaagtattggtgtaatgctcatgtttcctgggacaagactggtggcatacaggtggcttccattcctaaggcaggatccctgcctag

SEQ ID NO: 92065 - DNA, 1004 bp, Eucalyptus grandis
  Intron number 1 from transcript Egrandis_v1_0.042352m (loc us Egrandis_v1_0.042352m.g) derived from phytozome v7.0 (c hr-ID scaffold_7; pos 15909045 to 15910048)
caggtggtgttgtacgtatgtctacttccttcaggcctagttcttgtgacccctttagcgagtacgcaagtggtgttgtgtacatgcatggtaccggggaagatgaaaccatctataactcctcttttggcatgaaactcaggggcatgtcacttgttatgacctgtacaaactattatattatttggtaagatattttacggttaataccatgaaaaatctcaaactggtagacccatgataaatctattccaagctaatttttttgataataaaaaagcccaaactaatatacacgtaataaatttaataaaaactattttttttttttactacgaaaaacctcaaatttgtacatttgtgataaatttacccttcattagcttccgtcaaattctaccgctaaatttgctgacgtcaaggacacatggtgatgtggcatggtagaataaatatcacgaaaaccccaaactatgcctatgacaaatttaatagtacacatgtgaaaaatttggtgtttttcttgatattaaccctatggatttccacatgaacttaccacatcaccatgtctaatccatatcaacaaattaatagtaaaatttaacggaagttaatgaatggtaaacttatcacgggtatacccttttgggatttttcgtggtaaaaaaaaataattagagtaaaattttcatgtgtactgatttaagattttcaatagtcaaaatattagtttggtgtaaatttgtcataagtgtataagtttaggatttttcctggtaaaaaaattagttggggataaatttgttatgtgtgtattagtctggattttttgtgttattaactccactttctattattaatttattttagtgcgaagggtttgagagatagaactctatatatagggtgatactaacgagtgggaaaaagcacgatagtgaagccaactttggaagaaaaataaagatcgagacaaagagcaagaaattggtcaaaccccc

SEQ ID NO: 92066 - DNA, 1014 bp, Eucalyptus grandis; identical to SEQ ID NO: 91622
  Intron number 1 from transcript Egrandis_v1_0.024893m (loc us Egrandis_v1_0.024603m.g) derived from phytozome v7.0 (c hr-ID scaffold_7; pos 36858038 to 36859051 reverse strand)

SEQ ID NO: 92067 - DNA, 759 bp, Eucalyptus grandis
  Intron number 2 from transcript Egrandis_v1_0.018037m (loc us Egrandis_v1_0.018037m.g) derived from phytozome v7.0 (c hr-ID scaffold_2; pos 5656631 to 5657389 reverse strand)
aagcaggagggggcgagctcttcttcgtctcggaggttggtttccccctaatgtcctctccttttcctgttcgggctttgacggttttctgttcttcagcctgtagtttagggcatctgtgtgtatgtgtgagtgagtgattgattttccggaatcggaccgagtcgatcgcgttcgtcacgtgcgaagatcgagcggcatatcatttgcttttgcttgtttcggttagggtttccgcagattgcacagtttgcgtcggtttgtgcgagggtacggagaatatgtaggtgatgagcaggatcgtttgatcttggagttacctcgtctgcgaatggaggatgtgtatgccgtgtgggcctgtgtgccgcagtgtgttccggaattgctcttgtgcttgttgcgatgatggaggagggttttgagttacggtgttagattaaacagattgaaaggacggaagagtatattgcttgagacggtataatttaatggtgccgaggacttgcctttcttcagacagggttcgtgtgatttttctgggcgcttaagttacacaaatgctggttaagcgcttaacaagtcagtttgtaaacttgatactttgactagcaactctcttttgtttgttagaaatcttgactggttcatgtaatgctgattaagacattttaatgggtgtcaaccacgtattgctaaaatgtgcgctccatgtatgtaaactgcttagtgatgctgcaattgcaccttgtttaggacgag

SEQ ID NO: 92068 - DNA, 953 bp, Eucalyptus grandis
  Intron number 1 from transcript Egrandis_v1_0.042922m (loc us Egrandis_v1_0.042922m.g) derived from phytozome v7.0 (c hr-ID scaffold_11; pos 14538095 to 14539047)
cttaggatcttctataggtgccaagttaggatccagtatgtaggagatcttcagagcagtgagtaagaacatcatcttgtccctccagcaagcaaaattgttcccattgaaccggtctagtttgaccatatcttgattcataactttgattgtctccgactccattgtagcaaaataaatccttaaaattgttggaaatatatggcttcgaaataggttgaataatgaaattggatcgagtaaaacatttactcgaactttgaggcgtgatatcactttctttaaggatttatttgccccacaacattgctaatgatcaccggcaaaaatcttccagaatacaacaaagtctcggatgagaatactagatagcaattctagtatttttccaaggtctctctaggaaaacaatcgaaaaattggctgcagtttttcagaaagaagactcgaaaaatgaccacactttttctttccgaaaaatgacaagtttatatatgaaacagtcttgcaactcttcgtgaaaattgccaaagaatgaacaaacacgtcttttagaaaattgtttggataaacaaatgcggctcttcggaagaagtcgaaaattgaacaattgcaacatttcaaaaaaaaaaattgcaaaacggaataagtaattttccaaatgttgtcttgaaaagacataaataaaattcggaataatagtttttttaaaatagaatttcgaattttcgttgccaagtgcaccaaataatcgcgcacctgcacgtgggtatggtagggtctagccccacccaatcattcctttaactacaaaaaggaattcccacatttttaaattgactcacttgctcccatcttttctatgtgggacaaagtaaaaaacattcattttgttttaacaaacaaaattctaacaagacacacttgttcttgggcataaattgacggtgggg

SEQ ID NO: 92069 - DNA, 820 bp, Eucalyptus grandis
  Intron number 1 from transcript Egrandis_v1_0.049724m (loc us Egrandis_v1_0.049724m.g) derived from phytozome v7.0 (c hr-ID scaffold_7; pos 2365957 to 2366776 reverse strand)
catcaccttctcagcaacaacgggtcgcaaagcaggtcgttttggggaagatatcttcttgacaattactatttttttggctttgttgtgatttccattgcattaattaaattcttcttatctacctagctgcatgatcatcttttatatgcacctctattttgaatgctagttgttggaagtagttaggggtgaccggccccgatcaatccaattcggttgtcgggcaattcaacaaaactaattacacaagtttcaacgtgcaaaatattcaaacttccctagtcaatcacacttcgtgtgttttacactttaccttaaccatgaaggccatgaacaattcggctaagagttatgcttagcttaggttgtatagacaatctctcttctgctctttaaatgtttagtcgatgtgggactcttggaggcttgaagtgtcttgtgggtctctaaaaaattggttcggtctggtttggtccagttcccatttggaactgggaattggaccgaccggccaccggttctcggttcgggcggtttcggttgcacactcctagaagtagtataggaattcaaagtcgaagaaaaaaatctggagatttgtactcattcgcatcgtgtgaatctttggctagacagaaattgaagagaaggaattcttgttgctttttgacaagctttaatgctctagggtttggctgttttctggcttctgtttctgcatcaccttttctatgcttcgtcttttcttggatagtttaaccgtttaggtcggagcaatggacgattatttatcaaacaattttttttttgcaggtgc

SEQ ID NO: 92070 - DNA, 872 bp, Eucalyptus grandis
  Intron number 2 from transcript Egrandis_v1_0.015319m (loc us Egrandis_v1_0.015319m.g) derived from phytozome v7.0 (c hr-ID scaffold_11; pos 15200394 to 15201265 reverse strand )
tttaggggggaagttgacaatctagaggtatataattggcgtttataatcttttccatggaatttcttttgttagacattcatggtgcataaatttttactcaatatgcaatgtgatcctaaatttttaatttattcaatgtgatcttacaatatagtttctgaacttttaatttatttggtgtaatttgatacatatcaacgtagtccctagactatatgaaaatattcaattttgtccttagattatattgaacattttcatataactcaaggactacattgaatatataccaaaagtttaaagaccacattgaataaattaaaagttcaagtaccatattatatatttggtcaaagttcaaagattatttgtatcataatcttgatacctaaataccaacacattttatctaatgaaaagacatgccatcaaactttgattttgaactctcacgtagtcaaggaatggaaaggttcgagtctagtatttagcatgaattcaatgacatagtggttttctagggaaaaaaatatgcagtttatggagctctacaatgtcgttgggaaaattactaaaaagtcctaaatctaattcaatcctaaacctttttttaccaaataaattctcaactttttacatttgtgtcaatttagtccatccaataaatcttgggcaaacactgcggacatggatattggttgtccaacgcgatacacaattattgatataaacaattttaaataatattttaatatttttttaattacttatattttaccttttttccttttctttctctttctttttttcttttccttccccgccttcttcgagcgactagccaaagggaagggtcagcaaggtcgacc

SEQ ID NO: 92071 - DNA, 689 bp, Eucalyptus grandis
  Intron number 1 from transcript Egrandis_v1_0.039981m (loc us Egrandis_v1_0.039981m.g) derived from phytozome v7.0 (c hr-ID scaffold_2; pos 30514660 to 30515348)
gtactctgttgcaggaggtaagttgtcttgaatgaggaattagtctatttggaactggaacgtagtttgtgcattttattttagctaaattgaggtgttcaagaccctttgttgagctcagaaacgagtaaattggaagaacatttgaattgtcagatgacgtactccttttaggagaaaatattacagcaaaacatgggtttgaaatctggaaatgactttggtgaatataattattaggcagtgtcatgaccaaattttaatgtgggttatgcattgagtagtgttttatttcttaggagctggttacttgtagataacagctgtaaaccattatttatagttgtctttgtttaatttggttggactacactgtgtaactcatggttccattggtctcatagtgttgctaatgcccatttatagtttgttattgtcaatcttgttcgatgtggatgatttgtcttggaccgagttaggttggaacatttggttttctgatgctgacttgtaagttacattggttgtgagtccaccgtgttaaagacacctcgtgtattgaggcaaatcagttgttgctggtaagatgtcgcgttatctatgtgctgctcctaccattgacagccatttactgcagttgatcttcattggtaggacagccatttattgcagttgatcttcatttttta

SEQ ID NO: 92072 - DNA, 833 bp, Eucalyptus grandis
  Intron number 2 from transcript Egrandis_v1_0.030417m (loc us Egrandis_v1_0.030417m.g) derived from phytozome v7.0 (c hr-ID scaffold_2; pos 7641286 to 7642118 reverse strand)
ccaaagacaattctttaggtgagagatgttaaaatatgcatgtattttctctgttttagaaattacaaatatcgacaacattatttcttaaggcacctccgcatggatctctttttttttatgttttatttaggatgcatggatcatgaatgatctcatgaagaagccatagcaggtggctaaatagatgacagttttttttgaaaatgctctaatttctattctgttgtgcattctaaaagggtgcaatagatagctgaatcgatggcggatgctttcatttagttttttgatgtataatctgaccgggaatagcttagagacataaacttggtcaagttcttaccctgttgagttcatcatcctggacattcatatagttggcactttgtttattttactgtgccagaggtatgagatatcgccttttgatctgttgaaagttttgtttgtcagcagacgtgcaaatctactcggttgtctgcccataaatttgttattactgttgtccctaaaatttccagatttccccaagctcatggaatcttatgatcacagctgagtaagctatagatcaaactttctctggcctatcgtaatacttgcaaatttggcaagtcaacaggtcaccttgtgcattattttgctacctcttatctgtttactgtatcgttaggctttttatatctttcttggaaaaagatcatccagtagctgataatgctctcattctctcagttgttgcagtttttcatcagtgctctaactatttcgttcgcaaattaatcctttatgcaggacctggaggtgacctgcgggtctacctagaaagc

SEQ ID NO: 92073 - DNA, 786 bp, Eucalyptus grandis
  Intron number 3 from transcript Egrandis_v1_0.023478m (loc us Egrandis_v1_0.021656m.g) derived from phytozome v7.0 (c hr-ID scaffold_11; pos 1813456 to 1814241)
aaggtaaccctatctttactttgctagccggataaaacgtgtagttcatggacctgttgataaatattgaagtttgagattcaattttcagaatgaggattcttcattccactattcaagcaatccaatgtcatgaatggtggagttaatagctatataatgttgggaccatgacttaataactaaagcttggcagaagccttgttattaagtgaaagaacttttaaaaagaagatgtggagatagcaatgtagttctaataactggtcctgcttctgaagaaaccaagaaaaaaaatgacacagctatctcttacgaatcttttgccgacctttcatttcaataacaaactattgaggaatcaaatgtccattcaagctcttgaaaagttacaccttttaagttgcagctgatgctgtgactatggaactttcttttcttttgaagctacagtcgcctaatttattaagtagagtctagaccagagctgtcaattgttaatggcttgatagaatcataggaatgacagactttagtacgaaggcattctgaatgcatgtggcatccaaaggcagataatttgcttgagcaaaacatcgtgaaggtatgttactggttgagtaagactttattaacgactcacttttttataccgaacaattaatgcatcaagtggtttgagggtgactgctgtccatgcagtgtttaatttggagaagacttttaagactacgttctctttgctcgtactccatatgtggctttgcttacgtcgattgaaagaag

SEQ ID NO: 92074 - DNA, 970 bp, Eucalyptus grandis
  Intron number 1 from transcript Egrandis_v1_0.005278m (loc us Egrandis_v1_0.005278m.g) derived from phytozome v7.0 (c hr-ID scaffold_7; pos 38412501 to 38413470)
gggtacagggccgacgaggtcctgggtcggaactggtgagttcgtccctctcgtgtcgatttgattcgtggggtgggtagtggaaatggagaggatttctgggctctgctcttctttgttttactgtttgggggtagtcctgggatctatctgaagaatgaaggagagcttgttgcttgatgtttgagatttgttgtaaaggagcgacttttcgtggagggttcgtgttaagtcgttcggtatgtgagaggatttctgggctctgatcttctttgttttactgtttgggggtagtcctgggatctatctgaagaatgaaggagagcttgttgcttgatgtttgagatttgttgtaaaggagcgacttttcgtggagggttcgtgttaagtcgttcggtatgtgagagaatttgaaggatagaaggaatacgggggaagagatgttgattggtgtaccagagagcgtaaaaatagggaggttttattggtacatcatcagtgataatttcaatttggggtgtggtcttgtaatatagatatggcgtacttaataggcagaccaatcagaatccacggcaggcatagatatgatcttcgtagctttcacttaagctcttttttttttttttttgggggggggggggggggggggtcgaatcacttaagcttttcaagaatttcaatttgagaactgtttatggacatgatcacccaagattctcattgatggcttgttgttgaagagataaatgatggagcttctactgtgtgccaatctgttttagaatgggctacgtgatggacatctgagtattttgcactgtcttctctttcatgttcatcatgatcttgctatgtttggagtattgcgtttgtgttgcttttgggagcttgttagcttctcatttgactcttctgatactcctttgtttcagccgattcttgcaatatagagatcctcgtgcacaga

SEQ ID NO: 92075 - DNA, 976 bp, Eucalyptus grandis
  Intron number 1 from transcript Egrandis_v1_0.029679m (loc us Egrandis_v1_0.026470m.g) derived from phytozome v7.0 (c hr-ID scaffold_11; pos 28535807 to 28536782 reverse strand )
agtctcgtccttttttcccgattcgggttctcaaggtgcgatctccgacctccttgtctatcgtcatggtttctgccggctcttttttttttttcttttttcctgatcttttcgttaacttggtctagggattgggcggtgggttggggtttggcggtgtttgatttccgcctgattgatttgatgccatttgctgtccgattctgttttaacgttttttttttttttcggcctcggtttgggattcgtctggcgacagtagatttcgaggaatttcgcttcgcctctcgccgattgttgacgggagggttgaaaaacggagcgatggtccgtaaaggaggcgcctttatgcccgtttccatgaaataatcgtatttcagttccctttagatttttttttttttttttacttgggatttcggatgtatgggatcccgatttttgtacgctcctttatctatggggcttcttctgaatcctttgacgtccgtggaagtggaatatcggtgctcttatttgccctgacgttgcagtgttaacaaatgttatggaattctgagttagttgtgattggaccgattttgggcggatgaatctcgcttgatgtcttgtgttggcaatttctcattttttgtgcttttttatttatttatttaatctacgtgccatttgagcagtagcgttctttgtgtaaagcaaattggagaatgatttacaaagaccaacgggacaatgaatatgtggtgaagatctggtgattgtctcgttgaattctgcttgctcataccatcacgcaagttgcttgttattaagggatgaaagaggataagaagcgagaatatgatacttttgattaatggttacgtttttttttaaaaaaaattttttgggggggtttttgagacgatgtcttgatctttttttgcttttctcttaaacagatattttttcttggattttgagagctggaattggg

SEQ ID NO: 92076 - DNA, 1005 bp, Eucalyptus grandis
  Intron number 1 from transcript Egrandis_v1_0.030058m (loc us Egrandis_v1_0.030058m.g) derived from phytozome v7.0 (c hr-ID scaffold_7; pos 7670417 to 7671421 reverse strand)
agctgagaagttcaaatccatcattgggattcgtaatttgcaagtttccatcttgccttctgacttgaaacacttacattgacgtacaacactttgggctagatgtagtaacttgaaagaaaatcagtattaatatttcccccctttccttgccaagacgagaaatcagttgatgtattcagttttgcatgtagatatcatggcataagcaagcattgtcatcatttccatcattgctggcacaatcaattgcatggttaagttcttaaagttatttatgtttagtttgtcagtaaaatattattgaaaaagctatcaaggggatgatcaccagtggattggatgaatattgtagtctcaacgttatgagcaaaagccaaaaggttattttggaaacttatcgtggaacataaatttaccgaaaattaccctttgtgaccctgcaaaaagggtgggataccacttggctttgggttaggcttgtgctccaagtaactcatgaaggcatttctagcgacaagtccattagttgcatggtatcaattggttaaccaattattggtaagaatccccatttcttctctttcaattattgttgagattgagggttgtttgagaagattcctgatgaagtgttgtatggaaacatggtatgtgttctgatgaacatcttttgggtggttccagtggaaaattattttattaagttgattaagtatggcaatccaagcaagggtcattttcctccttatcaatttcttttctgtctgttggattagtacattttctttttttctctctttttttttttaaatgtgaaatgcatttgattgggacttggctgaggatgaagaacaaaaaattttattttcgtatacaaggactagcatagtttctttttttcaataagcctttttatcaaattcttaatctctcctccatatgtctattctgatctcaaacgatgtattccccattgtgcaggtcaacgccatcctaggaaat

SEQ ID NO: 92077 - DNA, 1044 bp, Eucalyptus grandis
  Intron number 1 from transcript Egrandis_v1_0.021364m (loc us Egrandis_v1_0.021364m.g) derived from phytozome v7.0 (c hr-ID scaffold_2; pos 7284724 to 7285767 reverse strand)
tgactcttgggttctcgccggattttcattttcaggtatacccagttcctgttttcttcgtaaatgttcgttattcgcgaatgccgtcaatgggtcgttgggttcccgttcttctctccgtcgttggaactgcaagttcgctgctttagcttttcgttttgctgaagcgttgtggaatctgagttcggttcgtcgatacgtttattgggtcgtcgggttttcggccgttaatctgtttctttggtggatgggtcgtttgacttgatcgaacttgatgttttgtaaaaagatagtgcaatcgaatcacaatctgttgcttttaagatccggaatacttttgtcaaccaagtcaattgagctcatccttaggcagatgcatgagttttgcttcagtctctggtaattagaggattcgaaacaagacttattttcttttcccactaatttggaaaagttgattaagtacgtagtctcagttaaaataaatgctctgtgctctaataccatgttaaggttaaagatgcaggagagaggaatctggaatttgtctatattttgatgtgtgcataaaaagtgtacatggagccaaaaagttttgttaaatcttgagagatacatagagtcaacaaaatcatcaaatactttaacataggaagttatcccagagaaattcctaataatctctgttagtatttataaaagtttagtgtgcaattgtagtcttatagattcatttacttgtttcttctcaaatctcttgaaattttccttcccacacaactattgccttttgtcaaaaggaactggataaaccttcggatgatcttcatgatcatgtttctttaggttcgcagtgattgtaaggtggcctatgggggttttgtcatgtttacttttgcaattcaggctgtcttattttcttttggagccatgtttttatctgcgtccttcggttatgtgttgtcttttaattccttcaggctgaccctttttttttcctgtgtcacaggtttgctgcaagctttgcttcagtttctgtttcca

SEQ ID NO: 92078 - DNA, 641 bp, Eucalyptus grandis
  Intron number 4 from transcript Egrandis_v1_0.011274m (loc us Egrandis_v1_0.011274m.g) derived from phytozome v7.0 (c hr-ID scaffold_11; pos 26942275 to 26942915 reverse strand )
ctggtcagccattcttttactggtgagcttagctaatctcttttgggctctcttgatgtttagataaaatggatgaagcacagaggcataatctctgtacatatagttagttttagcccatataggtctaggtttggcatggggtctccctgatgtgcctgttggctgctgggttgaactcaccaagtagcttggctgtgacgagctacgaaatccgacaacaatttctgctgatcattttgtgggctgctgcctgacagtatcacgacgtttttagattctgcaatgctctctttggatgctgcttagatcaaatgattggaaattaacttcttcatctcagtcatattgttgttttgcacttcacaatattcagcttgttatttagcatttgagcatgattgaggacaagtaaaatttgactggtagaactctcagaagatgacagaaagtgtatgcaacacattggcatgaaattacaaaaggccaggggtgattattaaacctaaagatcacgatcgctttgtcactgatttccttattttcctgtgatgcattaaatgtaccagggtattatgtcaagcattctgtcttcaagcttagtggttgtttattttctttcttcaggttggatttaggag

SEQ ID NO: 92079 - DNA, 584 bp, Eucalyptus grandis
  Intron number 3 from transcript Egrandis_v1_0.021014m (loc us Egrandis_v1_0.021014m.g) derived from phytozome v7.0 (c hr-ID scaffold_11; pos 2616718 to 2617301 reverse strand)
gttcgcttgccaataaggtatgcttgccgatgtttgagtttttcgggcttttatagccaaatactgcccttgcctgaccgattgaaatctatataagcctttatcagtattatggtttacatgaatgtaattggctttactaaatgtataataattgttttaacatttctttcctcatatatcagacatgtttcttgctgtgttattttgttcttgcatcaaaggacaggtaaagtgtgcatagatattaattcccattcctgctatatttacactgcatcaacatagcacaatatgcctagacgatagtgctgccaacactgctcttactctgcaacaaatcttaagttttgggaaacggccttacgtttctttactcttctcggaactcaaatacagtttaggctgctgtagagctccctattccgagttccttgaacttttcagattgttcaagttggtagagcaaatttgacttgctaacaaagaaataaagtgaacatagtcgatgaaaactcttctttttccctgtctaattgtttggagtaggtggtgcatcctgcacatctgtgttacaagctacc

SEQ ID NO: 92080 - DNA, 690 bp, Eucalyptus grandis
  Intron number 1 from transcript Egrandis_v1_0.021014m (loc us Egrandis_v1_0.021014m.g) derived from phytozome v7.0 (c hr-ID scaffold_11; pos 2617684 to 2618373 reverse strand)
tggctaaattcaaccctaccatctccctcctctcggttggttcttgtctctcgtgtttgctctttagtcttaaactcaattcagactatgattaagaagctggagcaacccccaacccacaagccacggcctgttaaggtctttgattgtgctgaattagaaatttttggctttgctcgaattgggtaggaaccccctctttctatgggacatttatatggtgatcgtcctgcattttgcttgtagtgctttatctatgatgcttcttgctgaatttggactcccattgagcgatctcacggctcgtgctctattataatttcccctttgtgccttcaaacgagatcgatagtccttttcgatgagagaatgctgatgaaagagtgaatagaatctttttatggtagattatgtatctgccacagaagcagaatgtgtctaattgagcttttcttatgacgatggctatttatgctgtcaccgaatgtaagcatgagctcctaaaagttgaggccgttgaattgaccaaatgcatgaatttagtttggctttccgataattaggttacttatgctattttgaacaagattcttctgatttccacactattcaaatgttcaaactctgacggaaatgagtttatgctttgttgttctgctcacgctctatatacaatttcaggtcctcacc

SEQ ID NO: 92081 - DNA, 652 bp, Eucalyptus grandis
  Intron number 1 from transcript Egrandis_v1_0.040722m (loc us Egrandis_v1_0.040722m.g) derived from phytozome v7.0 (c hr-ID scaffold_7; pos 51353085 to 51353736 reverse strand)
aggcttcaggtacgatcattcaaaaatccaagacttcccttctcttttcttgatttccttatgaaaatgaagaccctgcctttggggcagaaagccgaagaatgagatgttggcttgaaagattgcaccattaactactttacaacaagtccaagctcatatcttaacactgtcggctctaccctgagaactgggcacacgaagaaagcataaccaggcaaaagccaataagggagactttttcatgagatagttaaccgtgacttcattcattgacatatataaccagatgtgagatgagcctaaggaacttgttctcgtaccttaacgacatagattcaaatcgcgcttcttgatatcagggtaatgatagagtcatgagtcgcaagtaagtcgggagcaatatatttgaggactgttggtgtcattaccttttaatatttgacaccttgatgcactcatacctatggtcttttctttccaaaggctttttgtttgagagtgattagtcacaagaataaaaggacaaccaatcctgtcctgaagaagatctaaattactaaagagaaaaacaaaataaaattggtgcgatggatggtgctgattgatgattacagttggcgaaagagaagtcaagagtggaagagataga

SEQ ID NO: 92082 - DNA, 508 bp, Eucalyptus grandis
  Intron number 1 from transcript Egrandis_v1_0.013646m (loc us Egrandis_v1_0.013646m.g) derived from phytozome v7.0 (c hr-ID scaffold_7; pos 39737037 to 39737544 reverse strand)
ccttacaaagttggcgaagcgctaaccaagctcaggtctctctctctctctctctctctcggtgaggtctgtcttgtcttttgtctgcctgctatccctcccggaaaagaagatggctggagaaatttcgcgacttcgaaactgggttttgccctagacgttcgttagatgcttttcggtgcgatttcggtggactcgtggcggaattagctcgtgttgatgaaatggagatggcggttgctcttgttcttggttcttttgtttacttctgctcaggctagtttgtttcttctttgattctgtggtggtgtatgtatggctacagtgtgttgctaaccagccgcaagaatggcaaaggaatgatttttcttttttctttttctttgagggagggggggggggagggtgctttttgtttatgtacagactaggacgatccctatgccaaagctaattccgtctatttttattaggagatcggttgatagatcacttcaagcggaggtat

SEQ ID NO: 92083 - DNA, 644 bp, Eucalyptus grandis
  Intron number 2 from transcript Egrandis_v1_0.018386m (loc us Egrandis_v1_0.018386m.g) derived from phytozome v7.0 (c hr-ID scaffold_7; pos 31825776 to 31826419 reverse strand)
ccggcctcaacgtcctcgtttccaaggtcaaccaattccaacgcttaattgctcctctaattaccaaatagaaccatctcaaatgtctctttccagagagggaaaataatgaataggtttgttcatatataattagtgattgtttctagtccacttccgaatttagaatgtttactatgtgtttctgagttgcataatggcgtgagactttagctgcatttagtttgtaagttctacgcatggatctcgaccaaaatttcttacttttgggaggatcatacccaaccaagacgcttgcaaaagctaaatatcggacttgagactgttatccaagagcatattgaaccaagtacttgctctctacaaagatctcgaaaatttcaagctaccgcaacaaagcctagtcgtttcattgggcatgatcttcctgtgcttaattgacttcgaagaccatttattctggaaacgtgaagtggatatggtatctttattcttgtcttccatttggaccaaaacatatggtagtcagtgggagaaatcaagaaagaacagagaagataatcaaatttgagtcgattaatatttttctgcatcagttcctcacttttgattcaaccgtttgcttcaggaattcctagaaggca

SEQ ID NO: 92084 - DNA, 443 bp, Eucalyptus grandis
  Intron number 1 from transcript Egrandis_v1_0.018386m (loc us Egrandis_v1_0.018386m.g) derived from phytozome v7.0 (c hr-ID scaffold_7; pos 31826555 to 31826997 reverse strand)
gataccaggtacggaatcgccgtggaaaggttggctattaatgctttttgtgattcttgagagggatgaatttttaaaaggcaaaagctataccctttaacatattaatcctcatcaggtagatcgagcttggtttgacaattaaaaggagtggatcaagttttttgaactgaattttaaccgttactgtcagtctgtccataaaatattgaatagtctcagtatggtggttggtgctttgaccttactgccaacaagaaggcacttatattttaacatagatttgattcctcccgacatattattagaaaaacagcatgatatggctagaaaaaaccaatgaaattgaatccagttctatctttttcttaagttcccaaaggtttcttctgtgtaggacaagcttaatgtatgaaccctgtcttgtgtgggtctctgacagg

SEQ ID NO: 92085 - DNA, 506 bp, Eucalyptus grandis
  Intron number 2 from transcript Egrandis_v1_0.004246m (loc us Egrandis_v1_0.004246m.g) derived from phytozome v7.0 (c hr-ID scaffold_424; pos 17050 to 17555 reverse strand)
ttactgaagactggggaggttggagagaaatcaaggtagattaagctttgtttatttcattaaactgttccgtatatgaattagttttcaacagaatgctttctatgacgactgatttaagacatgacattttctggcatatggcatgtacagaaccgaaagttactcttgaaatacttaggaaataattggttgcctgccaacaacaattagagggtgtgtggacgatggtggtggtgaaatcttaggttgagtgagttaaggggaatatttttctagttgtcgaaagggcaagtcattcttcagaatctaaaaaagcatctctttaacaatgaaaacattttccatcaaggatcttcctaaaatatgccaggattgtgagattggaaaacaaattaaacatattttcaaaatttgttttcttcaaaacaaacagagccttagactttatttcgtctaaaaatttattcggtgtacaatttaatgcttctgtgctatttttgcag

SEQ ID NO: 92086 - DNA, 695 bp, Eucalyptus grandis
  Intron number 4 from transcript Egrandis_v1_0.005964m (loc us Egrandis_v1_0.005964m.g) derived from phytozome v7.0 (c hr-ID scaffold_2; pos 47270256 to 47270950 reverse strand)
atcaaactgctccacatcctgtaattgcacttcaggtatgtttcctatctttccaggaaaattttttatctagaagcttaaacttatcttgatgttgaatgcattcttcagaatgttttacctagtcctttcgtgtcacccaattacttttatcaaagaactggtttcttctttgtttaattttattctggtagaaacttttggcagcttactgttagctctggggggtattcgttctcatcaattttggatatgcgattctgtataaatgaaatggaataaaatgttctactctttggtaaccttaatctacacaatgctttcaatcctacaggaggttcatgagattcatctatgagtaaccattgatgagacaatttcaacatcacacgttagcgttacccattgacagattcttctatttcaggagcatgtttacattgtggaagatttcttcatcaaatgctagtaattgtttgatctataagaattctaatgttgatgtttttgcaacagtgttactgctctatgcatagggtgacagatatacagtatctgctctctctctctctctctctctcattgtacctctttgtttttcaacctgaagcttgcaagtatgagtccagagtacctaaatactagacaggtgtctcttatctaattgttggctctgttgacttctcatgcaacag

SEQ ID NO: 92087 - DNA, 863 bp, Eucalyptus grandis
  Intron number 1 from transcript Egrandis_v1_0.021790m (loc us Egrandis_v1_0.021790m.g) derived from phytozome v7.0 (c hr-ID scaffold_2; pos 18388940 to 18389802)
aggttcgtgggtaggaatcggacttacgcttcgcttgtgcatgaccatcgttttctttctttctttctttctttctttcccttttgcccttttcttgtttccttcgttgcgggggagatgcgtcgggggaaatgttttcgggttcttgaatggttctgcttttggcatttcgacttttcttgatctgggttttggtttcttgacgccattttgtgataatgctcgagtttctggtgggttgaaagttttgcggtttctgtaatgctgatctgaggatcgagctggtggtaactgtggctcgctcgagcacgtgaagttgtgggttgcaacgtccactcaatgcgcacaacctgtttgatggatggtctggtagaataaaaagcagtttttcttatctaaacttcgtgctcttagtgctgcttcgatttcactctccatgtccaggctataaaacatttgatagatctagagacgagattattttggagtgctgctttcattttgttatgcttacctaggcttaaattgtttaatggtgtactgtcaaaagattagatagtaaaccttatattaattttttgaggatacatatacccattggtacattattggttatttggttctaattgatgtatactggttctgtgatgctatcagcattccattcctactgtaactaatatgggccatgcaagatcattgatctgcagtagataattgataattccttggttgtgcatctattgtcactgtgcaccattgctaaacatcctattagcaccatagtggcgtcttcttgatttttgtattggattctggagtctgcaggtgagacactggagcatctgccccggagtataagt

SEQ ID NO: 92088 - DNA, 475 bp, Eucalyptus grandis
  Intron number 1 from transcript Egrandis_v1_0.013740m (loc us Egrandis_v1_0.013740m.g) derived from phytozome v7.0 (c hr-ID scaffold_2; pos 44894896 to 44895370 reverse strand)
tcctctctcttcccctgaaggactctttctctctggtaatttacctggtttctttcttgtttcctttcgcttgtcctttagtcatcgctttgattgcggatgttattggaagagaaacgagaattcgaaagcatgtgggtgtgtctgaggctctaagcagcggcggcagcttttggctcttgcagttcgtttgtctacattcacttggcaattgcaaatgtttctacccccgtttgaacttcgacattcgcgagggaaacacacgaaacataggcgcttacccagtttctattttctgtggaagttttacatcggtgatacacgcgcttccttaattgaaattttctctttggtttgttcatctggagctatgttctcggtaatcgagcgggattttccctccggtttcgttcagttcagaaacgtgcataattaggacacgctcacaagtgtgtttctctgtttcgtttctcag

SEQ ID NO: 92089 - DNA, 767 bp, Eucalyptus grandis
  Intron number 1 from transcript Egrandis_v1_0.053483m (loc us Egrandis_v1_0.053483m.g) derived from phytozome v7.0 (c hr-ID scaffold_7; pos 47568540 to 47569306)
ctttgcttaggtaggatttcgtcgacggggaaatgtctccaattaaaggtgaggttttgcatccgttagcactttccttggaaatgcgttttagtaatacttatatggggagatatattgtgctcctagatatgtgatgtactgtaaaggttcgttttgataaggcgtgtgctgatatcgtttctgggaacttgtagtgtgttggtattggtaatattaaagaagaaaatagctgtattttttccagtccttaagatttattgttccatcgcattgctatataaatacctggagggcatgaggttggactatgatcagatcagaagcttatgagcatttcactcccggtcgattttgttgtaattatgatcagtaggcctatcttaatctgagtgcttcattgttttgaataaaaaagatgctctcccgttatgttgtcctaaaattcatgatggctgatgctcttttttatgcaagccttttgatttactaatgaacagaacctagattagcagcattagattttttttaatatgaagttgagtatcgatcttcattgacagattgtttttaagtgtgaaaatagtgttttttaattggtagtttgtgcataatatttggttggcaaattagttaacactgagaatactaagttcctgcttatgggaactttctgtttatgtgcttggcttgaatcccctttattgactcttatttttattatgtatccagttgaccctacgaaaaaggccgaccctaaggcccag

SEQ ID NO: 92090 - DNA, 481 bp, Eucalyptus grandis
  Intron number 1 from transcript Egrandis_v1_0.018403m (loc us Egrandis_v1_0.015517m.g) derived from phytozome v7.0 (c hr-ID scaffold_2; pos 63421887 to 63422367)
tagcgcgccgagcgaagaatcgtctccgcttcgaggtgcgtctccccgcccgtttacttccctctcggctgcgcgttcgattcggtttcgttcggctcgtgccgcgtccgagccgcgatcgggatcctcgtcgcggcattcgtccctgcgattcggttttcgctgttttatccttttcaggtcggcgtgcggtcagtcgcgcctcttttgagctcagtccgtgtggttaatcgaagacgccgtgcgtattctctggattttccctgttctgcagtctttgattgagtgatactcgtcctgcgagcgtggttgaggctctttccatgtcttgatttgccgaatcgcgatttgttatcgtcctttggcaaaaaagcaagcagtccttgctcttgacgtggccatgcgactgagtttagctcattttcgtttccacttctcgattgcagctcgtgatcatcaagtttcagaaagctacttctgc

SEQ ID NO: 92091 - DNA, 917 bp, Eucalyptus grandis
  Intron number 2 from transcript Egrandis_v1_0.018403m (loc us Egrandis_v1_0.015517m.g) derived from phytozome v7.0 (c hr-ID scaffold_2; pos 63422524 to 63423440)
ttctcctttcatctggagtgatattgtataacaaggtaatccgcattctttgtatggtgggtacactggctagctgcaaatagaattctttctagtccactttgatgacgaatagaatttaaaatgtagaactgttgtgtgaaaggttatttttaataattatataaactattatcattctgctccgtttcaccagatgttgagtgtctcgttcagggtgttttcttcccattcctcgcaagttgatggtatattgcagatgatgttggactgatgaagtgctatgtgaatagtttgatttttcagctccctgtaatgcatagtgtgttttttccacatggacaattctttttttcttcagaaggtccacacgggtccttgaagagtacatggtggagccattgctgtgctgtgtgaaactctcgttggattaatttagtgcaaacttcaaaggatagtttggtcaagtagctccagggttcacctctaagtgttgccattggtttagatatatcataactgggctaacaagcagtcagcctaaactcgtggtggactttcttgtgcacagacgactaaagtctggatgaattagatccaatatttgtagttgtgataaagtttgatatgctgtatactccttcgcattgaacaatctgttcagccagattaaatcaatcttataaataagcctgccagtgctgataatatctcatctctgtcatgacaatcccttcttttactgctccgttgttcacttggtaacctgcattgtcattcttgttttggtgttgagtttttctatatggttgaatagaacttgaaaagtatactttttttctcctaaagttcttaagcatgacgatatgagtctttttgcagtgggtactttctccaaagtacttcaattttccatt

SEQ ID NO: 92092 - DNA, 979 bp, Eucalyptus grandis; identical to SEQ ID NO: 91555
  Intron number 3 from transcript Egrandis_v1_0.020713m (loc us Egrandis_v1_0.018444m.g) derived from phytozome v7.0 (c hr-ID scaffold_2; pos 14474854 to 14475832)

SEQ ID NO: 92093 - DNA, 706 bp, Eucalyptus grandis
  Intron number 1 from transcript Egrandis_v1_0.024041m (loc us Egrandis_v1_0.024041m.g) derived from phytozome v7.0 (c hr-ID scaffold_11; pos 29847202 to 29847907)
cgcctcgaagtttcggagcaggaagccagcacaaggtccgtggcggtgatcgttcttgaattttacttgtttaatgcttccaagctataaacgtgtatggattcgcagcttgtttcttccatggtgatgagaacagctagtgcaaaactaggtactttgcaattgagagtgcgacagcagagatagctaaggatttaaaatcaaggaacgatgctgggtgttttaggattggtttacaaaattagtataagtggcgggcttttttcagtaaatctaccaatacttgaagtgaaaccatccttgcttaagccacatttaaagttaacatcacaatcggcgaaagacgaaagtgtggccatatgggtatgatcttgttcttgattcttggacattgatgctgtcgctaggcctgaagtttttgcatcacgatacgaactcctaactaagcttctatctccagggtaatgagaaagaccgaagtatgtgattattgaggctactgacatattaatagaattttgattttggaatcattgatttaagacagcaaaccgctggctataaaatggttacgcagtatttcgagagccagttctttacaaaatctaccttactttgcatgttctgtttgtgcatgaactgaagcagctaacgcagctgtccctatacaggactgtcgagaaggaagaagaagtcgttttgccta

SEQ ID NO: 92094 - DNA, 550 bp, Eucalyptus grandis
  Intron number 3 from transcript Egrandis_v1_0.004357m (loc us Egrandis_v1_0.004357m.g) derived from phytozome v7.0 (c hr-ID scaffold_2; pos 59332258 to 59332807 reverse strand)
cacacaaattgagttgcaggtcagttgctcctgtttattcgtggcatttgtttttatctgctttaattaccgtccagtttagttcctctttcttaattaagaatggcagaacacctggtcacatgcaatgcataggtgagtcatatggcatgcggtctcaaagttctacaaatggttggacaagagccttgggcttgccatttggtttaacacctttcttgaagtgacagtgattgaatccctgttttgtcaatttgattagtgggaaaacctgaccctgtagttctttgcggcatgtaatttggtagtagaacaattgggaaataaaacatttagcatgataaaaaggtagtccctctagatgctttgtgtcttcggaagatttagttaaaaaaattgttgggtttgtgctggcctccaagggatcctggaaacagctatggttaaaacattattctccatcacttgaatatttgtaagttgatccttggtcacctgctgtgcaagcctctcagtctccgtgaagacgtgtatcgtgtcgtgaaagctc

SEQ ID NO: 92095 - DNA, 591 bp, Eucalyptus grandis
  Intron number 3 from transcript Egrandis_v1_0.018982m (loc us Egrandis_v1_0.018982m.g) derived from phytozome v7.0 (c hr-ID scaffold_7; pos 44715756 to 44716346 reverse strand)
agaaggacgaggtattcctcccaatctaaatttccatgtgagatcatctctctatgtgaatgaatacgggcccccttcttgcagatttatgcttcaaattattgagacaagacaattctgtaggataagtggcagcaaaactacagctgaaatgacctacttaagtagaacttcttcttgctttggaataaatctaattgtagagagtctgaagagggcaggagaatctcccggaataagtatttgggtgcaatgttttttttttccttttccatgtcatttacccttcagatttaatccgccagagtagcactgtggctttcctgtcatctctctgttgtaacgatgtctatgctctgtgatccttcagaaaatgtatggtcatcccctgtgtatgttgcttgtaaaacttggcttgggactcaatatctttcatgttccattccaggcgtcccattatgtttggggcgattgtttggttttaatctctggaggcgtgatcataactttagaactatgctactatggcttgtaagtttgactcccattctggcagctgctcgttgtacaagagaagactggaacgtttgg

SEQ ID NO: 92096 - DNA, 723 bp, Eucalyptus grandis
  Intron number 1 from transcript Egrandis_v1_0.029163m (loc us Egrandis_v1_0.029163m.g) derived from phytozome v7.0 (c hr-ID scaffold_7; pos 46267371 to 46268093)
aggttaactcccagctcgagaccaagttcagtcaggtactcccggcctctcccgattcccccgccgcctcgcttcagtcgattggcggtcgccgggcgcgcgtcgcgcgtcgtttcgatcagtagatcttcgtcgttttcgccgactatcggttcttcttcttttttatcggttgcgattggagccgcgatgcgctgttcgattcgatctgattcgaaggggaattctgttttcgcgagctggcggactgtgatttaccttccggtggcgcatcgtgtcaatctgctcctgctgaaatgtggatttggttacgtctatctgcttagggaatgccgagcatgagctgatgatctggtctttggaaattgttgttccttgagatttgatgaacatttctgctgttatgcgcaatatgagctacctcttttgcggaaatgtggttattgtaaggataaactcatcgattgctcgtcatagtgtacaacaaacaggaatgcctgtttcgtttccttgaaattgttggcgggaagtgtagtggcaatggtgattgaagcgatagcattagccatgattatcttttgtaattttttctatttgattcctgatgtgcagtggtacttagggtgcttggccttattgctttttggctgatccttttatctttctttccctactctttggcttgcaggaacctgaacctattgactgggaatattacagaaa

SEQ ID NO: 92097 - DNA, 682 bp, Eucalyptus grandis
  Intron number 2 from transcript Egrandis_v1_0.029163m (loc us Egrandis_v1_0.029163m.g) derived from phytozome v7.0 (c hr-ID scaffold_7; pos 46268138 to 46268819)
acagtaagttgccctgactcctgctgaactgattaatgcacctgttctctcaaacacgatacattttcattgcatggacacccgaaaaagatgctctgctcactgtttttggtttgattatctgattatttgtccatacctttaggtattcacttgtgctgagtgcatttcacttatttctgtggtgcaatttctctgagtatcaccactgatgcattgccagaggaatcatctgaaatgaaggcaattacgcatgtggatttgattaagtgaactattttgccaaatcaagttagagttgttctgcatgtaagtggccagctaagtagcattccgtaagttacatgatgagcttgatggaaatggctatacctggtatagattggacatagcgagaagatagtggcatggtgtatcctaaagattgacctaaatttggagaacaagcagcccttgggtactttcccctgcaatttacgcagattgctgctggagtcttcttctactcttggacatatgtttgttctgaagtgtaatactgatagcttggtggaacatttccatgttttctttttgaattctctgagcaaattaggcagggcgaggcattattgagagtttataatcccatagtgtttcatttgcaggcatagagatccccaagtacgtggacacagtcacc

SEQ ID NO: 92098 - DNA, 886 bp, Eucalyptus grandis
  Intron number 2 from transcript Egrandis_v1_0.018495m (loc us Egrandis_v1_0.018495m.g) derived from phytozome v7.0 (c hr-ID scaffold_2; pos 61481702 to 61482587)
cggcgtcgggctcttcactaaggtgtgaagttagctttgtgcatttgtgctgttcattctgcgtgattcgagctccaagtttcgactcttgtgaaattcgttctctctgctgaaagtattcattactttagattgctgtctgatgcgagattagtagttttcaagttccattcttttggtttagggaggggagggaaagatcgcatttcgtttgagctgactgtctggtgattgctcttcaatgggattctgtatctctcatcgtgtcaagagactcaagaccgagggaaagactctgtagctataaataaatctgttccatacagattctaagagcgtcggataaaagattgaaccttgatggaaaacgagttgaactttctatggcctctttaagtatatgacttcccatcaccttagtagcgagtcgattccttaaagattcaaagtgaatgtcagagcctcgggcatccctttggggcagctattaaggaaatcttacagtctccaattcactgattgtccttgcggcatgcatagtcgatgcgtcagaaattgtattttatttttcttattgagcatgtttaacaagtgcttctaagaggagccttcacacataatatctgctattaaggataatgtacattattagtttaattttttgtctactgccatgggcttgttcctgcctgatccagggtgagttccttaaactgatgtgattgatagattaatgatgatgattttctgataattccagcatacacattcctctttgttatgtactgctcatattattttatttttgttcacaaaacaaacctactacaaggatttatgtctctttgtagaccgccgcggagtattcacgccggggagagaaatt

SEQ ID NO: 92099 - DNA, 785 bp, Eucalyptus grandis
  Intron number 3 from transcript Egrandis_v1_0.043815m (loc us Egrandis_v1_0.043815m.g) derived from phytozome v7.0 (c hr-ID scaffold_2; pos 4916803 to 4917587)
cgctcctcaaattcaaaccctttgtcctagtataatcttgaaacttatttctcagtcgcatgtaatttgttggatatttcaataatattttgaaatatttataataatagcttttataaaagttatgatcgcatttaagaccatcattatttttaacggtcacataatggtttcttaacaatcatataacggcttttcaattgttttgcaacgtttaatttatttctcaaataaatccttcattattttacaacggctcttttaacgactctattttgtttgaatataaaatctcataagacaatcttaaaaaatatatacaccgaatgaaatagagaatattctttttaaaaaaaaatatttcctttcattttccttgctgggttatacataacgttgtttctgttccttctaatattcagtgcggaatatagaagaaggtctgttgtatcttgagaggataaccgtcagaagcttatcgcaccgagttttgcactccgaggggcggaattatccttaaggacaatgtttacatttgcatgcctcaaacaaatttatttattctcatcagcttttttcctacataatttgctttatccaaatctttcagagttaaacgtgttttgttgtactagttgacggttcagaagaaacagagagagtgaaagcatacccttttttgagttcaataactgagattttcaggaggatgaagccttcattttgaagacatcttttggtcatttgcttctgttaacgtgtccatgcatttttgtaggtgccaa

SEQ ID NO: 92100 - DNA, 646 bp, Eucalyptus grandis
  Intron number 3 from transcript Egrandis_v1_0.027752m (loc us Egrandis_v1_0.027752m.g) derived from phytozome v7.0 (c hr-ID scaffold_2; pos 64099161 to 64099806 reverse strand)
ggaaggtgatttttttaagttacccttatttagccaggaaaaaagaagaaaccctcatttgagcatatatttggttcatttgatgagcatcgagaactctatttgagcgaattttctcattgtgatggtcaagtctgagacaatcttgccgtctttaggggctctctatttgcatttcatccaagcttgccataatttaatcgaatctttgaactgctatgatctactgtatatcaatcatatctggaataagattttggacaaaatgcatttggtattgcctcctcgagatcaaatggacatctctagcaccatatcatttttttccagattcctgtttctattcctttttatgaataaaaatcatggcatttctcaggtctatcattttatggtttctttcccccttctttacaaaaacaattccagatgatgagaaagaattgaccatctacaacttctcacttatgcatctgatttgttctctaggatagtgttcatcattataggttaagctttgatattcaacatcaagtaactcctatgcttttcgtgttttgtgccgaacataactcgttactctctgctgttttgttttattgctcctccagcaagctctagttctcttaattacaactattttctc

SEQ ID NO: 92101 - DNA, 718 bp, Eucalyptus grandis
  Intron number 2 from transcript Egrandis_v1_0.027752m (loc us Egrandis_v1_0.027752m.g) derived from phytozome v7.0 (c hr-ID scaffold_2; pos 64099974 to 64100691 reverse strand)
accttgattttgaagcagtgagatgcttggtgcattgccctcttctcatgttgtttgatgccttttgctattcttagcagtatcatgtgtagttagagattaatcttaatcttcttagcaccatggaaaatcaaatcttgaatgctgatagattagatataatccttcagtgacttcttcctcggagatgttggctgtgacatgtgcatgctcctcttccgccatcactatctcattttgcgatctttcccacagtttatcgggtgactggggagattaatcaagtactgtggccatgatatttaactcttgtgtaatagcaaacacctgggttaagatatgtttcgttggatagaaaagtaagagcccctcattcacgtatgcttatggagtattttagtacctgatagaattgtacaatgaacacatggactaccaaattggatcagtctaaacttcttgggtacagaagtaattcttgctatgggagtgccctgcaacatagtataacaaaacgcagattagtagccattaacagttcttaaccttgatcatctcttctgtaaagaaagacattgctcaaggaactagattattacattcttaatgtataaaggctgacaatatcttgcaatttcattgagatccagttctctgagtatgaaagaattcagtaagatcccttgtctttttttttttttttttgatgcagaagtct

SEQ ID NO: 92102 - DNA, 359 bp, Eucalyptus grandis; identical to SEQ ID NO: 91503
  Intron number 5 from transcript Egrandis_v1_0.027404m (loc us Egrandis_v1_0.025163m.g) derived from phytozome v7.0 (c hr-ID scaffold_11; pos 1484343 to 1484701 reverse strand)

SEQ ID NO: 92103 - DNA, 560 bp, Eucalyptus grandis
  Intron number 3 from transcript Egrandis_v1_0.003108m (loc us Egrandis_v1_0.003108m.g) derived from phytozome v7.0 (c hr-ID scaffold_2; pos 1031878 to 1032437)
atattggattcatagccaaccatttggtattgccggtaggtataactttgcagcatgtatgcaatagactacatatatttggcttttttcttagtgaggatagagaaatgagcatttgagatggagattaattggtttttcatgattttgcaagttgttatagatggaagcaagtttaacttcaccataattatcaacctatacaaattaaaatttttcttatgaatcacaaatgtgcattcttatgagagttacatattgatgcatgtttaagtcgtgcaaaactatctttgagttctttcaaatgcttttaaataaatatcttttttcttttgtcatgctttaaaactacaagaagaattgcataagtgagtgtaaaaaaaaagaaaaaaaatctttgatcacattctaaaattggttaatgacatttgcattcaaggtttgaacataacctagaattaattggttgatatgtacaagtgtgactgattatgttgtaaaaatgtttgttttgtattttattagaagggtattcttgaagaattatttctattttgaag

SEQ ID NO: 92104 - DNA, 1037 bp, Eucalyptus grandis
  Intron number 2 from transcript Egrandis_v1_0.029277m (loc us Egrandis_v1_0.029277m.g) derived from phytozome v7.0 (c hr-ID scaffold_7; pos 21028164 to 21029200)
tcgacaggtgccacaatcggatctcggtgctctaggtaattttcgaatttggaattgaatatcccgatggctcgtcgttttagaatcctcaatcggatagtgggttacggtagtaagaaggttgttgaatgaataatcgtatgattgcgtgtccagtttgggcagaacgccaaatgttagttgttttgccctaaccaaacatgttttatgttcttattaaatcatggggggtttcttgaagatcttgcaaactacaaatagtctcggttatgtgcttgggaggtattggattttcattaccttgtcgtatcatgatctagaagtttcattttcatctgtattggttcttggcctgccatgatctgaatgctttatttgttatgctgctgcatactctgccccttctcttcatcttttgagaaagggtctccatttcaatatgatcagcttttcgtaagtctaacgtgaaagcttattcgtgtatcatttgaatgtggtcccattgcttcttttgatgtagagtagggtatattatattcatggagtaccaacgcattcaacatcataaatctcttgaaagtttattgaaatggatttcttaaatcaatcatgtgtgggtttcatggccttatttgaaattttggctacttgacatgtgggatactctcttcaaatttgtttgattttagggtcaagattaactaacatgaaaagagtaggtgatttttctttacacatttaccatctctatgttattgaggggagcagaaaatgcctcgatacatgcatgtttgtatttttgttagatgaaaaggaatggacagaggaaaatacatgatcatgttaaatactaacacgttccgtgcttctttagtaggaaataattcaaaatgtgcttttcttctgtcggactagcatgacgaaatcctgccaagtatggggaactataatggatgcttagatacttgaaggagcaaaagaggctgtaatatccaccttacaaaaaatggtttccctcttcttttgcagtcctctat

SEQ ID NO: 92105 - DNA, 747 bp, Eucalyptus grandis
  Intron number 1 from transcript Egrandis_v1_0.053507m (loc us Egrandis_v1_0.053507m.g) derived from phytozome v7.0 (c hr-ID scaffold_7; pos 13408133 to 13408879)
aaagcaagaacggtaggtagtatgtgcattttgaatttaatatgcatttatttaaatatataataatatatgtatatttaattgacaagatcatgtaacttttcatgcaaccaatataaacaaatatggccggtcaatttcgcatatgaccgatcagtgtaagagttttcataatgtggattacttaattaatactataatttaccgttttatggggttggtctaaggtgagataacatattttttaattagtttaatatgggattgactagtgtgggccaagtaaagcttggcccgtaatgagagggcctagttggaagtttctcctctaaccctaattctcataagtatccttacaaaatgtaagggagtgttcacttagcgaagggtgaggaagccgtctcattgacactctgatacagagagtaatagaaaagaaggattagggtaatagaggagaaggatttggatggatcatcgcttttctactttcccatcaaatgatgtattcaaaaataggtgcgttagtctttctaatcaattgtctgtgctcttgttctaattatgaagatcacgggattgcatgttttgcatcttacaattagtaccatagcttgagaaatgtagaaatcgaattcgtcaaagttgtttgtagcaactagcaagtttgtgtcttacaatacagcttcgattattctgtgcaaagaagcaggaaataagaagccgagaaacatcggatctacgcga

SEQ ID NO: 92106 - DNA, 418 bp, Eucalyptus grandis
  Intron number 3 from transcript Egrandis_v1_0.017349m (loc us Egrandis_v1_0.017349m.g) derived from phytozome v7.0 (c hr-ID scaffold_11; pos 18114226 to 18114643)
ctctccacgctttctcatgtgagttttatgctggaagattgactgaccaatcattgtttggaaaaagcttctacctgagtgcaccaatacagtaaaacttggttgggttcttctctgttcttgacaattctgattggacttggcagcatatactgatgttctcgggcaatagttgggaacttgtcttctctgccatgtcacagcaccgtacatttttcttgcatttgttttgtttgttttttgcccaacgaagcatgtcgtatatgttcaatgtaagtctttgctggcgagaaataatgtttcctgattaataactgttgttcccattgttgccttttcacgttatgcattgatcatgtctgtgtccttagggcacacgaggaactgattgcactctcttttgatttgcagaaaattg

SEQ ID NO: 92107 - DNA, 898 bp, Eucalyptus grandis
  Intron number 1 from transcript Egrandis_v1_0.048075m (loc us Egrandis_v1_0.048075m.g) derived from phytozome v7.0 (c hr-ID scaffold_7; pos 374800 to 375697)
atcgtaagcttggttcaaccactttcgtgacttttatttcccagaatgtattatgtcatataggtgaatttgcgatgatgcagttctggactttctgcatattgtcgagcccttacttacttagacgaactaaggttcccacagtcagaggatgtcacaacatctgcaggaatcagagttgaccatttgtccacaaccaaatataagaacccaagcgcactcaactctcttgagatatcgatgttttcccgtgttcctatcaacgatgctaacgtcatttttgaagtgatctaaatctggtttcacccccttttgcctgcctctttcatccaaggaggctttattacctgccattttgcctgagaaagtttcagaagaaaagcgagggctgacatttcgcaatgcgtcgaatgagtaaatctaactgtttgtagtttctagagcgggttcacaacaattaatattaagcatgttctggacttggaagtcattatcttacattcaggtcattctgcacagattttgttttggtacaaagatcatgctactttcgttagataagagagtcggttacaaagattttacagggtgttagtttctctggaacaaagatcatgctgttggttggctattcaagcaaccaaagttctagacatctctagagcagctactgtcggataatttatctaccttttccattttcctgcttgcgcactccgggaggacagaggaacgatgactttgaagcaacttgcttcagaaacttatgcaatcctcagatttacacagaagatgttggataattgctattcaatatacacacaacgcatatctatttattaaattcttatttttcaattgggtgtattccaatgcagtcagtgcgcttacggggcta

SEQ ID NO: 92108 - DNA, 808 bp, Eucalyptus grandis
  Intron number 2 from transcript Egrandis_v1_0.032871m (loc us Egrandis_v1_0.032871m.g) derived from phytozome v7.0 (c hr-ID scaffold_7; pos 46236340 to 46237147 reverse strand)
atacgtacctccttaatagcgtgcaccatcacgtattgttaagtttatgtcatatccgttttgccccttactttgaattgttatttggtgaatcggatcggatgctttcttgcttgcactatctttgtcgggagaagggaaaaggagatttgaaaattttactcttacagtgaatgcaaccttttttcagcccactacaccattatttctttcattttctcatagtttgtaggtctgctagttgggaaatcaatgtgcttaactgtccacttgtggttttttattgatagagaaaatttttgtttgtgtgctgcttctattgaagattagtgtttagtggaattgaatgttaagcaatctctcttataatctcgaactttgttgagatctaacatctgttttgagtattatgtgtcagtttcttatcagaatcatgtctgtttggcaatcttttttctgcatcagtgctctgagaatgattgatagaaagaagatggtgtacatgtcgtcgtggatttgtcagttgagaaatgatgatttggcaaaaaaaatggagaaagtgatgttctttttgcttttaatctttacaaacctaagcagagaaccaaacttttttccattaactttgacaaaattttactacgaatttcgtaagacgcttgatgccacttaggatctggacagactttctagtttaaccaaaccaggtgacaacgaagttctttgtagaaacagttgggcgctaacatctcacactggcaatgtctgtgcaggacctgctgttctcctacaacattgctgtggacag

SEQ ID NO: 92109 - DNA, 717 bp, Eucalyptus grandis
  Intron number 2 from transcript Egrandis_v1_0.026017m (loc us Egrandis_v1_0.026017m.g) derived from phytozome v7.0 (c hr-ID scaffold_2; pos 31835088 to 31835804 reverse strand)
tccgatatctaggaggtttagacccttccggggaggttggtcctggtcgcattttgtttttgagtgcttgaataattatatgtgacgtggaaaggttacacttttatttggtgagaagatgatatgagggcgaatcatgttcatggcagtagttcaagagggaaagaaagattgcaaaagcataaggggttgtggagaaatggagttcgggaatggttgatctgtctattttggggtttcaggctcgtgtacttgtctgtctaggtagattctcgtacggttttaggaagaaaagatgagagtggttcctacaaaatgtagatgaccatctgtatagtatggtttgttgtgcagaaaaatgcttcgtcttgtgaaagtgattgtttatagcgtgaccgtatgagaatttattttaataggctagtgcaatccttgaaggactaacatggatccaaaatttggagttcaaatgccgagttcaagacttgccattttttttccatgttccatagtcatacattaccctatagacagatgctttgattgtgtgtcatgaccttttctgtatttttcattaaagcaataatcaacacatggacaaaatttacatacgatgacatgcaaacacttactatgtggataactacctcaccctaatatgaccttagatgatgattttcagcatctccaaactaatcaaaaacaagaagcagcaaa

SEQ ID NO: 92110 - DNA, 865 bp, Eucalyptus grandis
  Intron number 1 from transcript Egrandis_v1_0.015072m (loc us Egrandis_v1_0.015035m.g) derived from phytozome v7.0 (c hr-ID scaffold_7; pos 7015668 to 7016532)
attgggtccctattcttcttctccctctctctctctctctctctctctctctctctctctctgtaaagctttggactttcgtgttgttctttgtgtgtcctcgattcttgttgtctgaattttcttggatttggaatcttggtgccatatgagatgatgggtttttttttttttttttttttttttttttttggtgtaaatgagatgatgggttgttgggtgttgtttccagtttaggaaatcttttgtgggtcaggatcggtttggtggtgtctgtcagatgaattgcatgcctcaagtaattagactgctttgtccatgaagtaatggtaatttaagtaaaagctgaagtagtggcgcacgctgaaacttagattggggaagggtctcttcttatgtcttcagcaatggacacaatttgtactgcctaatgtgcgcctgcatttggcctgccctgtctgttaccaacttcctctgctatatatcataatgttgggccagtcgcatgataggctaagattatgtttgattaaaatttggagttttagttgattggcatactgttttgtcagattatagggaaaaagaatgtgttgtcttgtcgcagtatatggacaagcatcatgtagcaatgaccagtctctgtatgtagcaaatttgatttggtagtctccctacaactttgatgatgaatatttggaatattagttcaaatatcacattgtttcataagactagtttcacagtacatagagaggcctttatgtagcaaatttagttctttttttatttttttttatttgactctccgctggatggctattgctttctgtttgcaggactgttgaagacgatcttcttgtgg

SEQ ID NO: 92111 - DNA, 579 bp, Eucalyptus grandis
  Intron number 1 from transcript Egrandis_v1_0.018936m (loc us Egrandis_v1_0.018936m.g) derived from phytozome v7.0 (c hr-ID scaffold_7; pos 14594229 to 14594807 reverse strand)
ccggcggccttggcctcctcagagctcctgactgggtaacgctcctccctcactcgctgctttccgtctatgttttttcggaacacgccttgagctttgagctttgatccaagcacctgaggttcgtcgagtcttgtatgttgttgggttatgtactgaagcaggagagagagagggagagagggagagagattcttgacttgggtgtttttaatcttgacccagaactgtcatggggattcaaaagggaaatcagatattccattgccaaagcatatgcattcccaaattttcacatcattagtccttttagtcatctctgacctggaaattttagactgcttgtttccccttaatggggacagattgatggcctaacaacagcactagttcttgaggagtgatgctgctagtagcaggactaatttacagtgttacgttgtgaagcgacgtggtgaagttcaaatgagaatttggacaagcgatccatattcattatctttttttctttcccatgtatttggatggtgattttgcttttcttctcgaaatcggcgtgtgctcaggaggcaccggatc

SEQ ID NO: 92112 - DNA, 684 bp, Eucalyptus grandis
  Intron number 2 from transcript Egrandis_v1_0.046632m (loc us Egrandis_v1_0.046632m.g) derived from phytozome v7.0 (c hr-ID scaffold_7; pos 51827788 to 51828471 reverse strand)
ttccttaattgatactgcattcatcggtcgtttaggtatgatgatcaagtctaagcttttccacgaagtctaggcaggttgctattgtgatttcttggactgcagaatgagctctatagcatgtcgtggttttgtatgatcatattcacagttattataaaaggccaagaacatgagaagtttgagctggtaggagctccaggtttctactgttcaagaacttgattctaggtctacgttcctatgtttgttgagacatcatttgactgattagttgagttgttaataggatgttgcaactggagtatttcttatgacaactttaattgccacgttcaatagcatgcaaatgcttttggtacgataagagatttcaatgtattgtgtggctgaattccccttgaatctgtcttgccttcctaatgcagaacatttagtgaatagacagctggttttgttgatttatttccattggtacctaccattatgtggatgggttcaaaataacaataaatctgaggacttagctcaccttgtgacaacttcagaaatttccaatctacacattacaatgactcattatacttgcctctaggcttcaagaggtatgataactagatcaacgctatgctaactttgtcgtgtgcaggtccagtggagattgcagctgtaggagtatctatt

SEQ ID NO: 92113 - DNA, 670 bp, Eucalyptus grandis
  Intron number 1 from transcript Egrandis_v1_0.027426m (loc us Egrandis_v1_0.027426m.g) derived from phytozome v7.0 (c hr-ID scaffold_28; pos 231040 to 231709)
aagactccagcaaccagtaactagtaagctcctgtctgatggcaatttcttcacttgattcacggccagtggtctctgtctgagtcaatttcttcctggttttctcttaaaaaccgtcactcgtatgtgtttggctctgacttcgttttgtcctgtttttggttcagtgtgtgcaagtggtttgatggggaactggggtttggtgggtgtttgatttaatatgttagttgctatgtatctatcatgaacttgatgaggtgtgactcttttggctcaagtggctcaagtacttgtaatatttgcacggctgaatcatgaatcttgattttgaagcttcgtcgacttttcatttgcctgttgctggtagcaaactggcagtggcgtttcttctacttttggtctccctaccagatgcaatcatttactcccatatttctgtcggtatttcctaatttgcacttcataacaccctagatgttcttttccatagttgctgtctgctagttgttcactctgcaatcttggatcttctctaggaaaccattattgcaattgtctagagtaatgtaattttctgatgtgaattctttctattctagaactgaatgcacctgttggtctgtgtatttctgcaggtgtcttctttataaggctcctttctgggttcatt

SEQ ID NO: 92114 - DNA, 470 bp, Eucalyptus grandis
  Intron number 1 from transcript Egrandis_v1_0.011120m (loc us Egrandis_v1_0.011120m.g) derived from phytozome v7.0 (c hr-ID scaffold_7; pos 51649223 to 51649692 reverse strand)
gtcaacaaactcctcagtaacgtaagatttgaatttgaccttcgagtttgcttgcgcagatgtactgttgcccatgtatgggtgagcttaggcatagaattttaagtgggactgggcgtgttgctcactcaagtttggtcatgcggttcttgttgagaagtgtacacctttttgttaatttacttttgttttctcctgatgtgaacatgtttttaactgaaaacactgacttcccaatttatagattgttgttttattgccaacgccctctagttgtcaatgcttaagcttttttttttttttgtttttttttgaaaatttcatgtttgatttgcatagtttggttcttgtttactaaatttcattgatggcggggatagtttttcgtttttctccctcctcttctaatggatttcatacttttgggataattaggaggacaaattgccgtatactttttacatatcgga

SEQ ID NO: 92115 - DNA, 627 bp, Eucalyptus grandis
  Intron number 1 from transcript Egrandis_v1_0.047819m (loc us Egrandis_v1_0.047819m.g) derived from phytozome v7.0 (c hr-ID scaffold_11; pos 5879353 to 5879979)
ataccgtgggttaatcgtagtgatcttcgttcctatgcacaaattcatgaacatatgtctcatggatttgagctttcatggtttcaaaaagcctgtgatatgcaattcataatatgttattcgtgcagcatcaacgctatgaaccaaatttattgcaataatggtaagtacttacgatttgttcaattttctcaacaaatatatttggctgtgaaatttcatctaaatgtgaaagtgagttcggtcatttgtatatcttttcatagctcatgtgatttgaaaatggccactaagatcaagtagtttgataaatgctgttgtggtattttgtaagtataataatgaatgaatttttattcatttgtttatttatttagtttagattccgccgataaatcttaacggattgaaccaagacactcattacttgattatggtaaataggttatcttctaaatttttttcagcttgtcacgtattcaatctcccttgcagtattttgcttctacccgatcgtcgtgcttgcgttctatgttataggtaccattactacaatcttctcattgtgaaattgatttaatgtttttagaagcaaacatttaacatacccacaaattggttatcata

SEQ ID NO: 92116 - DNA, 859 bp, Eucalyptus grandis
  Intron number 1 from transcript Egrandis_v1_0.017172m (loc us Egrandis_v1_0.017172m.g) derived from phytozome v7.0 (c hr-ID scaffold_2; pos 22388534 to 22389392)
agcatctatcagtttctcgttaagttgttttttatggattgatgcttgtgattgtgcgtttcagtttgtcggtggagatttggattttgagtgttttaccacattttgcttgggtttttaatcgacttataatagattagtggcgaattctaaataaattgatttgcatatttaaattatataaataaaacctcaaaagttgcaattggtatgagcttaagagagtttatattgagtgacaacacatatctttcatgaagtaatcgatcgtccctacttagtaattcattaattttcccttgatacttcccctaaaaaaagggttgcgaagccaatgaatttgctccacttccgtcgtctcgaccattgataaatacaagattggttgttctaatcaaatatctccaattcaacatgggtcgaccctttgaatatctcatctaaaacacgaaaaattactatagtattctagtttctcttctctatagacgtacaggtagaatagaaccttggttgaattaataaagtagataaaaagcctttcaaatactccaatccatatcaatcaattaatcaattttgacctctatgtgcattcaacatttccatccacctaatcactaggaatgagaagttattactatcagtctgaattggtttcgacagggactgacgaagctgctgggatgtcccgaaggcgatgaaggagcagaggctggagagctacttcggccggacgatcgcgtcgatgccagcatgagcatctgtcagttcctcgttaagttgcttttgagtgtagggggctttttggttcttttgattgggggattaggttgtggttgggaggaaggggactcag

SEQ ID NO: 92117 - DNA, 512 bp, Eucalyptus grandis
  Intron number 1 from transcript Egrandis_v1_0.004546m (loc us Egrandis_v1_0.004546m.g) derived from phytozome v7.0 (c hr-ID scaffold_2; pos 6928182 to 6928693)
ttctctccctgctgctacggcgaagtggcccaaggtcagtctctggttcttgaattcgtcttcttccttcgcgttcgagccttgtttttgccctgtcttcgtcgcgcaattcgattccgtgaacccatcacgaacccgctttcgttttggccatggttggaggtgtaattgcactgtgatcgctcagcgtgcggacttcggtattcaagtttggttttttcgctagtttcgatgctctgcgcggcggaatgagatgtgggctgatttggtttttgcaattcgatgtcgaatgagtgttttagcttcaatgcgtatgtgggttggtcatggtggagagtgttgattgagattggtttggcttccgttcctttataaaacggttgatgatggcgaaacggagccttgcgggggcttttgacttaatgtgtgctgaccatcattgccaaagtaagttacctgccgagggctagaaggagttttgactgtgagtgtgactttgttcgtggttgcag

SEQ ID NO: 92118 - DNA, 692 bp, Eucalyptus grandis
  Intron number 1 from transcript Egrandis_v1_0.018653m (loc us Egrandis_v1_0.018616m.g) derived from phytozome v7.0 (c hr-ID scaffold_7; pos 43194586 to 43195277)
agctcaagctcgccagagctgctcctggcttcctggtgagtgctcctgttatcaaaagtttttctttgaattgatgcgatttttgcccccttgcgttccgtacgaattctgggttttgcttcccattccgttcggtttaatcacggttccgtttgtttcccggaggaaaaagaaatgggtttggtgtagaatgttaagttaccgtcgctggtgatctttccttaggttcttgattccgtttctttcatttcttgggttgatttttaaggttccttgattcacccagaatgtaaccggagttttatagtctttcgcctctgtttgttagaatccgaggatgggtgtcgtagcatttgtgtaggtttggcatgtgtcaggtggtgttctcggcaattgagtgcgctcgagtcggtgattaatggaggaaagtagtcgaattgtgatggattgaggctttgtggctgcgtcagtatcagtttcagctgcctgtgcgaccaggatatggcgatgattcacttttagtttgaaaattagttgaattgcaaatgaagaatgatagaattctctgcgcaaacccggctgggctgtaaggttgatactggaatgagctgagaggtgaggtgattttcgcacggtatctcacgtggtttcttttagactgcaggtacagaaaattctgtgtgacggaccgg

SEQ ID NO: 92119 - DNA, 554 bp, Eucalyptus grandis
  Intron number 1 from transcript Egrandis_v1_0.013471m (loc us Egrandis_v1_0.013471m.g) derived from phytozome v7.0 (c hr-ID scaffold_11; pos 3861769 to 3862322)
gggcacggcatcgtctcgtttcgggggagtttgaggtttgctttcttttcttgaaccctagagaagaccgcttgagtcggcggagggaagtgggaggtgctggaacgaggtgaatcgctagctgtttctgtttctcgtgtttgcacctttgcgttagtgcattgaggtggaccgattttgggttggtcttcaactgcgaaaagagaaaagaaaaaacaagagagggtagaggcttgtttgatcccggagaatcctctttcctgtttctaatgtggtcatctctataacgagaagaacccataagtttttttcttggggttgagtgttttttccatttttcgtcaattcttcgtaatgttagtcccatcaaagcagcgatcttttcatttcttgctttatgaaatcaaaggacaagggcagtaaatttcgacaatgaattggagatgccgtaatcaatgaacctttcgtgttttttagttatttgtgcgattgtcggccttgtcataattcctgaaatccctactgattctaattgcaatcatttcagttgtgag

SEQ ID NO: 92120 - DNA, 941 bp, Eucalyptus grandis
  Intron number 2 from transcript Egrandis_v1_0.013471m (loc us Egrandis_v1_0.013471m.g) derived from phytozome v7.0 (c hr-ID scaffold_11; pos 3862612 to 3863552)
ttgccaaggttagcttgttcttgagctagcgagcatgttgcctaagaatgactgaagccccagtcatgctttgaaggagtgtatctgttgttataagtttttccctgttgacctttggctatagacacttatcctatttcttttcctgtttcctcaatggcttgatgcacttttggtttagtgagattccattttgaaccaggtcatactaccattgcttttttctgagattttcagactttccttgatgatcgtttattcattgtgctgcttatgttcatctgtttggtgattgagaggaaatcttgaaaataagatgaattttgtgaaattgtgaattgtatacgttctctgtcgaggagctgccattgttgaaatgaagattattgcaatttccatagatttcagaccatttagagatttgagtcctggttctttctctgttttgacttccatagatcagtgtcacgattaatatgggaaatatatagagtggcattcttacgtcttcaagcccgtgcttttggaatggggaattttttatctctaacatctatgaatcgactcatagtagcagaaggagctatcatttaatatccttcattcctcatgctctaaatgggttaacatatcttgcaagtctttctaattttattgcctctgtatccactaattgttaatcaccttctagttgtgaagctgatctgatctttaggataactttttacttggtattttcttctagcttatgataatttggaatttatttcttaagtatatattttgttaatggtaaacttcaaacgtgatatcttcagcttttacaattttttttttaaaatttataatgcttctttcatctgttggatgtttttttttttgcccctgaatcattttctttatcagacaaggttgcaggcgcaagctgctggggttcctta

SEQ ID NO: 92121 - DNA, 617 bp, Eucalyptus grandis
  Intron number 3 from transcript Egrandis_v1_0.009338m (loc us Egrandis_v1_0.009338m.g) derived from phytozome v7.0 (c hr-ID scaffold_2; pos 56437057 to 56437673 reverse strand)
aggttcccaggaataaggtattcctcttcaacattttcctaagaaagtttttcttacttttaggaaaaaagaaaaaaagaaataaataagcccgttttagcttagtcaaatagactatgccaatcatgttttgaaaagccaaggaaaaaacttgcgaagataaatgtttgtggatcatagacaatcaaaatcattgatttttgtgggatccacgtataaatcatgtggaccttctatgatgacaaaatatgactaacccaattcatgtcgatccggatccaagcaattttgacttcaaggagtagtgagacccacatcagatctcactaaaagatgtaaagttagcaaaagtatgatgagtggtttcaagtgggaagacaataattgtgtgatcaagcttacaatttgcgattcttcccaatatttgaacaagctaagagaatcataacaatgttatatgtattggcacaaactttttgatcacaagagtaaatacagctagctagtaaggtggagatttgaacacacatttgtcagaaaattgatctatactttagattcacaaactaaggcatttgttgttgaattcgggcacagtaagatttggaagacagcgg

SEQ ID NO: 92122 - DNA, 396 bp, Eucalyptus grandis
  Intron number 1 from transcript Egrandis_v1_0.001328m (loc us Egrandis_v1_0.001328m.g) derived from phytozome v7.0 (c hr-ID scaffold_7; pos 36252510 to 36252905 reverse strand)
accaggtttctctttactcttctcatctttgctttttaatttttataatgcccttctggttttgttctcctgtaagttaaacgacaatggtgattacttgagaattttccagatgatgtttgttcgttccttttcttttcttttcttttcttttcttttttcctgcttttagtaagcctggccttataagaacctcgcattcgacttagtgagatagaaccctttatgcttttactttgtctggcaaactcattaggtattttaggattatatgttatgatttacggaatttggtcgaattattttttgaatgtggaggttggttggtcatatttgacatgtggccgagctgtttttgtaggtggggacaataccggagacatttcagtcggtcca

SEQ ID NO: 92123 - DNA, 674 bp, Eucalyptus grandis
  Intron number 1 from transcript Egrandis_v1_0.051264m (loc us Egrandis_v1_0.051264m.g) derived from phytozome v7.0 (c hr-ID scaffold_11; pos 3365005 to 3365678)
gaatagtatgcgaaaaattcgcctcctcatttgtagttttgcatggtcaattcacttcgttactgtttgggaaagtgatgctaaagttggcccaccagaagaatgaggagaacacaaaattcgtgcaaaatagagaactagcacgtgacccaaaaaaatggcactaattcatacactcactgcccagccgaaattgatcatatacaagcgtaacgtgtattcggcaagaacattgatatttctactttagtccacgctagatctggaaatcataggattatgtaaaccaaggaaacctaataaaatgcatgttaaatctctagtcatcgaagaaaacccttctttgttataagaatcatcatcggctataatatcctgtgcgaacgaattaattatacgaacttaatattgttaggaacttagtttttttttttttattattataggaaaattccattcattaccatatttataagaaaattccataaatcaccataataaagtaagcccaaagagctgcaaaaaagaaaccaaaatccgaaaaccgaggtatatcatcaaaacatggttttcatcaggaaaagagtgagcaattacttttgttggttttcatataaattttctttgtggtaatttcagggaaggtgttcgtgtattggctaggcacagagcca

SEQ ID NO: 92124 - DNA, 777 bp, Eucalyptus grandis
  Intron number 2 from transcript Egrandis_v1_0.012142m (loc us Egrandis_v1_0.010765m.g) derived from phytozome v7.0 (c hr-ID scaffold_7; pos 44589376 to 44590152 reverse strand)
gctcctgtcgatctggatcgtcgtgctttgcacaggtaatgagcatatatggcattatcgttgtttataagcttccggccaacttttagttttttttctttttcttgggttcttttaacttactgagtaactgcacataacaacatcgcgaatttgcatgatatttcggagttaatttgtttgggataattcagttgttgatatgaagttaagcccatgacgatattgcatagtgatgaagagtatacctccagatgtttcctttcccttgtgtcgtcatagctatgacgttaattggttccataatttaatctttgacacttcgaaaagatgtgcttgtagttacataattactgacctgtgtcctgtcctttctctttccagcactgccaatatcatctctattcccattcctttacttcatggtaagttcatatgttacttcaacttttaagtatgacatatatatatgatatgttctgtctacacccgagcttaaattgtatggtttgagctttgttttctcagatgccgtctctctaggctcctggtcgattagtccttttttttttttgcaagtatgacgagtgtgcgcgaagtgaatagttgcttaagatggttaaacttgactaaaagttccattattttcctcggcagataattgtataaatgactcgaagcatatgatttagcctctccaacttgagaaatctcttattgtttcttgaattttgaatgacagattagagactttcatattgccaaaagagaggaaga

SEQ ID NO: 92125 - DNA, 552 bp, Eucalyptus grandis
  Intron number 1 from transcript Egrandis_v1_0.026321m (loc us Egrandis_v1_0.026321m.g) derived from phytozome v7.0 (c hr-ID scaffold_11; pos 29580332 to 29580883)
aagtgtttggcggaggcccaggtagccagcgaccgtatatacaagtacctctatactttatagggcatattgaagatttaatcgatggtgcatttgaattgattattgagttttttgagatctttccgaaagtccttgccgagcatgcactctcgtcctatattctcaggaaaagctactgatcaaagaatgatttagggccttttttcagtcgtcttatgtaaggttctcacataaatttgccgcataaaaccttgattatttcaggacaaggtttatcatacttgaatgttatcaatctatatccttaccttcatctcgatcagcggatcacattgaaaagcactcaatctgcctgagagtctggagggaagtatcagaggttgactaggtttttctcattagcctctccacaataagttgttccctccagcgtctttgctcctgttgtcctgcatcaaggtcttggatcctcgtgtatcgctccgtgattttttgccggcctttgaccatgcagtggcagatatattgctgtggaggaacagaaacgtc

SEQ ID NO: 92126 - DNA, 570 bp, Eucalyptus grandis
  Intron number 1 from transcript Egrandis_v1_0.017267m (loc us Egrandis_v1_0.017267m.g) derived from phytozome v7.0 (c hr-ID scaffold_7; pos 14719177 to 14719746)
gctgaggccggtgaccggccataagaaaaaaagaaaaatttaaaaagaaaaaaaattaaaaaaattaaaagaaattaaaaaagaacacaaatttaccaaacgtgtttttattctttttttatttccgggataatttttgaacagaaacacaaacaaatacatcctaagtgtctccatgtgatcttggaacacaggtcagttttgattgttttccggtacgtcgtgtccacatgttattccatggtctcgtcgttctttcacctgcctttccgttttgaagactattccgtgtttgtcatctatgcatctttatgtgttctttgtattgttagagatgcaatttgaacagtatcaatttagtcagagggccatattttcccctcatcatgcggtaggcgaagccaagaatcttttgtaccaaaagcatgctttggaatgtgtagaaaaactatggttgaattcgtagtttaatgaagactccaatgactatgagtgcttaattaatctagcatctttgcctacgttgacgtccatccttttaacaagtttgttattttacattcattgcag

SEQ ID NO: 92127 - DNA, 855 bp, Eucalyptus grandis
  Intron number 3 from transcript Egrandis_v1_0.023712m (loc us Egrandis_v1_0.023712m.g) derived from phytozome v7.0 (c hr-ID scaffold_2; pos 46765169 to 46766023 reverse strand)
ggtcattacacttctaaagtctatcgcttgcagaggtaagaattgctgatatcactgttcttaaattcttgatctgtactgtgttgctcaatcaaatcataggtttgagttgctgcactggtccttactattgcttctgttttctcactcgataatgatttctccattagttaacaatgccgctgcttggacagaatggtgaatgactggagaattgtggcatccccatattttgactcttgatttacataatctaatagtaccttccaactgtggtagtagtaccttaacattcaattagctttgtatcgatgttttggtattgctattcctctttcttaaaataggtatgattactctttccgggtttggttaaggagattcattcctaaaatgtttattgggtagagagaggttgtgattgttgtatctacttataaatcctttataaggttgatgggtacctatgaatttttatgtttcaatttagtcattccctttgtctttagtctttcacactgtcatgaatatggtaatctgagaatccaccctccccacttcttgttatttggaatttatctggtgcaatggaaccctggataagtaccatagtttagttcatggttatagagtattaaaacttctacttttggataggagtacttaattgcatttcttttccttattacgctctatcttgactttgatgttcagtgcttggtgccctctctctctctaattttgttgatctcatcgacatctcaagcttattgtgttctaccgcagtaacagtttccttcccttacacttgtttgtgcagcaaagttcctacttggttgactgcttttgcaccag

SEQ ID NO: 92128 - DNA, 365 bp, Eucalyptus grandis
  Intron number 1 from transcript Egrandis_v1_0.023712m (loc us Egrandis_v1_0.023712m.g) derived from phytozome v7.0 (c hr-ID scaffold_2; pos 46766248 to 46766612 reverse strand)
gttcagctcaaggaattgtatccttctctctgttttttcttccgatgagatttgaatttatttgaccattctcgtgccgatatcctttttctctttcgagttttcccggctgctgatgttgcttgtatggcgttcaattgaatcccccatagaactggaaaataagaggctttcggtcaaattactgccgtagcttgtgttcctgttttgctgtgccctttacgtccctcaattgacccaatgcctagggtggtttagttttttcaactacccatttgttgatgagatcgcgatcctttatagggttattcccttttgacgttactccttgacttctcgcctttccgcgatgaagccgaattgtc

SEQ ID NO: 92129 - DNA, 355 bp, Eucalyptus grandis
  Intron number 2 from transcript Egrandis_v1_0.017090m (loc us Egrandis_v1_0.017090m.g) derived from phytozome v7.0 (c hr-ID scaffold_7; pos 8430478 to 8430832)
ctgcggaagtacaggtgacatgttcttgataaccttgattttgatgttacgtgtcttggtgaaaaaaaatttcagcttttgattggtagcctatttgttgattcatttcaattttaggcagtctgacgcgagctattcatctgtttatgtaaagatacccttctggattaagccattcaagttacacgtgggcatagactttcaaacctttttgggcttgtcactaatatatcagaaacagaagatgcattcatggacattgcattactgcagtttctgtacatacaaagaatcttaccaaattgtaagctcgattgcaggtcaattgtgcatcaattgcgacgagtcgatccca

SEQ ID NO: 92130 - DNA, 982 bp, Eucalyptus grandis
  Intron number 2 from transcript Egrandis_v1_0.026281m (loc us Egrandis_v1_0.026281m.g) derived from phytozome v7.0 (c hr-ID scaffold_11; pos 908420 to 909401)
gggctcaaggtgggtctttctcttcttcttctttttttattcatttcgctttacattttggaagctggttgtgtgatttcgcccggttttggtttttgtagttgtgtgaaagtttgctgatttgtgtacgggcattcgctatttttcgttgggaggattaatttgaatcaggagggattgtttacgggcaaatgggatggtatgggggaattacgaggtgtgacctttggagtgtgtttagtttttgttgaggttgtgttgcggagttgattttttagatgaagttcttgaatcccaatggtctactctagtttaggtggagtaatggaagtgccatgtccacggaaatcatttttggtgtgggataatcctggtcattctttcatctccaaaagggtgttactgctgcgtatgttgattcaaattttgcattttcaacagatagcaataactgtgatgctacgtttatctgtttaactgaatatgcggatgtttgctactttaagttgtgggaaagactgggtgtggtgatggtctgtttcatttgatattttgtagttttagtgtgtaatccgttgatagagaggtttctgttttagttagaactcaactcagtaaaccacagatggatttcatgatctgaaacttttgcttttggattggtttggttagttcactgtatgcaaacatacaatcacaagtctcgaattccttttgggttggcagaaggctggttccttttggtttagtatgtgaatgaggaagttgtttgtgtggagtatcattggattttatgttttggctcaagtttattggtgcagttttttatctctgcaatgcatatactcgcagtctgcttgagctgtgcaggattttttactgaagcctctcgaaaattccaacaaaagtatatttctatttgattttgtcagctgctgcttttggatttaagaactcaaacaacatgaatgggcaggtgcaa

SEQ ID NO: 92131 - DNA, 337 bp, Eucalyptus grandis
  Intron number 2 from transcript Egrandis_v1_0.003364m (loc us Egrandis_v1_0.003364m.g) derived from phytozome v7.0 (c hr-ID scaffold_7; pos 36124015 to 36124351)
gtcgagtctccaagtcccacgcgcactcttccaaggtggtgcatggagctatatttttcatcacctaattgtttgatattagtggatttcaataaaaaaagaaaagaaaaagaaaaagtgctttgagtttctccatagtccttcttgaagtacgaatgcctccattttactataacggacctttgaacaattattgcatcatgttgatcacaaatatcaatagatagtggaaactttttttctccttgaataagcaggtatatttgtttttgcggttgaagtgataaataaatgatttacaggtgaattggcaaagaacgttgagtttggcatttca

SEQ ID NO: 92132 - DNA, 826 bp, Eucalyptus grandis
  Intron number 3 from transcript Egrandis_v1_0.049851m (loc us Egrandis_v1_0.049851m.g) derived from phytozome v7.0 (c hr-ID scaffold_58; pos 261648 to 262473)
ctgcagcatcgttggcgcttggaataaagacagaggtaaacttggtctttttgcttttcctagaatagatgttacggcaatattttctatttttaggagcttggtaatctttatacaataaacctttttcttattatggtgaccatatgaaccatattctattacatgttatttatttgcaggtttcttgtgttcttgttgatttttcgcatgccaatacatacacttgacaatgctcatagctttgggtaattgatatgagagtacactaaatgggactctgcaaaagatgaattatttttctcttggagatattttacatcaatatggtctgtagtctagtattggaagatgagaggtgaacttaatatgatcctttcattgtttatcattaaatggattgtcatattttattagagagaactgtctttcaaggttttgcgttgcttttgggaactttctatcttgtggcataatataggggcaacaattgatgcatgtcaagaaaaagcagtctattgctaatatggaatgacactgcatagggagttttgatttctcttggttcttatgtattgctttatgctagatgtttccaccatgacttcgtggtgttatcagtttatcctactacagaagttaagtaagtgtctaaaccgtttaaaaaattgatctcttttgctcctatccattggggtcctagtaagagttttttcccccgtatgtatggaatatgtgttctttttcatttttcctgcacttgcagttacgctcatatatgcgctccttcttatgatctcttgacagggtataaaggaagtctggt

SEQ ID NO: 92133 - DNA, 563 bp, Eucalyptus grandis
  Intron number 1 from transcript Egrandis_v1_0.016123m (loc us Egrandis_v1_0.016123m.g) derived from phytozome v7.0 (c hr-ID scaffold_2; pos 59157253 to 59157815 reverse strand)
gctgccacaccgctgcatcgacgcgccaaggtgaggcaaaagtcttgttttgaatttgattgtggtgtgtccgtgtgtctgtatttgatgggacgtgtcacctgaaaagttttgatcttctgcattgtttttgagttctaggtgttcaggaagttgtggtttgcattgtgagggtactgcatttggtgtctcgatacacgttttctttccgtgaggcagagtagatgtgtgcgaatggccttgtgtctttgtagacaggaatggaggagctctcagtgaggaaatcaatgggtatatgaaagttgaatttgatgtgatggagttgttataagtcttgttagcatcgataatctcaaatggatgtttaatagttaagacgaagcattgataaaatctgctcttcgtgtgctaatgtcccctttacaattgaagggaacatggcataaatactaaatttctgctcatgccttgaggtttgtatagcagcatatccctaattatcaggttttgcctagaagggcaatcagactgaccctgtttgtgacctgttgcaggtggttcgc

SEQ ID NO: 92134 - DNA, 1027 bp, Eucalyptus grandis
  Intron number 4 from transcript Egrandis_v1_0.040641m (loc us Egrandis_v1_0.040641m.g) derived from phytozome v7.0 (c hr-ID scaffold_11; pos 34832673 to 34833699 reverse strand )
tttacggttttttcctcaaggacatccacgttgcggtatgcatcgactttcggcaaatactagaaattacgctaaaaagtgttttctattacccaaagaaaaaagtttgttgcagagactacggtttagatatcgctttactttctgatatacattcattaacgcaagttgtgaagctagtacgagcatctagagagagtgaataagtgcgaaaacaaattttacagagtaaagtatataatgttgcttttaaaccaactctatttagcaatagattatgaaaaggaaattagactctaataatcaaatagaattacgatcaaagtaaaggagcttagggaagagaataagaacacaaggtttatagtggttcggcttaatctaagcctacgtctactcttttgcactgacagcccaccggctggatttcactaaaaatcaaaagagttgttacagtatagctcttccttaatttcacagtgtagagactttgctacacttcctcaaggtcccacagaagtataaactctctttacaagttttcgctcaacaattgaattgacaaagaacaaggagcttcatattttggaatttttctatcacgcacacactcgaataatttggaacatcttccttatatactcccccatgccttcatacccgttggcacttaccaaatgagctcttccaatctacccgttggacagaatcaattagggagatttcgagttatttaaggaatatgacgatagcccatcaatcttgctcgtccatacaatcatgatctaggtttccataagtagaatatttcaagtatgcttcatcaatcaacggatctaaattacccgaattgaaatcaaaacgaataacagattccaagatgctatatccagccgagagatcttcttcagttgatagaatcaaatctttaacgaaatactcagttctggataagtcttctttaacggtctagaaaatgtcaatgtgaatagaatttgagtcttaagtctggtggtttggcggtctt

SEQ ID NO: 92135 - DNA, 580 bp, Eucalyptus grandis
  Intron number 3 from transcript Egrandis_v1_0.017907m (loc us Egrandis_v1_0.017907m.g) derived from phytozome v7.0 (c hr-ID scaffold_2; pos 63324074 to 63324653 reverse strand)
ccagctttcactttcattctcgccattatttcaaggttcttttgtctcttctctctcgttatctgcagtgcacttaaagaaccttcattttataaaaaaatgagagaagcagatgatagtgtggtaattggatgatggggggttaattttacatgggttcagctcgaggttgcgagcgatttttatcaaaaatcaacagttcctgtttcaactaggtccggagagattcgctttgctaccacttaattcagttctcattttctgtgcatgtgtcctttcaatctcggcgcacttaaagaaccttcatttgaaaaataaaataaaaaaatgagagaagcaaatgatgttgtgttatttctgttgatgctggatccctaaaattcccaaaacgagagttgctctgcgaatgaatatgtccctgaaatggaacaaattcaagatagtccggtgcttcagcaagagaaggcagcagcacattcataggaaagacaagagacagcagcgcacaatgtgtcgtcgaagatgatcacaagatgaacttattctattctttggtttgttgatggaactgataattagg

SEQ ID NO: 92136 - DNA, 1035 bp, Eucalyptus grandis
  Intron number 2 from transcript Egrandis_v1_0.018410m (loc us Egrandis_v1_0.017999m.g) derived from phytozome v7.0 (c hr-ID scaffold_2; pos 17162577 to 17163611)
gacggataccgcgtccgagtctgcgctcctgattcgtaagttttcactgatcgcacaggctttttgactcgtgcactcgatgacgcggtccgtggaggtccttgtgttcgattttagccgtgagttttgcgcggcgcttggatgatcggaccgtaggaatctggtgcggagtctccgttcgagttttggtgtgtttgagtggcgtcgctctgttccggtgttcttcgagtccggcggtcttttcaacttgtgatgttcgagctgcttttgcttgatcttctggatatctgtgtatagaatttcagtgcacttcagctgaacgcgtaatttacgaatgatatgatgtcgaactgcgtaagaactcaggaaatgaaggaaaaagaaaatgatcggcctggaaatagtccgcataacgtatttgttaggaggatctggaacgcttatcagtgagggtaagtttgagcttctggtttttatttcgtccggcacagttttcggttgtccatactccatagagctgtacccttgttatccatcttttcttggtagatgcgaagaaaaaaaactcttcggtcctcggttcaatggaaattagcgctggacgttttgtcgggacaaaacccttctgttttgatagagagagagagagaaatcctcagggtcaaagttagttctctaaagtcttgatttcgaaactttggtagttgtttgtttctgatgaaagattctcttttgctctgtcaatgcatgaattggatcatagttgacatgcaggtacaaatctcgagcagcccacttttcattctttgcatggtagaggggtgttggggttgggagatggcgttgttaattttttcagaatatgcattcctttgcttgcaagcttcccacaggaattattttcattggcatgatttctatttcctttttgcagtccctttaaatttcaaatctttcatagatttaatggaatgcttttctcattctgagttacactgttggcagggaaaagtctgctgtcagtcatagcatcac

SEQ ID NO: 92137 - DNA, 948 bp, Eucalyptus grandis
  Intron number 1 from transcript Egrandis_v1_0.008766m (loc us Egrandis_v1_0.008766m.g) derived from phytozome v7.0 (c hr-ID scaffold_2; pos 52327240 to 52328187)
aagcggggctcctgatctcctctggaagcagacaggtagcttcttcttttagtcctctctcttgataggctgatttgccagagatgatcctcattttctatattgtcacgactcgggaaatcgtttcattttttttatttttcttttcttttcctttcatcttttttctggtttgattttagctacgtgcacatcgaaaagtactgtctgtgaattaggtggagtctaagaactgtagagatctgtgtatggaattgactttagctcgtatgattggagtgtccgaatgtggttgattatctagcgcgacattgggctggaattctcacttctagcaatgcatattttaaaaaactgaacagtttctaggtctgaacatattactggaaagatttttttattttcctggctttattgtccagtccttcgacaccctttaaacttttctcgcatttttcgcaccgttcgtttactataacaaggcagtgaggaacatgaagctatattcgtgttatctagtaaagggtaaaagcatatggaatgagcaatatgcagtatgatctgattggttctaatcttttactagttactttctttgtgatgggtaatttaaatgtaattcacatcatagatgaaaaacctcgaccgatttctatgataggactgaagttcctcaagctttagatgcgtggaacttacgcttttcattcattaggaaaccaccttggatcctgacggtttgatggccacataagcttgttgttaaagccatgatcacgtctgttttaatggttctgtgctggatgcctggtttcccatttcccctcttgaatctagttgaatcatttgtttatgcatagccagttgatcattgacattaacaagaagcactctcatacgaaggcatatactggtactgactcttggatggggatggcatacagaatc

SEQ ID NO: 92138 - DNA, 1050 bp, Eucalyptus grandis
  Intron number 1 from transcript Egrandis_v1_0.046536m (loc us Egrandis_v1_0.046536m.g) derived from phytozome v7.0 (c hr-ID scaffold_2; pos 30159306 to 30160355)
tttactgcgagagcgtcctggcctcggcccctcgcgtcgtccccggcgattccggcgattcgggtaggttaccgatggggcgatttgcgtcccgtctcgtatctgtgcagattgataattttgctgcttttttgtttagcttcacgctgtggttgaaattgtacttaacctgcctgttcttggatttcaaatgcgagttacgcgaaatccatttgcgggaatgtgtagttgggaaatccgtagtgcgaaattgaagttcgattctatgctttagtttaggaaaaggaaatgcgaagctggaaaatttgcgatctttttatttcggttcagtttgatggcaaaaaagcagttcatatgatttcttgtgctttatttgggaagatagtagcaatgtgtttccttaggcttaattctgctacaatttgatgtggatgttttgaaatgggattagagaatcctactccgaagggttaaaattgttgctgtttcgggtgtggtgatgcttgagtgaattttcagctctagatcatagtgatgtcgcttgtcctatgtttattagctttagtagaaggctagatttgaatccagtttgtgggtttagcttatttttattcagttccggccaatcttgaagagataatttgagcagatttgaggctgattcgatccgtgtatatctcattttaaggatgttcttgtcatagaaaatgatcactccttgaaacctgtctgactgtgcagcttagctttgttaatctaagttctttgaaatggttatcgttgtatgatatgtgctcaacctacttaattgataaatgtggttaagatggagtcaaatttatctttatttctcatggtttgaatacttaggatgcacctacattgtcaatactagaacaagttttgtcagaattcctggcaattgcatcgtgaattcaatcaaatgagtgaacagaatccaacattgacagcttactgttttctgctgttagggtgcactgaagctgtgcctgagctccaccttgctaatcgacttgacataaggtgaga

SEQ ID NO: 92139 - DNA, 558 bp, Eucalyptus grandis
  Intron number 1 from transcript Egrandis_v1_0.016998m (loc us Egrandis_v1_0.016998m.g) derived from phytozome v7.0 (c hr-ID scaffold_11; pos 1818307 to 1818864 reverse strand)
ttataggaagtggaatctggcagagttcatcagaggtacttcactcatctccaggtcttgttgctgattctcgattctttatttgcgctacgttcagtatttccttttttatggaattggggaagacgatgaagggccaaattcaagagtttttgagttacttctgatcataacggagattcttggcggggatctaaattggagtgatttaataatttccccctcaaagggcttttcccaggcattacaatgttttcagttgactccctacttttgagaaagtgctcgactcaaattttccaattagactcgtcagcatttaaaccaaaatattgtacctttgtctgaataattgtttctataaactgagttattttctatttccatgcttgcttgacagctttctttttgattcagtcagaaaaaaaattgcacacagcacggtgttttattttggtcctcggacctgctttagttggattaatcaactctattgatttatgatatagtatcaagagatcatgatcttactaaacacaaaattgtcctgattggcag

SEQ ID NO: 92140 - DNA, 688 bp, Eucalyptus grandis
  Intron number 3 from transcript Egrandis_v1_0.022530m (loc us Egrandis_v1_0.022530m.g) derived from phytozome v7.0 (c hr-ID scaffold_7; pos 24457172 to 24457859)
ccagcacgagtctggtttgtagttatttgtctcttggcttcttttcttgattacccctgaaaaacatgcagttaacagaacctctgctccacattttccaatcaaataattcttttttgaaagaatgatcaacattttatcttgtaattaacagatcttctctattacagtaatgaccatatcttaggggtcattagtgttgcttcattcattttttgataacttcactctaaatggcaaagtgggaatgtcacctaggctgctttttcaggtggctttggtggaaacattggacatgaatgaagtgttggccctctttgacaagttagatgttcttgacgtcaacaaagtgacagattgtatcctttggaatgaagtgtcctagtttaaaaaactcttaccatagatgcaagttcctcggtgttattttatgattttaagtttttgcatgagattaataaacttatcttaggctctgttttgcatgtaagaggtcagattatgttaactattcatatgttataaaattttgattacagttactatattgtgtgtgtattgctagtcaaacattgatgagggggttctctctatggagatccaagttgctatttttagataatctgcagtattaaatgctctacattgttatgcctgaactatgatttagacatcagagcactgcaga

SEQ ID NO: 92141 - DNA, 747 bp, Eucalyptus grandis
  Intron number 1 from transcript Egrandis_v1_0.001729m (loc us Egrandis_v1_0.001729m.g) derived from phytozome v7.0 (c hr-ID scaffold_7; pos 44978703 to 44979449 reverse strand)
aagcagttgttagcgtgttcgagcggataaagaaggtataagcttgtggatgtttcaaattgtttgcattgcttgttgaaatacttttaatatgcattgtcttgtttgttgatacactggatgatgttaatgacttccatgaaatattcagcagaaaagtgagattggtgtaaaatagttgcggattacacttgtttgaggttacatttatcttttgtagaagtgtaacttgcaggcatgggtgatcacctacggaacaactagaaattggaataatttgtatgtaccctttattagttcttggaggacatagaagaattctgggtcaaatttatataacttgtgtgataattgtgatgctctccaatttgtggtctttttacggttgaagatttgctcttagcagaagttttgactgctaaagtatgcttcattcaaccttgggtcattgagttagttcttatatcattgctccaaatggttgtccttcctggagaacctcctactctaggccctgcattctttcactgtaatattaccagatttaatcatactgacattcttattcctggatatggtgactgccttttgatgcttctcaactagtctttgtcatttatctgaagatctaattcctacaatagaatgacacttttacttactgagaagttccaactttgtcttatgagtacctcgtttcgcttatgctattcttcttgctagccatccagaagagagtttggcctg

SEQ ID NO: 92142 - DNA, 681 bp, Eucalyptus grandis
  Intron number 1 from transcript Egrandis_v1_0.039332m (loc us Egrandis_v1_0.039332m.g) derived from phytozome v7.0 (c hr-ID scaffold_2; pos 5299436 to 5300116)
tcagcagaagggccattttccggttgacttgtcaggtgcgccttctcatagtattggatgcaaaggagttcagtatctgtagctgtacgcgattaatatttgagaaacatgcggtgcttccgagaccccgtatcggcacgacaaaaacccaatatcacagattgtacgaagatgttgaggcgttcgcgttactcagtctagcggagattttttacttgtaagctcaacaaaaaccatcagaaaagaccaatgaaacctgctaaagaactgataaacatatgtgcacgcctagtccattgtcgcgtctttataatacgctaaagtccaaggaaaaaaaacctttaaagttcaaactccaaggcaaggccatcgtaattagagaaaggatcgcctttcgatgcgcagtaggtggtttgattataccgagattagatctgtgcacatgggtaatctttctaaatcggctatgggctgggttcgtgcacctggttgttttgatcgatctgtcgtcgacgatggcccgcaaagacgaaatctcctcaccacttctggactgagtgtaaggtcattttttcttgattcttgaatgggaaaacagtgattgattcgcccgttctctctctcttttttctctgtgtgttggcagagaggggagaagaagaagtggactacattccagga

SEQ ID NO: 92143 - DNA, 1017 bp, Eucalyptus grandis
  Intron number 2 from transcript Egrandis_v1_0.010860m (loc us Egrandis_v1_0.010860m.g) derived from phytozome v7.0 (c hr-ID scaffold_7; pos 21361848 to 21362864)
ggcctgcttccaaccatattcgctcaaaggtgagctagttcgtcaggtgtaccttttcagcatttggtaactgccgcatctggtcagtgtaaattgaagaagttcatgccaaattgtagctacaatgcttgaaaataatcctctgaagctacatgatctaataggaatcacaggttttgatggagtagtgcatttggcacgtttgcttagctttttgcctcaatgtaaggctgaaagcatgatgcatccttttgcctattatcatagttcctgtgccactattgaaaagtttctttccaccttaactttgtgctttctatggttaaatcatgattgtttcataaagcaacaagtaggacatcaattacatatagttgcctgcctaagtatgagagaaatttttgtcgagattccagcaataactgcgtcaaagcctgttctcttttttctgaacactttattagtatcttttgttcaaggggcatgcaaattctcagacatcagcaacatgaatgacctgtctagaagtggttactttttgtttttgggtgtaaagaatcggatcattagaaggttgatagcggatatatttccatgttctttcatgtgataatgttttctgcgtttttctgctgttgtatgttcttatgaataacaatgtagaatttaaatcttgcaaggaaagataattcttacaacaattaactataatatcaaatattgctgcagaacctctagaatataagctctgaaagagttgatattatattaatagccgagctgctagactgactaaattgttgtgctcctagattctacgtcaacattcctcatgagagttttcccaatgtttaatgcaactcctgtaacttgatttccagaatctgagtaaaaacaaaagtgaagctcctgaattgcttgatgttgccttcttttctcttggttaaaattgtgaacttctggttgtacctctccgtcaatatttttgctccttgaatgcattttccaggtcgaagt

SEQ ID NO: 92144 - DNA, 1011 bp, Eucalyptus grandis
  Intron number 1 from transcript Egrandis_v1_0.002646m (loc us Egrandis_v1_0.002646m.g) derived from phytozome v7.0 (c hr-ID scaffold_11; pos 15275879 to 15276889)
tttcctgataaaggttagtctctctatctctctctctctgtgtctgcgtttgtgtgtgcccgcatgatcagttcttggaaaatttgatgcttttagcaccgtggtgcttgatggggttgttgatcagctgatacggtggggaaatttgcattttttttttgctgggtttttcgttcttgattgatgttgcttggataaaatgaggttgaagaaaattgggttttgcctaaggaatcactgcgattaggttgtgagcttatagctcgagttcttctggtcaaggtaatggtggagctttgactttaggagtcggtggactttcgccgagtttcatcagctgcagagctgtgtctttagactgtagtgcttggtcttggtatatgatgtttcccgtatgcttattctctctgcaaagctaatcagattgccggcgttcaatgttgtcatctacattttgcggagtaaatcaatgaaaggggagggaaatgtataaagctgattagataggctagcgcgaaatttttcagtggaatatgatagtcttctgacaacattagtctaccatagcttcatggatcatgataggggatccagccggcgttgggctgtggttgatactgcacaaaatttagaactttagatggagacaattaagaaactgattatgtgcatgcagttatggattttttttttttgtcggcatataaaagattagttgctggtcttcatggagaggagcttccgtagtctttatcactggggttacttactgcttctagataggagctttcatgcgattacttattagatcatgcatgcgccctttgtatgtatgtagaattattggtttattggatacttttatgccttgtgactgctgttcaaatttttatatccctctttgaaaaatggtacatatgttctgatttgcatcttgtcattatatgcctctgttaattgattaagttcacttcagtcacaatcttatttttttgggcagtgtataaataa

SEQ ID NO: 92145 - DNA, 756 bp, Eucalyptus grandis
  Intron number 2 from transcript Egrandis_v1_0.002646m (loc us Egrandis_v1_0.002646m.g) derived from phytozome v7.0 (c hr-ID scaffold_11; pos 15276898 to 15277653)
acttccaaaggatttggtctctgattctcctaaaggtgtgattcctttctttcactgatgaagaaaagataaaagtttcatgcaagaattaacctgtgatatctgtggaccattatgttagtcctttgtccctttaccttttgatgccggttaaaacttcaaatgctgctgatttaggagaagtgggacatttgtcaactaagtttggtatgaccgtggatcataaaggatgtactattgctttttgcttgattactatgcagtagttaccatcaaagtactctattattataggactctaaacattcctgtaagaaaatctaaattaataaaagtttgtgattccagaagaaagaccaacatttgccatctaagaccaactttaacaatatctttgaggaaatgaattagcccttgtgattatggttgagctcttcttggttggtaagagtataatgatgtatgcagattccaccctccttgaacttgtcttaaaagatgtgtaattgagatgtgagaacaacattcttttctgccattatgagcatgcttctcaaattgatggtaacattaaaatggttaaagcataagattaaattgatgcagaccaacaaacatgctatagtctcatccaatgcacaatatagagttgctttgagtagtgctaggaggttttggttgactcaagtttgcacaatgatttttcctcatctttttgtaggtccatcggacattccatcagttaatatttcaagg

SEQ ID NO: 92146 - DNA, 1010 bp, Eucalyptus grandis
  Intron number 3 from transcript Egrandis_v1_0.032996m (loc us Egrandis_v1_0.032996m.g) derived from phytozome v7.0 (c hr-ID scaffold_7; pos 29266734 to 29267743 reverse strand)
ttatcaccccgtccatcctctctgatcgtctaagggtatgcctttatgttaatctaaattgtatttataattgtctatgtcttggtttaggcatctattatttccccttttctcattacatgatccatcacctagctttttttcttttatataatgagatgggaattgctatcaagcttgaacctttctggatgcgttctgatgaaaccttttattgatgcacttaggagaattatgcacatgtatgtaactgataggatgttgacagcaggatcttgctctgttaattctaacaaatgccttaaccttttagttttatacatggtggagttctcaagtagagttccatataataatattcattggcacggtttcttcaggtctattaaattaggaggatctgagtgtggaaagtttgttcccataggcaaatgatgatttaattagatctccctgttggctcacgtcctgtgtggaacaaattgttatttttcttggccttaatagcactcattcttaatcagcaagttttgtggtggcaagacatatttctgctaatatggataagttagtctttgttggagaatgaaattcactttttgagatttatactgtgaattccctcctggctcctctaagctgtcatattttcaaactcatcagtatttgcatcctttacatttaatttaagtaatttagaaccaaaaactccaatggaattagtctttgctgcatttgcaaatgattgattgtgtcgcttacatttgattgagttaagataacttttaactcatctgccttgatttaaaatgtgctctggtggttctgttgcatttggactcctgggtttttcatatccagtgttttgcatagaacaattagatacttcaacatgctatatagctaacatattcatcctctcattaatgagaggatcttgctggctgaactcctctcattactaattagtcatctctttgttatttatatactttatctggtgcagatta

SEQ ID NO: 92147 - DNA, 944 bp, Eucalyptus grandis
  Intron number 3 from transcript Egrandis_v1_0.053977m (loc us Egrandis_v1_0.053977m.g) derived from phytozome v7.0 (c hr-ID scaffold_2; pos 12535864 to 12536807 reverse strand)
agccaggtcctttttgagccatttttttgagtaattagtttgttgtttgtccttgaatttattggttgttctcacatcttgcattttgtttagatgggtgagttgatgcaacggaaggtaaataaagacagagattatgaataggataaataatggaaatagtaaaataaataattctttttgggccatagaccaccctggggcaaaactgggaggagatagatgtaaattcatgaatcactgtcgcccttcttttcattgatggctgtcttgttcatttgatgagatgcatatgaagaactcccagttttctttcttgccgaatgaagcagatgaattgttaccttaagcaatttcaccagatattacaaacttggcaggtctattatgaggacaattttccttggtaattggtttcgcatcatagatcagcaaaactgcggattgctttatttgatataaatgcttttgaagagcaaagaagtgtattcagtttatatgggatggtctggccaacttccataaactggcatagttgagcgatgctctccattgatatattagtaatgatggttcatcaagaagctcagctggactcatgttagttcagttgtattgtgcttatcacaaaccatggatttctttttgttaggcttgtactgggtttagatattacttatccaaaaaagactgttactaatcctaggctttatttcttcttatagaacatagtatgtgtggaaacacctagtagtgtccatatctggacctgctttgatgtttagaccattttaaatgacactgttactttcacccagctttgtttccttctttagaacatctcatgtatgtttgcagatttcttgtagtgtccaccactagagctacgtacttttctaattgtaacttcactttctttgactcgataatgcatgaacctcagc

SEQ ID NO: 92148 - DNA, 712 bp, Eucalyptus grandis
  Intron number 1 from transcript Egrandis_v1_0.022655m (loc us Egrandis_v1_0.022655m.g) derived from phytozome v7.0 (c hr-ID scaffold_7; pos 44692377 to 44693088 reverse strand)
ctctcgtgcccgcgagctcgtcgaggtgtggattttggatttccttccgctttacggagctccattttgttgttcccttcgatatttctgtttcgcgcgccaactgcttgatgaaaatcctcagtgtgtaaggaatcctgtttattgggaacttcgaattgctagtagggtagggttccatttcccatttcgctcccgacgtttcgtctcctttgggatctggttgtggaagtcgagatgtggagtggcccatgtgaaaaggtttgtaggctcgtcacgttgctaagcttgttcaaatgggttggttgggtaattggttgttctggattcgaatttttgtcggggatgttatgggaagagctatgatggacggacttagatcgcagttttcatgctaagctctgtaagagtatagttgcgtgatgaagtgcttcttgatgaataagagtgccctcacgattgactgatgatttgagatcgagcgtagcatgattagttttctctaaaatgcatgcttgggtagtgaagattgtgctatgtggcatctccagtttggttacttcgaaaattgcaatctcaaaatagcttagtggatcttgatcccgcttattttcccgttattcaatgtcgttttgagttttctgtggcttgatcttgtcgccatcgtgactatgcaggaagcacagatcttgtggaggtcctggcatatatc

SEQ ID NO: 92149 - DNA, 1016 bp, Eucalyptus grandis
  Intron number 3 from transcript Egrandis_v1_0.000119m (loc us Egrandis_v1_0.000119m.g) derived from phytozome v7.0 (c hr-ID scaffold_2; pos 2499762 to 2500777)
ctcgaatccgggagctatagtgctaatttcgaagagtatggagaacttctgcttgcctcatttactcattatctgtcttgattgcctagcataatgttttattacatgaactaccccatgatttcaaggatcatgggctttttgtaggatgtgactcgatcaataagaccagttaatcctaatatttataggatatcatgtttattcagagcaagactattggcttttggtaactactgcttacacaaaagataatgcctaatgaaatggattcttaatattggaatggcaaaaacacaaaaggtggcaatggaggatgcatcatcttgaccccttgaatcttcagaaagttagatgtatgccagtgacattgggtggctacaaaatccgaaagtaattcttcaccttctcaccaaaacatgaatatatatatatatatttcaaaaaatcataaaaaggtctatgtgaatctacccgacagaattgatatgttgtgaaagttttgggtgttcagggttgaaaaaggatatatatttttggtaagggttgaaaaaggatattgaagtgcatgagtcgcaagattttgattccgcacaaaggaaaaagtagaagacaatctagatgcgccttgaactgatgaatcaacaaagttggcaatttgtagtctgtgaaggtgaaagtcttccaatgtatgggcttttgtcaactgtgaagttccttttactcctcagctctcgatttcttatcctccatgaaaatgatagtaattatgaacgcttgttcttcgagattcccttgcttataatgtattttcttcgcgattgctctcttactgtcttttgtcatgaaattgcgaactgatgttactcctttatggctgcttgactagataattgatatcaagatggatctttcccctgcagttctagaatgggggcagggaatgtctggctctttcatgttactttcctgaggtggttgactatagtactttgtctgcaggttgggactcagat

SEQ ID NO: 92150 - DNA, 901 bp, Eucalyptus grandis
  Intron number 2 from transcript Egrandis_v1_0.027449m (loc us Egrandis_v1_0.027451m.g) derived from phytozome v7.0 (c hr-ID scaffold_7; pos 44894382 to 44895282 reverse strand)
aaactctttgaaccctccaggtacagattagactatttatcagttgtaggcacaatttaacatattgcgaaatcttctttgctcagcatatttgttttaaaaattattgtgcagacttgacaacttgctactcaaaggctcgtcatgcttgtccttgtgttacgcttgtgttgcatttatgatgtgtcaaaatggtttttctgcatagttgaccttttcacccctcggtggtggaatagtggaatcgtaaatgtactaagttccaaaattcaatcttctgttgcaagattttgttgctgttcaatgatgtcagttgactctacaatattcgcatagttgttatttgtgtttcttttggttttcttgcttatgtggaggaagtaggaactatgtggcacagtcatcctgttcaacctaccaatcacaaaatgaagttccgttattttatttcttttcaaggcgttatttgaattttctagctattttcgtcacttcttagaaaacccaatgtgatgccattgtacgctttttggtcggtacagcaactagccagtagccatgtgctagtggctttatgaattacactttgaactgttcaattgtttcatgtctgaaactggcaactgttccattgtccactgaattcataccaattttatctctagcatgcactcagggcaaactattctatatatagaaatatgtcatttgggatagcaaactatttcatagttgaggggaaaatctattcaaaagatcagtaaccaagctggaatatgcacatgaaagttgccagtaacttgagtcttaacaacctgcaacaaaagaaaatagttcaagctgatgatgacttcgtgcgatgcacttgacgaagagcaatgaacttcaggttaagcttgtc

SEQ ID NO: 92151 - DNA, 796 bp, Eucalyptus grandis
  Intron number 1 from transcript Egrandis_v1_0.030375m (loc us Egrandis_v1_0.030375m.g) derived from phytozome v7.0 (c hr-ID scaffold_11; pos 20465148 to 20465943)
gcgtacgtctttctctccctctcatgtctgcgcgcgcgcgcgcgcgagacgccttgcattagataaagctgaactgcacctccgttcgttgattctcggtctaattcgagaactggccgctgcaagagtaggaactaggaacatccttcttcagttttttcccgatcgcgtggcctccgtccacgttcgcgcatctcttgctctttggctgttccaagttccgtgattgatcgtcgcatatctcctttctcatgtgttcgcgaagtgggttgcctcgatcgtttgcgctggtgaatctttgtggtgtatggcgcgagggggcttattacacacgaatgttgtgcatgatcctggttcgagaaggaccctggggatctcatgtggagggtcttttgatatgtctaagtggggtgggtttgtttccctcgttgcttgtttcggttcatttgggaagttaggagggagtggaagttgtggacaccgctgaatatctttctagcgatgattgtcctttctcttgaagaatgtctgagtggtttgaagcatcatctcaggttgatgcttcaaaccatactagttatttatcctatactctgtttgcagattttgtgcaatcgcattgaagtttcttgatgattttggctccaggaatcatttatttgcgactgccgttgtctcttcttttatgtcaattacaattttctatcttttctttctttgtaattgctcatcactgtatctaaatttgctcttgtattcagtatcattgtggaccaaggaacccactcattgtcat

SEQ ID NO: 92152 - DNA, 897 bp, Eucalyptus grandis
  Intron number 1 from transcript Egrandis_v1_0.030180m (loc us Egrandis_v1_0.030180m.g) derived from phytozome v7.0 (c hr-ID scaffold_2; pos 5568933 to 5569829)
gtcgaggttctccgtcggctctctcccttcggcaggttcggcgcagtccccacggcctcgattccgtttcttcttttcgtcgtcgtcgtcgtcgtcgtcgtcgtcgtcgtcgttgtgaaattcgcgattcaattgcccttttttctggcttgcccctttgcgtgcgtgcgtgtccggttcggttcccgtgtgacctttgaggattcggtttggtggatcgaggatttttatgttttggggttggtctggccgaaaccctagctaaagtctcgcttttgctgtcggttgttggattgtggattttccgttggaaattttgttgtttggtgtttaaagttgtagtttgcttggagggtgttgctactcctcttcaaaggtttcgaatttcgtcagaatttaggtgggttaagccgtatggttttccgttttgggcttttgatgttgggattttgcttttccccagctggtaatctgctgctgagagggacttgttaggttgtgttcgttgtttcgcattggaaacgttgtcatctcatactaccctgagggttggagttgatgatagtcctttcagtcgtcctaaccactggccaccccgacctaattcgtgatgaacccaccaaagaactatggagttcagggttccacctgacatgaacccgtatagcgatagggatgaattgaatatagactctagctccactcaagcgtatctttcttcgggaataggtagctgttagaattgtagtagcagagtgactgacgaaatgaagacagaactttttagctcctttggatagcaacctgtggattttctaaattattgcctgcaacttctttttttgtttcgtttcgtttcattgaactgctatttggaattcatgggcagtgaccgcc

SEQ ID NO: 92153 - DNA, 958 bp, Eucalyptus grandis
  Intron number 1 from transcript Egrandis_v1_0.030590m (loc us Egrandis_v1_0.029236m.g) derived from phytozome v7.0 (c hr-ID scaffold_2; pos 4814861 to 4815818)
gttctgcttcgcagagatcaagaaaccctccgacggtatcgtcccagtcattctctctctcgctctaatttcgcgtgacttctctacttcggttctcccggttctttctctctctttctctttctcgttcttgttcttgttcttgttccctccttcgattggattccgactgcactaggcgcttgacatgtggctttcggctagtgtcttgtgtacgtctcgctataattgcctaacccatggcgtgagatttggaaactgctagtgggctgttctctttgtgtgggcgctcgtctttactgcgccaagtgttcggtgaaatgtctcaatcaaaaatgatgggaactactcacccgtcctccctggtccatttctgcgccctcttttccacgccttgtggttgaatgtcatgtcggtatggctggagaagttgcattaattggagctgaccgattctttgagttcggttgagtgtgtttaccagcgaagtaaaacatgcttcgtgttatggtggaagtttatgaaatcccattgatcttgacctgatcgtgcttccgtattaatttttgatgtggaaaactaggcacaacttaactattgttaacttgatttctctgggtggttagaagagttgagaagatactcatcatgaattgagtgcagcagatgacaatgtttgatggagcggggcacgattttgcaatgttcccatgaagtaccttccttgaagagttgaagtttaaaggaaaaaaagaacactttgattgatttcgcaaaattgtagtcttttagctgtctctttgagttctttgatgatggaattatttgaaaatgtttcgctttgtttctctttttcaaattgatatgtgagttctgttgtttgccgctgattggtttattatgatcatatgacttcttcttttatgtgttctcttatgcagccatctggtcaagatca

SEQ ID NO: 92154 - DNA, 612 bp, Eucalyptus grandis
  Intron number 2 from transcript Egrandis_v1_0.028072m (loc us Egrandis_v1_0.026436m.g) derived from phytozome v7.0 (c hr-ID scaffold_7; pos 50232260 to 50232871)
acggacggctctgctcggtcggcggcgacggcaatgtgagttcctgctttgcttttgtttttcggtccggcgagtggagatgagcgtgagtcgtgacagacgctgtggttcgccgacggaacgatgattagcgaggatttgttttggctgtctttgaggtcattttcagttaggacatccgttggcactaggaggatggaggagaggattgtgtttctgcagtctgtacatttttcattgactttgcacagaaatgttaaatcatctgttgcgcccgcacgatattatggcatggaaaggtgagaggacatgcgtcgatagaggagcaggtgaaagatgtgcaggataaaggagactgctggatttccctgttaaggcataggtttgaaggagtagagaacagtctctgagtggaaaagctgcacctgtcattatcgaaacactgtttgttgttaactgatgagatgtaatctattagcttttagctgatgttgttttttgcccttctttgagtggttatctggaaaaagatttcttatcgcacaccacacagtctctctattcttctgtttctcagattttctacttcgtttcaggcttacagtccatcag

SEQ ID NO: 92155 - DNA, 491 bp, Eucalyptus grandis
  Intron number 3 from transcript Egrandis_v1_0.053814m (loc us Egrandis_v1_0.053814m.g) derived from phytozome v7.0 (c hr-ID scaffold_2; pos 9357635 to 9358125 reverse strand)
ggggagttttttcggttttttcttcttgactaagttttcaaatctactattttgcttgatctttcatttctatgtgcggaggttggtatctgcattccacaagatccaatggttaaaatgtattgagtgaggctgaagctacaccatattcatagtaaaaattttcaaatgttggaccaaaacaacttgcttttctttgtgggattttcttgtgcacaggatcaaacaaaagaaagaaagaaagatagcttccgtgaatagtggtgctaaaatctgatgaagtgttgagttgaaatatgtaacattcatatatttgaattgtaatataattaactccatcatgctataggttttcattgtgacatgaccttatttattattagtataagcactataatgagtgtggatccaagcatggccatatatgcttcaattcgatacatatgcacgcttcaggccactttttgcctcacttgatattggctttgaag

SEQ ID NO: 92156 - DNA, 825 bp, Eucalyptus grandis
  Intron number 1 from transcript Egrandis_v1_0.007251m (loc us Egrandis_v1_0.007251m.g) derived from phytozome v7.0 (c hr-ID scaffold_7; pos 45020769 to 45021593 reverse strand)
gaagtcaccagctggcagtacaccggatatatctggtaccttttcttttgaaagaacaattttatgctcgaggtttttcttgagacctcccacactgtcggagttgttgtcccttctcagttaggcatcatgctgaaagcagcctcccaatgcttcctaatgccttttgcagattttctaaatttggatttaacttctaaagcatgtttgatgaaataggattcttagcgaccttttattcactagaaggttatagtctaatgatgactcatctattaggattacttgtgctctgctaatttccatagctggtttctcacataagtaatcttgtgtgattgtttcctacttcaagcggaatacgtcttggattagaatttccttatagtacacatatttgtgaaagtagttgcacttgcagtctcccatttataagttaatggaagtgattgggttttagcaattggttactcgtgaaatttgttcaaggtgaagaacttgtatttttccaggttctttaagaggttgtttggttttgctccaaaagaacaaaaaaagataacttgctttccatccagaataaaaaacgaagaaaatattatgagttttaaaatgttattagaaaattatatagggatatacacatcgattttttgtatgtttaaaaggtttcaggcattctattctatgtaaaagtgaagtatgaaagccctcgaaaaggaaagcataaaggaaatcctaaaaaaacaactgcaacaagtttttaaattttcctgaaactttgggattctgatgtttttgcttatcccattctaggtggatcag

SEQ ID NO: 92157 - DNA, 871 bp, Eucalyptus grandis
  Intron number 1 from transcript Egrandis_v1_0.037168m (loc us Egrandis_v1_0.037168m.g) derived from phytozome v7.0 (c hr-ID scaffold_2; pos 33983220 to 33984090)
tcctcctttgttgccgcaactagtcttgagaaacggtaggcgtctctctccttggcaattctcgctctctctctttggcgattctcgctttgtttttcatggctcccctttgccttttttttaatcagggtttgatttgtcgctcgattgagcggagagggttagtcgtagatcgtttgcgttttgctgttcgttcgatttcttcctgttgtagctcgtctcgtgtcgtttttgggggtgctctcacgttcgccatcgacgtacggaccgttcgtgctctcgcttcccgttcttcttaacaacaaatctgcaatttggggttccctgcaattcttctttcctcgtgggtttctccccctttgcggaatcgaagtagtgggtaacaggaaaaatgagattttggggtcgatagttcgtgtgtttcacaagtgtggtagaagcggttgcttgagaagattaccagtgtcacaaagcggtgggttctcaaatagtgccgtcaaatcctcgaacattctcgaactcgctcgaaatgctccccttaccttatctatgcatttgtacctgtctgtccccagcagagttttgggtgggctttttctcgaatatacgttttccagaatccattcttgaattttcatgcctttctattctcttgtacgaggttctttgaattgaaagatttagaagcaacgtatttttgttcacagttctctgggttctagcaatttcatgataagctctccatgttttgattgttttaaatttgctttgagatttattatgtgatgaataaaagttggggtttttttttgttggtgttttgcttctttttgtagggtggttgtgtttcagaagcgcacctgaagttcgg

SEQ ID NO: 92158 - DNA, 517 bp, Eucalyptus grandis
  Intron number 1 from transcript Egrandis_v1_0.052223m (loc us Egrandis_v1_0.052223m.g) derived from phytozome v7.0 (c hr-ID scaffold_11; pos 36876784 to 36877300)
aaggtgattgattgagtgtgaatttaacttggtggattggtcattgttattttaaatttactttcttttcacttatttgaattaaaaattttaaccttgactgatgtttaatgatatacaagaattggggtttttgatgtttgttttggatgtgatcccatatattgcatcatgtcatcagctgaaactgtagcttttgtttcgaatccttactagtaaaactggtttttgatcttgatgcaagtgcagcagaaacttgaaagactatattgcaatttgtggatggacagttttattgagcgcttaagaggcactttaaatagttcaaacctgtggaaattggacaaatcattgagaacaagattgtctatatttttaaaaaatgttctatctacctctgccattgtgttttttgctttgcttcaccacattttatagttaataagtttagttggatagttgttgattcctttcctttgtagggatttatcggtttaagtggagctatactgatcca

SEQ ID NO: 92159 - DNA, 1008 bp, Eucalyptus grandis
  Intron number 2 from transcript Egrandis_v1_0.011405m (loc us Egrandis_v1_0.011405m.g) derived from phytozome v7.0 (c hr-ID scaffold_2; pos 10035406 to 10036413 reverse strand)
cgatcggatacgatctctctcccgaggttaacgtcacctccgttttcgccctttcgaaagcattttgccgcatatcctgaattcaccttgaccttttgtgatccagccatagcttatgaagctggtgctactttctcttttatgttcctcccggtcgaattgatattagcaggtgtttttatgctctattgggtaggattctcgattatcatggatggtcctattaatttagtgttaagaaaattgaagcgcccacgtgatgtatggagactaatggaaattgactgaggcatggattggacatgacaaaatgaatttatgtacagaaggaggtcatgcttcgtgctctgtcgagcggttggtgtttctggattcattcaattttagctgattttatggctgttcagattgttgggtgattttgttttgcaaaagactgggttatactaaagctatctggccgttttgatcccattgattattaattgctcgtgatgtgttgttccatctctagagcagatgagtgttgcatgacaacttgctggaagcttgagtaagtagagaacatgatttggacttcaatcaccgattgaagtttccttgcttctgcggccaacagcatgtttgatggagtttattgcaagtgcttattgccttcttcctctaaagattttgtttttttttaatttcccatcaaagcagcattgactttgctgatattgtggcgagccagtcaaattttgcaatggctagtttgtcacatcttttatctttaaagaggattatttggaaacgtgatgatgctttgccaatttgatgggcgactattaatcactgctcctgataaaacttctgccattttctgctagaaattaattgtgggaatgtctacatttttttcagtacttgtgcaattaaaacgtgcaaaagccattttacagcatgtcatcgttctacttcaaaggacatcaatgattttgatttttccaggcctcgtttgcacggcac

SEQ ID NO: 92160 - DNA, 1019 bp, Eucalyptus grandis
  Intron number 1 from transcript Egrandis_v1_0.021348m (loc us Egrandis_v1_0.020833m.g) derived from phytozome v7.0 (c hr-ID scaffold_7; pos 20592237 to 20593255)
aggcggcgccgctccagattcgacagagagcccaggtaccctctctctctctatctctttccttctctgtgaagctggcattggtgggtcattgtcggtgcgggtcgaatgcgggagaaaaatggtgggtggctgtcttttttcggtgggaaagatgggtttcgtttgtgtcgcggagaacgaggtgttttggtgcgttttgccttgtgttgcgtcgagtgcgcacgcccggggttatggtttgttcttgggttggaggtggaatgtggtggtgatcatgggtctcgggttcggggtttcttcgatgagatgcggccgcctgctttgatgggtggcgctctttatggggaaaaaaaggcggcccgaccgactttgggtcggtgctccttgcgcattgttgcggtggaaattataggagctgcagtggatgtgttgtgggaatatagtgacctggttctgtttgaacgaggaggtaacctggtgactggagccatcggggtgatgaggcggtttgctcgagttcttcgcgttattgtatcttccctctcgaatggtttcatggccatttggcagttgtccgtgtttcgtaattgtgggttagaaaagaagagtacggaatctattggatttttggacaactatatagtttcttgcctggagagaatgtgtattcaccggtgcgcatacatttgtgtcagaaatttggtacgtggttttagttgagagctgtgaatggcaaactcaatactcagaaaatagctgggcccagtgatatcatcagcaacctcaagtgattgttttgtttttggttttagcaccctagattcttgttgagggatcgtttaatgtcttaatgcaatcttttcccctgagcaagactgattgaggcattgtatttggtggattatccatctagttccttttgcatctgttttttggtactaaatctgatagggcctcttgttttcacttctaactgattaattgttgggttcctagtcccaagaggtctaggcggg

SEQ ID NO: 92161 - DNA, 977 bp, Eucalyptus grandis
  Intron number 4 from transcript Egrandis_v1_0.031574m (loc us Egrandis_v1_0.031574m.g) derived from phytozome v7.0 (c hr-ID scaffold_7; pos 49807930 to 49808906 reverse strand)
accgtcagcctccgccgcgctacatcagacgtcgtgtatgctctccgatactgtttactgctattcttgtcgacctattctttttcttgtgcgttgtgtgtctcatgctgttttcctaattttagtttaaatgtcgtttgcttcgccttcatgtcttacattgtacctttcctgtaccttgcaagtcctgctggcttttattttgcttttctgttgtttagtctgttgactgataatttagtgtgatgtctgataaaataggaacacagaaaagagcttagtctgttggctggttggaggaaatgatcttgtcctttaataatattgagttttgaatagatttagctcttgccctttctcttcatcagaacatcaaattttttaacatgtacctgttgtttaccgttcaaataaagccgtgcccatagctttttccttggaaatatctaacccatatgtcttatctgtttgttaaattattgcttgatggagttttcatagtgcgatattttgggcacaatgtattttgtttctgatcaaaggttttacagcttttgattggtttataagcaccagctattgatattcctgctgatggcgacaattttttctggtgcttatgttctaatttgaaaggttttttcggtaattatcatcctatagagtgttctttagttttaagcttggtagataataggcctttagtgtaagatgatattgtagtatgtttctggtttgataaattgatttccatcaactcttccattgtaaatgattttctgtacaccaacagtgttcgcatgatttggccaaaattggaaagaaaaatttgttaactcgacagttttctcttccttgcttgattattctcttttggcaaacctattggactcatttggtattttattgtttttgcttatagtgatgcttcaggtatgctgggttttttcatttatgagtattttgtcttttgcagg

SEQ ID NO: 92162 - DNA, 650 bp, Eucalyptus grandis
  Intron number 4 from transcript Egrandis_v1_0.049086m (loc us Egrandis_v1_0.049086m.g) derived from phytozome v7.0 (c hr-ID scaffold_2; pos 10224303 to 10224952)
aagctacaaaagcttccccagtgggcatccctcttgtgagtatacgtgaaatgactggttttcttattgtgctcgtgtgaaaagataagaatgggttgatttgattctcgtatcgcggctttcttcaatcctgagttctcctcgaaaggccttctgaactggaacacctgaataggaaaacagcccgcactttttaatgcacacaagacttcgccctcttcgctgggccaccaattttcttagttttacttgacgcgagacttctaaacaattcttgtccagatgccaaagatcatgatactggaattagaaaaaaaaatggagcaatcttgatatatctgcaggtttttttttgctggaacgccagattggtttacaaatttgactcaggaattcacacaactcagtatggttcataacctttcagaaaaatgtcggtcaacgtgatgcggccaatgttgagaacagcttaactgcaattaaaatctctcaacaattctcaaactaatggcgaaatcagacagtaacctgagacaatcggttttcatagtcaacttttctttttattcttttgtttctatggtatgaccgtgcagaaggctcattgattgtccacatccagggtctttcgcaggtctcagttacctttc

SEQ ID NO: 92163 - DNA, 909 bp, Eucalyptus grandis
  Intron number 1 from transcript Egrandis_v1_0.025808m (loc us Egrandis_v1_0.025808m.g) derived from phytozome v7.0 (c hr-ID scaffold_2; pos 60163356 to 60164264)
tcctacgagtacgccgtccgcaggggctttgacatgtaagccccctctcttctcaaatggacaaaacttatctacaagaatctgtgctttttttttataggacgctgtgaaaatcacgcaacttcctaacatatggtcgattgccgtgtttttttcgtgaatcctcacaagtggatcgtgaacacggatatcatccactctactctcgagtttagtaaagtttgtatataagcgatgctcatagctaggcccgcatcaatcaatcaatatggtgaaaaatacagtcgctagaataatttagaacctatgcgaggtattcattcgtggtctgaaaaagtgaccaattaaacgggtgacttgtaggtttgggactgcagaaattccggctttgacttctccaagtttttgcgtttggaattcgactctttattcattcgttgttattacttgacttgaataacttttaaggacgttgaaactgtcttcactttaatcattgctcaaaacgatctccacataaaaatcatgggtcacggttggatggtgcaaaagtctacaccgttaagtaatttggggatggaaacttcaaatgggtttgcctaaacgagggaaattctctacactaaatccaagcataactgggttagcgagtaatttcgagaacggacttggcaagcatgtttggaacacagctttgcggatttaagggtacgcggtgatttcgcactgcagtcgccttcggaaattttgctcacgtcttacctaatccgtcggcatgataatgcatttgagcagtcgaataaattattctagcagatcatcagttctagtagatcacaaccgcttacaatgtctgactctttcgtttgtccagcctcttctcctacatccaaggcaacaacaagcaag

SEQ ID NO: 92164 - DNA, 616 bp, Eucalyptus grandis
  Intron number 2 from transcript Egrandis_v1_0.047747m (loc us Egrandis_v1_0.047747m.g) derived from phytozome v7.0 (c hr-ID scaffold_7; pos 13393383 to 13393998)
atcgaaacctatcgagtctacccaaaatcagacaggttcatctcctttcaaatttcacttgggtacagcataattcaattcatgcaaatgctaatttgctctggagtctagattatggattttgttttctgtggaagatgaatacaaggaaacatatactagtgcatcttgtctttgtgacctaggcttccaagagaagcgtgaaaattccatcatcaaagtgacaaatataagaaatcttttcaagtcaaattcaactgtcctcgatccgtctgtgtagtgttgtaacgttgattgttttgtcgcactgtgatgggttgtcaccatgatcatacattaatcacaaagaaaatgttctcgacatgttttcagttacttgtcattgcaagtcgtctgattgaaagtgatagcaaaatcgaaccacctgattgaaaaggttgaaagcccagctagatagacgttcatgtgactacgcataagatccactccatttgatagcttcctgaaggttatagaatcattgtttcttcttcgacaaaaatttatctgaatcaaactcctgaacattgttttcctatgcaatgcttcccaattttgagcagcccacattgttggt

SEQ ID NO: 92165 - DNA, 449 bp, Eucalyptus grandis
  Intron number 1 from transcript Egrandis_v1_0.052083m (loc us Egrandis_v1_0.052083m.g) derived from phytozome v7.0 (c hr-ID scaffold_2; pos 28530663 to 28531111 reverse strand)
atacaaaggtcatacacttgtgctctatctccttttctataccttatactctttatgccgttccagaaatgtcctttagatatcatgtatatttgtttagaatgcaccgataaaagaaaaaaagaagaagatgaaaccctaattttttatgcaaactaagtgtaccaggtagtaccttgcctcgtgtcattaaactaaacactaatgcctagagggttctaaaccttaaaagttttgaataatcttgccaaatcacttgagtagacgagttcagtaatcaaaatctaatccgtagccttgcttaactgagaaggcactagtcaacataagtctaaccattaataaaaaaaacctaattgctccatgatctcttgttgacgttgagatttaactagataagcaattgaagtttttattttccttctgttgtgtctcacaggcattccagg

SEQ ID NO: 92166 - DNA, 972 bp, Eucalyptus grandis
  Intron number 4 from transcript Egrandis_v1_0.028437m (loc us Egrandis_v1_0.028437m.g) derived from phytozome v7.0 (c hr-ID scaffold_7; pos 10546577 to 10547548 reverse strand)
tcctgctcgacaagacagagaatcttcaatctcaggtaagcaatctatgatgtgtgatttccatcctggagcaatgtcagcttatcttattaaacgaactaattattgtatgtaagaagtaggatctagtgttcagaaactgaatggccgctgcatcatgagtggtggttgagatgcaacaattagatcacaaacacatgtatattacagctgtagtcttcttccggtctcctgaactggtcgagctactagtacagcctacttattcgggtcatcggacaactgttgaaccagaagtatataagttttgcctatacgtgaactgcaattcttccctgttcaagtcttgaatgctcaattaagcagattacgtaacaaaaccgggacaggctgaatttgtgtcttcttctcgcactcatgcaagtgtttcatttcctcacatcacttcagcctagatgctttatcgagtgcaattgtcttctcatctagtttagcttctaaatagttcaagaactgatggacatgaacaaagttgggtattcccagttcaatatcctctgttcctattccttttctcattccttttgccgtatcataaagctttaggattgtactttctaacacccatcatttcctgaaattcagtgaatttcttgctgctgatctacttttgattctatgttgctagcttttgcatcaaataagagctcactaagaagtttcccactattataggaagtgtcatttgaaccttttaaaggtttaactgttacagctttccaatagtctgctttcatcttcccagtcttctcatacaaaatgtatggaaggagcaaaaattggtgattaacttggcgatagaacaaagactaccatctttctctatgattgaattaagaatctcggcatctaattgatgtgcattttctacttttaggcgcaagatttccggcagcaggcgacctgactcaa

SEQ ID NO: 92167 - DNA, 1016 bp, Eucalyptus grandis
  Intron number 2 from transcript Egrandis_v1_0.021176m (loc us Egrandis_v1_0.021176m.g) derived from phytozome v7.0 (c hr-ID scaffold_11; pos 35865944 to 35866959 reverse strand )
cttcatcactttgtaagtttctctatatttccttgcttgtttctactgttctgatgagcttggtttgttcagctacatatcattattgtcatgtatatgctgagatataaaaagattgtacttttgcgaggacgaactgaaaatccctccgaaaatatcggagatcgatttaactgcacgtgcacgcatttcttacgtggccacgactgtgtatttggcgtgtcttggcccgctatgggaatgttttgatggagaaagtgtggtaataatgatttatgacccgtattaatgcaaaattaagcgatattgaatttcaatgggaagttgatttttctgataacaatcactttcgtggggaggtgattgggttgcttcaccacttacatgtcctaatcaattcacggtgcaccttttcattatggaggggtggggatgttgttggggcttgttaagggcaagatgaaaagggtgggtggaagagggaaggagatgaatttctgccaaattttctggttttctttggtgctctgttcaaccagcaaaactttgcaattggaatctcttgattgtcggtgtttaatttctcttatcaagtacattgaaaacctgttatgaattatgacattctatattatgtattggcagcttgggttatgtgttttctgtccagattcctttagttgatccgccttatattcttgaactcctagtactgagtcaatgaccatttaagctgcacatttatacttttgtgccgtgtgttcctaatttgctcaaagctgcttcatgggcatgagaatcttgtgaatgattttgatgagcattatttggttggataaggatgaaaaggactaaccaaattggtgataggtcgattgatatcgacgataacttttacctgtatcttatgtagagttgagattgccatccctcaaaatgtttggaaatttcaaaatgggcatttctattgatttctgatactaataaggtcgatcacctttgcctgcaggatttaa

SEQ ID NO: 92168 - DNA, 592 bp, Eucalyptus grandis
  Intron number 1 from transcript Egrandis_v1_0.010337m (loc us Egrandis_v1_0.010337m.g) derived from phytozome v7.0 (c hr-ID scaffold_7; pos 27578919 to 27579510)
aagttgtggctgctggaaggaagagaaagagcccggtttgtttcctctgcatctttgggatttgtattattatttcttcgacatgaatatggtggaatcgatcctctgcttgtagttcaacccccaaattgctaaacatcatctgaaatgttacaaatctcctttgacgtgaacgattgaatcaaatcaaaatcatgatatgtatcaaaactccaagcactattatgttgtatgctgggtctgttaagtatcgatttgcttttccctaaaatttgagatttcatttaaatttgagaaaattgtgaaacgattacgtgtgaattcactaatcaacgtttgagtatcacgaaagttctgaaaattatggatcttaaaacagcaaaaatgcatgaattgcaagattcagttgcagtcagcttgctgcgttaggctcggctccattggaaccataaaactttgtttttctttttctttctttctttattgtttgtttttggccagaagcataagacttggtctggaacactatgtttactttaatttccttgattcgacaggaaccatcttctggaatcaatcgtgaagtattctt

SEQ ID NO: 92169 - DNA, 623 bp, Eucalyptus grandis
  Intron number 2 from transcript Egrandis_v1_0.018255m (loc us Egrandis_v1_0.018255m.g) derived from phytozome v7.0 (c hr-ID scaffold_123; pos 21068 to 21690 reverse strand)
accgtgttgacactcgggtccccattgaagtcactgtatggatcctcattaaacctttccctctcttgagactttctctgcgccatgtgatcagttgtaaactagattagtattgatgatgcatcgtcatggtgttagaagtttgtttgattttgtggaagagatttactactttcttttgcctttgacttgtaagataattgtcaactgagacttaaagaggttgtggaattcagtattttagtggctgagtttttgtcttcatggcatctcttgcaagttaaaggtcaacgggcacgaaaattatttgaaatgttcccttgagatgaaagtgctatggggttcatcctaatctacatgcgagaattacatcgaaagttgttcctgggctttgtgtggagacatttgattcctgacataccattgtgaaatgtgaaaaatacatggaatacttcttttgtttgccctctttagtgatatcttagagaaatctacctccgttaactcaatgcctagcaactttttttgtgctttgagatgcataaagattgactaatctttgttctgttatcatgtgaatattcaaagattggagagctaaagaaactcattgaagagggtaa

SEQ ID NO: 92170 - DNA, 764 bp, Eucalyptus grandis
  Intron number 1 from transcript Egrandis_v1_0.006278m (loc us Egrandis_v1_0.006278m.g) derived from phytozome v7.0 (c hr-ID scaffold_7; pos 13588120 to 13588883)
cacttgataaaccgcctttcttcttgatagaaaaggtacaatcgaagattacttcttttacttttatggtgaatattttgaagtgatgattaaggtcacaatcaagcatctcatacaagtaggtctacataggaagatgtaaactgtacgactcaccttcaatttatagaaatatttctacattgaaacatcacatgttcttcaattgttgaccgaacattcttgtcagatgtatcaaatgcatttttaatgatccccttttaataaagttttatgctaattccgatggtttagctctctcctaagtgccagatgaaaacacatggcatgtgtcgtgatcttagcatggtacaagtgtattgtctaatttgaatcctataaagattaccaaagttttgctaaaaatggaaagatgtgacgttattgttgacattaatcattgaaatttgtgcacgtgcaactgtaattgatgcataggttattttcacaagggatttatctttagaattgtgaacataaggagttacttaagctcaaatatggatccaagttgaatataaagattattgataatgtttatttgatgtaggcacatttcctattgaatcacgtgagactcaacattctataaatgtagttattgcgcgcaacatgcaagacttatatcatagtacatgaatgctcttttaactaagctggctttaaattatgatttgactattttctcagggcggattccctagtctccaagagttagaattgga

SEQ ID NO: 92171 - DNA, 811 bp, Eucalyptus grandis
  Intron number 1 from transcript Egrandis_v1_0.005002m (loc us Egrandis_v1_0.005002m.g) derived from phytozome v7.0 (c hr-ID scaffold_7; pos 49239415 to 49240225 reverse strand)
cgtggggtcctccaccagcgacgtgtgctcttcaggttctaatccttatcgcaatttttgaggactgaatttttatctagttatgtatttctgggtggcgcgtgagtgcgtcgattttctttggtggttgtgttttttctttttacaccgaaaaaaagtcactgtgcgtcatgtatctgacgccggcggtgtcggtcttgacgcggagtaatatttaatttgtgcagaattgtcgccaagtggtagttttttctttcctggtaaatgaaaagaaaaaatccatgctaaatttcgaaatcttgattctaatgcgagtgatgcttaatgaagtaatgctttctctatgcttttttatgctttgatgtgtgctggaactagaagaagtgttctctctttactcctttcttttggtaaaactgaatccttgtttgaagataagctttaagggtgatgatcatcgacctttttagtattgccgtgtaaagttggcattggaattgggaattttgatctcccccattgattcccgccaattccttttgagtgactgagtataacagccgcatttctgcccattttcgctgaattttcgtctgcagtatgcatttgctagagaaagtccttgatgctattaactggacgactatattggtgaacccgagattgctgcgacttggaaagactagttgctcaccaagcacctatctttttctttgaatcatctctttctgggttttggctgatgcaaatgttggtgttgtgacatcttgcgcgtcgcctcctgctgtgtttgcagagttcgtcaatccgt

SEQ ID NO: 92172 - DNA, 960 bp, Eucalyptus grandis
  Intron number 3 from transcript Egrandis_v1_0.013534m (loc us Egrandis_v1_0.013534m.g) derived from phytozome v7.0 (c hr-ID scaffold_11; pos 23912977 to 23913936)
actattctaggattaagggtacgttgattgcgactctgactatggctggttttttcagtctgctgttggaatctgattttgagatatgttggaatgagaaaacttctttcttttttgctactgcagtcctctaacatgtctaggatgaatttaggcacaaatatgtcctcgcaatcaatggtatttgtgttaataaagtttgcactcacaaattcagagtaatggctaatgagattcataacctgagaaatctggcttatgcttattgtgattcaggtgaaatacatccaccattattccttataagtgaaagcatgtcattgtctttgtggtgtacatcgtcaaagaccacagttgggttggcaatgcagtactttcatcaattctatcaaaaagaatattgaaggattatttgacttctcttgttgaactaagtatgactttagggaatcagagtgagagaaattactctgaagtttcttccgtgtacataattttgtgccaatttcaatcgcacatgcacttatatgcactttaaaagcacttggcaacagaaagcttggaaggaatggatcaacatttggacatttagaagtattggaaggaataaagattcatcatgtcaatactgtttgtgggacaaattgcaggattttagggactattatctaatgaacatagaagtgttgtcgtaatttgtttttttttttttttgtcatttcagcaaactggattgggtttctgctgaagcaaactgagagaacatgtttaggccttgttgttgcaatgctttctcaaaatatgctttaactttgctcttgtggttctggtgtcccatgtttctgatccaaagcgcagtaatctgttcatttattgcacctaagccagtgaaacaaggtatctttaacccgttactcctttttactgaagtcccatctgaacaaaatgcagagacggaac

SEQ ID NO: 92173 - DNA, 602 bp, Eucalyptus grandis
  Intron number 2 from transcript Egrandis_v1_0.015931m (loc us Egrandis_v1_0.015931m.g) derived from phytozome v7.0 (c hr-ID scaffold_2; pos 44269739 to 44270340)
agcatcccttcgtgtcctccgcgattttttctgaggtagcgctcgctcctggtcatgtcgcgtgggttttaggctgcttttttcgggaactctcgtatgtgacgccgtgctttctatttttgtcggaggagatctgttctttgtagtggctacattgtgctttcttgtcgcggtttttgtgagataccctcgagatttagatctgctggttattgtaacggtcgagagactgcagcccagtaatcagttcgccttcatactaaaaatttgtgctcgtcctctctctactttgtccgttagtcttcgatgaaactttgagcgttttctttttccgtgatcttcaaggcaaaatggacgatcttgtgcgagcttttatttattcttttgtttttgggggtttgaatttatatgcagagaggataatctcatggaatgtccaatttttttttttttttttttgaacagacatggaatgtccaatttaaacatagctattaatctttgcttttcggcagttacctaaactccgattgcgcggttgtctgattcgattttaatgcgtgggttctgttcaggtttccatccgtttgtattttcagaac

SEQ ID NO: 92174 - DNA, 433 bp, Eucalyptus grandis
  Intron number 1 from transcript Egrandis_v1_0.023606m (loc us Egrandis_v1_0.023606m.g) derived from phytozome v7.0 (c hr-ID scaffold_2; pos 61244092 to 61244524 reverse strand)
gttatcaccgatttgatcactgacattttggtcaggttagttagtttgtgatattggttcgcaggttatcgcgattttgattgccgtcctttgcatttagaagtgattttgttcttgtgcgtaggaagtattgaattggtttcgctttagtagatgtccattgtcgagtaggtcattcgatgaaaagcattttgtttgcgggatggtatgattagtaagttgatctaaacgatttcgagagttcagtagggatcatgactaagactagaataggcgattcgacctaaggtcctcatttcattgtgttttattggtaaaatgtgtggcttgatttgtcttctgtcattttggattctttcaatgtgattgcaaaatggttttgatgttgataacatcaggtatcaaggttcgttaccagacttattcagggaag

SEQ ID NO: 92175 - DNA, 534 bp, Eucalyptus grandis
  Intron number 4 from transcript Egrandis_v1_0.025679m (loc us Egrandis_v1_0.025679m.g) derived from phytozome v7.0 (c hr-ID scaffold_7; pos 40127976 to 40128509 reverse strand)
aagccccccgaagatcctgcactcaaggaattgaggtagtgcttggtcaatgtttatgtgcctacacatgtgtatgttatgcttcatccagaatctattttactaatcttctagggttaaccacttgtgttgcatttaatacaggctgtatgtactatattacttgtaagatttacatatgcaatcacgtatgatgttgaatttttatgatcattattgggatactgaattttttctatgtatttgtacttcccctattgatttcgataatgattatgtcccctagttagtatgcgtgctggtatttgaggcgcctcaattactgtctgatttgctacatacgtattgcaagctgcagtttaattggatatattgttttgtatttgtcaattttagtcttgagttcagaaatttcaagtatctgcccaacttcttcctttgtccagtttgatcttctcttaacctgtttgagctaactggacgaggtttctggccttaggttgttgaagcaggagcttcaaacctgtgcacaat

SEQ ID NO: 92176 - DNA, 1051 bp, Eucalyptus grandis
  Intron number 1 from transcript Egrandis_v1_0.023342m (loc us Egrandis_v1_0.023342m.g) derived from phytozome v7.0 (c hr-ID scaffold_2; pos 55715690 to 55716740 reverse strand)
ccattgatttcctcacgctgtgtcaccggctcaaggtacgcccgcgagactctcggtctcggctttgattcgttttgctctcgcgacgagtctgagggaaggtgaaatctaagttgtgaagcaattaggtcctctctatctcttcttcatcgcgattcgtcagtgtccgcaagtcttggagcatgagctgattttgcgaagaatgcgctttgtgctgtgctgactgcttctcgtatctgttcgtcgaaagttttgatttttgtgttccccttgtagaagtgggttgcgttatggttctggtccagctgactttgcgtgctcgatagaattcacgagtgaaattctagtcgtgaagtaggaaggactttggtctctcgtgttttatgattttgttgtgaaatgaagtgactgtggaaactcttgaagcatgagcttgcatctctcatatctgttttttccgaagtttaggttcttttgagcattagatttgcctttttattctgattttttgcacggctgagctgtgtggtttgctatgctccactttctttggtactttaccttgttgaagctagttcaatatgttccattgttcaaactttgaatgaggattttttgcacgtgactgtttcgtggtcatggtactttagtttgatctactgggtgggtgacatctaacttcaaggtagttgtgctgataacttgcgtttgcataccttgatcacacctacttctgctcttcagattgattgtaagttgacgtcgggcaaaatatctgccatgacattgcacttgtagtaggttctatgtggccaataacgtgagtttacacctgttgtgagtttacaccttgacagatttctgtgtatgtgtatttgggctctatgggatctcatcaattccaataaaaaaaattaaatgacagtgaaagcaaggggaacaagcattaagtaggaatttgtgacatgtttcgacaaagtatgttcagtagaaataattttttgctcttttcacagaccaccaaaaggaaagggtggatcaatcaagggat

SEQ ID NO: 92177 - DNA, 882 bp, Eucalyptus grandis
  Intron number 1 from transcript Egrandis_v1_0.009657m (loc us Egrandis_v1_0.009657m.g) derived from phytozome v7.0 (c hr-ID scaffold_2; pos 57581353 to 57582234 reverse strand)
gctctgacggctaacttcacttgcaggttgggcatagtggtcaagattaagttatctatctaattatactgatccatcttaacgacccacacccgatccaatccaaccaacccaacccgattaaaaactgattagcagtttttctcttcatatatggaaaatagcatattgaaaaacctaccgattaaaaactgattaaatatgaagaaattagcgaatagtaaattaccaaaaaatttgacaaatcaaactatgataagatctgttatttcttctggcgtgggaaattagaaaatgaagttgtttttatcatttatttaagaaaaagaaaactttctaatttaggaatgattgtggaatagcgtatgtaggagagagaatttcaattgtggaagtgatgaaattcgtcagttacgaactcttgaatatcgtaaggaatttggaccccgcaaaatccatgtctagttgggctttactaatgtaagcacataccgacttttttttttaaacttttcactaaaccacatataactcaacccactaaatttaagttaaaaagtgagtttttaaccgatctttccatctttagttactactcaaattcttcgaggtttgacaatatattgagcctggttctatgaactagagctcaacctgacagtgagttctatgttcgaacttgactatactcgataagattcagtgtcgcaagttacctgattgtttagctattatcaagttcagacttgattcaagtcaataccccaagccgaagcttgtctagcctgagagccaagcatgaatcgctcacaagaaattctgacttgattacacaccttacatgcagggtcgcatttgggaagccatttcaggggacggagt

SEQ ID NO: 92178 - DNA, 735 bp, Eucalyptus grandis
  Intron number 1 from transcript Egrandis_v1_0.019890m (loc us Egrandis_v1_0.019890m.g) derived from phytozome v7.0 (c hr-ID scaffold_7; pos 31851918 to 31852652)
ccgtccgaccgtccgtccgtccgtccgtccgtccggtacgcgcgatctattggttttctgaaaatcggcgcgctgaatatgatttgttgccttgaacgaccgcaattgtctgaattttcgatttcctcgctgttcctcgtttgtcgtgctgattggattgatgataggatgagatgacttccgtggctcgagtaatcccgcttgctttgcttgatttctttgtcccccttttctttttgtggattggattctctcctttactggtttggagtggaagatgaaggcggtcgccgagtttcgtggggttgaggtgtgtggcgcgagattgcggaatgcggacgctgattattgttgtgcttgggagattgaatcgagggattgaaattttagtatgagtggatttggagaattacgtctttgggtccttgggtaggtcaattttgtgatttgttgggctttaactagttttgaggtacagatgctgtctctctccacatggctgctcacatagaagaaagaaattttctgggataggaattctagtaaaatcttcaatgtcgttagtaaataatgatgcctcagaatacgtggttgatttgcagtttcctgatttttttttttttccggcacaattcagcttcccgatgtgcttcccagttttttggctattatttgagctttgtagtgttttatcttgtaggtgtgcttgaaggttcactactttgtgcaacagtc

SEQ ID NO: 92179 - DNA, 460 bp, Eucalyptus grandis
  Intron number 3 from transcript Egrandis_v1_0.019890m (loc us Egrandis_v1_0.019890m.g) derived from phytozome v7.0 (c hr-ID scaffold_7; pos 31853434 to 31853893)
catatcgctgttatcctgcatccttcattgaaaaggtcaggactaccttctatttgttgcaaacaatacggtgataaaattttcgttatattcaatatatagaatataatgtatgtaaatgatttcaaaggattagattatgtgatttttattgatagataaatagggaagagagaagtaggaaactgaacttagcgtgatcattttctggatgagctgattccattgtcgtaacctggaacttaccatgtcggagtcagttcttgatttcttggtatcagagtgacaatctatcctgctgatttaaattttcactcccaagtagatactggaactttttatctttcttgctgacctttttttccccctccttttaaagttatatgtttgtgagagttaatttttgatttttctttgatgtgcagccacaaattgaaagtggtgacaaaagtgagttttt

SEQ ID NO: 92180 - DNA, 927 bp, Eucalyptus grandis
  Intron number 1 from transcript Egrandis_v1_0.050694m (loc us Egrandis_v1_0.050694m.g) derived from phytozome v7.0 (c hr-ID scaffold_535; pos 3351 to 4277 reverse strand)
gcaaactatcatatcagagtaagtcctgatctctcatagcaaaactgggacataaaatgaatttttcatgtacatgtatgtccttgttatacattccaatatctaccattgtaattgaattgacttgtgatatcaataacaggtttgtgtaacctcgtaaaactagaagagttggatcttagcaataatagaattactagcgggcttcctatgtgctgacgaaacatgacatctattcgggttctatttcttgaagacaatgaattcacaaataatgtcgcctcatctcccctcactagtcttacctcactcgaattgctttccatttcgggtaattattttgatatcccctcatctctcggcccaattgcaaactattcaagacttaaagccctcttgcttgatgacaataaactaacaaccgattccaaagttgcgtctttgatcccgaggctccaattgaagttttttagtatgtcaaatagtctattgaaaggattcaaagtgacttctcttggctttctcaatcatcaatatgacctgagaaccattgatctctcctcaaatgacattctgggtcccttttctagcttggttgttggaaaacaacactaagctggaatatcttgttatggcaaataacttatttgcgacacttgaggttccactgatgacccttcgtaatcttttgtggatggacatgtccaacaatggcatgagaggaaaactcacgaactaatttgtttaaatgtcccaaatatgtacgacctttatctgtcggccaacagattggaagggaatattccatctgaactgggtagtataaaatccctctattacttagacctttcccacaacaatttctctgggggactacctatccaattactagatagaaactcatcattgtatagactcaacgtaaca

SEQ ID NO: 92181 - DNA, 759 bp, Eucalyptus grandis
  Intron number 2 from transcript Egrandis_v1_0.052487m (loc us Egrandis_v1_0.052487m.g) derived from phytozome v7.0 (c hr-ID scaffold_2; pos 32985531 to 32986289 reverse strand)
aaggtacctttagtgacattctccaactttcttctctctacccatttaatgtacaatttgagtccgcattaattgctttttagcctggttactagaagttctactttgagcatggtgccaccagtacgggctaaaaattacaaattctattgaaacatgaaatgttaaaaccatgaaatcggcttactggttagggaatgaaatagtgtgtctgatgtaggggcaaccagtgcgggttaataattatagactctattgaaaaatgaaatgttaaaaccatggaactggcttactggtcagggaatgaaatagcgtgtctgacgcaggggcaaccagtgcgggttaataattacaaattttattgaaacatgaaatgtcaaaagcatggcactggcttactggttagggaacggaatagtgtttctggcataggtgtaaacacgggtttgatccctacacaattagttcaatgatccctggtttgggccactcacctgatcttatgcttgcgtctcacttgatccattggattaatggggtaatttagtgtgcacaggttaccaatccactgcttgcttctcatggaaaaaggacttcgtgtgtagtccatttagtttatgagtaaccgctgaatatatattacattcttttgactgcggaattttttacaactctttgccacttctagaacttgtctcgatgataatcatgccttgtttactaggcaactgctatcaaaggacttaaaagaacccttcg

SEQ ID NO: 92182 - DNA, 1030 bp, Eucalyptus grandis
  Intron number 2 from transcript Egrandis_v1_0.010704m (loc us Egrandis_v1_0.010704m.g) derived from phytozome v7.0 (c hr-ID scaffold_7; pos 44605340 to 44606369 reverse strand)
caatatcatctttattcccattcctttacttcgtgagttcttgcattttagacttcaattttaaggatgatgtgtatattagtgctctgtctacacttcagatatagcgtcctacaaggaaaattatcaaaaaagtcctaaacaatttacaattatactagtttagtccttccgcaagtggctgggggagctccccctcgcccaacaacggctagggagtcctcacccctcgcccagtgacaacaaggcaagctctcgccccttgccaagcgatgatgaggtcagcccttgctagatccggtgagggggccccgtcgttgctgggtctggcgaggccagctctcgccacatccagcaggggctcgtcttgccagtggctgggcgagctggccctcgcccaacgacaacaaggggagctcctctggctaccttagtctggcaaatgacgagggttggccagtcgccatagccaaaggaagaaggagggagggagggagggagggagggaggaaaaaaaaaagagagaaagaaaggtaaaaaaagattaaaaattaataaaataatttgaaaaaaaatcattataaaatttgttgttggcgccggcttatggacggccaattttggccgaaagaactgaactagcacaattgtaaaaagtttaggactcaattggctaaaaaaataagtttatgactaaattggcacaattacaaaacgtttatgacttttttgataattctcccatgtcctacattgtatgattatcgttcctggttggttcatcttgaaagtttttgcttttgttacaaacgaaacaagtatatatgaagtgaacattcttttatcttattttgaggcataagagttagccattggaatgcattcccataggatggttaaactcgattaaaatttctgttactttcctcagcaaataataataaatgactagaagtatatgacctagccacttctactcaagaaatcttaatttgtttgttgaatttcgaacggcagattagagattttc

SEQ ID NO: 92183 - DNA, 744 bp, Eucalyptus grandis
  Intron number 1 from transcript Egrandis_v1_0.010904m (loc us Egrandis_v1_0.010904m.g) derived from phytozome v7.0 (c hr-ID scaffold_11; pos 6013179 to 6013922)
ggagtatcctcagcacaccaagaaaggtaagcacttttgagtttgttcaatttcttataaagaatagtaaggatgtcataacttttatacgatactcatttaagtactataactttttttaaaaaaaaaaatttaagtaccatattgaagtaaattcgatcaattaaatgtcgttttcggcaaatcgtcctagtaattttttaaaaaaaatttcatttcgacgtggattctttttatttttaaattttttttattaaccgtccaaattaacaatagcaatgtcacataagacgattggtattcatatcggattttctgacgagacaaattgctgatgactcttaagtgatcgaattcaaatttgtggcactcaagtaaataaaataaaaaaaaatgttatgacactcaagtgagtgttggacgaaagttatgatacttctaatgtacttatcccaaaatattgttagaatatatttggtcaaagacatatgaaattccacttaacgtgaaatggagctaagatcatgtagctagttcgatgttgttgtggtattttataagtaaaacaacgaatacatttttattcatttattaatttaaataattataattccgccagtaaatcttagtggattgaacttgatatactcaaatatcattgtttgattatgatctaaataagtgtcttttattttcttcagatttcacttgttacatattctatctcttttgcagatatcgcct

SEQ ID NO: 92184 - DNA, 821 bp, Eucalyptus grandis
  Intron number 2 from transcript Egrandis_v1_0.052640m (loc us Egrandis_v1_0.052640m.g) derived from phytozome v7.0 (c hr-ID scaffold_11; pos 23227012 to 23227832 reverse strand )
tgcttaatcgaatcttggtgaattgttcttcccaggttggttcttgactagaccttttgtataagcgtcgcctttggtttggtttcgctggtatcgcactgtgtgttttccttggctatacctagagtaagtgccatgttgtttgcttattcctcacctatttttttgtaatgattgataacatgaagaagctgcgctagtgcctactccttgaatgtagagtaatcagcttcggtgtaacgcgaggttgcaaaactttcgaagtcaggttattaggtactccgtccatagattcagatctcggggcaatgtccatattttcttctacttggctttttaatacgaaaaggatgagttatgtattaggaagtactattgaattttgtaagcaactcgtttgtggaagcttgatgagacttcacatttggacaagttttgcttatgttcataagaaagtctgttaagcaaaaatcagataaagcttatggtataatgagaaagatgactccatgctcacttttttcccctaggggccttgacgttaattgatggagaggcttaagcttgccggcatggcagatgtatgattggatatggtgttcctcatagtcttgtgaagagtaatatggttttacaattttttcttgcatcctgaacattttgaaggaatttatatcatcttggtttattctgggtgttcttcttttctctgtcctttttggggtcagtagtctggctgggggaaaagaggggaccatacgagcttctgctttgttagtgcttaatatgacatgaagtgccgtatttgcaggcaaaactgt

SEQ ID NO: 92185 - DNA, 747 bp, Eucalyptus grandis
  Intron number 2 from transcript Egrandis_v1_0.002552m (loc us Egrandis_v1_0.002552m.g) derived from phytozome v7.0 (c hr-ID scaffold_2; pos 62075128 to 62075874)
gtgaactgctttcttatttgcacgaacagttgcaggtatggtcatgccaatgtgtggtgctcttgcatcatcttctcatactacacatatcgagggtcttttgaatgactcaagcaatctgcttcaataagcaaggataagcatttttagcactgcgagggtccataataaagcagaaacccaatatagatagaaagatcccaaaaagaaaacatgtttaattcctattattcctgccattccccctgaatatgcagttgtggcacatattgttgtatttctctctagctcatagtgacagaatctaacgttggccacattgtccttagtcatgaaccttatatccttgtttttacctgtatctgttgtccatttcattttatccagttttgaaattattaaatgattttatgatcatctcctaataggaatgtagttgctattagctgatccctattggctgtaagctctctcatccttgctgggagtacctgttctcttactgatgctttgtcaatcttcttagatttactttcttttgctgcttcacttcccttagtttattgatcaccaggcaatgcaatcatatggaataaattatatcggaggagtacatgctccactgttctccaaaatataggattttttgaattttcagtctctctttgatattgtacttttgcctctgtgagtgagcatatctaagagattagttctttattgtaggttgcggatcctgctcattat

SEQ ID NO: 92186 - DNA, 486 bp, Eucalyptus grandis
  Intron number 1 from transcript Egrandis_v1_0.041917m (loc us Egrandis_v1_0.041917m.g) derived from phytozome v7.0 (c hr-ID scaffold_11; pos 3727138 to 3727623 reverse strand)
tttgctgacttgaaggagaaggttagggtgctattactttgcagtgttgtgattatgaaaaccacacacacagcacaatagaaacattaaagattcgtctcaagtgaatttattttcttcccctgattttagcccatttaggtaatttttttgtctggtatcatttaattggtatatactgatgattcctgacaaagggaaaaaatggcttgtactttatccaaagggataagcattatatcttgctaacatttcatgaggtaagctaactgcagcactccatattcatgatctctagtgattgaagttaagttgagtcaacatgacctagttgactctttaacattgagcaaatgacagcatcgacatattttcaattaaaatggtgattttgggccttaaaatattgcatttgtcgaccagacacttacctctgtttgattaaaaaaaaaaaaagttgacattagatgataacttggcagtggg

SEQ ID NO: 92187 - DNA, 771 bp, Eucalyptus grandis
  Intron number 1 from transcript Egrandis_v1_0.011342m (loc us Egrandis_v1_0.011342m.g) derived from phytozome v7.0 (c hr-ID scaffold_7; pos 36279708 to 36280478 reverse strand)
atgtccgtacaagctttgcgcaatattcgcctcgaaagttccttgaaacctcagagcgatttttccctggtgctttgatgggcaagaaaaggggagaaagaaacaagtagaagattttagtgcgtgggttcagatggatttgggagggagcacaaacagagcggtgggcgtggagatagcagaaggtagtttgagcaggaggaggagacacagtaccaatgacctgactgatttggtctgctcttggtctcttcacgacattctcaacgaaaacctcttccatgacaaggtttctttttattggtttctcatctttgcttttttcgttttatcaagccctgttggttttattctcgtggaagttcgatgagactggtttttacttgagaattttccaaatgatgctagttccttgcgctctactttttttttttcccttatgcttctagttagcctagcctaataaaaacctagctaagtatattaaaaatatcaaaaattatgtatgactttgatgtcaaaaatttctgtcgacttactttagagccaaatcataaaaaaaaaatgatcacttaagtgccttaagttataaattatggccaacatattacgtgacatttttatttaaaaaataattccaacatggattatgacatgactatactcttcataaacgacgccgtatgagaaataatccttcaatatgctcttccattttctgggaaaatttgcatagagaaggaaaaagagagggaaagaagaaaggaggga

SEQ ID NO: 92188 - DNA, 593 bp, Eucalyptus grandis
  Intron number 2 from transcript Egrandis_v1_0.020458m (loc us Egrandis_v1_0.020458m.g) derived from phytozome v7.0 (c hr-ID scaffold_7; pos 30755829 to 30756421)
tgattcaggccatcaagaaagctggctctatcaatgtaacatcttttcttttattccctttgatctttctttttgtttttctttaggtgggtttgacttttaagtaactagaaaaatcttatgtggtgacatcctctattaaacaaatgtcataagctagcccgaggaaacctgataacatgaactgattctgactaatgtgtgaaaagacggtgtagtatacctcaaagtcagcctttagattgatttcttgttttgatcccaaaatttggagatattattgaatagagacaattgcagattatgatgcaaacatggaaatgcaatgtagtttctgacttttgacccacataaatttttgtttctgactaactagtaggtactggatgaaatatgaatggctctactgggaagtaaaacgtgtctctgcatccttcttaaggcagtaatgtttaataccaaagaatgcattgttgtacattgttgggtgaagttgaatgcaaaatgctgaatcttttcttaatgtgaaatgaagaaagcttaattctcttgttgcagaggtttattccttcggaatttggtttggacccaga

SEQ ID NO: 92189 - DNA, 677 bp, Eucalyptus grandis
  Intron number 1 from transcript Egrandis_v1_0.018412m (loc us Egrandis_v1_0.018412m.g) derived from phytozome v7.0 (c hr-ID scaffold_7; pos 2149044 to 2149720)
tggccttgtaagtctccaataggggttgccgtgtgatgagcatacgaattgcaagcaaacgtgggaatgtattttgagaaaatgcaaaagttttttgaactaaaagggtttttttgaaattgaaatagtatttggtagagtgctttttaaaaatacattaaaaagcaatttgatgtaaatgccgttcatagtttataaaggatttttggtaaatttcaatgttataagaaacctcaaagctatggcacactaacctatggcaatttgaccttggtgttaatagaggagagcccgtgatctttttgcacgatcccaactcctttaatatcaagttgaacttcgcgtagaaacatgaaattgaaagaggaacttaggtaggtgcaatagattaattcctctttccatttctttagtacatttcgtacacgaggttttgggtcttttgagaggtcatcagcaatataacatatgaaaaaagaagaagaagaagatattaattatgatcaatttaacttattttgatttatttatatgaacgtcaaacccccccttactaaaacacataaatactaaaaaaaaaaaaaaaaaaagcaaatcagcagcaggcctcccaaaagcccagacacgggctttggcttgcagcaaaagattcgtctcctttcttctcctcctcttct

SEQ ID NO: 92190 - DNA, 988 bp, Eucalyptus grandis
  Intron number 1 from transcript Egrandis_v1_0.019461m (loc us Egrandis_v1_0.019461m.g) derived from phytozome v7.0 (c hr-ID scaffold_11; pos 28356188 to 28357175)
acgagtcctacggcggaggagccgccggtctcaaggtgcgaaacggtctgctctcgattcttggtgcggagatgttcatttctcgatgatctgaaggcggaaactctggctctccgtgcttccatctgagattccgcaggatttgtaatcctcgtgcatgctaaatcgcatgccgatgccaagaaaccggagactaaggaagagtcctcttgaatctgcttgaagataaatcattttcagcgttgtgattgcttagtccaacgttttgactagtctctttgattgagcttatgctgcaactgcttttgattgttactgggtgcatgaatgaggatccattgattcatcacaccctgttttggaaggaagaagataggtatcatagaacattatcaatgcacgagggtgaaaaggagcgctaatttagctgcaaaatactggtatagcaaggaatagggtacaaccctttagttattgtctgatgaatttcatgccataataagcatggagttctctattctggtgttgtgcttatccagtgatggatcgcaggggcttggggttgcacccaattgcttggtgcttcagtaaatttttaccaatatcaatggaactcataaataatagatatctcgcccctgagtttggtagtgcagaaccctttctttatctcttccttctgtgccatccactgcgtttatctagtttcctctgtgagcttcaaatagaaacttatgaaccttttcggttcattttggtcggagtgggactcgatctgattgcaattctgaatcaatacaactttcttttgttgttccttgttgtctgcattcgctttaaggaatgaatcctatagtatcatcagtgtcatgaatgtctccttcaatcttgttttcatgttttacagatgaggatgagcgatgctgttttccacttacgttctctctagttcttgtacctcattacctgttcttgtgcttcttgtagc

SEQ ID NO: 92191 - DNA, 461 bp, Eucalyptus grandis
  Intron number 2 from transcript Egrandis_v1_0.006648m (loc us Egrandis_v1_0.004320m.g) derived from phytozome v7.0 (c hr-ID scaffold_2; pos 24878070 to 24878530 reverse strand)
actctcctattcccatttctggtattgcattttctcttccctattttgtttcttggatgttgattatgatattgctgggcaagtgaaccgagggaataaattcttttgattgtatgcaagctggaatatctgctacgaacttggcaaaaaattcttatcatatatatttcttcgacaagaaatgacttggcagggttacttggtaattactttatttaaattttcatctttacctcttatgaagtaatttgttaaattagtatccttcttttatattttgagctcacgctgagatctgagaactgttgttattttatgttttctttcctcaatttctgtttagtcaatgacattttgtcccctgtttttcacgtactttttggattacctggaatatagtagaaggtttgcccactatctattgtgataattgaagtctcaacttaacattgcaggtttct

SEQ ID NO: 92192 - DNA, 744 bp, Eucalyptus grandis
  Intron number 1 from transcript Egrandis_v1_0.006648m (loc us Egrandis_v1_0.004320m.g) derived from phytozome v7.0 (c hr-ID scaffold_2; pos 24878799 to 24879542 reverse strand)
cccgccgagtcgtcggaaagattggcccggcagaggttgtcgattcttgtggttcttgttcgtcgacgcaatctttttacgctttttgttccatctcccacatgggttttgctgatttaaatctgagaagcttcatcgtcacgcactctattagcgctgttcgtcgtcaaaatcagttgttttatgtttcccgcatgttggactttcttgttgttggtgctgcagattgtgggttccgtggaattggatgcatgtgaagtagtgaacgtgcgtcttttgatcacatagagatgggttttagcttaatttcacggttgttgatctccaacgtgtttctgggttggcttgcaaagagagtttggaggttttgagtgtaggcgaaagtccagtttcattgcgatctaatctggggaacttcatcgagattcgtcttgtgaagagagtgctaatcttgcctgaatgttacccttttcgttgagttgagcattgtgtgttgaatcaaaagttttgcttttgatatttgttagggcgtgcccccaggcacttgttaaatagccaattgaggaaacgtttttcctaatccactgttcccatggtattctgtgtaatcaaaaccttgaaaactgaattattccatgttgaataatcatatttagtgccttgggcagttcggtgattctttgttctgatacggtttatccatgatcaggtgtctctggcttgaaatttgttgtgtcttggata

SEQ ID NO: 92193 - DNA, 807 bp, Eucalyptus grandis
  Intron number 2 from transcript Egrandis_v1_0.029968m (loc us Egrandis_v1_0.029968m.g) derived from phytozome v7.0 (c hr-ID scaffold_2; pos 8452520 to 8453326)
cgtcgctccccaaaggtcggttcttttttcctttctttctttctttcttccctatttttcttcgcctgtgtgtttgacggatttctagcgtgttggttagtgagtgatggtgctttgcgtctctaatttgggggttgattggctgaactggggtttcgttcttttctcgttgcttgattggcttagtcagtgagagtgacctttttttttttttttggggggggggggggaactgcatggagtttgtccttgcagttttcttctatcatgcgaaatggaagtaagcgcggtggcggtggcggtggcggttttttttcttttctttttggggatattgagcacactgtgtttgaagaacccttaggcaggcaaagtcattgggttggtcccttgtgttaaatcttgaaacagcatgagatagtcagatttctgcaaattattgagccagagttttatttagaccttactttaatacctcttttgccagagttttatgtcgatacacgtccacttactgcaagcgtagccacgggaagcccgtgacaccagtagtttagccagttctaatgcactagttgattataaggaacgattgtgtggggaccaatccttgcagatgaagcaaaaatttggcggccgggaggtcatgcatatgtgtaaaactttgctatggggtgcttcataacacttacagcagtttgaaatattttgattgagcatgtggtgttatacttgtcaaattggtgtgttactaatgctctacttagtactaaagcagtctgtttgtttatcgtttttgcagcaact

SEQ ID NO: 92194 - DNA, 667 bp, Eucalyptus grandis
  Intron number 3 from transcript Egrandis_v1_0.029968m (loc us Egrandis_v1_0.029968m.g) derived from phytozome v7.0 (c hr-ID scaffold_2; pos 8453382 to 8454048)
ctcaagatctattaatcgagtgttgtgtaggtaagaaatagctgctttgattgaatatgatttaatggcaagcataaattagtcatagatcgtcttgagttgagctggtacttcactgctttccaatggatggcagaaaaagttatttgatcataataatcgatggatattgctagtaaatttttgccccgtatttataaaagatatagttctatgtgctctatactctagcttttgggtttcaggtactatattgttaaggggtcaatatttccaatgggatagtggttcatttgcatgatccctatttttcttcccagaggttgatctggtgcatttggtatatttgagacaagattggctttatactggggctcttttgccaactatacttttatgtccatctttgtttcttgataggttaaccatacattatccctctgaaacagctgttgtatagggagttgtgcatatatacaaaggtttttgctaagttgacttgttgcaatgttttcatatgatttgcctttctcctgccctcactggaccttagctattgcgttccttcttttaaaattttttacaatatcctggttgccttgtatctgacatcttttccttttaatgtactcttcagagttcataaacctggtgtcatctgaatcga

SEQ ID NO: 92195 - DNA, 1055 bp, Eucalyptus grandis
  Intron number 1 from transcript Egrandis_v1_0.034712m (loc us Egrandis_v1_0.034712m.g) derived from phytozome v7.0 (c hr-ID scaffold_2; pos 39484609 to 39485663 reverse strand)
tcgatactgtcttcaaggttttccaaaagccaaaggtgtgccaacttctattttgttcactgatatattaggagaacacactgctgtaatttcttttctccaacctgtaagcttagaaaattatgttgttgcactagctttgctgaaacagttaactttttgttggtcactgccgtgagtggaacctttattgtgctattagaatccaactagatgccttaagtagttactggaaccttagataaggtttcttcctgctttgtctgcataaggtacctggactatgcataagatactattggcacagttaacaaggtgttggcatgcttttctatgagttaagcatggggcaattgcgttgatcaatgtagatggctatctttgtttgaatataccttctaatgtgaatatctttatcaatatattgcttggattttgtcagagaatgtggcaaactgattgggatttatatggccagtatattgttattcggtgtactgaatggatgttttgcttacgttctcttgttgctataacttgtaaatcttggtttgaattgtatctggggaagtgctgaagtcattatgtctcgaaaattactgaattatttgatatcttgaacttgacagttgcatctgcaattaggtctctagttctccatgattgaggaaaagaatagttctgcttgtgtctgatgatctagaatcaattgcttgccatatttatgtggaccttgaaatgtttttagtagaccttcgcgtgtgttgggtattaaactaatctggtaaacctgtattctgttgctctatcatcagtatggtgtaagtacgctatgccaatatatttagtccttgatgatctcatgttgtggagtataatagtaggattttcgcagtgatgtcgcattctcttattctaatatactaatttgtaaccgttggcttgtttagaatcggatgcaactcttccgcatcgcaagcactatttgtgcctcaaagaactgggcattgaagatgtttttgggttgatcaagaggatagtttgcttacggcaac

SEQ ID NO: 92196 - DNA, 723 bp, Eucalyptus grandis
  Intron number 1 from transcript Egrandis_v1_0.016661m (loc us Egrandis_v1_0.016661m.g) derived from phytozome v7.0 (c hr-ID scaffold_7; pos 10843256 to 10843978)
aagccatcagcgagtaagattcgtttgcttttctcttgatagtcagtaagttattctcgctatactcattttatgggggaaagtgcaaccgctgatctcccatgcgatgtcattttcaagttttgacggcacttctgagcgttgaattgtgtagttagaattagcaacacttgggctagccatacatatgcagaacttgttgtcaatttgattgacataaggggcatttaaacagacatgacaaatgtttacccaattgctaaaagtgcctgatcttcatatttcgaattggagtcctagcatgatttcaaattggagtcctagcatgattgctgtggtacttattgaagaccgttcttgattattgaacagattgatgaagtaaagatttagtatctcagaaatagcgtatgtttagttgttcttcattgtttttctgcaactttactagcttgaatagcgtgcaattcttttcttctttttttctttctgatgaatggaaggtgtgataaatcagtatgtatgggaaacacccgtagaaatgttagatgattctaaattcaaatgctgaaagctaaggaactatttcagtgatattaatgagaatagttcttttcttttcatctccttttctttataagaattggtttttgttctatttctctctcatgcttctctgtttccacagcgaaggattcttttttgctgtcaaggaggtttcct

SEQ ID NO: 92197 - DNA, 669 bp, Eucalyptus grandis
  Intron number 1 from transcript Egrandis_v1_0.049500m (loc us Egrandis_v1_0.049500m.g) derived from phytozome v7.0 (c hr-ID scaffold_7; pos 21016142 to 21016810)
aaaaccgattcaatctgaactcaactccagaaaaggtaagctatttcaaaccctaattaataaagtccggagacgaaccgggtcgatgaaaaatccaaaggtgaccaaattcggatataaaaagaataaaataaattgaaaaaagctagagactccgattcaagaaaagaaggaataatgagcaccaagacttaacccatgattattaatataaccttgacatttaagtcaaaatacaatttacattaacaatggccatattgtactgtcgaaatagttcaaatggcgtgttttacggtcgacacatgtaaattttgggatgtttgactaacatgcttcatgttaaaagagggagaaggttggtttgaatattttagtttcataattagaatgaatctttcaagaaaaatgtaggcgatgcttcgaaaggcgtgaatatgtccaaaaaattgtttatttactacgaaaggatcgactgcttctaacacacaggtcaacctctcacgtaccactattttctataatattggatcttaaattagaatagatggacggtattcctaagtttgagaatataatattattgatcttttcttcatcttttactcgtgcgaataactagtcacatctttagttgctgacaacttgcagacttgaagctgacttcat

SEQ ID NO: 92198 - DNA, 915 bp, Eucalyptus grandis
  Intron number 2 from transcript Egrandis_v1_0.018443m (loc us Egrandis_v1_0.018443m.g) derived from phytozome v7.0 (c hr-ID scaffold_7; pos 34771801 to 34772715 reverse strand)
gcaggttagtgtagcacatcttttgacccaaaaaaagaaaagaaaaagtatagcacatctgaattagcttatgtactttctgtttcagcaagactttccgaggcaccgttttggctcaattaattattttggcatacgaactcgatgcatggccacctaggacataatgttttgtagagtttcagcataaaggttatttagtattggtcttgctcaatttccttcttgtcttaagccatgggacttggagaaaaataccagataaatcctttagctccatctttattaaaagacacgataaaagtaaagaacctactatcttttctcaataaaagtgcataattttgttttgggccttgactatgtctatgtccatcctatctgcttctgttgtaatttgagagagtttcctttagattcacaaggtatatatggtcaagcctaataatttttaggataaaaaatagtttttttcttaaacagtcatctgtttattgtaactggaaatcttgggtatgccagcctgattctaatcaggatcaataaattttgaaaagaaaacatcccaaattgagatctttttggaggtccgagggattagaattggccattaggattttgccaaatgtcgtcttcactttccagattgagaatttgtgagtaaactgtatatattaaaggtaccaagattttagaatgtttttctttttatttgctccaccttgatgtagtgaatttctgttcatccttcatgcatggttgtaggccacttgccaaggtgggcaaattctctgtcgtttctttatctatcagttttcttgttgaggtttctgtgtcttcccacaattttgctaacattatcctgtgccctatgtatcagggaatcacttgttggagcattggagatctactggg

SEQ ID NO: 92199 - DNA, 592 bp, Eucalyptus grandis; identical to SEQ ID NO: 90664
  Intron number 2 from transcript Egrandis_v1_0.024027m (loc us Egrandis_v1_0.024027m.g) derived from phytozome v7.0 (c hr-ID scaffold_7; pos 18464616 to 18465207 reverse strand)

SEQ ID NO: 92200 - DNA, 497 bp, Eucalyptus grandis
  Intron number 2 from transcript Egrandis_v1_0.031098m (loc us Egrandis_v1_0.031098m.g) derived from phytozome v7.0 (c hr-ID scaffold_7; pos 4957171 to 4957667)
caaaggagatacttgcctcaagtgtttggtggaaggtacttttgctctgtcttgtaactatatgtgttgggataatcatgaactcataagtttgtaccactgctcggatggacagttcccttcattattagggattattgccttgaacattgttgtttctgataattgtctcatggttattcttcagattttgtcatcccataacattagctagggtcttttgttgtttttaactctatattatcagggcgtgtgtccataagatgttgaagatgctttatgtttggatcatcttatagcctttgagctccttaaattccttccccttggtttgatcaatttgcttttcaatggctgatgcttctgtaggaatagcttgaaccaattttatgtagtgggcctctatcaccaagagtttgccatcccaaatcgattttttgagattttttgttcatttttcaggaggaataataaaagttcccgagctgcttttgctg

SEQ ID NO: 92201 - DNA, 1011 bp, Eucalyptus grandis
  Intron number 1 from transcript Egrandis_v1_0.041839m (loc us Egrandis_v1_0.041839m.g) derived from phytozome v7.0 (c hr-ID scaffold_11; pos 38512016 to 38513026 reverse strand )
gaaggacaacttgatctttaccttgagatccgtacgagagagcgatttctaggctaagttcatcaatgaaaatgtaatcaatctcatctcaaaattaagcttgatgtgctctgtaatgtattgataggttgtgtgttgacaattaatatgcaaaagttgaagtgaacaccagaggtttaatgagccaagcagagttaagagctggaagacattattagttcattgcgggataaacggggttgactttgactggtgtggaagacattgaaaagtgcgagattgaaaactgtggagtatgttaggctaagctgaatcttaggctcgattacttggtagtgcctgtatttgctgggtatacatctgggtttttgaaagactaagcttttgaaaagtcaataagtatgtctaaaatttctataatcaaatcctttacttgtctgagcaacactgatcctacactaaagcttgctctagagcacatgggcatatctcatttccaatccctaagattgtaatttaatattcatgagcgactgactgaatttatcatccctttttaatgtctggactagtgattgtcttaaaagtaacccaatgcatctagtcttaaagggaaaaagaagatgcacgttcttcaaatcatgaacataattgagaagccaggaaatcatatcaggagtcgtaaaccccgatgataaaatggtaatagagtcattattgacaatctcgaaagaaccatattgcatttgcataagattcaagattatattgcacaaaagagaaaaagtcaaggatttattgcattatgggtacaaacataattacggctcaaatttttgttgcaatcttcctttcaatgataataataatttctgactttgatcaccgctagagtctaagtctttgagttctttgagttacaattggtgaccacaacctctctagcaagatatcgtgatcagtagatcatttcaccataaaaaaatttgttctttccactgtaaacagtgc

SEQ ID NO: 92202 - DNA, 766 bp, Eucalyptus grandis
  Intron number 1 from transcript Egrandis_v1_0.021729m (loc us Egrandis_v1_0.020554m.g) derived from phytozome v7.0 (c hr-ID scaffold_2; pos 20321405 to 20322170 reverse strand)
aaggtttcaagagcttaagcgtgaacctagtccatgtgagtagttattcccgtgtgatttggtcgtttcccacatttggtgccgctttgaggaatcgaagcgtcccttgccatttgatcatgctcggaattctgagaaatgtctttaaccagtagcatcggagtcgattttcatctttatctttcacaagatcgagttgatggagtcatgtcacaattcggcgttgctttttatcttctctgatatttcggcctcgtaagttggcgaaaccagaaacaatctccctctcgtctttcacactgactggcgaatctccttagcttcgcatgctgaaacgaacgtgtacatttttagacaaatcttgtaaaagtttccatttttaggcaaatattatgaaaatttccatatgtttcgtactgtgtagatgaatttttatacagaagtacatgtggctgatctgtaattcagatgtcattgcaaataccttgttgtaacctttcaaaagattggtaggtaatgcatggacaagaattctgtggatagcagcttttttttttttttcaaatttctcataacactttttctcgtctggtgaaggtattgaagtcttatctacatcagatttcgtatttctcctttttcatagtcgtcctactggccaaaattggatcggttgatgattgctcactttattgattgtttttccatgctcttggttatttgattctcagggagacatatacgatcaaaagagtctgttgagtgc

SEQ ID NO: 92203 - DNA, 316 bp, Eucalyptus grandis
  Intron number 1 from transcript Egrandis_v1_0.053878m (loc us Egrandis_v1_0.053878m.g) derived from phytozome v7.0 (c hr-ID scaffold_7; pos 26065277 to 26065592 reverse strand)
ctattcgaacgaggaatccaccagcagtgatcctcgtgatttgctcgatgttctggttatactagcttctttttctttaagcaaactttttttacttgtgtatgcgtatgtcaaatagatctctatagtacactttaatacatcgtcaaaattgtatcgttacattaacagaaactcaatttcacttgaattatatcctatatgcattatcttttttttgtcttcaaataaattttgaggtctaaacggaacagtaggaaatttatgaatgaagtgcaataactaaaccaatcaaaatctatatttgcaagaaata

SEQ ID NO: 92204 - DNA, 916 bp, Eucalyptus grandis
  Intron number 3 from transcript Egrandis_v1_0.002319m (loc us Egrandis_v1_0.002319m.g) derived from phytozome v7.0 (c hr-ID scaffold_2; pos 1632815 to 1633730)
aataaacctctcgaggtactgctgtcctcgtattgagagatgttctgttacagtacagtggatgttatctcagttgcaatatcagtatcgtactcacaacaggatgattatgaggacttgcccacatttaaactaaatgcataagttacttgatttttgagtttgaaagagatgagtccttgagaatggttctaccatgctatgaaagttgcttagttgaaataattacttatgaagaatgcaacttttggtgatcatggaattgtgtaatgtcttcagggtgagatggtcagaataaataaagttggacagttttcacatggtctgtggttaatttcacagtaaggatccattatcaatttccaatggacagaaggttggtgattagattaaggatcatctgcacttctcactctgagtggttactgtctaaagcacatgataagtgcaagctgtgttgctctccatgagcagtgttttccaatggtagaatttcaaattactgtcttcagcgctcttctaccaatttccaagacacagtcatgtctttcttcacagacctttcacattggagtgcccttttaagggatatgtgaattgcatccatgggatacattagtggaactacagagttcctctgtttgtttcttatatgatgaattatgcatgcatccatgccttcttcctggctttgttaaataaatcctccagtcaatccagtcgatgataagcaaggctgaactgggaaatttatttgtgtttaggagaagttgtttgagccttttcacaatgaacggttccttcttttctctttgtaaaaattaacctgctcccttgctctgttgtatgttattctcaaaagttaacacttgttgcggcaggtgactgtcaattcggggggagttgtcttctttgg

SEQ ID NO: 92205 - DNA, 896 bp, Eucalyptus grandis
  Intron number 1 from transcript Egrandis_v1_0.033891m (loc us Egrandis_v1_0.033891m.g) derived from phytozome v7.0 (c hr-ID scaffold_2; pos 46760168 to 46761063 reverse strand)
ttttcctgccactacacctccttcccatcgacaatgtcctcgcttcaattcccaaaagaaaacttgaagagcaatcaaggaaaagaggatttgccactggcacattacttacaaccaacccttcaaagctattaaacaataccaaacaaaccagtcaattacatttatcaaaatgacaaagtcctagaactggagcctactaggccgtgacttggtcatctgggcttcgccgtagggctcgtcgttgtcgatgcgtttatcattcctgaacgcggcacaggcgatcacataggcaatcaccaggaggatcagtatgacgatgtttacgattgacaccttcctccagctgtgccggaggctggctagcacgccggctttgcaagagccgcacaaataacacagctgatcctggtcattgttccacaaggagcagtccgtgttggtcccaactagcccgcttgctacggtccagtaggtctcgttcacataggtgtagccacagtcgctcggcggtttgcagcatccagactgtccaaatcaattagaagaaattccatcatattcttccacaaattaacaccgaaactacaatcaaacgcaagaaagccgccaaaaatcgattcattattagagcaatccagaaccatatttctgctgacattacaagtcggacaatttactcatcatgagatcttgaagctaaatgggttcctgaacgcataaaacatgcaattatagaggccgccctcgtggaggaaaagaaaatgacataaagtaagacaaaccaaacgcatgattaaaatcactgaccctatgaagcaaaaggtgatcaataatcgaggtgtctttacgaggcgtacgatggcgacgtccagcgtgctagacaccagaagaat

SEQ ID NO: 92206 - DNA, 807 bp, Eucalyptus grandis
  Intron number 1 from transcript Egrandis_v1_0.019405m (loc us Egrandis_v1_0.019405m.g) derived from phytozome v7.0 (c hr-ID scaffold_11; pos 4528880 to 4529686)
aagccaacggttcgttttccaagtaaaacgccaaggttggtttttggtaagcggaagcttcagatacgcagcttcttttttgcggggtggtgtagaaatgcactcggcttttcttcgtttcgctagagaaattctccgttgaatgaccggtttttgcttaagtcgtgcgtttcctcaaatgggtcgtattcatctctcagttcggcggcttcttgcttgtgaagcttcgttttttgctttggtccgtttctgtcccgcatttgcgtggagaagttcgacgatttccatgcttttccatgatttccgaggattgggtttggttcggaggttggtgaatttgatgtacgtggtgtgcggttgaagattcgcgatgagctcgtcttaatgtctgtatgcgtgggattttgcttcttcttttttcaattcgatttcattgctttatagtttaattgatattttggtttcgggtagttctgctcctgtggaactgtggctagtatcaactgccctatcttaattttctattatttttacctgcaccaagcttattcaacggttgattaggaatagattcttcttttatcgacgcattgtctcttcctctttctttttcaactgtgcattcaaaggtctcctggttcttaatgatggtggaattacgatgtcatccgctcgatttcgtgctgggcatggttctgggtgttttgtttttggtgcttatattttcaaatgcaaactggaaaagactttgaactattacggtaacttgctgcagcctgaggcattgaaaccccgtgctccattccc

SEQ ID NO: 92207 - DNA, 910 bp, Eucalyptus grandis
  Intron number 1 from transcript Egrandis_v1_0.049383m (loc us Egrandis_v1_0.049383m.g) derived from phytozome v7.0 (c hr-ID scaffold_7; pos 44722212 to 44723121 reverse strand)
tgcggtctacacttacaagagaagaagatccaaaggtttgtgcaaaattctaaatttttggagggtcgttttctcattaacaccttaggaaagttagaaaaaatgccgagaaaatcctaaatctactgtacaatagccaattttgtattaagcttttcgatttgataatctagtcataaacttttttgagaatttgccaacgtaatccttcaaactaaaattagcctgaaattgttatagacaccagccatcttgacaaggttgattctcattttatgtttaagtcatttgattagtatatattcatttctggagaattcaggcaaaagcgtaaaaatcggaaggtttagttgcaccttactgtattttataccaatttactagacaagacatcgtttattggatggaagcgagtaaacacagaccggataaacctgaaggtctctgtttctattatgttgaccagaacatgcaataaatactccaatagcaaaatagagaggaacaaatcaaatttttacaaagggggaaatgctaacttgtccagaggaatacgacatattttacgatcaaactctatctatggttgttaattatttcttgcccaactttatatgttgagatgggtccgcgagacctgatggtctttttccctctcggcaccctaaatatatctcaataattcaatgagaaaaaggaaggaatgattgattaataggatagaacgagtgtggtactattagtatctctcagtcgtcatcgttgatctcatcgaattaacctatttgaccatcttctagtgtcgattttattttagccagaaattaattacggataataacacaagcttccgaatttttgtatggttcattaaggctgcttagaccccacggagttcaaggaattcaga

SEQ ID NO: 92208 - DNA, 633 bp, Eucalyptus grandis
  Intron number 3 from transcript Egrandis_v1_0.010442m (loc us Egrandis_v1_0.010442m.g) derived from phytozome v7.0 (c hr-ID scaffold_2; pos 50484497 to 50485129)
agacgcttgcgaagcatctctttcactgtatgccgccatttttatttatttatttaattctgctaattcgatgcctgaatttctcgagcttggtaatgacggcgatggtattatgtcgtaattcggattcaaaggtaatgaaaaggtcttggaagagtgaaatgctgatgatctatatgtcgagtctcgacagtaagtcatacttctgtcgttttaggacaagccagtggatgggtactgctaattgcgttgagcatgcattttaggctcgatgtatccatcccattgtaatttcttaattttggattgccttgagtgttcataacaactcggtaattgcaatttctgttttcatcaatgagggattggatctggctcccggaaattggtgttaaagatattagtggttgctgcagagctgttatttctctttctttgcacattggcacttcaaaaaaatgctgttgaaccgtgccaagttaaaagaatcacatgcatggacaaattcaatgcggtattttgttgtagatggaacacttgcattgtccaaattttgaatttttaacctattttgctgtttgttctgacttgaattttttttttttttggttgattccaggggagaaccagcct

SEQ ID NO: 92209 - DNA, 397 bp, Eucalyptus grandis
  Intron number 2 from transcript Egrandis_v1_0.034000m (loc us Egrandis_v1_0.034000m.g) derived from phytozome v7.0 (c hr-ID scaffold_7; pos 29551372 to 29551768)
tcaacaggtatgtaagatcccgagctctcttcataggtgccatccatcgaattcaaacatgattcagtttgcataaaaaaccacacgacatgttattttcctttgaagtgtagtatggatcctatctataagttgttcaaagtttttgtcctggaggatgtattttgacaattagatgcaacattgcaggttaatttcttatgcttgatgacttctgttagcaagtaaaagggttgattaaaacttttgaaactagcaaattttattgcaaaactacatatcccgcgtttctcttgtgggtgtatccctattctatcgcctttcttaatcatatattggttgttcaaacacctactgggcagggcgttcctagtgaattcttcaggaaacatcttcg

SEQ ID NO: 92210 - DNA, 947 bp, Eucalyptus grandis
  Intron number 1 from transcript Egrandis_v1_0.026072m (loc us Egrandis_v1_0.026072m.g) derived from phytozome v7.0 (c hr-ID scaffold_2; pos 6846062 to 6847008)
ctctaattgccaaggtaaggttgtcgaggacttataaggcgcggatgtccaagaccatggctttggtgaaccgaggtagcgtgatcacagtcaaagtgcccaagcgagactccccttggaagtggcacaaggacattaaatttaggttcaaaactactcgcattaagattttgaaaaatattgaggaatagtattttgtccgtgatgccatcaattgtcataccacaacagaaagggaggatagggatggagatggtggcttataatgttagtcgaatcgagacatttgaatatttatataaaacaaagcttatgagcagtgaattaatgtattcatttcgtgacccgtgatttcagtgtatgagagaggcataattgagtgttgatttgaacatgtgtttttcatattaattgtgtacggttttagtttctctaagcaactttttataattgttttttataacttttaaaacggtggccaaccctagctccgcactgatttacttttcctttttccacaaccttccctggtcaacgttttcgtgtctctttccaacctctctctgtcaagaaaccaggaaatttccccttctatttccattaatggctttcgcgattctgatgcggttctgacagggacaataaaaatttcctaattcgaggcctgcccaggaaatccaaacccccgaactttctcccctcaacgtcaccgtgcaagttcctggaactttccccagaagcgcgaacgtccacgcacgccgctgcgtagtttcttccccagtttcgcgaagaacaagacttctagctcttctgtcgtctttctcggtcttcttctgttctacacgcccaaacccatggagtttcttccgatgaattccgcaccccggagtcaatgaggtggctctcgttcagcggtcgtcgcaccaccgtactcaagttgttgtcgc

SEQ ID NO: 92211 - DNA, 925 bp, Eucalyptus grandis
  Intron number 1 from transcript Egrandis_v1_0.020846m (loc us Egrandis_v1_0.020846m.g) derived from phytozome v7.0 (c hr-ID scaffold_58; pos 116076 to 117000 reverse strand)
gctttcagcctttggaaggccagcattctttcaaggtaggtctaaaaaatattcccaaacatcaaatattttggcaaatgggcttttgacactcaaagctacttggcaaagctaatgccaaatgcagcctttttgaatacctcaaactccgttttaaaggcattcaaaagccccaaagacctttgtgtatgttgaactgaatgcggccaaagcgaaggaggagagtgataatggagttattagaactctgtaacagcatatgatgtcgacactcttcatttggttaatcgtagggaatgagcatcccaatgtaaaaactaactcttcataaccttttagagggaaaataatacacatgtaatgccaagcatcgccataaaaaggaaaaaaaaaaccgagttaaattataaattgtcccagaaggatttgtgaagcaatcgaaataaggcaaagttacgaatttcacatcaattattctcacgacaggcaatcaatatctcaaaaatcgaattatttattgatcaaccgtgtctataagtgctcattagtcatggacgacacccagagaaaattataaggcgttgggccacaaaggggaattgataaattggcaacatagcaacactggcaagccccctgaatggagtgctcggcccaaacttccggaaattgcagtttgcaccaccgcaaaaccccatttatcccgtaagaaaggggaccaaaaaggaaaacgttctcttgaacaggaagcctttgaattgggcttgaggcccaaatcggccctcaaaccaacgtacgcacaagataggccttcgggacacagggcaatccagagccgtccgattactgacttcccccgacctcataaaaacccgctacaaaaaccctagacgctcctcctgcgagagagagagagaaagagaaa

SEQ ID NO: 92212 - DNA, 671 bp, Eucalyptus grandis
  Intron number 2 from transcript Egrandis_v1_0.020345m (loc us Egrandis_v1_0.020375m.g) derived from phytozome v7.0 (c hr-ID scaffold_7; pos 18616425 to 18617095)
ctgagacgtttgctaaattgaagaaagaaggcaaggtaagagagtttcttcttttctttttttttataatgaattcaatgattatctgttgtaactgtttgcttcaaaatttttgctgtttgttgattttttgggtgggaaggtcatcttgatgtgacatgacatggttgcttccttgtttgatctcagttgaactattgagcatttttattggcgaagtgttggaaatttgtaaggtttagcaactgaatttaagagatttttgtactattgttaagattaacccttgctgcaactaattcacactatgaggattgatcattctattttgtgtgttactttctgctcttatcctgttatacatacgtacatcatttgtctagaaattttatatatttgcaatttggaatgagtagcatcacacaccatttcctaattacaagaacattaaatttgtaaacttcatttttagtttgcaaagcacatcatttgaactaaacaagtcccaggggtcattcattgacactttccaaaaagatggcaatttagtttgaatgtagttgtgatgcagcggccgttatttaaatataagaatgatgctctttaatgacaactgtgttctttcattttgtgaaggtggcatttattcctttcatcacagctggtgaccc

SEQ ID NO: 92213 - DNA, 562 bp, Eucalyptus grandis
  Intron number 1 from transcript Egrandis_v1_0.003286m (loc us Egrandis_v1_0.003286m.g) derived from phytozome v7.0 (c hr-ID scaffold_7; pos 45171463 to 45172024)
gaattcatttttcacgggtaggcttgattttctttagtctgctgagctctttcctgaattctatcttccattatgtatagcaaatcgggtagattggatgtaagcagataacttcttatttagattggtgtagttccaattattatctggtggaatttttccatatagtggccctgtacacctatttttattttatgataaaattaagttgtcaagctgtcggtgtgttttgcaattagtgcaaaggattgggttgatggtttctgcaaagcattcctttttaacaagtacaaggtcacttgcaatttaggtcgcacctgcatgttatctattttgattggtgagttttccggatggatggttattgtgtaacagtatctgcccgggtagtttcttctctgctagttatgtatcatctagtgtcgtgtgggtgtgttttcactggatcctcttatcaacgggcttgcttcatcctagtagtgttgcttttgttgctgtatttgaatggttgttcttcctttttctcctttcaggattgtgcttccattatcagctcggggac

SEQ ID NO: 92214 - DNA, 788 bp, Eucalyptus grandis
  Intron number 1 from transcript Egrandis_v1_0.010257m (loc us Egrandis_v1_0.010257m.g) derived from phytozome v7.0 (c hr-ID scaffold_2; pos 61946040 to 61946827 reverse strand)
cactggtcagcccgtgtctccctctgtccttcgcgttcaggagcctcgtctttcgagcttctgcagagcctgtggaacttgtcgtttggcaactgattgttacgaactgtcgtggctcgcgaaacggttgcgtatgctcccgatcctgcgttgaagggttgtaactttagggggatgtttgacgcaaatttagctatcgagttaagctagtttgcgatatggtgcgtgatgctttttcggtttgagtactgcacagtgaaatggagtgcgttcagttgttctgtctcatgtatgccctctgatgaatctgagcctttacatacatgactgggataagaggcggcagtggcaaaactaagttttaaattttcttatacctcgtgctttaatcctctctgtcactgtggacaagttggttgtttatgagtagtcgatcgatggatttggggtcgattcaaactggagcgagtgttcatgttagacgatggacgatataagaagttttgacgaggcactttattctttgaccagtgtttcagtactattttgttttcttcacctttaacttgtcggttctaatgttgtcacgttcgattctttttcctgaatttatgtaaaagcacctatttttatttaatttcgaatttattatgtataactttatgaatagatgatggggggatcatagtttcttctgcagtattaaatgatataattgtgctctgataattcatcttgctgcttttttttcagctctcccgatcacgtcactttttccatttgtgtac

SEQ ID NO: 92215 - DNA, 360 bp, Eucalyptus grandis
  Intron number 4 from transcript Egrandis_v1_0.020008m (loc us Egrandis_v1_0.020008m.g) derived from phytozome v7.0 (c hr-ID scaffold_11; pos 10890891 to 10891250)
ttcttgatatcgataaggtgactggatgtatccttcattcctttggaatagagcattttatatattcaactcttgtcatggatgaagagtttgagtttttttgtttgtcagttttggatgtcatctagtaatatacttaaagaggacaaacttgtgaatcgttattctgtgtttcatttgaagtggtcagcaaatttgtctacttttggatgttatagagcttttgttaatgttattgctttgcctgtatattgccagccaagcataaatgacaagtctctctctgtgattgattttcttactgttggataatttttggcgtgaaaacttttatgttgctggtcctatacttaaatttag

SEQ ID NO: 92216 - DNA, 520 bp, Eucalyptus grandis
  Intron number 1 from transcript Egrandis_v1_0.021993m (loc us Egrandis_v1_0.022010m.g) derived from phytozome v7.0 (c hr-ID scaffold_2; pos 5484391 to 5484910)
tctctctcgctcgctcttagtcgcatactcgtttggtaagtaggtatacaatatagaccatcctggttgttctttgaggaacaggaagatcgaatcatttgatagttgaggggggtttggtcattctcttcaagccttactgtttgttgtctgtgttctttacaattcggtatgagatagcgtcaattcgttgttttaagtttgctgtagaatttgaatacaatttatgcttgctcttgtgtagatcgacatagacaagattggtaaaagtaatcatagggaattgcagaaatttgttctggaagttgatgagtagataagaaaaaacttctaggtcaaattcatgattacccgagcttatgctgtagaagatactgttaattttgatagaattccctgctattaaggttcttgtgtctcgtattgagttctgagaagcattatttgttttcatttttcatcagctgaccaacatgatgatctgaattctcttcttttttatgcatagtgtggagataac

SEQ ID NO: 92217 - DNA, 620 bp, Eucalyptus grandis
  Intron number 1 from transcript Egrandis_v1_0.011360m (loc us Egrandis_v1_0.011360m.g) derived from phytozome v7.0 (c hr-ID scaffold_2; pos 52442932 to 52443551)
gcctcgcctagattcaggtgagggccgcgacccccacaaaaagttcgttggccacaatgaaaaagcgaaaaaaagaaaaggaagtaaaagaaaataaaataaataagaaattaaaaaaatagtttacaccaatgtcagtcgtgtcacataaaacggccggcattacatcaacaatttttaaccaaaattagtcggattgattatcatgataaattatcaaaatgtacatgattaaattggtcaaattgaaaaatttagggttaatttgatacaaacgtaatatgtttaggactttttggtaattaagccggaacttttgtttgcttgctaataatttgcgaacgagcctacgtgaataaaccaaaaagggaatgaggccaaaacccatgccaagtcaaacctgtcaaccttctctcgttggcggcttcccagaaagaatgggaggaagaggcggagatcgagagatccatgaagcggctctcctcgaatcccctctgatccaaaaccgagatcacgaccacgaacgcgacgacggcggcgatggtggcggtggcgaaaaatcttctctcggcttggctcgaataggagacgagagccgcgcgatcatattcgaagaagtg

SEQ ID NO: 92218 - DNA, 602 bp, Eucalyptus grandis
  Intron number 2 from transcript Egrandis_v1_0.011360m (loc us Egrandis_v1_0.011360m.g) derived from phytozome v7.0 (c hr-ID scaffold_2; pos 52443679 to 52444280)
cttccttcgcttcagtcaccggcttcagcgtcctagtatgactctccatccatggcaacattcatgttcctatcagttcatagcagttagttgttcttgtcatcgtcgtcgtcgtcatgtcatcgtctctgatagtggtatcgctagttaaaagagaggaatagacaaagtaattgaggaaaaggtgtactgaaggagatgataactcagcacaagacacaaaaatggagcaagacgtgaagtgaatcaacatatcgcaacagagagtgtttttaggtaaacaaacagaactttaccatagcattaggcggattcaaaaggaaaagaagtttgattggcttgcctcgagatggcgattgggtgctgaatcgtagaagttccgagacttatctcctaggtttcgctatccttgtctctatagataaattgtgcttctccagtgttgaatttccatggctgatgccgcttgtggaaataacttgttaaatctgcagaggtcgactatactttgagcataatttgtaggttgtgttaacttagatttgtgcattttggttcgcgagctaatttgttgtagcgaaaatgcctgacgatagttagga

SEQ ID NO: 92219 - DNA, 800 bp, Eucalyptus grandis
  Intron number 1 from transcript Egrandis_v1_0.038877m (loc us Egrandis_v1_0.038877m.g) derived from phytozome v7.0 (c hr-ID scaffold_11; pos 36089269 to 36090068)
tgtcttcccccccgtcgcttacattcccacaccaggtgaacgtccgatgaacattccgctggttttgggattttgagtcttaacccgcgtcgtgttctgttctaagcactgatgggtcgtcgtttttctttctcaaagttgaatctttttttggtaccatccagaaaagttgaatcttttcctcgtgggcatccttcgaagcggatgaaaatcgctcaaagttccaaggtcttgatgatctcatcaactgaaaaatttaggcacttaaaacgataagtcattgataattctggtcgcttctctacataaaagttcgtttgatcttctcgtttatgggtcgtttaggaaaagcaatcgttttgaaagaagggaaagttctcaaaaagagacgagttgcttctcttagtcccttcaaatttatgacataggttttaccatatgtttattccaagtcgttctgatttaagggcaacccagactggcattgtggaattttgggccttcaggtgaaacaaaagcatattccaattggaccaacaaacagttgaatcgacagacacttagacagttggaactgtttctgtcctcattaaagcgttgatgcgaagctacttgtgtctgtctattgtaaatgcttgctgcttttgaatatacaggtcaattcgacgctaggcagaatattgcttgttttttctttttgaaatcacatcaatttgcttcccctcctcaagttttttcctttgaattatctgaaccgaatttcagttggaaggttatcgaggagccaactgagtcaagac

SEQ ID NO: 92220 - DNA, 1032 bp, Eucalyptus grandis
  Intron number 1 from transcript Egrandis_v1_0.025245m (loc us Egrandis_v1_0.025234m.g) derived from phytozome v7.0 (c hr-ID scaffold_2; pos 60241236 to 60242267 reverse strand)
tgtgaagaattgtttgttcttttttgatttcggaggtgggtttttcgcgtggaggtctgtggagtgttcgtcgatcgttcttttttgtttactgtttctctttttctcgttaaaggggttgtgctgattgctcggatggtgcgatttgacttctcattgtactgcgtccgtgttgattgctcgaggatctgcttggggtgttacggagaagctgggtttgatttggttctcgggtggttgttgggcaaatcattggagaaacgtgggattaggtgaatccgactcttcggacttgtcggaggcggaaattgagccctcgcgtgttctctttcgttagatttgctaggctggttaatgtaatcacgttccttgctgctgctgatgatttgactgttgcttatcgccgtacttgaccactcttttcggcgatcactggttagtgtgcattgtcagtgacaagaatgccactttgtccaaagcatttgttcttagctgttatccgtggggtgcttgttgaggcatgttggcggtcttgttggttcttagcagttttcataagctctgattcacgggttgtcgagggaattgctgatgggtttctgaaagtgtcaatcagaactaatgctagacatgaacatcttaatgagaatagtcaaacctctggccacccttataggagtgatggtttgagacaaagaaatgaatgggttgttctgggacatagtcagcatttgcaagttgatgacatgagcaatgggacattatatctggttacatacgatggtattaggagatgatcttgaggaatgtgtcgtttatgcccttggagtgtgagtcgattgtctgataggaggatgtctgagagtgtagaagcagcaagcacatacattgaaatgatatccatattccatgtttggttgcttctccttttgtttagcttcatagattttatctttcttaaaatcctgaataatgcaaatgattttccgatttgcaggcttcactcttgctgttttggaccaacgggtttcc

SEQ ID NO: 92221 - DNA, 755 bp, Eucalyptus grandis
  Intron number 1 from transcript Egrandis_v1_0.021547m (loc us Egrandis_v1_0.021547m.g) derived from phytozome v7.0 (c hr-ID scaffold_11; pos 9038863 to 9039617)
ctttcaccaaagtccgcatccagagagaagacaccgtgagtcccgccgtcgcttcggctcttaatctgcattctcccctttctgttgtcttcttcatctcgctctgtattcggcccgggtgttgttgcggccgtggaatgggcattggggtttcgctttggtgtgttgcggcgatgcgacgacgagggttgtcgtgtcgggattctgattctggggttttgaggttatgcgtgaatttgagtgtggactagtgggaacgatcgaattcagaaacttaggatgctctagccggaggtttcctgaatggcaaatgcatcatttgactgatctttctgtctagacagtggctggccggtaacgaataattagtgtaattttccagagtaaagtgtattgctagccgtatgttgccgcaggggttgaaatgttgaagccctttttttccctttcatctctcagatgtaatttgtggtaaatttgtgtttttgagctctgtatctttcccttccccctctccagctgaaagtgtaaaacgaaagggtgcagtgaggcgtcttcacttggtcgttgtttgttcccgaagcgacttgacgatttgagatgggcacatgagttaacttgcgttatgggctttgaaacttagcatctttagttgcgaccaaattgcatcattgaccatcaaacctttctacacgctagaaaaaaaagtgaccacctttgtgattgatttgtttgttttgatcattaggcctttg

SEQ ID NO: 92222 - DNA, 612 bp, Eucalyptus grandis
  Intron number 1 from transcript Egrandis_v1_0.036126m (loc us Egrandis_v1_0.036126m.g) derived from phytozome v7.0 (c hr-ID scaffold_15; pos 408652 to 409263)
aagagaattttggaaaatcaagtgagtttgccactctgcttttgtctttcttgtaagccatctttcgtatgaaaagaatcgtcatcgacttgaattaaaccaagtgtgagaactgtcattttctgaatgtgatttgaacccagcgtgttctctctttttttctgctctagcattggacagcctcaagtatctgctgccagcgtaaatcttataaccgggacatctattgtatggcctgtatctgaagccaaggctatgcctaattggcaaaaagatttgggagaaacactagcaaaacacttgacaaattatggctttaagtctaacccttgaggtaagtggttttattcaccatctgcctgttgcagttgaatggggtttggctgacattcatggatatcattgccgtatataatgtaccttttatcacagattttctgtgtcgaagactccatctactagttggaagtacaagtttttatatctgtaattttccctgtcatataatacaaactaactccgagaagaatatttttaatgttgggggtggttgacaagctctctgaacgctctcatggatttggttttgtgacttttgatgagaagcaagca

SEQ ID NO: 92223 - DNA, 823 bp, Eucalyptus grandis
  Intron number 1 from transcript Egrandis_v1_0.041805m (loc us Egrandis_v1_0.041805m.g) derived from phytozome v7.0 (c hr-ID scaffold_2; pos 7840819 to 7841641 reverse strand)
ctgccagaccaacgaggttcacgtctttgacactggtgggtcttcgagtttatcttctggagattctggttttccttcgaagtttgcgtttttttttttttggagaatgtcttcgatatagattggtatactctgcttagtgctgagggaaagattggttcttttcttttttctttcttctgtctgactgggatctcccggggtttttttggtgcaattctgcttgttaggatttttttttggttgtgttataacttgctgatgccttttgtttgtcgttggctttactttaatcaatggcttgggtcttgaatcggtgatttgtggctagttttatgcgttgaatgtgtgtgtgggaagagaatatttcatggtattatatgtccaagcactgctatgaccaatagtttcctgtacttctttcatcttgaacaattactgaagatgtttttgactttctccccatttgcattttcctgctgtttatatttactgctgaaatttcatgagggtcggcttttggtgtgcttcaaactttgttgccttctactttttgtgtcgtgatcttgtgtttcgttggagcttagcctgtgtggcatgtggaagttgttgaactatgagaggtgatctcgtttaccatagtcttaattggtgacctgggggttaggtgtgtgtgtgtgtgtgtgtgtgtgtgagagagagagagagagagagagagagagagagagagagagataaatctgccattgtttgtctcggtatgttgtgattttcctttttttcaattgatcatttggtttttctgacttgcagtggagcaaac

SEQ ID NO: 92224 - DNA, 643 bp, Eucalyptus grandis
  Intron number 1 from transcript Egrandis_v1_0.050295m (loc us Egrandis_v1_0.050295m.g) derived from phytozome v7.0 (c hr-ID scaffold_2; pos 47575109 to 47575751 reverse strand)
accgtcaaagagcagctcaggaggtaatactggagccctactaattgccttgcaatgccgttgaacagaaaaaaaaggggacttatttattgcttttcttggctgttggtgctagatatggtcacttacttgtgcgttggttgttggtgagcactgaacattgagtttttggaaatcaagaaaccaaattacatgtttgtactagctctgttgcagctctgttgaatgtcatctgttccatttgtcgcataaactgagaatgagatggttcatttgcacaggcctttttgttttagaatgcaattaacctgattgatgttgatcaagggctttccctcttgatttaagcatactttggactaaggttcagattgtattcttgtaacctggttcttaccccatttaatgggttgaaagtggataatctagtgtgaaagtctgtcagtagctttgatttactgataaaataatttcgacttcctagatagctcaaaagtcatgtaaattgtgttagcaaagtatcaacttcctaaatagctgaaacttaactggtgtatcaaccatgcctcgtggtgaatatattaagtggagatgcttttaactttcaggagaggtatcggctggcatctattgaaggctagtg

SEQ ID NO: 92225 - DNA, 908 bp, Eucalyptus grandis
  Intron number 2 from transcript Egrandis_v1_0.018441m (loc us Egrandis_v1_0.018455m.g) derived from phytozome v7.0 (c hr-ID scaffold_7; pos 8148656 to 8149563)
gcaggttagtgtagcacatcttttgacccaaaaaagaaaagaaaaagtatagcacatctgaattagcttacgtactttctgtttcagcaagactttccaaggcactgttttggctcaattaattattttggcttatgaactcgatgcatggccacctaggacatgatgttttgtagagtttcagcataaaggttatttagtattggtcttgttcaatttccttcttgtcttaagctatgggacatggagaaaaataccagataaatcttttagctccatctttattaaaagacgtgataaaagtaaagaacctactatcttttctcaataaaagtgcataattttgttttgggccttgactatgtctatgtccatcctatctgcttctgttttaatttgagagagtttcctttggattcacaaggtatatatggtcaagcctaataatttttaggataaaaaatagtttttttaaacaatcatctgtttattgtaactggaattcttgggtatgccaacctgattctaatcaggatcaataaattttgaagacatcctgaattgagatctttttggaggtctgtgagggattagaattggccattaggattttgccaaatgtcatcttcactttccagattgagaatttgtgagtaaactgtatatattaaaggtactaagattttagaatgtttttctttttatttaatctaccttgatttagtgaatgtctgttcatccttcatgcatggttgttggccacttgccaaggtgggcaaattctctgtagtttctttatttatcagtattcttgttgaggtttttgtgtcttcccacgattttgctaacattatcctatgccctatgtatcagggaatcacttgttggagcattggagatctgctggg

SEQ ID NO: 92226 - DNA, 918 bp, Eucalyptus grandis
  Intron number 3 from transcript Egrandis_v1_0.008967m (loc us Egrandis_v1_0.008967m.g) derived from phytozome v7.0 (c hr-ID scaffold_7; pos 35155303 to 35156220 reverse strand)
catcggaagagaaatttttgactgacttgctgcaggtatatcggctactgtgctaaccaaattgcaaatgagaagagataacgtgaagcggaaaatgaaatctcattagctgaaatgtctaaaaaatgactaaggattatgaacaaactgtatgatgagtctttatgatgcatccttggagcagttgaaattgataaaatttccctattttaatgggatgatacttaaaggaacaatctgatctattgtttcctgagcttttgacatagtatcctagaatgtggtctagtgaacatcttatgacaatcagaaatttcagatatgttgttttcagctcatcccatctctccaacttgtcgacaagtggaattgtgtgtgatgtgatcatcaaaatagttttatgcatagatatgattaatttgccagtcgcaatgcttctgtgtgtccaattccagctagtctcttttctaacagagttttagagagctttcatagatagttcatgcctgatttagcttgaattattcctttctgattgctagacaatttgtcctcttgtgaccaaaatatatgtatttctgagggatctaagttccgtttagttaggatgcctccaattttccatcaagtcactgattttcatgatatgcttatgccttttgcaatgtgataatatgtaccatagaatgcatagtaatctgattttttttgtttgactttatcaatttccatgtgacaagaccaagtactaaactatatttcacacttatttcttcaattttccttttcctatttttttattctccttcttctgggttttggttggggagagcttatcccttcttcgggagcttaaatagagttgctttgagttagaaggcacctcatttgtgttgtaatagcttatctacgcaggtc

SEQ ID NO: 92227 - DNA, 862 bp, Eucalyptus grandis
  Intron number 1 from transcript Egrandis_v1_0.028388m (loc us Egrandis_v1_0.028388m.g) derived from phytozome v7.0 (c hr-ID scaffold_7; pos 23565239 to 23566100 reverse strand)
cgccggttcatcatcccgccgcgcctcccgacgaggtatgatcgctcgcgttctccaattccatcgaatcgcgtcgtccgagaatacggagaacggtccgtctcagttgggacgcgggccggtgctaggttttttgtctgtttgtcttccgctaaccctagcgttcccgcaatcgaactgcttccgagtgctggagacgcgcgtttcgactgtcgggaactagaatccgatggttgttctttctcgggagcggctactttccgtgtgacgcatttcccgtgatgttatggatggtcactatcgggattgagcttctcttatatgcaaaaaagacgatagcggccatggtggtgatgttatcctggaagatattgaatttcctaggttattacttattagtctctttactcatgggaacctacgggacattttaggcttggttttgacttgtgatgtcaatggagtcgctcttactttagatgtcgtggtgggggcgtccatctgttgctgagtttagattgctgctcttcaagatcatttatacctgtctcttattttctgtctttgactattatgaaagaacttgtggatgccatttctgcatcgtttcgtgatttctaatgttttttaattgatagagagaccgtcgagaaagaaagtgcgagttggaattgattaattctccttaagtctcctgttttgtgcagttatttgacctcccaacaacagttgatcccaactacataatttccctcatacgaaaacttctaccaccgaatcagacacataactcttgctccaatggagttgacggaaataattcctagaagtctagctcggattccattgaagaaaagcgggc

SEQ ID NO: 92228 - DNA, 710 bp, Eucalyptus grandis
  Intron number 1 from transcript Egrandis_v1_0.009003m (loc us Egrandis_v1_0.009003m.g) derived from phytozome v7.0 (c hr-ID scaffold_2; pos 46806356 to 46807065)
tgttttactgcgattacttcccgctttaccagtttgtgagtttctgcgtttcttacttgaatttcacgttttggcacccattcaatctgcacattgtgtgagggaggtgtctgtttcagttttctttatagagaattaccaatgttgaattcttcacttcttatcgtgctgcattggtctagcttctcttgtttcttgatgaggttacggatatgtttctagggcaatttgtctatctggcttataatcgtattgtgtcttcgggaaatctttctacccgacttcctttaatacgatggagatggataaacccttacttgtgagttatttctatagcatgtagcgaatgaccaagatggtacattgtcgtgactcatgaccctaacttcaaattgttggagtctttgttttgcaattactgaaggttcaaatcatatggctttacccaaatattcatggacatgaatgttctgattggcactttggctgtttgcattgtttatgatatctcttttgatgtttagtgtttctttttctgtctccgtgctttataattcactctctattcatttatttatcaaagactgaacgtaccttcgtgaacctaagcagaaataattatggtaacctcctacatcagtatctggtttgattcatcgtaagcataaagtcactaatatggtcaacattacgatgtaggttactcgtag

SEQ ID NO: 92229 - DNA, 1062 bp, Eucalyptus grandis
  Intron number 1 from transcript Egrandis_v1_0.018407m (loc us Egrandis_v1_0.018407m.g) derived from phytozome v7.0 (c hr-ID scaffold_2; pos 18303076 to 18304137 reverse strand)
tacaagaaggctgaggccagtttctggactggtgctgccctgcaattctccccttttttcttggaattgcgtttgtgaatgtgttcttgaatttcccctgttctgtttcatcatgtgtgatggcttctctccctgttttattggagtgatgtagttatatgcggtactgcctggaaattaatcgacgaaaaaatcatggaatgtttcgagaattgcctctttgtttctttacttgcgttcatcccgtgatttgtttgaatggaaattgtatttgcttggtaattgggatattttactctgtgctttatcaggattctactgacttgttgccctgtactttcacattcgcctggttgctctgtataagggactcttaagttttccccacttttgatggaggccatttgtcagaggttccgtagtctgatcatgtatttattccaattttagcatcgaagccttcacatatgtatttttttttttttttaagaaatggagaatgattgaataatgctgtggagtattttttttcttttttttcttttgtcatagagaagatatgattagagaccaaggcttgcaccacaattagaatgactgatggttgttaatgaacttgaatggcaattttacaaagattttcatattttcagtcaaacccatttgttctagccattctcaattgtgttggtgcacatgttcagatcttagatgaagaaatttgaattctttgaagaacacgtgaatcctgtacttgttttgaaagtaactctggagcatacatcttggttcagtgcatcgcatatccacaatcttaaggtcataatggatgacacctcgtatttcagtcttgcatggcattggctcactaagatgcaagcaggtttcatgagaatattcgtaattccacatgtgcagacactgattgtattataattattttatcagactggacaacaagcaccagttcatttctctgcatcatccatctcaattgtctaatagtcacctgttgatgggtttgcagccgaagaagttgatctgtctcaggatttgcagcac

SEQ ID NO: 92230 - DNA, 598 bp, Eucalyptus grandis
  Intron number 1 from transcript Egrandis_v1_0.002245m (loc us Egrandis_v1_0.002245m.g) derived from phytozome v7.0 (c hr-ID scaffold_7; pos 45868330 to 45868927)
gcggtgtgtccactgcaaatgtaagtatcgctctgcttttactacgcagattcaaatgaggtgttttgtttctctttcgtttcagatttcatttcccagaatttctcactagtttagtgcttaggcgtgactctgaggatgagatctaggttctcgatgtggcaattttgtggcatgtttaattcatttgctggtttgagggacaggcacggatgcctaccagcaatgatggccgatacaagacttgtttgcaatttgacttttccttgttgtcctagttgttttctttttatcatagcgacagacgcatgcttcacatgtcctcctgtgaagttggatgattataaacttgtatggcttgacttacttcagtgaactatattatttatttcattgaagattctggttatccatggtatactttcttgttagacaggcttcttacagtgcttatattgtaatcttctttgtgtgttccttctttcttcgctgcatgttcgtttatctttcacccttttctaagagaaaattttgctggtcttctctattgacctgacttgtttttcgaaaccagggtgcggctcctgaaccgcccacc

SEQ ID NO: 92231 - DNA, 389 bp, Eucalyptus grandis
  Intron number 3 from transcript Egrandis_v1_0.040140m (loc us Egrandis_v1_0.040140m.g) derived from phytozome v7.0 (c hr-ID scaffold_7; pos 43775297 to 43775685)
gctgtgatcacaacatccagaacggcttatctggggttagtccaatgcttcttaaagagagacaatcacggaaacttattttcattttgattggatggtagtttgagccaatcatttaatttgattcaaaatataggacggatggtttgcttaatttattagaatgagcctacactctaaatcagaaaatgcagcaaagtagactcttcaatctaaatatctagtagtttattaatggtctcatttctcttccatttgactctctctctctctcttgctctctctcagggcattttacgttggagtatcgtccacagaagaggggctacctcaagtgcaatgatgcgctttcagaggcagtttggttaagctaaacattctacccggtg

SEQ ID NO: 92232 - DNA, 514 bp, Eucalyptus grandis
  Intron number 1 from transcript Egrandis_v1_0.017325m (loc us Egrandis_v1_0.009953m.g) derived from phytozome v7.0 (c hr-ID scaffold_2; pos 25491023 to 25491536)
tgcgccctcttctcctcgggttcgcaacagtggaggtgattttctgtaatttgattttacatctacctaagcatttcattactccttttttttttcccttttgcatgcttctggtaaacctggaggaagttaatgtgcattggcatgtgctagttgagttattttctatattcggaaactcagtatgcatgcatgaatgttctggtttatacctgcgctttgctgtgtactatggctataggtgtatattaagtgttgcgttggtgtatcaattgatgcagaaggcctttttatgccctttcaaacattcaattgtcttgtgatagaagggaatcttctgtttgttgattcctcctgtcacatccgtgctttgttgtctgttttattattttatgggatggtgtctttctgctgttaactctggttgagagtccgatgctctaaaattattttcttttactacttatatgtgaagataatattcctgcagtggtgattgaggagataacagaag

SEQ ID NO: 92233 - DNA, 656 bp, Eucalyptus grandis
  Intron number 3 from transcript Egrandis_v1_0.038093m (loc us Egrandis_v1_0.038093m.g) derived from phytozome v7.0 (c hr-ID scaffold_7; pos 44744982 to 44745637 reverse strand)
gagaaggtgattacctcgctgttaaaggacccaaggtactaatcagctctatgaagccttaattttaaattatagatgatatgtatttgctacgtactttccctcttgatttcaatatgggcctggttgcgatgggcaggcctggacaataagttaggcctaactttaatggtcgccttggtctaagacaggtccaatgattaccttggctactcatgaagacctaaatgggaaatctggagaatgtttctattatgtcaaccggggtatccgagactcttaagcactcatagtcataaaatcaaaattttttacaaagattgtgtctcgaagcatactatagatacaaatttagataataatttgttaactctattattgcaacaaattattttcacacgagtcagccctcctaaaggaatgtccacacattatcatttgaaatggtcaccactaagcatggatctaacttactcaacatcatcaatctcacacaatgtgcatcttggaacatcacaacatttcgttgggaaaagatacaggcgagactagtgcaatatatcttcttcaaatctaaaatgatcttgtatagtgacgatgttttgatcatctcttctcaagggacgactcaagtataagcccaatcaagctcgtgc

SEQ ID NO: 92234 - DNA, 579 bp, Eucalyptus grandis
  Intron number 1 from transcript Egrandis_v1_0.054386m (loc us Egrandis_v1_0.054386m.g) derived from phytozome v7.0 (c hr-ID scaffold_7; pos 11153969 to 11154547 reverse strand)
aggaccccgccccaagtcgtagcgccgaagttaacgtaccgagcgacaactatcataggccctatagttttctttttggaaaggtcaaacatggtatcaagccgaatgccagctagtgactacaaaacactctaaaggattgattaatctacttttctcttaccttctttacaatatctaaccaaatgccagctagatcctataattgcaaaagatctggcatcaaattgaggaataaatttagagatattcggaaatatcataatttttacaaaagatattaaacttggtaacaatatatgtttatatggcaattcttataccaatgtaaaaaaggaaaaatataaaaggttatatggcaattctcaatctagaaaagaaaaaggaatgctaattaaagattatatggttatggcaagttggccacatttgatatcctccattcttcatccttaaatagctgaatgatgctgaaattggatcatagataccccatcatggtgaaatcatcagctaagctcatattcatttgttctttattgctagctagttgtgtgagagatgtttggggcaagatac

SEQ ID NO: 92235 - DNA, 837 bp, Eucalyptus grandis
  Intron number 1 from transcript Egrandis_v1_0.000398m (loc us Egrandis_v1_0.000398m.g) derived from phytozome v7.0 (c hr-ID scaffold_11; pos 42791218 to 42792054 reverse strand )
cgaaagtgaaaggttttcctgcctggcctgccacggtacgtgtgctccgctgtcgtgcattttttttttccttctttttggtgtggatgtttatccgagaagttgtggttttttgatgattgcggagctgagaaaagttgctatctctagggtttttcgggtgacttttggcatgcatatgtgttaggagcctgtttttctcttgtattaggtcttccatagctggctaagtttgattaggcgcctcaagagttttgagaaattgagtaggatcgatgggatgggttaaaaagtgtgcttgattgaatttctctggcttcggctggtgttctcttttcgtatctcacgattgttgacgatttcctatcagctcatatgaggtgttcagctcggattgtaggaatctggaatagggggccaactttttattgtaatagtaagatcaattgttagcctagtaccaaaaataaaataaaattcttagcagttgttttcttgttggaggtccattttcatgtttacatctgatgatgcatgttgttcctagcctgaaaatcttggagaagtatgagtagcttttttgtttagaagttgagaatgtccgtgctatgtctcaaaactacctcgtgttataggctaagtgccttattgatattatgcccatcaacaggactctcctgcttgtgcaaaactttttttataccataatagatcttccccttacccttctgtcgtatcttttttaactgccttgcacagtacatgtatatgtagttcatgtctggactccagttaactaaatttcactttcattgtgcaggtaagtgagccagagaa

SEQ ID NO: 92236 - DNA, 980 bp, Eucalyptus grandis
  Intron number 4 from transcript Egrandis_v1_0.029453m (loc us Egrandis_v1_0.029453m.g) derived from phytozome v7.0 (c hr-ID scaffold_11; pos 33163390 to 33164369 reverse strand )
cccttcacttggtatgatattatctgaatgaagtcattattgcagtctctaattgaatggtttttttgaatcatgtgattggttgatccttttattagtgcgagctgtctgagagactttgagataattgcgcacttgcaagttgcaattgtgaacacgagtgatgtgtttggtcattatgtttgcctttgggacatccctcttccctctagcttgttgtgtattataggcgctttggctttttctttacagcagaagcagtcttgaaatttatttcttcagaagatcaaaggattttgactcagaagaagatttcccatatacatcttttgtatagtgacatcgagttcgacgtagaagagcaaatttagctgccttaaaatttcatcttcatcttaagtgtagacctagtctgtaagtatatggcctaaaactgatatcggccttttgattctagtcaactcccttgtgcaatacaggttagctggtcagacatctatggattagcagtatatgtagaattgagaaatgctgattcagttgtgagatggaacttcattggccagatatatgtttaagggcccattttcatgacaaaaggactctctgactctgaagtctggtgctctaattaatgtgggtgccacattcatgtacaacatgtacagatacactgttcaaatctcttgtcatccaaatgcacctgactatacaataagtctggtaatcatcttcaatataacctaaggacaactgaatatataatttctttcggactttaggaacatctatataggaggagaaacgtacctacatgacaccttatttcattaagattggtacgggaaggaacatatataccctttcatctttctgcttttgctcttcactatttcttctttgattatcgtattggagtagtggatgattttatgatgtctccacctccatacaggaaaacacacaatatttggacgagt

SEQ ID NO: 92237 - DNA, 995 bp, Eucalyptus grandis
  Intron number 3 from transcript Egrandis_v1_0.052142m (loc us Egrandis_v1_0.052142m.g) derived from phytozome v7.0 (c hr-ID scaffold_2; pos 59058523 to 59059517 reverse strand)
ctcttcgagcttacttttgccaagctcctcgagtaatcagatcttgttctttcttttaacctttttcacgaagataaacacatgtcggtggcgcagtcaaaactttggttgtcgtcatataatgttaaaatagaggagcgatttttttttaggcgtagtataatttctatgtacacgaatgcatccgtacatttttcatgaaaaattagatgcagtaatgtccattcgaactctctttatggggggaaaaaggcagtgaactgaagaagtccaaaaggtcatccccgttttggctcagtgatttctcaaaagatctacgctttaactcttaatcttattttaattttttggtctgtcctattctatgctctacactgtcgctctctcgcttttgcgatttccgggactcgaacaccggacctcttgtgagtgcgcccccgctcggcccagtgtttgggctttaattgatctagcacacttttgacttgggctttttggaaggagtctgatgaacttgcaatggaaggaaggagtggctgctatatagcaaacatagctgaaataacttctagaataacgcaatcgagctggcagcacttggccaagttaggaccggtgctttaagtagcataatcagaataagttttactttggaaatgctaatgtgcatcattcatcgccaatttaacacgagcggcatattcatttatgtatggaagcaatatcctttcaaactagaatggtgctgctgccacattcaactcagacttgttcattattcatccatgctctgattaatgatgatgatatgggaatgatacgtgataatctgcttattaggaaaaaagaatcgaatatatagttgcgtcgcctaacaaattttcatcttgtcccttgctaaagtgtcaccgagccgcccttgcactggaatatgcatctgctcgcttgcatctttctgattggtgtagttttcttctccatttcaggtttcctat

SEQ ID NO: 92238 - DNA, 929 bp, Eucalyptus grandis
  Intron number 1 from transcript Egrandis_v1_0.051173m (loc us Egrandis_v1_0.051173m.g) derived from phytozome v7.0 (c hr-ID scaffold_11; pos 3629619 to 3630547)
gatctgaccaggtcttccacgcttaaaaattcttatcttcgatctttcgttttttcttcacttgattccggtccgtcgaatttcgcgggaagttgaattgcgattgcggattggggaatctgcgaagcatcgaaaatggtggctttccatctgtccagggtagaatggaagatccttatgtcttgtcttaagaatgtgtacgctgtccggttgcttcacggtctgctttgacttcgatccccatgtaattggtctctgaacactctcccaaatggtcgactacgattaaaaatgtaggtgattttgctgatataagtgaacttttgaagactgcatattcaattcaggcaccatttgatggcaatgcggtattttttattaggtattttacttgttctttcgcggaatttctgttatcctcacgaccggtcagctaatctttgatcgaaatgtctaaaagatagctcgtgttgagctttgttggttctacttttcaaattgtcaagcagagttcgagctcaaatgtaagtcgaacctgcagtagaaattttagacaaagcgacatttgtgtttcttatgttaaatcgcaattgccagctctcacatacatgtaaacatattatgatcacataaaatataactactcaataactcgatagttggaaaaattaagcattgcaaagcccgatactgaactaaactttttttttcttttttctttttttaatgagcagtgactcagttgagctcaagtagctcatgagtagtaggaatttcttgtcccacgagcttgaagttgcaaaaccctttgcactgcgaggtgcggagtatgcaggagaaccggacggtcagtgactaacatactcactcttgctgttttttttcctctcctagttcagacaaaggaaatcttggggtgccccagttac

SEQ ID NO: 92239 - DNA, 621 bp, Eucalyptus grandis
  Intron number 1 from transcript Egrandis_v1_0.038650m (loc us Egrandis_v1_0.038650m.g) derived from phytozome v7.0 (c hr-ID scaffold_7; pos 16765648 to 16766268)
cacgggtacttctcatatcttcagtgtagaactcgaacttaaagttctcactaaatgatgaacaaaatcacaatacataaggagaatcaagattagtcgatgtggccagagttaggtcctttcagttctaatgtgatgaggaatattgagaagattgacaaaggagctcttttgaattgctgggctaagatgtcatggagtcacctgtcgagactcgcctattgttttattgtctcgttattttgatataatttttccatgttgcatattagaccaattttaggattgcttgcagaattggcattattagtctttcttcgtgaaaacaagaaaggaaagaaaagaagcattaacactatagtcgtcggttgtttaaacaatgtaagcatttactgcaataatcgggcaatgcctgcaaaaccaattcatgagttttgagcctgcaattctttgccaactctttttgcctgcttttcaaaaagtaaaatgacaagatggcaagtgcagaatcgtttcttttagtactttatctgtcacctgaaatcaacggctagctaagctcatctgactgtgtgggatgatgcagacactttcggcttctgatctaaggaaccctgacat

SEQ ID NO: 92240 - DNA, 837 bp, Eucalyptus grandis
  Intron number 1 from transcript Egrandis_v1_0.018598m (loc us Egrandis_v1_0.018598m.g) derived from phytozome v7.0 (c hr-ID scaffold_11; pos 14524003 to 14524839)
actattacgcggttctgggtctggtagtgttttcgattcatcagctgttcgtttctataacgagagaagtagatcgagtcatgagacgtcttttttccttttttgtgcctttcttggagaaaaaaaaatggtgaaatgcgatcggaggtggatgagtgtgattcgattagagggtcgtatcttctgcaaattgaaatttccgtcttgttcaggttttattattagttgcagcttgcaaactagaatgccatcgatggtttgattcagagaactttatgatcgaatgggagagtgtggattttgacgttgcacttgatcacagtccttgacttaaactatctttattgcatgcgctggtgagatacaatatagatctactgagaggtttcgggagaattctttacaatgttgtgagaaatgttcattggttgttcaggcaaatcgaactgtttagtatgcagaatctcaagcgtttgcagaaaatagaactttcattatcgcatgaatttccaaatagttcttgaatgaagatttggagtatctagcacttctctgctatcatcaacctcaagtccatggagcaagcacctttgaagctatcataaaaaatgtggagaggacgtttgcaccacaactaatacttagtatatctgagtagattaagatttctcactgttagttcttctgcgcttatgtcggttatgcttaccgctttcaagctatttcagatatctactggatggcttatgttttcttttcgatctatgggttgtgtacttgcgaccagttctggtcccatctgacatgtttcggaatcattgttcatgtagcttccag

SEQ ID NO: 92241 - DNA, 515 bp, Eucalyptus grandis
  Intron number 2 from transcript Egrandis_v1_0.032833m (loc us Egrandis_v1_0.032833m.g) derived from phytozome v7.0 (c hr-ID scaffold_2; pos 35270272 to 35270786 reverse strand)
cacatagttttgcttgcgagccatccaatcatctggtaagttttactcatttttctccattttttgacttcgatgacattttcagttagcttgttatattgttcttgcactatttgaacttataggaatctggtctttacattgaaaatacaatggaaccaattagtgatcacaacagggagcctctgccatctcacatctaacttataatggaacagaaccaatctaattgttccaactggcaaaatattgggaatcaaacatgtatgctagcatgatcagtgttttttgtattgcagtaatctgtaataccaagtagttccaatatcctataggcagcattgggttttgcacataattaatgtggaaatttctttgtttataaatgtggactttaagttctactttaatgacctatgattactaaagttctatctttgtaaattgctagtttcttgtccaaggattgatgagtatgattctgtgcttttactatcccaaactgcagcatttgg

SEQ ID NO: 92242 - DNA, 969 bp, Eucalyptus grandis
  Intron number 1 from transcript Egrandis_v1_0.032833m (loc us Egrandis_v1_0.032833m.g) derived from phytozome v7.0 (c hr-ID scaffold_2; pos 35270802 to 35271770 reverse strand)
ctgttgaggtggggctaatgctgtcaatgttaagtgtcactttttgcaattaaataaaagaaaaaagaagcatttaattttatttggtgcgctgagatgttctaaattttcttctagtgaatatgatctaaataagaataaccttttctagaatctaaaaacagtgattagttatgtggatgctgtgatatgattgcgaagcaaagggatgcacttcccctttttttcaatggtttccattatcatcgagaaccttctttttgttgatgatgatccttcgtagtattaaccagtcaatctgccataaaattctggggcgcctcatggctccaacctttcaatgccacaccaattcatgacagcattgatatcccataaatcaccttccgcttgggtcttgatccctggtgggttaggaactattactaaaagcttgcaagaaatttttagacaatttacttatgcttgtttggttgagattgaaatgatatgctacctacttctgtgattgtgttgtcagcagtgagctctgggggaaatctattcagttctttaaagtatcagttgtgtgcgtttactctaatgtggaatattattttgtcttacattatgttattttatctgaaaataccatcttatgtagcatttttcgtgtgggcagttgcagaacaaaagtttcgagcttacttgtgtttgtttggtgtaactggaaatcttgcacttcaacgaatgcaaaccttgtctgatacatctcctccctctctgctactgttgcatatgtaaattttttattgaagcaatttttgtgtgagatcgtgaacctcttttagaggtgagttaatttgtaatctaaattgcggttcactgtgtactttctctgaggctttttgaatgttattgcacatataacatggttcttttcccatataaataggtggtcaaaaaagcagtgttgcatttgccaagata

SEQ ID NO: 92243 - DNA, 722 bp, Eucalyptus grandis
  Intron number 5 from transcript Egrandis_v1_0.021721m (loc us Egrandis_v1_0.017219m.g) derived from phytozome v7.0 (c hr-ID scaffold_2; pos 60125827 to 60126548 reverse strand)
gaacccaccaacatcttgcgcgtaagtttcctcctatttcttttgcgctgtgtgcttaagactgttgatttcgccatgagaccgtctgatgcttttcttgtgaaatggttgggaacctggaaacgctttaaaagctggaagcatctcggtttgcacgaaaaagtctgcaataataactaagcacttgaaactatgttctttagaagccaggaatttgtactgtagtcagtatcaaattgtcatgtgttttcagtatattcagaaagaatcacttactgcacaaaatcacatgagctactccatatttttctgcaagtggactagacaacatgtcaattttatacattttgcttttagttcatgtaatgagaataaccagtgagctaccctatatttttctacaagtggacgccagcatgtcattctttaacatcttgctcgttgttcacgtactaaaaataaccactctgtgaattagccagaagaaactgcaattttttagtgtggttttatttgttccatcatgttggtgactgttggcaattttgtgactattgtgtgatgatatactcttttaatgagtgcagcatcatttttttatttgcgtttgttttgataatagccttcataattctaggttttcttttagcatttaggttgtcaataatgtaatggagtaaattcttaaaacaggtgggctgctaaggtgcttgttaacagtg

SEQ ID NO: 92244 - DNA, 998 bp, Eucalyptus grandis
  Intron number 1 from transcript Egrandis_v1_0.021721m (loc us Egrandis_v1_0.017219m.g) derived from phytozome v7.0 (c hr-ID scaffold_2; pos 60127185 to 60128182 reverse strand)
ggttgaattctcttctgggctctcgtcatttgaaggtatcacctcggaactcttcctcctcttcttattcttcggacgcagcaacttgggtcttcatcgctcggaactgggtttcgtaaattcagggtttcttttaatgtttgtgtcgttcgacacttgatttgttggttctttaatgcgctgagcaatcattcacgtcttgctcgtttcgggtgtgctcttccttgtcgcgcctcttcgttttgaatgcttcttctcgtgttcctctgtcaggtttctgttgtatttccttgctttttatgcaatgtggaaaccgattcgttgaggaactattgagatttgggcaggaactagttgcttgaccccatgcagcttttaagtagtccctaaagttgacttcttgataaaccaatttcagttaaaattgttttttttttttttaaataaattatcttctgtgaagttcttgaattgcgtttgttcgtttgcacagcgcgaagagaaatggcaagcgctggcattatcttgtgcctaatgaggcagacgaagtatttctgaacatggggctgtttagggattttttcttttttttttaatggcaacttgcgcatgtgtgcctgcatagttgaaatatcttaatttgctttttagaatagcagaaatcactttcagggtggtggtcacgtacatgttcacggaatgctaccatcttacatgtcaaattgataacttgctatctttggtcccatttataactctaatatatcgtcctccatgatttgcccctttgcatttactagacaatctcaccagcatctttgtagagaattgttcttcctttttctgggaaaggtactatatgaatcagatagttccagtcacttaaaatttgggtttttctttttaagagaggtcccgcttcatattttcttgtcccattaaaaccagccccttgttatatttcttgaagctactttcatcaagcctgtaactaataa

SEQ ID NO: 92245 - DNA, 618 bp, Eucalyptus grandis
  Intron number 2 from transcript Egrandis_v1_0.007547m (loc us Egrandis_v1_0.007547m.g) derived from phytozome v7.0 (c hr-ID scaffold_2; pos 43782692 to 43783309 reverse strand)
ccaggtgattggttctgcttcctgtaattttgtatgtattctagtctctaatgtccactggattgtgtagtgctgagatcatctgtggatgtagaagtcattgcagcgtgcttcatcttttcgttaccagtgaaatggtttctttccccgacaagttcgtagagttttccagcagcaaagaatgaactgcatacagttatcaatgaaagcttctatttttctatatttgtacgtggtgatgcacttcgtcaacctaaataactgtcttgaatttttacctgtttttctgttttaaaaagatgtccccaagccttctcattgatgcaccttaactagtgcctcaagtaagctctctagtgttatcgtattctttttctcctcggttcgctttagtacactcatttattcagaatagcgtggcaaactcacctctctctctctctctctctcaactaaaggtgcatgcacgtccctgttttaatttcaactcatgatagtttaagacttgatttgacatgatttggatgtttgacttttcctggtaattttttttttcattgctgattaattttcgtgttgtcatttttccaaattgaattaattgaaggccacactacg

SEQ ID NO: 92246 - DNA, 853 bp, Eucalyptus grandis
  Intron number 1 from transcript Egrandis_v1_0.007474m (loc us Egrandis_v1_0.007474m.g) derived from phytozome v7.0 (c hr-ID scaffold_2; pos 8948775 to 8949627 reverse strand)
tctcacggtcatcaccgtgttcgagttcagcataggtagttctgcgcgttcttcgttctttgtggctgttgattttttccatgcgcttgagtcgcttgatacgtccttttactggatatggtacaatattttacatttccgatagataaagtgacagtccaatacattgtttgttatgcctttgcggagtgcattttcttaccgtttgtgttgcgtttggcatcattcttatgatagtgctgggtgcactttgtgggttctgaaggttattacttgttgtatttgtttccccttcctgaaagatgaatggtgacggactgatatgcaaattactagtactagtctacatttggaaaaaccatgtaggctagttatatatttatagtgttagtgtccattgagcaaaagcagtatggcaagagtgaagagttatgcacctgttttataccccgagttgtcctttttttggttagtctccccatcattgtcgactaggatcttgttatagggtgtgccttcggaggttaacatcaggtgttttaactactttgttggatgtgtgcccacatatgggcttatatgtgaacaaaaagattacttcttttcagatctctgttggctccttcactgtatttcctacttagatgtggtgcatttagaggatacaatttgtgtgtctacgaatgctaataggaagacggttgatcgctttaccacaacgaaagggctacttaagtgcatttgaattatgttggaacttcttttcaattgtaaagccgagtttcctcattttcttgttttgatgctatctttgtcaggtgctactcttagcaagggattaaaccggggaata

SEQ ID NO: 92247 - DNA, 808 bp, Eucalyptus grandis
  Intron number 1 from transcript Egrandis_v1_0.027211m (loc us Egrandis_v1_0.027211m.g) derived from phytozome v7.0 (c hr-ID scaffold_7; pos 8654329 to 8655136 reverse strand)
ggtggcctcgtttgctgcgatgtgagggctcgaattcccggttctgcctctctcgttgtgctctctgtttctcgtcgatgatcggaagtgttcgtgatgctgtggagtttttatgttaatttggcatgttcttgctcgatacctgtgatttgttcttgttgcgtgcggtgcatgatgaccctttttcagttgttcttttgcaaccgatgaggtcggtgtgcgggccttgggatactaaattgtgctctgtttatgccctctttcggttaattatcattttgagtttagtcattcggtgtcaaagtcgccaggctgatttctgaagttgaagcgtgtcggatgttatcctgaggattggtttattctctgagctttttgaattgctctgcacaagtggatattggactttttttttctttgtttcttttcttctgttaattggtttcagctgtcctcaatgctgagcttgctgcatttttcgcttaatctttgcaagaccatttgtgaattcgatagaggtattaaatcccacatgaaatttcgtgtatatgaatatgggagaacttccttgtgtctaccagggcatcataacttcagcccttccacctggcagaagcagcacgctgagttttcgatagataggaatttgggtcataacccaaaattgaagtaggaaatgagagtagatacagtgagcaccagttttgtacttgaaactgatatggcaatttcggaagctaacggaagtggcctttcggtttttgttggtgcagttatttgttggtccttgatcgaacaaattggagaa

SEQ ID NO: 92248 - DNA, 364 bp, Eucalyptus grandis
  Intron number 3 from transcript Egrandis_v1_0.047191m (loc us Egrandis_v1_0.047191m.g) derived from phytozome v7.0 (c hr-ID scaffold_7; pos 20491576 to 20491939 reverse strand)
tcacagaagtgtctgtggaaccaagagttaaccaggtatcaactatgcatggtcatgcaaccgggtgtgccgggtcagactggttggcccgaaaggaaaaattgggcaggcatttctcttcctgcaatcggcccgcccaacttcgcccaccgaccctgtcaatattaaataaaatatttgattttcctaataatgggcatccacactcatcctagaatgtgctgtcctgaaccaatttagagttgtgattagtgacaaactgaaagtgcaatatcaaaggattggcactccctaatgcattaaagttttttcttttcctggcgttgcaggctcagtacttggaggagatcctaagggaggcttt

SEQ ID NO: 92249 - DNA, 707 bp, Eucalyptus grandis
  Intron number 1 from transcript Egrandis_v1_0.029336m (loc us Egrandis_v1_0.029336m.g) derived from phytozome v7.0 (c hr-ID scaffold_7; pos 12145971 to 12146677)
gaagagtctaatctaatgtaaaggaacttctacgcactcctttattatcttagcactaaataattcatgagcatttaaaaaaatgttttatcatagatattactttaaattatattgtattggacaaatcataatattcaggtatacacataattgagcagtacaaatataatgagtaggctaaactcatccatgaaatgtatgctgactcaacataaatttggatacattgcactcatgaattattgctaaaaaaaaaaattgataacagcagatgcactaaaccacttgactttgtctgggagcacatgagatttgccacatagttagtcatattaattacactaaatgtttcataagatccatataatttcataatttaatactacataactttattatgtctttagctcattcaaagagaatcaacaaagtgaattagactatgggcgtgcatggaaacgtttctaagaaacgttttcggcacacttctgtacggaaagtgtgcccgggaacaaaaaaggaacagaaacgcgtttggttgcgtttctgtttcttttttgtttttttgtttctgaaacgaaataagaacaaaaaaaaaagaaacaaaaaaaagttgtttcttttgaaaagaaacacttcttcaacggaacaaaagaacaaaaaccaaagaagcaaaagaacaaaatcggaacaaaggcgacgaa

SEQ ID NO: 92250 - DNA, 545 bp, Eucalyptus grandis
  Intron number 1 from transcript Egrandis_v1_0.054972m (loc us Egrandis_v1_0.054972m.g) derived from phytozome v7.0 (c hr-ID scaffold_7; pos 37081113 to 37081657 reverse strand)
atattgtgaaggaagttctctgtacagatttggtggtatgatccttttcatgacttttgtccctttagacttaaatttgatattttattcttccaagctttataacatcaattttactcctgtcaatttgtgagtctccctggagaacaagataaacaatgctttaagccattctgttgcattaatagattaggatgtttgtttcttttacttggtccatgtcatgatagggaaatgaattaagatatgggagattagtaagatatgtcttaaattgggcagttggttcaaattaattccctggaggaaacttcctcttgctgatttcaaatctctctctctctctctcagcatttctttcagtagatttcttctccacgttgcttttatatattcaaagtttactgctgcagtagcatgacctagatttagaacaagaccttaaaattttctatattatacttttcgcatgatttaattttgtgctatgcgatgctctttctgtcataggaacaccaattaatttcagggacttcaaccttcta

SEQ ID NO: 92251 - DNA, 714 bp, Eucalyptus grandis
  Intron number 1 from transcript Egrandis_v1_0.009102m (loc us Egrandis_v1_0.009102m.g) derived from phytozome v7.0 (c hr-ID scaffold_2; pos 63601661 to 63602374 reverse strand)
tccacagtgcggaccttcgttatcgtcaacccaaggtcttccttttttttcttcttccttcacatttcaccttccatttctctttttttctcttgcgttttaagtcgtccttccgttgactagcgtgctcggccagtccttgcaatcttatcttagagggtttggttccatgaagagagtcctcgcttttcacggtacattaatgaccttgagaacggaccaccaattgtatgtgtgctggtgccgtcttctgcaataaatggtcaagataaaaggaactgaattgggaaaagagtcttcaagttaattaaaagagtcgggaaaagaagaaaaggtttgagaacaaagttgggtttaactgattttattatcctgctgctgaccacacacgacacgatagaaacagtgggattctcgatccgtagacatcctcagatgcaagccacagcaaccacctcaccttttccaaccccatcgattataacctattgaaagtgacagggcaactgctatactgctatatcacctcagtcaacctccaaaaatcaaaatgcagttctatttcattgactaagatggaacggggcttttgcatttatcggccatcactgcagaacttagtactaccgttgaaaacaagtcacccgtggatatgctaatgtcgggtcaatagtttctgaccagttttcattacagttggaacatcttccgctg

SEQ ID NO: 92252 - DNA, 1018 bp, Eucalyptus grandis
  Intron number 1 from transcript Egrandis_v1_0.050461m (loc us Egrandis_v1_0.050461m.g) derived from phytozome v7.0 (c hr-ID scaffold_2; pos 57694676 to 57695693)
attcttgaaggtttcaaataactaaattagacaatccattacgtaggagaagtttaataatttaacgattttgagtgtttgattaccctctaggaacaatttacacagtaataagaggaactggaatttaagaacataatatgtgcacattctatcaattatcccaaaaaggaaaaaaaaaagcatgaaaagtccattgtcaaattcagtagataaaaataaaaggaacggttccaaacaatttctcattcaaaaacagaagtataaagaataatcaacatatttcatagaaaaacggatgaaactgttaattctactaatcagaaagttaaaaagttcgaaaatggagaacctcaagtcgtccatgcatgtagtcatgtaccaggttcacgcttcaaaaccattattatcttttcggacgcctgaagttgccttcgaaaacctttaaatttctttgtaatgctctctctccattccactgcaatctcctcaaaagtcttttgacatacccatcttctgtagatgccagattcatcacttttcgtgactgtcgtatctcaagcatgatcatgttccgtgggagccggccgaagttgaagagtgcgtttcctgccaggcctttcgtttccgtgagttacttaattaaatgattagttgaagaaagatgaagagcactgatcttctaaattctgtcgttatctcgtgatttcgtggaagaagactttggttgggagactggaaatttaacaagaaagagaagactacgaagttggacactgggttctgttactagtgttatataactactcttcctctcgctgaggtactgcgcgctcgcacacgctgagcaaatgcagggtcgcttgaaagatccatccttgggcctccgaacggctgtggcagtggccgcgttgctgctctgtcgatttccagcgtgtttggctgctgctgctggtgcagcgtgcgattttctggcaatcttcaacttcggaagctcgaactccgacacgggcgccaa

SEQ ID NO: 92253 - DNA, 638 bp, Eucalyptus grandis
  Intron number 1 from transcript Egrandis_v1_0.021714m (loc us Egrandis_v1_0.020112m.g) derived from phytozome v7.0 (c hr-ID scaffold_11; pos 8274310 to 8274947 reverse strand)
aggtgagtgttgtgaaggttgtgagctctaaattttggatttggaatgaattctggggattgtttgggagaggaagtgaatgtcttcagtgtacattaaatgctcttttgatcagtatcatttagtacaaatctaaaggatcaattttgattacatctccatctgtgggtggtttttaatggtccatccaacgggtatcctttacgtcatgtgcactgtgcaggcatgtttttctgcaacctgtttccaattttgatcgctataacttatgaggtgtctggtttataccaaatcttatgtgtagcatttgctacatccttttgcatctcttttaacttttaacttttaactggactcaacatatatccatatatggatctcacttcagttgtttattaggatgctaatgtgcctgaccactctccccaacaagagtattttcatggtcgtttgttccattgttctgatggaacaaacggctttatggctttatcggcttccatgaaaatcaatgtgaggtgattatcatgtaataattaggaggcctaatccatgccaaggaaatgcagaataatatccttttagactctacatatatccctatggatctcacttgagttgtttattaggttgctaat

SEQ ID NO: 92254 - DNA, 376 bp, Eucalyptus grandis
  Intron number 3 from transcript Egrandis_v1_0.028318m (loc us Egrandis_v1_0.028318m.g) derived from phytozome v7.0 (c hr-ID scaffold_7; pos 50575672 to 50576047)
atctcttgagaaagatcaaggtaatacggttttttctggtctgggttaagcttcttatgttttaaatgttctattgttgattggccaaacaaaactattgtggttgtgctcgagttttgctagatccagtataaatttctcacctagtttggcaatacttaatgcagtattactccaactcccagcaattaatgtgtacttccctcgatctcgaaattcaaagactttttaaaattctcgacaatggtttttccaaggacacgagaatttgaacatgcaatgaatttcttcgggtgttgagcttgtagctaattatttaagtttaacttcttgatgagcaggaatcgaatagttacaaggacgtaccagttgtgat

SEQ ID NO: 92255 - DNA, 658 bp, Eucalyptus grandis
  Intron number 1 from transcript Egrandis_v1_0.011813m (loc us Egrandis_v1_0.011813m.g) derived from phytozome v7.0 (c hr-ID scaffold_2; pos 62943662 to 62944319 reverse strand)
ccaccgtgtggctcgcttgggacactcagaaatcggtacgttcgtcctctccttggggggctctctgtttgattggtcggaaaactgcgatgagggaaatgggaagaggaatggagtttaggagagtaaagatttggtttttaagatttggctgcaaaggaaaatgactgaggatagacactttgtaatgcgtgctgtctaactcgtaagttgctgttgtttgttcgagctgaagcgttgatgatagggattagtgccatattgggtgatgtagaagtacgtgtatgtaagtgtgatgttctttcctcgaaatactgaaaatttgggttaattgagccagcaatcagttcactcaggtacgttagttgcagaaaggaatgtgtatactagcttcatgggtagttgttttgcaactgtgtggggcttccctgagtagacgaccttgctccttagttcttagtaataaaaatgctgatacctctattggaaattcctagatattgtgtaagtctcagtttgtctggttactcttgagatttttcatgtttttttatgtagtggattcttgtcttaattgcatcaactaattcaggatgttgccaataattctctctgttctagtcgttaacaactggagaaattcattatttgtagcatt

SEQ ID NO: 92256 - DNA, 832 bp, Eucalyptus grandis
  Intron number 2 from transcript Egrandis_v1_0.042148m (loc us Egrandis_v1_0.042148m.g) derived from phytozome v7.0 (c hr-ID scaffold_2; pos 39235621 to 39236452 reverse strand)
ttaccaggttagtgaaagttaacattatttcatttgtgtaatgattgaatgtagaagtatgtgtggagacaatgtttagagcacaagccctgtgcactttggtgaatggttccaccaattatatactagacgggtagacctatttatcgaaatttaagctataaaatgatcctgcaatctgctttgttagaaccgttgagaagtttgtgctgaaatacaggatattcttgttctgccttcgcccatctctgtccatgccgtaatttctagaacttgaggtctgtgctatgcttcttggaccttctaattacttactggaaaatttatcttgtttttgcaggaatgtgttgtcatcagtcatatttcaggtccaattcaaaagggttattaagtcaaagaggaattagttttcaaaatacttgcaccaaatacgaattgtagatgtctatatatcctatgtaggtatgtgctatgtcatcatctcaactaaaggtgatcatttccataattggtttgaaatggatgtcctttcatataagatggatcttggaagcatgcaaaatatcaggtccactgaatcacgaaggaagatattaacctgaatttgttaagttgaattatcctgaaatgttttctgttcagtcttgaagtagttcatatatgtttctagctgaagtaattataagacaaattgtgatgactagtgctttctgatcagctgaaggtgaacaaaagagttattccaccctcccttcatttgctcttctggtgtttttacccttcatttcaactaccagcaactcttaaaacaggtgtcacagttgttatatct

SEQ ID NO: 92257 - DNA, 838 bp, Eucalyptus grandis
  Intron number 1 from transcript Egrandis_v1_0.011005m (loc us Egrandis_v1_0.011005m.g) derived from phytozome v7.0 (c hr-ID scaffold_11; pos 32109678 to 32110515)
cggagcaggtatgcttggtgaactgaaaaggcgtttttttggtgattgcccgtgtttcttaccgctttaaagattgatgggtcgattttgcttttttgcgtttttcgcttggtttcttgctttggatgctgctctgtctctgggagttctctgtttcgggtatcgttggttcaggaatacagacaaatgttggtggccactttcttgaatttactgagtattttctccatataccgtgaagatttgagcttctttctttggaaatatggactaggggaattgcggattgggttcaatacagtttgattagttgctttttctcatgtgtgatgtcttgttgattcagtctctctctttttttccccttttgacatgtcgtaaaggccttttcttttttggggggtttcgtgtgggaatcaattcttctgcaatctgctagaggtttctctcccagcagctcaactgatctttgtcattgtccctttgttttggtcctaaaaactatggtttcttgtgcaatcgggatacatctagacgtgaagctagagggtcaatgaagtttgtaactttgtgattctagaaccttctgagtttcagatgatagcattataccttcaaggcaaagtttccatagggacctaaaatcaaaagaaaagctttgaaagttgcaattctttaggctgattgcccttccttctcctgctgtctgcatactcggtttatatagtaatccactgatcaatcttactactttcgatcctttcttttcatattaatcctgattatgttttcacatgtgaaagtttcagaacgcttcacctgaaaaggcttctgagaa

SEQ ID NO: 92258 - DNA, 625 bp, Eucalyptus grandis
  Intron number 1 from transcript Egrandis_v1_0.048620m (loc us Egrandis_v1_0.048620m.g) derived from phytozome v7.0 (c hr-ID scaffold_7; pos 26405407 to 26406031 reverse strand)
actaggttaaggtttagcagtgaaggctttattagtattgggcttaaggcccgtccgcccaagttggacctagaaagcccggctcacgggaatagggcccgtggaaggagagaggtataaaagggaggagagagagagaaaaacacaccgttttactttagaaaaaagacgtaagtttttctctcaaagtacactccctctctctctctcgtttttcttgaaaagcaaaaggaaaacagtgaggcgcgaaggccaatttgcttcaccggattgaacaggatcaagtttctcttcctctaacggcgtcggtgcttaatctgtggctaacaaggtacgctcgaatccatggtgtgctttacgatcggcgatacgtgttttcccgggcttcgtcatccgcattgatttaagggttcgattcggtgtcgaatccagttttcgaggatcagtcattctcaacattggtatcagagccctagttcacgttttcccgacttgtttgatgatttttgattgatttttcgcgaaagtgtttcggccgtacggatcggggcgagaaatcccgacacccgagcgttcttcggccattttactgagttttcgtaagtcgaaactgttttctgaatac

SEQ ID NO: 92259 - DNA, 1018 bp, Eucalyptus grandis
  Intron number 2 from transcript Egrandis_v1_0.046009m (loc us Egrandis_v1_0.046009m.g) derived from phytozome v7.0 (c hr-ID scaffold_11; pos 25882430 to 25883447)
aaaacacacattagcaccaagattgctggaacatagtaagtttcttgctttttgttcctgttaacctaagtaggagccagtgacaacataaaagcatggaatagaaacatatattctgatttaagaaaagtgagttgaatggaactttgtggtggattcacatcatcccaaagcatggtgctcaacaaattcagcttaaccacaaagctttatgactgtcccaccactcttcacattaattaggaaaaaaatgtaaattgtgtcatactctaccattatagcaaatttactttgatattgacttatgtaattgttaatttgaatataacttagtattatagcaaatttgcccatgtttctattgtatgcacatggagaaacatagataagcatggtcacatgttttagaagtttgcattaatgcatatgaaaagtcaacttgtttgtgaaaggaacgtgattaattagggaaaagataaaattgtaagttcattctactaactctaacgttaattcaacaaaaagaactataaatggaactatagacatttccaaaacaagtcaaatgacgtccccattatcgtggctaaaattcgtaaacttgttacagggcgagcttcactttacaaaaactttaggtcttcccaaataaatgtaatattgggtactatatggagattccctcactccatttttgcacgttcctagatatctttgtaatgctgggaaatgcctttaagctcatgtaggtcatcttataaatgatacttatatttcaaaccacaaaaaaaaaaaaaattataaagaacaacaatggtcttttttttcttgaaatattctcggtaaatgatattagaatatattaggatgcatttgtttatttcctctactctttagaccatagcatcacatttaggaatgactctttcttttgaattttaggaatattaagtatgtgctatttaaggcagttaccttgttgcaaacacaagctcttttcttgtcgtgcagtggatat

SEQ ID NO: 92260 - DNA, 991 bp, Eucalyptus grandis
  Intron number 3 from transcript Egrandis_v1_0.018995m (loc us Egrandis_v1_0.018995m.g) derived from phytozome v7.0 (c hr-ID scaffold_11; pos 2099834 to 2100824 reverse strand)
ctgctacgccgtttcaacgtaacgaagcttctcccttttctctttttcttgcctttctttaaaaatggatattctctctctctctctctttctctttctaatttgttttggctgagtgatgacgacgaaggatgatttttgagttcattgccgccattgattgtcttggctccgccattgattgtctgttgtgtggtgtggagttggatgattctttttatctttttttatctccaagagggaaatggggttaattaagatatgattttctgccagaaaaaagaaaaaattataatttttttttagaaaagacagacatggatgagagttcagaccaagcccacgacagcttgccgtgggctgtaacccaccccgtatgattggccgttgaccgctagttgaccttccaaaactggtatgtgtatgtgtttgttgtttttttcacttctcaagagttgtaagtgtggtatatcatcatgactcaagtggctgtttgattcgtgataccataatatataaatctcgcggtaagaatcaagccacatctaattggtagccatgaactcgattgttgtattgcgaaaggcattataaataaaattatgcgacttcgattggtattggcaaaccgggtacttaccgatggagcttgttgatcgctgcaggcctgaaaccagaagacatttgtaaccatagtcacctattataagatttgagattgctcttaaatgttgaatgaattagaagatcatgagccctctgttctgatagatgttgcttgctttagccctgaaggtagtcacgtgtccttggcgatgattatatgctgttatttctcagatcaaaatgacaaatgcctttccaaccgaaaatgtgcatatgttgtgattttaattcttagggcattatagcttgagtgggaaacattctaattgctctctcatatatgtttacaggagaatttcgggcaacaaggagccagagttggaaa

SEQ ID NO: 92261 - DNA, 847 bp, Eucalyptus grandis
  Intron number 1 from transcript Egrandis_v1_0.045506m (loc us Egrandis_v1_0.045506m.g) derived from phytozome v7.0 (c hr-ID scaffold_967; pos 12433 to 13279 reverse strand)
gaagctgtaatgatttagcgccaaactgatgatgttaaaaattttggatgtgtgcgtgggaagcatgatttcggtattgattatagtttttggttagtggtgtgtgcaagtggatggtatattttatagtggatggacaagggataagataggataattgaaggataaagaacatgagatataatttatctaattgatggaaatggatagtacaagatgttttggtaatggaggagtaggtaatggaggaatatttcatgatataaaaactatcttaactctactcctccacaccgatggaggtataaacctcacacactcaaatgaatgaactacaaacctatttataggcatgagttaccgccttattctacctattaagtgtacataaaataatataaaatttcagcttgcttctttgtctcctgcttgttgcggctagtcaagttggactttgcttttcttttcttctttcttccaatcttctcgttccttcttccttattctccaattttctaatctttgccgctgcccaccacttttgttgactttagtttacttctttagcttgacttcttgctgcccacgtaggtttcttcttcagccactaccgatgacttttatttacttttcttttgcctaaagcatattgtagctgccgtcttgttccttctccattaagcatacttaattcttaagcatgagtagtctagtgtgttctagatctttcaaaaatggatcacaatttccaacagatgaggattgaattgatggcagaggagaacttaaatgggaatgcacatatcggagagaaacgcatcaagcactacagcaatttccactgtac

SEQ ID NO: 92262 - DNA, 991 bp, Eucalyptus grandis
  Intron number 1 from transcript Egrandis_v1_0.043524m (loc us Egrandis_v1_0.043524m.g) derived from phytozome v7.0 (c hr-ID scaffold_7; pos 29204422 to 29205412 reverse strand)
agcctgcaaagtcttgtggtggaaagcagaagaaggcattactctctctctctctctctctctctctctctctcatgctgagctattggatgtattggccaactggggttcctttgtagttattgagaatgtttccaatgatgttacatgaaatgaagtgaagatagcagacctttcatgttcggctacgatagcctagcaagttttcaattttttccactacatgtacatttattaggttcttggggagcgactaatgagctattggtcttaagttgagctatcgaagagtgtaatgggccttcatttttgttctttttcttgttagttactgattatttttactggcgactgttttagcgattggtccccgcaacttcaggcaaaaatgagatgaaaaaggaacatgttttatatgatcatcctactattatttttcgtttaacgtcgggtgagttgggtcatgatgggattagattctgtcggcatcccttttatacatgtgccccaaaagtcaaattcttgacctagggccaccttttgactttgggcacacacgcacacacacagacacgaaagaccaatgcagcgtctttcacgtgaagacaaaaaggaaaagaaggtgtgcccaaggtcaaacttttgaccttgggccccaccattaaccaatcttcaattgctgaagagaatcatgtgcagggcttcacttttcttttcttcaattcagattccgcaagcttccgtgcggcaaagaggaaactttgttttcatttatttttatattttcttttttgtaatcacacttcgtgtagtcccacgaaaacttgagacataatttaataacatgcatgagatgcttcgtagctgttggcatatcataaaatatgctttctatcgctgttagtctactgaaataaaccaagagaattttatgatgggattagattctgtgatggtgagcagaaattgagcaagggaaagcagaaggaga

SEQ ID NO: 92263 - DNA, 810 bp, Eucalyptus grandis
  Intron number 1 from transcript Egrandis_v1_0.024534m (loc us Egrandis_v1_0.024534m.g) derived from phytozome v7.0 (c hr-ID scaffold_11; pos 31526395 to 31527204)
ccccccgagctccgcggccgtcgcaacgccgtcaggtaatgatctgaagcggacgcgcgcctttgcgtgagcgtatgtagggcaacgttgttgattttggagtttttttttctatgggttgtgtgatttgtatggtgaatttcccggttttagagatgattgcttgctgcttcttcggattgagctagcgttcgatttctgcctttgtgtatctttctcgagatgtccatttgtgctggagtttgggctttaatttgcacgatctttctcttttgagggagtggaggtatggattatcggtggctgagtttgatcatggccgccgggcattgcattctatgcgtaagcgctctgttttatcataatgttgcctactcaattaggcttagttagatgctgcagagtataaagcaattcactcagaagatcaagtacgtattttttcgcctgttacaacgcttatgctgaacgatctgggggaggtaatgcttttaatagagcttttgttgttcattcccgtgattttgattgttactgcttatttgttgctgtggtagaataggtaacggtgaggaatcctatgcggcgaattgttgttaggtcgatttctggattgggacttattttgtcttgatggtttcactgaagaagagagtaggacgttccctgatctttgtttagcatcttgatgcaaactttgttgcttgaatagaaaaaaaagtcaaaaacttaattaggagttgggtgatgatgttttgctttacccttttggcagatcagagactgatattgtgaacatagtggagcgaa

SEQ ID NO: 92264 - DNA, 954 bp, Eucalyptus grandis
  Intron number 2 from transcript Egrandis_v1_0.009039m (loc us Egrandis_v1_0.008933m.g) derived from phytozome v7.0 (c hr-ID scaffold_11; pos 40380121 to 40381074 reverse strand )
gttggtggctatcctgcgttgtactgagagaggtatgctccgttttgttatggatgaatgtggttttctcaagttgagatttttattgagggcacatgctgttctgtgatctttgtgctctttttgtgactgagattggaggttgggtaggcattccactggctttatgctccttttgcgtgagctattatgattgcgccattgcatgtgaaggacctaatgttttaccaatcgatttcttcgagtgtttgttcctgtatgagctcttgagagctgctagatggctttttgtatttggacaactttatccttgcacattgtagcaaggcaatggacttgcagtttttggacatttagtcatggacactgaaaggagttgccccatattactactaagaagtttgtagtgccctgaacgaaaactatttgcccccatgaacatgttattttgaagcaagtttaagcaatctgctgtcagattactttgtgcattttgcatcgtctaaggattcttctgttctttcttttttcgactaatactacgtagttggctctttctaataacctcttgatggtttaaggattgtttgattgattcaaagagtcaaaactgagcaatttgtcaataggaacaattaagatgaaggaatttctaaatttcatcttgtgattaagcagagactcagaaacaatattaaaaagcaccatagaagccttacattttacattaaatatgtgcaattttggtggtcgtgttttgcttgatgctaatatgagaaatgctttgtgcactttggaaagaatgtaatgagtagtggtggtgtcatgttggtaaagccgtgcttacattttgtgaaggatgacaagtgtgtcttctgtctatactgaaatacaagattctaagccatttctttgggcagtctttccagaatcagggcttttggacgggaaagg

SEQ ID NO: 92265 - DNA, 603 bp, Eucalyptus grandis
  Intron number 1 from transcript Egrandis_v1_0.026366m (loc us Egrandis_v1_0.026366m.g) derived from phytozome v7.0 (c hr-ID scaffold_7; pos 49652552 to 49653154)
caagtccaaatacctcaattagagccactagtatgatgtctctttaatgaagtctttgttaggattttttgccaatcatatatgtaagttcagacattcctttgttatttgattttgaatcaatgagtgaattattcaatgccatgaagaataaaatttgatataatgtaagaaataacttttaccactaattgtacgctctcccggcacgattgtccacgttttggagagatcaaccttgaagtatagctgattcaaaacttacgatatcgtcaacacttgtggacaaaatccttcttaaaagaaacaaaattcttgtaaaaccagctgcaatctggttccactgcatgtcaatgcatctttctgaattacagataggaaaagcagaaacatataattggaacaataacaaagaagaaaggataacattgtaaattcacggaatagaatcaaaatactatatttttcttgtgaaggaactgaggcagacaagtgggatgaaaacgggggaactagaatagattcgagagctctcgttcccctctttaaacagcctcagagcttgcagtttcggagtgcacaaaggaggattatagaaagaaa

SEQ ID NO: 92266 - DNA, 550 bp, Eucalyptus grandis
  Intron number 2 from transcript Egrandis_v1_0.026366m (loc us Egrandis_v1_0.026366m.g) derived from phytozome v7.0 (c hr-ID scaffold_7; pos 49653309 to 49653858)
cagtaattccctcctgcgcttcttctgattcctttgcttccactggctttattcttatttcaccaatgatgccacctctaattttgctatgtaatatgatgtaattatacccagacaatcaagagtttccttttttctttctaaaaagcttcccttcgctccatctatttttctatttcgacttcaattctctgatttggtgagttttttattttatttagggtcatatcctcccacccacttcctccccgttttgattttgatgcagcaagtgattttctgatgaactgatttctgttaattcttgatgttcctcatatttcaatcaatctagaggggatggatatgggggaatgttaactcatctcagttttaatggtgtgggatgacttttattaatcgcttatcaggttcaatcaattgaacacagtcattttcggaataaagattagaataaccactttatttgaatttctagtaccattttaatgccgaacttatattccttcttctcatatttgtcagctaaacaagacttcaatcatagtag

SEQ ID NO: 92267 - DNA, 722 bp, Eucalyptus grandis
  Intron number 1 from transcript Egrandis_v1_0.038626m (loc us Egrandis_v1_0.038626m.g) derived from phytozome v7.0 (c hr-ID scaffold_2; pos 52602421 to 52603142)
tggtattcattgttgttcctggtgagccggatttggttcatgattctcagacaactatagggtgataccaagtgaagaatacacgaacaggaaggagaaggccaattaggtacgtaagtacatgcctgggcaagcatttggctatgctaattgtagtaaacttcgctttactaatactggtttctgtattaggttctcttgctcttctgaaaaagagaaagagagcgagagagtaaacttttataaaagttcttcttgtattcgttctttgtacattccgtatttatatacgagaaacaaagcttgtacaactgttttaacagaaatgaaaacagaaggagggaaaataacagaacatggaaactattcagttttgacttaaaactgaatatctattattcaatgagcacgtgttgttgatgtaactcatgctttctttgttcttcttttctttatcctcgcaagtagagttgagtttatcgtttccatccttgatcgaatcattagcaccaggaatggagagagaattcactacgtgagctcagccgcggaggtcattggcgcttactctgctcagttcgggagagacatggatgctttgactttaatttgaacttctttacttcatcttccttgtttccattcaagctcggctcttgatctccagcacttgttttcgattctcagacaactatagggtcggagattgagctgctgggttc

SEQ ID NO: 92268 - DNA, 600 bp, Eucalyptus grandis; identical to SEQ ID NO: 91695
  Intron number 2 from transcript Egrandis_v1_0.000947m (loc us Egrandis_v1_0.000947m.g) derived from phytozome v7.0 (c hr-ID scaffold_7; pos 44875654 to 44876253 reverse strand)

SEQ ID NO: 92269 - DNA, 963 bp, Eucalyptus grandis
  Intron number 1 from transcript Egrandis_v1_0.028450m (loc us Egrandis_v1_0.028450m.g) derived from phytozome v7.0 (c hr-ID scaffold_2; pos 2343081 to 2344043 reverse strand)
aagactcgagaagctgccagacggaatcgccggaggtattctctttcttttctcttttgatcgggttcttgaatgagatctttgttttgagaattcgcagttgtgggtatttgatcttgcaagttctgatttttctgacttcctgaattcagaaattctttgcatgattagcatccagccctccgccattgggtttgtctgttttttctattttgtttctgttttgtttgaattgatgagagaacggtagttcttggtgcataaggaagttataatggcatagcaaagctgttatcagaactgatgggcattggaatttgaattagaggataacaatgaccggccaagttctggagaaaaacttgatggtagcattgaaattagatcgtcactaatagcagaatccaagagctagtttgagatttaagtcttatcacttctcttcatagctagcaggcatgttttgtcaaactagccaatatcattccatgattgccgggtagccaggaaaatatgcggctgtttctccatcgacttcaaactagggagtgatgaccttgagttatcattgggattgagatatggtcggttaaatctcaaattaaatgcagaatttgagcaaagaatcaatctttactggggaagttcaatgtcctgcgactgtttcagcatatcgatgcaattgaatcagaagccatgttcatttacttcggaaactttgtgcatgagaaatattgatcattttgcaatgtagccagtcaaattcatctgctctcttgatgatggtgatgaaaatgcattaccttttatctatatgttggatcaaagattgctggtagttgaatcttgtgatctttcaatatgctcttgcacagaccaattgagacttcccaataacgtttgctcacttctttttgactctgcccaggcgcccacaagctaaattggcaaagcaggctaaaa

SEQ ID NO: 92270 - DNA, 404 bp, Eucalyptus grandis
  Intron number 1 from transcript Egrandis_v1_0.042542m (loc us Egrandis_v1_0.042542m.g) derived from phytozome v7.0 (c hr-ID scaffold_7; pos 2800340 to 2800743 reverse strand)
ctctctcttatccttcctggtaagtacggcaagtattattcgctcgctactaaaacactgattagtgatcattttttgagtcgcatcattaggcgtagcaggaaaaaagagagcagggagaaaaattctcccatgatttcccttctcagatgctcaacatcttgcattgttcaaatcgaagaaagagaaatataaacaaagactgaacttgtgtttcccgtacatggagacgacttttcaggaatctaaactaatcaatctcatggaaatgaccgccaaacatgaatctaattggagatggagattaaatagcttgaccctttgtttaatttggttttctgccttatcagctcctttttaacttctatgcaattcaggtaacttagttgatattgttcttggat

SEQ ID NO: 92271 - DNA, 692 bp, Eucalyptus grandis
  Intron number 1 from transcript Egrandis_v1_0.024007m (loc us Egrandis_v1_0.024007m.g) derived from phytozome v7.0 (c hr-ID scaffold_7; pos 40907735 to 40908426)
gctgggagcagctccgtaaagcctttgcaggttcgctctatcttctttgtcctgccttctcggattcttaatcgcgtgtggttcggtcgtcgacgatcgtgccccgttttttgtgtttagatctacgatctgcgtagagatcgtgatctggtcggagtgatctttcggtggcgatccattctagactgctcgtgctcttcttttttgggttgatcggttgttataacgaactatttctgggtttgttatttccttttgaactaatgtcgttcgctgctacaagtaaagaaattgttctctaccttgagtgccggatatggcgtggtctcgaaaaaaatgtcaaactttattgtctaatataacgatctggaaggatggggaacaaatgagaagttgatcatatccatattgggtcataggaatgcggcgcagaggaagctgattaggcaaactatgccgagacttacggcgaggacctcctcaagtcattggacagagaacttaccaatgatttcgaggtctgatcttcttcaattatttgttcctatattttcgttgattatgaacgtggttgtacgttccgatcataaagccgtggctataagatgacatgattttctaaatcctttgcatccctgtaatttcccataccttcagaggctggtggtcctttggacacttgatccagctga

SEQ ID NO: 92272 - DNA, 432 bp, Eucalyptus grandis
  Intron number 2 from transcript Egrandis_v1_0.046436m (loc us Egrandis_v1_0.046436m.g) derived from phytozome v7.0 (c hr-ID scaffold_7; pos 29338947 to 29339378 reverse strand)
caagtgtcaatttgtccgaggatcaagtctctaatatatatgaactgctgggaatgacaataagcgatatggtccaagaggttttacgctctacaatctccgtgtgcttccgtgctaatgcgtgcctattgaatgcatcgtgtgaattatttcgcataagactttctttgtttgattagtgtggcccaaatgactctctgcttcaaataattgccggtaaaaagaaaagggcaactcctcacgaggtttgttatattgacaccccaatttccacaggataagggtagtctagtataaatagttttttttagttctgtctgctgttctggattaattgttttatgtgcagcgatccgatttatcgtcgctttcttctcaccaaaaatttgttggttttgtgtttaaagggcctaatcgaagaggaaaaactgg

SEQ ID NO: 92273 - DNA, 887 bp, Eucalyptus grandis
  Intron number 1 from transcript Egrandis_v1_0.046797m (loc us Egrandis_v1_0.046797m.g) derived from phytozome v7.0 (c hr-ID scaffold_11; pos 24634067 to 24634953 reverse strand )
gaagtcatctacaaaatcgaagttccggcgaacaggtgactgcgaagctcattcggcattcggttagatgttgtgtgtttcggatgggtttggagctgtttcgcgggtcgtgggtgaattttggttcgggggtttaagaggctagtgtccgacttcggatgggttaaagtctttcgcggaccatgttgcttgtaatggctatcgagatgctgtgtggttcgatcttttctttgatgttatgatgttgccaaaggtttttctttgttatcttttcggtcgatcaatgtgaaggaccaattgcatgtaattagagacttcataaacacattaccacctgtaaaaggctcagcttttgagtagtccatgtgatgtagcatttatagtgtgcatcgaggcttttcttacttatgtttaaatagtttcctttaatagtctcgaatgacattttttcaccactttgtgaagaattctagttgtatggggaagcgggttgatattctgacccttgggattcccggttcatgataatggtcctgaaaggggtcaatcttgaatttagtttatgttcaacattttgtcatgctagatgggtcaatccccaaattttataggtattattgtcggcaataaacgtaacaagcctttttagatttggtcagcaggttgcgatattgactccttaatgctgttggctttattttgaatcatggcatctagaaacttcattatttagttataagtaaagtttttcaaagagatgacgggtttatcatcattttagtctgtattggtaattaatgattattcttcttgataaattcgtgcacgtactgtagaaatgactatactattataataataaggtatcctctgggaaatgcacagat

SEQ ID NO: 92274 - DNA, 799 bp, Eucalyptus grandis
  Intron number 1 from transcript Egrandis_v1_0.007235m (loc us Egrandis_v1_0.007235m.g) derived from phytozome v7.0 (c hr-ID scaffold_11; pos 44585086 to 44585884 reverse strand )
tgatttgctcggggcgcgaattcgggggcgtggaggtaatgaattggctgagttcttttgggtttgatttcttgttggtttcgcgtgggtgttttggtgcgggattctaggattctgggggaatttgggtaggatgcggttggggttggttctttgggtgtggtgaatcggtgaatgcgtgtgttcttgttttgggcgtgattggtctcccctgcgtggctcattgttgccgatgccttgtttgcgtttgattgtgttggatgtagatttggcttggttttcttggggaatgatttttgtgggtagcttttgggatttcttttggacttaatttgcttaactcgtgatgctggctaatgctacttcctctctctgtaacgatgctgtgccttttctcttggtctgtttgattgatgcatcatcgtgcaattttcgtattttgtctggagagtctgggagtcatgctcccggtgcacttgtgtgggcttatagctataaagcatctgggaggttcatctttctggtcttgatgcgtccgtttggggagcgcaagtatcaagtggggtccttgagcttggttttctcgcgagacattgttattgttgattttctcagtggcaagttgcttataattttctagttgtcttctgtacaagtcactttagctgatgccaacgtgtttatattgctctgattcttgtgcagcttctgtcttttttacatgggttattagtattcatgatattttatgtcctgtgattcagtaggaacacattttgctgctgatatagtttgctct

SEQ ID NO: 92275 - DNA, 592 bp, Eucalyptus grandis
  Intron number 2 from transcript Egrandis_v1_0.038912m (loc us Egrandis_v1_0.038912m.g) derived from phytozome v7.0 (c hr-ID scaffold_11; pos 19823623 to 19824214 reverse strand )
tggtcatcttctcagtgaaaccccaagtcggtatatagcacttgtactctgttgctcagtttgtcgcttttcttgtcctttctttttctcaaatttcaataatgggatggaagcacatatatggtcgatatgaccacaagccaccaatgttcttcagctttgagttggtagcagccaaacatgtgacatgtgatttcacaacatgctagtgcatctcagttatcaccagattttggatgaatgccttcactattctttatcataacttttgcagtgatgatcgcatgcttctacaacatattctcacctaaagggataatttaattctgttgatgaccgtcaatggtccacagaaattaaagaattatgacattattctgtagttttactaagtgatgatacaatctggagaaggatgtttccattgatatttgatttcaaaagtagaatggatattggttctagaggtcatgcatcttcctcattgctgaaaatgttacttatagtagaaattatttggaatattttttaatttacttttgttgttctttctctagttaaaggtgttgtctcccagttgaggccactacta

SEQ ID NO: 92276 - DNA, 791 bp, Eucalyptus grandis
  Intron number 1 from transcript Egrandis_v1_0.038912m (loc us Egrandis_v1_0.038912m.g) derived from phytozome v7.0 (c hr-ID scaffold_11; pos 19824218 to 19825008 reverse strand )
ccttcggcgtccaagtcctccccgacaatcaagccgttgcgtatccctcttcctctctctctctctctctctttcctctctctgtggaagctctttcctctctctgtggaagcgtaaaggaatgcgaatgatgcagtgatgtgattagcgtcaagtttcggtttttatggaataggcgtgaaaaaggtgtgagctttgcctttgccatgacgtatatttgctgccccggctctgcgtcggcgtgtcactattacagggtttggtttagttattggaacgacattgctattcaatactgaaacagctcaaaatctgtaataagtgtatgagaattcgatgtcctagctctgcctcggggttttgtatttttgctcacggcgaaaaaattcaggctgttgcttcatccttttagttgctggcattggttggtgtaagttaattgggtggaaaatgacaatttgtgtgtcttgtcggctgagcaagttcttgagcaaatccgatatcttgcccgggtcttttggactgtgaaatctcttcttagattttatgttgctctttgagaacgagcaagttggtttagcgattgtatagcttgcggttcagtagacctactacttttctttttcttcttgtttgtggatgtgagaaatgagtggatgaacaattgcgagttattctacctcctggggtttcttgacgggtttaatcttgagtagcttgttcctctttttcccctctctttctagataaagaaacttaaattttgtgaaagcaggtagttgaagacagtg

SEQ ID NO: 92277 - DNA, 650 bp, Eucalyptus grandis
  Intron number 1 from transcript Egrandis_v1_0.023423m (loc us Egrandis_v1_0.023423m.g) derived from phytozome v7.0 (c hr-ID scaffold_7; pos 18958839 to 18959488)
tctagatcctgcccacctcccgcaatccccaccaggtaatgggttttcttcagcggtggcgaattcacagtctttgatgcggtctgaacagctgcagtctcccgtctcttttttggccggtcaagtgcggttctttttgcctcgggtcgaggccgatgggggtgtttcgttctgggtgcctgctgctttcggcgttggtgttggtccgggaatgctctctagcgttttgagcagtaatggtgttggatttggaaggacccagtttgggtttgagttgggatttgtttattcttggctttgtcgagttatgctagcttggtcgttttgtagtgactggtcgttagtagattaacttaaaggagagtaatttaggtcgccagatcgctttcgggctcccgttttgtcctctgtttttttgtggaggatatgcaagattggcgttgtctgtggaaaacgaaatccgggaccgttcgtgatggttctcttaggttgcgtgaggcgggagtgcgtgcggagaatgagaaaagttggatggcagggagtgatcccaaatgaaatttatcagtggacacttgtgctaagtcgtgtgtgctgattttcttcttctttttttccttttttttttatcagattgaaaaattaatagcaac

SEQ ID NO: 92278 - DNA, 790 bp, Eucalyptus grandis
  Intron number 4 from transcript Egrandis_v1_0.015452m (loc us Egrandis_v1_0.015452m.g) derived from phytozome v7.0 (c hr-ID scaffold_7; pos 44087351 to 44088140)
attggtcctgtccaatgtaagatcacatcatatgcgtaagtttccacttaatttcagttcttatatttagtgagcttttttatatctgccataggacataagctttgtcttgcagcttagtcctatgcttgaactcttttctcatactaaccagaaaagtttcactgagtgacagactaggtggaaagagagaatgaatccggtggttagtagtacttttgggttgatagggaggaagctggaaaagttattgggtttgccctgccatattagtatagcttggtcgctttgagctttttaaagttaactattggcaggatttctaatggcaatcaatcacgtgtaacattggagtataacatggcttttactggaactggatgtctgtgatcagttgtggatatgatagttgaaattttcctttttccaaataatttcatgctaaaataaacatagataatatttctctttatttcatttgcaaataattgaaatagtatgtggtgaagctgacagccagcctcttcatccgttcatttgtctcattatgcctttgccgaaatgtgctcttagagtcctacagtaatacgtggaacaatttaaattggtacatactgattttttgttttcagatctaatgagctgatatagtaggtgctgcattttatttcaaatctggtatattaaaataacttttttaatacactatgcagtggcatgtgcctcactatatttctccttctttctttttccaggtgtggcaatataaactgggcaaagcgtacaaaat

SEQ ID NO: 92279 - DNA, 1058 bp, Eucalyptus grandis
  Intron number 1 from transcript Egrandis_v1_0.011984m (loc us Egrandis_v1_0.011984m.g) derived from phytozome v7.0 (c hr-ID scaffold_2; pos 23778660 to 23779717)
ccgccgtcctcgacgcccctgtcttgctcattcaggtactgcacatgaaaccccgtcttttgacacttaaaaagagaaacatcatagaccatgcgcatgccggaaagtgaggttccacgacgtgtggctttcctcgtgctcgaaaaatttaaggctctaaaagagaaacatcacttcacttaacacagagattctcccatccaaaccgcgagcggccctgttccaattttcacgcacacgaaaggagtccgccgtccgcaaaggtcggtccgaggttcttctttcgtttgccaaaaagggtcggtcggtcgatgatctccatgaactccgttagagctgcatgctccatcatgacttccctgcaccgtttctctctgagaaaacgctttgtaaataaaagttcacgaccgattagtagtacatacggtgcccatgcgtcgtcgtcgtctcggattttcaaatgggtcctttgttgctcggcttgggattttagcagatccccagaacacgatagagtccactcagaaagtcacaagtttgtccttttaaaggctaacatggcacgttctatcttcgtcatgatcgggttggctgtcgtcatttgaaagttcgaactatcaaaatataaaccatctcaaaaaagagaaccgatcacgagttttcgatcataagaatcaatttatgtaggaaaaaaaaatgccgtccatagaaaattcttttcgatgtcgggagtggggtggccccgcggcctttctagcaacaggacaaggaatgggcaaaaatcatgcacagtgcatttcgtgaaccacgccccaaccaaagattgtggaatccaaaagggagctcaagtaccgagccccacctgggaatatgactaattattaaactttcttggatgtaaggatttggagaatcaacatctgagctgatgctgctggttttgaatcgatacggtaaatgatgtgacggggttttgtcggcgagtgctgacgtgcggaacggcgtcgtgatggtgtgttgcaggtgactcgtctcaagtgcgggggtttcatcttcgc

SEQ ID NO: 92280 - DNA, 1047 bp, Eucalyptus grandis
  Intron number 1 from transcript Egrandis_v1_0.020913m (loc us Egrandis_v1_0.020913m.g) derived from phytozome v7.0 (c hr-ID scaffold_11; pos 22777115 to 22778161)
gcgggctcaagaagcccaagcaaggttcgtccccctgtgtcctttctttgtttctgtcgtttcgcgtgttctggagctcgtgcttttctttcttagcttgggattagtggttgctctgttgtttggtcggtgagaaaatcgtcggggaatgtatgagccttgtagtttccgagtcatgcctagtcgttcaatgccgcatctcgtattcttggcaactcctaggtgttggagcgttgttgatttgacttcagctgtcgccaatttgcgtctctcttcccccttttctggtcgcttttgtgtgtttgccctattctgagccgggaggtggaaaatttgggtaatttgtggtgctttaggaattagaagtgttggttagttgtttgccaagttctttttttttttttttttaataaagaaaacataaaagatctgtttaataggttgtagctacaaaaggtttttcaggagtgaatgatgcgaagactcaactgagaattgtagaatgaaagaacctcttaccttattgaattccatgcctgtgtcatctagcctcaggtgaactttacgatgacatattgtttagagacttatgaacccggttcctccttgctatttcatgttatgaatatatctccttcgatgatgctttgagtgcgcatttatgaattgtggcttggtgttgttatagcacctggttcttatgatgtactttctgatgggagtactataaagtgtgaataagaaaattatgcgccagttatagagcagtcatgttagtgtcgtcattagtatgaaacaacagagtgctcaggagtgcctggagcattcgttacaaggaaaatgttcgattttgcaatgttgctcatgaactttgaaatgaagaaagaacttgttctccagaatctcggtttttaccaaaggtcatacaattacctgaaattatgtttttgataagcagatttgaaatcaacagaatctttaactgagaacacttaataatgtgttgtaacagaattggagtccttatctggtgtaggaagcaaatcg

SEQ ID NO: 92281 - DNA, 978 bp, Eucalyptus grandis
  Intron number 1 from transcript Egrandis_v1_0.039820m (loc us Egrandis_v1_0.039820m.g) derived from phytozome v7.0 (c hr-ID scaffold_11; pos 38389964 to 38390941)
acacgtattggcaacctcgattagaacccgaggttcttcctcatgtaagctcattagaaaatgtcgaaaaggaatacttcatttatggcaagcgcagtccaatgcctttaaaataagttgatggtatctgctgctttttttttaatatatatatatatattataattaatctttagataatattaataatattatcgagatgttgatacatcaatgttggttcttccaataatttctttttccattttttttcattaaaatacaaagaacatctaggttaccatgcaaattttagcatcaagaagattaactgtgtcaaagcataagaagtcaagatactcaagagtagttgtttaggttcatttggagcaagtttgaacttttcacattttccttttatcgtagtgtttgaaatttgacttttattgcacattgaacatcttaaaattttgaaacatatgaattttgacatgtgtggttgtatagactctttttagtttattttgacatggtaggtttctcacaatgctctttattttattttgagcattctatttcattgatcatcatagtcatagtactatgtagttcttgtagctcaaaatgcaatttatgttttgttctatacaagttagtttcaagaattgtcaatgttgtcattatagtcttctccgcttgcatctcttgagaatgattttgtgtatggcatgtggttcctatagtattatgttattgatttaactcataactcatatgatgctcaaccggtcaaagattaaatggcaatttgagagactgacattcagtgcaaagtggaccgagtctataaccaacctctttatcggtttgttggtggatgaggtcaaaaagggaaatcgcacctcttctacttacaacaaagcggggtggaagaatatatagaatgaattcgttaaacagacaggattccaatataacatagtacagctgaggaacaag

SEQ ID NO: 92282 - DNA, 500 bp, Eucalyptus grandis
  Intron number 1 from transcript Egrandis_v1_0.025020m (loc us Egrandis_v1_0.025020m.g) derived from phytozome v7.0 (c hr-ID scaffold_2; pos 18343704 to 18344203)
caagctcgcgatccttctcatctccgacatcttcggtgtgtgatctcacgcttgtgaaagttctgctctattcttttccttcattttttgttctagttcttggcttcactacatggagtgggcttcgttaattgccggctgttaggattttattagtgagtttttgtgatgaatggtcgtaagtgaagagacaagagcttagttttgattagggaaggtcgactttgtggtgttatgactgtttataatcaatggttgacttcagtttaattttctctttccttcgtttttgaagtgcctgcacattcacgcttttcgatcttttttgtgaaactttcttccttttgctgcggtctcgagtcttgatgataagttcggggagtcgtcatgtggaaagagaatggatatcttctactttatcgttgaccaaataatgtgttcggccccttgtcatgtatatatggtattctaattgattgtgtgtctcaatggtgcagggt

SEQ ID NO: 92283 - DNA, 959 bp, Eucalyptus grandis
  Intron number 1 from transcript Egrandis_v1_0.037424m (loc us Egrandis_v1_0.037424m.g) derived from phytozome v7.0 (c hr-ID scaffold_7; pos 12140967 to 12141925 reverse strand)
atccgtgcaacatttctggtatgtccctccaaccaaagtgcttcctcatcctctggttttttcagattggcagtcactaatttcttaacacagactgtttagttgcattatttgaatgcgttgttgtcaaggcgtgaatattatgcgtggtcgcaaattcaatcggtgtttactcgaagtctccttttcagttgatattagttttatgacgggatcaacataagcacagaaaaatgagataatacatggcacatatacccatgataacatcgttgacgcaagatgggaccatcattattgctctgattaactcagcttgtaatttttggttttagcctcagaaattttcatgtctacttcttttgttcgaaagggtaagcaaccattcacacattctggacatgctcgtcctgctctgaagtagtaattgcttttgctattcgatgtctctttgccctcataactttgatgggtgatctattgttgcatagcttaattgctgttctctaaattgttgttccatttgataatgagggtaattagtctatgattcagtcttgttgaattcaatttgttgattacgtgctctgctattctaggggttggattaatttagtctgcgttgcttcatggttattagtatcaatattatgtgttgtttcattctatcctaaaaaaggggtggggggtaggaaattagtgagctaggcaacttctctgttgatgataggccaattgctgcatttgtttttgtatacatgtatcttatgatcgcaaattagcataaagactctggaaatacaaaacatagagatatgaggaagtgtctttgtggatttttgataaatgtcgagaagaaaaagcacattgttacgtggaggtacccaagtaacgagtaatgcaggctttcaggtgattatctttgttcattcgttcatgcagacattgcctgcacgcag

SEQ ID NO: 92284 - DNA, 852 bp, Eucalyptus grandis
  Intron number 1 from transcript Egrandis_v1_0.002842m (loc us Egrandis_v1_0.002842m.g) derived from phytozome v7.0 (c hr-ID scaffold_2; pos 43913745 to 43914596 reverse strand)
ataagaggtctggcggatttttgaattcagcattggtaagtttttaggcaaatgattaaccgttgctttgcaattccacgaagtcgtcgaattatgattgaggtggatgattagcatgaattggtcttttcagtaaaaaatgacctttttatcattaatgttctgcatcctgaatattttttgttatatcttgctaactagtgttcatggaatgatttgattgttatgactgcttctttggacgaaaatttgttttccgttccatagactatgagctttcagacttgatctattttactatgacacgtgacttgtgttcttctagattaatagcatgtttgttccagccctttttatggatgaagaatgcatataattattagtgaatagaatgagtgctctgcaatctgttgtcgatcaacctgttagagtaagtatccgtccaatggtcttgacattttatcaccgttagtgttaggcttgacttattggacaacctttctactctccttctcttctattctaaaggaagttaacagtgttctctgttctactatagtgaagggatgctctctcttttgatttgtcggacatattaatgtagatcttctgaaaaggctcagtcttttgaagatgtggatatgttgaagagagtatggatgcatgatataggctttaagcaaactgcgcggaaggctaaatgttacctttgaatcaaattacttaattgcatagcggaattcatcttaatgttactactctttttaagtacagaatgagacgaagtttcctcatttattttactttgcttttgcagataactctattctacgcagcagtgcttgctggtct

SEQ ID NO: 92285 - DNA, 602 bp, Eucalyptus grandis
  Intron number 1 from transcript Egrandis_v1_0.018864m (loc us Egrandis_v1_0.018864m.g) derived from phytozome v7.0 (c hr-ID scaffold_11; pos 24308657 to 24309258 reverse strand )
cgacgagaggacgctcgatctcttgatctcaacaggtagattcacaatatgctacgacacttggtatgccaatttcgtgaaaggatcgcgcttccgtgtttgtgtttgcatcgagcgtattcgtgctgatagagaaaagaaaaaaaaaagtcaaacgcagtggagatttgagaattatgagaatttggggacaaattttccgtttccgaaatcgagttttggcatgggattggtggtgtgactaaactggaagctgtagaatcgaaaactggaattgggtatatctaatattttggttgctgattgtatgttgcttgtactcagttcatgcctttatgcttacagtggaacaaatgtcattctgtcctgttttgaggatcagccatggctcattgtgcactttagaactcacagaatctagggacttgaataatttctgcaatgaaaaattatgaagatcgaggcagaggaactactctgctatttgctgtcttggtttccttgtaatgcaggatagtatttgagctttgttatggtaatgcttacgagtctctgattcatatgcaggtgagagcgagaccttcttgcagaaggccattcag

SEQ ID NO: 92286 - DNA, 893 bp, Eucalyptus grandis
  Intron number 1 from transcript Egrandis_v1_0.008396m (loc us Egrandis_v1_0.008396m.g) derived from phytozome v7.0 (c hr-ID scaffold_2; pos 46080713 to 46081605 reverse strand)
gagagggcgttgataaagttttgggtttgctcaaggtgagatctttcgtactcaatcacttagcaatatattggatgttggtttagtgcagaatacttttgagtatattttatgcggtggagtggttttgaattaggcttctttggtttgatttttcattgagatggtgcgaaccacttggttgtgttaggctcagcggagtgcgtgttgggttattaccactttgaagcctcgtcgaggtcagggcatgatggtgctttcatgtgttgttgccagacgtggaacgcctagtaatatatactcttctaattgctattttagaataacactacaagtggaacgcctctctgttcttttggtgtcgtattgttcacgatagtgtttcttttttttcccattttcttgtgtcattcctttgtgttccgttgcttgaatggtattattttgtttctactgaagaatgcatccttgtgatcatcttcgaaggcaagaagttccattagttgttttgattacctcttccatgactgttctgactatccccaggtttctgtattgcaagacaacataggtcactattctgtccagtctggtgttgaagaagaatacctatgttatgtacgactataatattgtgaagggaatcccaagatctgctattaaattgatgccatcctaaccagactctagttggcagttgttcatattaagaaatatatcggaagaaaatagttgcaaaaggcttgtcttaagaaatgataatacaggagagtaaatttaacaggtcattcattttaagaatgcttagagcagagcacgaagaaccacttactttctttcttcttaaaacctgcctctgatattctgctctcttgcaggtatcttctgctatt

SEQ ID NO: 92287 - DNA, 723 bp, Eucalyptus grandis
  Intron number 2 from transcript Egrandis_v1_0.055038m (loc us Egrandis_v1_0.055038m.g) derived from phytozome v7.0 (c hr-ID scaffold_2; pos 42970216 to 42970938)
attgctagattcgggaaaattatttttcgtgggtaagttgcttaaattaattttcgtgaataattagctactgctactttatgtaacatttggctctgtttcattggttgaggtccctgtggacctaaacttggttcagagagagttcagcatttggcaatggttgcatacaccaaggaaattcatcaagggcttgcttgtttagaattacatgagtaaaatgtacccttttgcttttctgcccaatttatttaaaaaacttatgaaaagtatatatgtggatcttcgtgttgatgtatattgcgcaagtttcaagtgtttaggaatataaaaaaaaaaaaaaaagaagtcaaagtgcatgtgttgcactatttagattatacaaaaagcaaaatggaaatagctatccaaacacacccttagtaaggctacttaaattttttagaatctcaatattctgctgcatgatcatgcaaatttctcatacttcagaacactagcttgttgtatctctttaaagtcgcgctctacgttgcaaataccactcaagctaggcattgctgctaacaaagcataattgttttgcatagttgggaggttgaactccttataataatcattttcagtttagttgtgaatttttggatgacaagatagaacataagcttaacataatttttgggcgcaggagtacttcatttccagtggaaactcgtggacata

SEQ ID NO: 92288 - DNA, 579 bp, Eucalyptus grandis; identical to SEQ ID NO: 91686
  Intron number 2 from transcript Egrandis_v1_0.034759m (loc us Egrandis_v1_0.033203m.g) derived from phytozome v7.0 (c hr-ID scaffold_11; pos 4629052 to 4629630 reverse strand)

SEQ ID NO: 92289 - DNA, 715 bp, Eucalyptus grandis
  Intron number 3 from transcript Egrandis_v1_0.008094m (loc us Egrandis_v1_0.008094m.g) derived from phytozome v7.0 (c hr-ID scaffold_7; pos 32687555 to 32688269 reverse strand)
caatctcaccgcctcaactaaatactccttctccagtttgcttctaattctatatcttcttccatctgattaaatttttctcttttgcattatttaagggttagttaggagttggtttgatgacatagttctcgtcctggtcattaaatgggccgatggtacatcaaaagaaatgggcggtggtacattggcacctgcaccagcagaaactgtttgattgttagtgtcgacatttaaacctccactcttcaagttcacatctaaaaacgggtcgatactaaaattcaattttttgactatgctacattagcatgtcatcatcacactcatcgcatttgcatatcatgttttctttttggcgtgtccaagtagaagtcaataatttatttgtgaaaattcaagttacacaagtattgtactggtatatggcaaggatggagtgagtgcgactcttaagtcttgcaaaacactttagtagagttaatcaagtgtgagaacagtgtgagagtctgcacacacagggctgccgctaagaattttcattgattcaattgacttgaacacgccttaggacaaccattttccaattcatgtatgcacgaactttttatccttccgattggatctgtcattagaattgttctcggcttcaggccacatgaatgaataatatctcgcaggttgggtgaaaatagagagttcggattcagattct

SEQ ID NO: 92290 - DNA, 786 bp, Eucalyptus grandis
  Intron number 1 from transcript Egrandis_v1_0.005843m (loc us Egrandis_v1_0.005843m.g) derived from phytozome v7.0 (c hr-ID scaffold_2; pos 7229353 to 7230138)
tcccctgcctcgtctctggattcttgcagcctgaggtaacccttctcgaacgttctcaatctttgatgggttagaattcgtggggtggtggtcttctttcctttttcgggtttggaacccggttcttggtcttcgtctctggttcttggattgatctcgatgttgggacgtgagggtggtgttgtcttgattgcatggagataggtttggccggagaaagttggtgtttgttgcctcgttggcatgttcggattgcgcaggagttgtttttcgtgatgagtcgttgggattgcttggtttgaatccggggtgcctggtatcgacgtgcgcatcgacgggttttaattgtattagctgaatccttcgccttcgaatttgttgccttccgtttcgttgtctgaagaattctgtgagataagcgctgcttcttgcgtgtgaaatttcattggatgatgatggcacgagtgaactgtctaggaaatttactgtttttatggtcgttgctctgttcttcgggttggagaaacgcggttgattcgaaagatcaggttctttatgacccgacctctgccgggttattctatgatgagtctgtagttctgtttggtttatggaaaatgtcaatgactttggatcaaggaattcttcgttccttttcttttattctgttatggttgtccatttacgatataatcttattgccagctttgaagcttgtgctccaaatctgaattatgtttaatgtctctagtgagaagcaacaatagcctcaatcgagctaaacct

SEQ ID NO: 92291 - DNA, 1015 bp, Eucalyptus grandis
  Intron number 3 from transcript Egrandis_v1_0.049614m (loc us Egrandis_v1_0.049614m.g) derived from phytozome v7.0 (c hr-ID scaffold_7; pos 1037850 to 1038864)
gcaacgagggagcttgaaagatcacctctttgaaagtatgcgcacttgtcctttaacatgtgcttggtgcccttaatgacatgtcctacattatgtggtaaaacgacccacctgtagctggatatggaagtcatgtctcccaagaaaactatttgattgctactagaatctggataataattttaaggaggaaaaaatgtcacttgtccttattatggacgtctttccagaagattgtagggttcggaaccataatttcctaaataatttacaatgctcatactctgttgaatgttcttctgcctgaaattttttttttatgtaaattgcttttttgatgttggtgccaccaaccaaaaggatgcaataccagagactttcggtgttatcatatactcagaggacattatagttcgatgccagggaaaaaaaacagatatagcggaagatcatgtgatatggtcatgaaatgtcactttctagcagcttcatccgtgtgtgattttagtaacgttttatcatctttgtctctcagtagtacatcttagggaatcctgagacttaattctctcaaacttggtcacttaggtgcaagaacaccagagttgcaccgtattgaggatgaaacttagtacaaagcttgcaagtaggctagtaatgatatttaatggaagggacatgcttgccaattgaacaactctcgaaagatactaaatgtttttaatagcagggcatattcgtttgcataagcgttattttcatttccacgagaaaagaaagggaatcctgctgtagtttctaccatattcttgtcctgcctactaattctcagcagttattttccaaaagttggtatcagttttaaccaaactatctttgactatggtggcttcagaaagggaatattgatttatctgtgatgacaaacattttattagttgattcttgtgttcttttgtgggttgtgtggggaaattgcctcttacttggtctaccgggatgaaaatagcgctgg

SEQ ID NO: 92292 - DNA, 667 bp, Eucalyptus grandis
  Intron number 1 from transcript Egrandis_v1_0.017997m (loc us Egrandis_v1_0.017997m.g) derived from phytozome v7.0 (c hr-ID scaffold_2; pos 37089805 to 37090471 reverse strand)
acgaggacgacaggttcagttctgtagtagtgaaaagaaacgttgcgaatttccgtgcttggaattacttgggagaatgtttgagttgggctttgagggtatatgaaaataatgttgctttgaggatggaatttggttgtcaattcttgtgtaatgatgatatgctccttggttgaaaatttgtgaaactgggaagtttattcgaatctactttttgtgccattcaagcttgagttttttgaggttttggttcagttgcatcctcattttttttttttttttatatgtggaaaaatggacctttgagaggctagtagttttagtttgctgatggtagaatgagcttcttcaagatacgtgtcagaattggatacatggttgggggttcataagcagatttacacttcgaatgaggtagattttgattgtgattgttgtcttgtaaatgatgaatccagactgctggacattaagtggtcacaggcctcaaaattagcatttggtgtttagatggtgatgagtgtccatttccaattatagtttcccatttggagtgtttaatggccttgatgctttgaaatgcattatttcattgagtgagaagaactgacagaacgtgcttgatttttcagctgcttgccttctgatttggagggtgctgttcggc

SEQ ID NO: 92293 - DNA, 882 bp, Eucalyptus grandis
  Intron number 1 from transcript Egrandis_v1_0.053439m (loc us Egrandis_v1_0.053439m.g) derived from phytozome v7.0 (c hr-ID scaffold_11; pos 8369200 to 8370081)
agcttgtttcgaggtcttgcgccctcataaaccaggtacgtcctactcatcattttccaaaaagctcttgctgagattaaatttctgctcgtcttgaaatagaaatgccatgtgaagaacaaggacatcaggaagttcctggatggtctttgattgttcccaaaattgatttggtgctttgaacacttcccttgagtagcttttctctgttttctgatgataagaaattgtatagtttttctttgtattgcttattgtaccgcattgcttattgatttcgttggtctgttgattgaagtatttattcttgggccggggtactgagatttctgtctgtggttagaatgtagttcaaaagttggaatcttgtggtgtctatgggaatgcatggatggaaattcgaagtgaaaatgtctttttttttaagtaaagttctgcatatgaatagcttcacgtcgttaggagacctagagatagcttgtgggttgttctattctgttggtcctcttgatgattgtttatgcagcaagtgtgtgcagtttattgtactttcaatcgattgaggtcagaatgttgccttttgtccgttagcttctactgtttctggactgatgggatgaatgagtttgtaacgaatcagtatagctagaggggtgtgtgtataccgaatggaggatgctggctgggggccggatactttggcttttgggtttggactgatattcagataacaagttttcccaaaatcaaatcatttgatgattttgcccacccctattgtttttttccctttacttatcttgtgggtctagatgaaattgaaaataatctttttctttgctcgttttactcatatgttttactcaggtgaggaaggcggaa

SEQ ID NO: 92294 - DNA, 918 bp, Eucalyptus grandis
  Intron number 1 from transcript Egrandis_v1_0.054437m (loc us Egrandis_v1_0.054437m.g) derived from phytozome v7.0 (c hr-ID scaffold_2; pos 20136826 to 20137743 reverse strand)
tgggtgaacttccaatctcacgcttgaaaccaagtgtgttgagaacatttttgtgtactattgggctgcgtttggcagtcgggataaaattcgggataggatataatttatcctatcctacgtttggtgctcactcgggataggataaagtcggatataagggggatatagacaggataaaattatcccatgggggaggtgggataaaggtggataggatttctaatgtccataaaaggaaagttatttttcttgaataacaaacttattaaattaaaaaaattgaaattatatttcaatataaataatatttgaattctaatttaagaaaataaaaatttatttttaattaatcttattttaatttctatattcagttttaattatattttataataaacattcaacctataaattaaatatttatatttattatatattttaggtatttttgtattttaggtatgttagtacagtttactatttgataaatttttattaaagaatgatgaaaggggaaaaagaaataataatgaaaataatataaaaaaaagagaaaaaataaaataaataataaataataaataaattaaggaataatgttacgagatattttcaccgtctttatttatgaacatttaggttcatttataataatatgtcgtttatataaaaaaaaatgtacataatgtgaacatatccgactttaatactgcgattcaccaaatactagacgggatataaaaaaatcccaggatttcatatcctatcctatccaatcctatcccgattagaaatccggacgaccaaacgtagggttggaggttggggaagaaatctaacaagtgaagtagacctactccaattaattcaaaatttcaagaggttgcgcatcttggatctgcaagccacagaggt

SEQ ID NO: 92295 - DNA, 882 bp, Eucalyptus grandis
  Intron number 1 from transcript Egrandis_v1_0.002641m (loc us Egrandis_v1_0.002641m.g) derived from phytozome v7.0 (c hr-ID scaffold_2; pos 53183812 to 53184693)
ccgtcgacgcttccacgcaccagtccgcgtcttccgtgagttccctttccccgtggcctctctccgtttctgctgcggagttttttattttcaaggttttcaagttttctttttgttttggtcgtggttaatttaggcgtactgggttattttatatgggtcgtgtgggtgcattttcctcgggagggcttttttgatggttgagttaggggatgtgggattgtctctgttttctgttttcgcatttgggaagagaagaggatattttgccgtcgtcgcacatagggagttggcagttgttcttcattctattgatttaacaatttgagctgccatttgttgatggatacgcgtttttcttttcattgtttattgaaatgaggaacagggatgttacgggcatgccattatgtttaatagtaatgaaagtgcaaaggcgctcatgtcttacgtttctactgtttatacatggttttgtgtaggttctttgaggtaatgatttagctctctcggagaatacattgcttgttttgcattttgctttggaattaggatgggcccattcaaaatgtcgaggggaaatgcattggaatgtgcagtgattttagtgcattctttctgttgatatgatgtctaatgtgcttgtttacatcaacgacagtaaggttaattgctgagggttgtggtttcttgtctctctcttgttgttcttccctgcatatgtatcttccttcacctaattatcaggcaagaggaatttgaaagagatatgattgttactggacatatcatcttcctcctcgtatcgtacattgcgctatcctatttggttcacaattgttcttgtcttgttgcttgagatccagaacattgaggaaaaag

SEQ ID NO: 92296 - DNA, 828 bp, Eucalyptus grandis
  Intron number 1 from transcript Egrandis_v1_0.018586m (loc us Egrandis_v1_0.018586m.g) derived from phytozome v7.0 (c hr-ID scaffold_2; pos 51096826 to 51097653)
gtttcagttcttgctttctgtaaggccagatttgttgctcgtcatttcttgaagtgttctttcctgaataatgaaatgttgtagctcagagaatttattcaaaatccttgatgagaccaagtttgctctgttgcgtgaacagggttagacatatgaatggcgtactgatcagcagagagctgcttgcaactaattatttgtgttattttattgccaattataacctccattaaaaaagggcacacattcactgtgtattatagcactttgaaggttttatagatgtccataatgtacaatgtttcaacgttaggcgacgcaatgcttatataccttcaaaattgctggcattgacttctctcaaattcttggtctcgtccattaagggatatagaaatggatcatggctcccatcttcttcaaggaactcacagactggaagttgtaaatatgcagattggctaacctattgtcttggctgtagtattttggttatctattgaatgaaactttgatggttctcacaaagttcagtcttttcaatgggttgttcacaatgaatgatataaatttggagattacatgttggtcaataacttccatcactcatacaccgtgtgttgcttttctgcattggctatgcagctttaaagcaacttagtaccctgattgctaattgctacaaattgctactccctaaaaaacttattgactgagatcttctgctagcagcagtaatgatcatatcagatgaaggtttctcttatccatcatatgtccgtgcatttttcaggccaggacattggaaagcaaccaacaagtagtaaa

SEQ ID NO: 92297 - DNA, 816 bp, Eucalyptus grandis
  Intron number 3 from transcript Egrandis_v1_0.033415m (loc us Egrandis_v1_0.033415m.g) derived from phytozome v7.0 (c hr-ID scaffold_11; pos 28567733 to 28568548 reverse strand )
ccaagggtactgtctctgtcaaagcataataacagaatgtgtagctatattttctcacttttggtgcttcacatggtgggaagcaatatgagaattatgatgacagagccatattgttgtttacttttgtcttctcttagagaatatccaacttgaggtttccttggaagagaaattctttacctgcttcatcattgttgtaccaagaagatagggcaaacatgtagctaactatatgaattgcagtcaaattgatcttttttacctagcttctgtagcgggtttctaaagtcaaagagatgacaactttggtttacgttcaatgtactatggagttctcaactgttgaaggtgtttgttagatattgtcgtacgctgctcatggggagatcccttcagtgccaagatttaaaataactgcatcaatgcatagttacaattgacatgttcatgtgtttgcgaattttaatgagacttgcttgagttttcatttatctaatgtttatgcaacggttttttgtttcttgatatttaggtatcagtcgaccttgacattgaaggtgccgaaccaacttttgtgactgaagaaatgacaatgagatcacaagaattacagtatgatttaaggcctccaccattcaatttctacagtccacaaattttcctctccatttgtgaatctagtttcttttctgtcctctggtccactgatgaagtagatcttgcttaaatctctaattttttgctctttccctgatgatggggtttttcttgctttcagggatcaagcagaggagaaggagaagaagaactctc

SEQ ID NO: 92298 - DNA, 947 bp, Eucalyptus grandis
  Intron number 5 from transcript Egrandis_v1_0.003265m (loc us Egrandis_v1_0.003265m.g) derived from phytozome v7.0 (c hr-ID scaffold_7; pos 49780829 to 49781775 reverse strand)
tccaaggagcaccatcagtgtaaggcattctcagcttgtattttctttactgaaatgtccgattaattgtttgtaatgagcaaaagccgcttgatgtcagttgctgaaaattgagtgtttgattggggtcaagtcatctagtttgagtctatgtattttcatcgcatctttctgtagctttcgtggaaaatatattataagcgatagagtttgtatctctaattcttgaaggtgatgactggatcatgttgctctatcctagatgatgaggggaaaaaggcctatctggtatgaacggttgggaccgttcccaagttggggaccagactgctcatattctctcctctgtttagtcgtctgtcttaatcctcagtccagaagatccttaatgaatttttgtctctaataggaggccaaaggaaatttaaacttatggtatgccataataaaatggatatgcatattacaaggtacataacatgtgcaagcatcagaatacaacttcttcctcaaacattaattaagcagaacgtacatcttctgggaaatttgtaaaagtatacttgtagtttttatgatatgaacacccccagcatcgttttgaccacacacgttcttggcttgtctgcatgagttctccgccgaagaaaaaggaaacctctttccatggaaatgcaattgtgtgaccactgaccatttacctcggaagttgtttcttaatgattccatggcaaggtcttctccagttttcatattctggattctaatctgagaaaacttcccttacaaataatcctcttaatggagcaagcatctgcagataattctcaattgttccattctctctcctcttttgatcgtcagctgatgttgtatacttttaggaagaggatttattggctacatttttgtgtctggttttgtaattcagtttccccttattgcag

SEQ ID NO: 92299 - DNA, 691 bp, Eucalyptus grandis
  Intron number 1 from transcript Egrandis_v1_0.003756m (loc us Egrandis_v1_0.003756m.g) derived from phytozome v7.0 (c hr-ID scaffold_2; pos 60220205 to 60220895 reverse strand)
cagttgccggagaggcccgtcacggtgagcctctcttttttccccaatccgtttgatcttatcgcttcgtgaagctcgacggagttgttctctgccggttcattgcggttaccgatgtctcgcggaagtccgtttcttcttcgttttcgttttcattttctttttggttttacctaaaccagtttaatccgaagttttatccgctcgcagtagttgtttattcgtctgcccaggtgcgtcagcgattgattttacatctcgatcgaggacagtaagggtgaatatcggattctccgctatcggtggcttttcgattttttgtattccctcgagtcaccatttctttcgctgaccttcatcggttatggttccagtcgttttaggaccttgtcgttttgtactactgctttcgtccgttggttgaatcttgtccgtagtgacattcatttcgcctaacctattatcacgcgccgttcaaagtgcagctaaaaaagttactcatgtggttgcaaataagctttgaagatcattgttcatgagttgcatttgtaatgtagctaagtcattttgtaatgaacgagactcggttacctctcagaaaaatagggatatcatgttccatttgatgctaatttgctctgtgcatcctgttacagactccttgtggacacaacttctgcttgaagtgttt

SEQ ID NO: 92300 - DNA, 869 bp, Eucalyptus grandis
  Intron number 1 from transcript Egrandis_v1_0.028820m (loc us Egrandis_v1_0.028806m.g) derived from phytozome v7.0 (c hr-ID scaffold_11; pos 26690567 to 26691435 reverse strand )
ggacggatcttccacagattccaaggttaccgacccgccaactctctctctctatcgctctccgatttcgacgaatttcgttccgtttcgagctgatttcgggtttgattttgcttccaagtccttcgtgtgtggcgagttcgatttggtgattgtgctgttcttcttctctggtcttgggtttcctgtagtgggtattcgtcgcgtttgggttccgaccctcccatcatcgcgcgactgctgcgaattctggccaatccattcactgctttttccccccttctcgtaatttattgtggagttaccggcggacgttcaatgcgggtttcgcgttggggacaatcggattggggcgttggaggcattggtggcgagctttggcggtttttctcggggttgaatttcatccggaagcgcgagtgatgttggattttagggggggttggaatggattagggttagggttttggggtagctggctttcagggcggggtcagagtctgggggagtcgtgtgcgagatggatgagaacaataaccgagcttgaggagggagaagctttctatgaccacgccggggacgccagcaaggatggcaacattgaccctgattcgggtcatttcaatcttttaatcatatcaaatgtggatactcatagtatacattatatctaatgtttctttgttgctgatatcaatctttgcattagagttttctggcaccttcaactcatgtcagaatcttttactatagaaattactggattatccatccaacagtgtgtttgccttcagaaaatttttgtgtccgcctttattgcttttacatgtaatgtttcagctctctgaatctctctatggcttcagagg

SEQ ID NO: 92301 - DNA, 686 bp, Eucalyptus grandis
  Intron number 3 from transcript Egrandis_v1_0.018702m (loc us Egrandis_v1_0.018702m.g) derived from phytozome v7.0 (c hr-ID scaffold_2; pos 62716362 to 62717047 reverse strand)
aagacgacctctttggatccaagaaggtacccagagcgtggagcagacacactctattttgttcaatcttggaatgtctgtcggcattatgcatgctcataagttgcatggcattcgattataatttataagggtgctgcgcatgtgttgtagttcttgaaggcctgtgtgtctatcggtgatcagacagtttcagcacttcaatcgttggccgaaaattactccaatgtgaactagtcaattttattctgccggaaggagaaagaggatgcattaccgtacaagcacgggcatacgggcacgttttgtttgccaattgtagttgtttagctctctggttttttggttctgttcttgtatgcaacagcattgagcctttttccattttttctctgctcgagccgttgacttaaaggctgtttagggtttaacagtttacagtcatgttttggtcttattgtgtgttatgcttataatcaaacagaagatgcccggcatcttaggctatttgatctaattcttggaagtttagatttgccttgcttcgcatacaagtccgccgttttagtttcattttccttcaggcctttaatgcttaaagagtcccttctttttcttatttttgatccatagaaatttattctctcttagtttcttgctacagggtaatacaaaagccgaagaaa

SEQ ID NO: 92302 - DNA, 901 bp, Eucalyptus grandis
  Intron number 2 from transcript Egrandis_v1_0.009300m (loc us Egrandis_v1_0.009300m.g) derived from phytozome v7.0 (c hr-ID scaffold_7; pos 33616317 to 33617217 reverse strand)
atactcttgcgaagcacttgtttcattgtaagtcagtaatttcgcttctactctcgcttgacattcgatatgccttcagctctagcttgccaactgaggatgtctaagtcgccgaatcccccgaaagcttaattagccgcttgcaagagctttctttttctgtgcagcatcttagactgtatactgcatctgaggccatctgaggcatatttaaagctggtattttgcgttcttaataattctagattctctatgcttctctgtgtttattgaggaaaacatggtcggatccatcctgtgattttgactgattctaatgtggcttaggttaatttgtgaagttgatgaacatagcatctgactagttacattgctctttatatgccaaatcattggctaaaacatgaaatgtctggttaaatatagctcttggcaccattttcctttgcacgggaatactctgtaaggaattcagaacatcagtctatttgcttgaagcaaagtgacacaatgaaaatgcactcaacacaagacttctatagtttgccaagaccatagccacatatagggaggaagcttgattctcacaatggttggctagaaaattcacatactgtattgtttgtgtttgtcattgacacagaagtagaaacctcatgtatcttgctagaaacagagctttaacaacactcttgtaggataatctgcattatcagtttacttaccatggccagtggccagctaagatttacttgctcaagcaggatacacatcactgaagtatgggagccacctcttccgcaatttttgtatattcttctacatgaccatttaagaatctctgtgtaacttagagtgctgcattttgaatattctttacaggggaaaaccaaaccattga

SEQ ID NO: 92303 - DNA, 609 bp, Eucalyptus grandis
  Intron number 1 from transcript Egrandis_v1_0.011190m (loc us Egrandis_v1_0.010774m.g) derived from phytozome v7.0 (c hr-ID scaffold_11; pos 20218582 to 20219190)
ggcttcaagacccattgtccccgtgcaagcgagaggtactaaaaatcagattttgggggggcttttgtttgccgaatagtatattcaatctctttcggtgactatttctgggatgatttctttgaacccccccggccctgtgcgataattcgtgggactcccttggctgtcttgatgttctgttcttgatgggttctgttctgtagtcttggaaattagcagacccgtgcgtgcatcttcttaggaatgttcttgtattacgttgaagatctcgtgcttctgtcgacgacgatttcttatgtggacaagtgtttgtgtgaaacccagaccttgatgagcgaataatccctctgaaaatcggggctttttccccttcaattcgtgtttttttcagaaaattctgagaagcaatcaaatggcaaatgccaaaggattttctgggcaaccaaattgaccgcagcttgtttatgttttttctatcgtatatgtaatttatccaattaatcgttaatatccatgctgattgtattcttatgcgaccatgatataggcgaggcagcgataggaggaggagcgggtaaggcagcgataggaggaggagcgggtaag

SEQ ID NO: 92304 - DNA, 541 bp, Eucalyptus grandis
  Intron number 1 from transcript Egrandis_v1_0.004219m (loc us Egrandis_v1_0.004219m.g) derived from phytozome v7.0 (c hr-ID scaffold_2; pos 62465999 to 62466539 reverse strand)
aggtcaaggtaaatttcgattcttatagctgatatttgttttgttttttgatgctgacttttttcctcttacctttgcaactttgttggaatcatgatgaatgctagattttgttgagtaaactagtgcagtggttattagagaccattttgacattccaattgatgtaggggtactgaatttgttctgtgttattgttctcatatgtattgagtttgtgaatctgctgttaccatcttcataatctggtgtcagtagcttcggttgtttagatcgagtggtagggactgatcagcgtgaattcaaattattactggatatgatgtgactatagctgtttcttagattcttcattgaccttcacaagcttgacaggcaaaccttttttcacatgactagcttattcttaggtgtctgtacaaatttatttcataaggaagcaatttgtcagtggtgatgatgcaaattatatagctatagtgtttttttgacattttctgtcttttggaattgcaggatctccctccagttcctcctgtaa

SEQ ID NO: 92305 - DNA, 945 bp, Eucalyptus grandis
  Intron number 2 from transcript Egrandis_v1_0.034196m (loc us Egrandis_v1_0.034196m.g) derived from phytozome v7.0 (c hr-ID scaffold_11; pos 43035408 to 43036352 reverse strand )
ctagggttgtcgatcaggacaagtaccctcacgtgcgccctccccccttccccctttctttctagctgctgttttttctggtggtgtttttccagcgtctcgtgtttcgtgaggttctcgattcgtttcggctgcggcggtaattgcggttgatacgatctgtcaatcgcctggttttggaacgtcgggaaggttaggctttttttttaagggatgctgtggctggtgttgcggttcttcggattgtctctcttagtcttgcttaaaaatgtaggaccttgcgattctgttagggatgagtttggctgtgagagggaatgtgtgtcggattcaacggattggtcgcgtctgtatggtgtatggttgtccggttgttttgggagtgaatagaatgtgcaatcttgggggaaaacgagaatgtgtttataatttagttggttgcgtgcttgtcgaagatagatatctgtggggattatggaatcgtattcagtaatgaggaaaattggcacttcgatctggaacccttctttaaggaccttgtcccgatactgactctttgacatgtaactcgctgattgattgtgagttggatgttgggtggatgcatgcactgccttttgagatactatacatctggttgatttatgcaaagataaaagctactctttccgtggtaccttatttgtatttgcaaatgttgggtcagtttcttgagacaagtgatatggtgcctttctttgttggttcagctgtgagctgatttgttcatgggattttggtcaagtcaattaattttgatgctttagaatctggagattaagtttttttcgagggatttggaggttgttggtttcatgcgttaacagtcctcacacgtgaaggattaatataatttttctgccttttgtagctgtcggtcaggaactgctttatcagaggatcggt

SEQ ID NO: 92306 - DNA, 931 bp, Eucalyptus grandis
  Intron number 1 from transcript Egrandis_v1_0.027328m (loc us Egrandis_v1_0.027328m.g) derived from phytozome v7.0 (c hr-ID scaffold_7; pos 29166849 to 29167779)
cgaggtcgctcaattttgcggttcgggtgcagatcgtaagcatttcgctctgctttatggatttttctgggtttatgttagttagcgagttctgtttttctatggagcgatttgcgtttacttttcactttcgactgttgtctgtcttggcaaatgtctagaagctaggtcttttcagttccattgtctacgaactcatgtttgatgtttggtcttggcatagagttaagagggggaaagtgcaatgactaggaatattcagagtgaatttcatgggaagatctgtgagaatttctcaagttggcttgctaggatttaagtgtccctctatttgttttgagcaataaagattggagaagactctttcataatgtttctcctttctctattgtgctgcattttctgctctctgaaaatgttcttgctaaagggggtttctttgaatcgatccctctgagaaacagttttgaggattattcaattcaaatgcttttgcctgaaagttgacaggtgagtctttgcctcgcataattaggccttaatgtcaagccaaaagagaggcactaagatttggagttttcctccactgcgttgagttaagtgcaagtgatttgggagaaatccagcttagtaaggaggctttctgtgtttgatgatatgtataacttggttgatttattttattcataaacgcgcaccacttttttctgagataatgatccgtgggcataattttcagctgttagtgtcacggatttcagggatcccattgttaccactctaccgtaccgtttttcaggctttcaactgttctttttagatcttaaagatagctctgctggtgtcgtatatatctgccattctaatctaatggcattgatcttctttctgaacagttttcaggttctgccacacttccaaagaagttggt

SEQ ID NO: 92307 - DNA, 863 bp, Eucalyptus grandis
  Intron number 2 from transcript Egrandis_v1_0.046224m (loc us Egrandis_v1_0.046224m.g) derived from phytozome v7.0 (c hr-ID scaffold_2; pos 44493585 to 44494447 reverse strand)
agctcgtctacgtcgtggagtattccgaccttcacgcattcattagtcagctgattcgctcgtacaagaatcgcatcgaaggaaacttgtcatcagatgggcctttattcagcttccaaacccactttcacatttgtggtatgcagatccaacctttgtttttccttttctatctcgtaaatgaaaaatcgggttccttgccttttcttttcatttgctttggaggagcatttcgatgtttactttccgcgcggtcctttgcctttgaagtgctccgcttttctcacggcaagtgatccgtccgttcttggattctttgacttcaaatcgaagtcgtttgagcaaacgaagagaaaaaaaagaagatggttggagagcgagttcttttgttgcaggctgagagcatttcaaattagtcggtcgatgttctgggagtccaaatatactggtggtttgcatcaaaacatgatgttagggtagggactttgatagggtatgagtgagaagaatacatgaccatggatcctttgttctttgatttctctgctcgtatcaatggagatgatcgtcccatagatagccatgccttttcacctagtccggatcgatactcgggtctcacagatggtttctttttggatgaccctttcctcgaccttaaatcctcagatagtgcttttcttttgaatgaagtagaccctgcgaatgatctcccttcaacatcggtagacctcggtattggagatttaatgtttccctcgacaagcgggatctcagatggaggcccatttggcccatctatgagctcgaatagtgccctgagtttagggggatattcgctctccccatcgggggacacggac

SEQ ID NO: 92308 - DNA, 613 bp, Eucalyptus grandis
  Intron number 2 from transcript Egrandis_v1_0.030493m (loc us Egrandis_v1_0.030493m.g) derived from phytozome v7.0 (c hr-ID scaffold_11; pos 27850001 to 27850613)
taacacctgctgtgatcgctgttcctcgccggagggtaagttaaagaaaagccgacgtgaacgagttatgcttctcttttgcagatatgaacagttgttgacgtgactttttgttggatttattgccgcgtaatgcgaatgaatcctgttcactatgctttcaccttgatcctttaaatgtccacgctcgtcctatcttcgattttcttcatcttgattcgagaaattccgcttaattacttcagtgcttgtgtgttttgactaagaaatttgaaagggttttaacttttggttttgaacgagtaaacttgaacttcactttcaagatttttaaggaacaagttgacttcgcttgccaaaataataccatttctgttaaatgtttaaaatcgaggtctatttctaatggataactatatttataacttcaagaattaatttgctcttttattctgtagagtctagaatgcatatgttagcggtaaataaaaacgtcaccgagcttgagatgcactttatcaaggtcatgatcataaacaaaaataacctaatgactggcggaatgtactgacaaatttttgttctttgttgcaggcaaaagttcgcgaccctc

SEQ ID NO: 92309 - DNA, 828 bp, Eucalyptus grandis
  Intron number 1 from transcript Egrandis_v1_0.038684m (loc us Egrandis_v1_0.038684m.g) derived from phytozome v7.0 (c hr-ID scaffold_7; pos 43984024 to 43984851 reverse strand)
gctagcaggtattttctttttcagtaagcgtatttcttaggtacaacatgattaatttgagcagtctaacaaatcagtcttaacactgctagtattgctctttctctgatcatgaggatttgaataatttacacatgtaccatgcaaatgtaaataaaatttcattagtaaaaccacttttcgtgttggcctctgaaagttcatttcaatttcggggccttatgcccgaactaatacagagcacattaaaggcaaaactgaaaccttaacagaccacgtgacgatagttaatggcggcgttaatgtccagcaaaacgtgttcatcatgcaaacctgcatacctcgcatctgtcatctctctttcctctcttttcacttttcactatcctcccttctcactttcctctctctctctctggcgttcatttgcgaaagagaatcctcaaacgggtggagagatctgaggttggaccagaaatgatgaagagacagtgaatggcgtgcaaagtttctgaggggagagcgagagacagacggagaaatccctcattttctttcttttctttctgctttaaaatattctgatacgtagtcacccactgaaactgcaagtccggtatcggtaggaacccaaatcaaacttgactcgcgcacaccggtaaaaaatagcatatcatttgtctttgaagtttacatgcaccaataccaagataagaattatgagaataaagttttgggttgaactttctaattccatctctacatttatgtatgcatctaagttcttaacatatgataatatgctgtcactgtaggttaaaatttact

SEQ ID NO: 92310 - DNA, 901 bp, Eucalyptus grandis
  Intron number 1 from transcript Egrandis_v1_0.000449m (loc us Egrandis_v1_0.000449m.g) derived from phytozome v7.0 (c hr-ID scaffold_2; pos 14392978 to 14393878)
tgcttcgagctgggtatagagtccaggcgcttcaggttgggaatggactggtgattgatcgagtggaagtggaatttggttgacgttatgatgatggggattactttgttttctgggttaatcagtctcgagttttgcattgcttccaatctagtcgggtttcgaaaggaagcgaaagcttcacttttgactttctgggtttcacgggcagctaggaatctctatcaattcctgaactaaaccaagccaaatgaaacttctgaaacaaaaacaaaagcaaacttctgaaataaagtatatctggtcctacttgcagtgttgcgattttaagtgtttttttgacactagtgattcgtaaatacaaactgtattatactgtgctagcaatttgcgttaactgggtcactgctggaattgagaaatgggcatcatgtaagttctttttgccgctgatggagttgggtttttattgtgggactaaatttaactttgttctatcagtaatcagtatttccttatgaaagcttgatgtgaatgtacattaaactgaggtaaagtgccagcaggcattaagaagctgcgagtctaggttggtttgggaattggttctgacttcatattcgggtgttgatcactgcttaagttttgggattctgatatcatattactcttgtaaactaacctcacaaatcataatataaattttttggtaaatattatcaatggtatttgatttgtcgcaatatgtaacgaccaattaagtaacgggacatctgtcccttctatgtgtactgaagtatgcatttcttcctaatctaattgtctattgaatttagaactggtttccagcaacagacggtcttttttaactgcattactttggcagcaaactggccctctg

SEQ ID NO: 92311 - DNA, 1008 bp, Eucalyptus grandis
  Intron number 1 from transcript Egrandis_v1_0.001473m (loc us Egrandis_v1_0.001473m.g) derived from phytozome v7.0 (c hr-ID scaffold_2; pos 62987677 to 62988684)
ttcaagtagcagacaaggatttttaccactacgacgtaattcatctcctcctccattttatttgccgaatgacgtaaaattttgccggtaaatttttgtgtaactgtttcgcgtgtgtgtgggtttcactgaatgtttgtcttgttctcgagttcgctcgctagcgttttgtttcattgttttgctcttaccacggtattttttcctcttcatcgtgtgttcctgtcttacgtttttcctcttcgtgctctgtcctggctttgcggttgggtatggtttgtggcttttgttagccatctccagaaagttgagaggcctttttgctcgtccttcaagctcaagtccacccccactatgtcggatcatgaacccatttcagcatctccctttgtttttgttttctcctctctctgttttttttccttttgttttcgtttcccttgttttgtcgtgatcgtttggttgattgttttttgattttatacgatatttgggatttttcccctttacttgtctctttctattttttcttttaaattttatttcttatttctccgtgcgttcgaatggaagaggtcctattgtccttcccttcgcctcgttaatatctatgatctttttgttgtataaaatgttcctgattagcactttggttcctcatagcaatgtattttcccccctcagctttgcactctttctgtatctaatttagataggcttgtggtgtttaatgcagctcatcgttattttttatttttttttggtctaaatgatgaaatagttcattggtttatatattaattcatttctctcgagtcatattttttatcttactactattactgcatcttgacattgttttgattatgagtcgttgcttggcagtttcaatttgttgtgccatattcaatttttattgtagtcggactgcctagaattttctgacatcatttttggcattggtaacatttaggtatctattgatcctgtggtttctaacaagaaaac

SEQ ID NO: 92312 - DNA, 988 bp, Eucalyptus grandis
  Intron number 1 from transcript Egrandis_v1_0.025725m (loc us Egrandis_v1_0.025725m.g) derived from phytozome v7.0 (c hr-ID scaffold_7; pos 35910161 to 35911148 reverse strand)
caccaagaggcccgtcttctgggccttcttcaacggtgagggctccccattctttctgacttgtctttgtttaattgctgtgtttcttttttctttaattattcgtgtgataagcgtgttcgttcttctcgcctttcgttctaaaatgtgttcgattacaaaatttggatttgccctaatgatcatccggcaagtgtgaaataagagagtgtcgtattctatgagtttggtctgataaaattggactaaaagggaatgatgcagagggaacttgattgttttgtaaaaaatgaataatttataaaataaatttcttaaacgtaatattttttcattttttatattcgtgtatgaaaggaatggtacggattgctaaccagttttttttttttttttgctaaaaggtaagtaggattgctcaccagttcataggcactcaagttcattttttcatattaattaagattaatattatgaaaaacgtcaaattgatatatctttaaaaaagttacttttcattaattttcgttaaattgtatcatcaaattgctaaattgattggtaaatgataattgacctagcttggagttttgctctccatttgtcataagtagatagtaattcaatttaacaaaaactgatgaatgataaatttattataaatgtattaattttgaatttttttaataaaaaaactagtttgagataaatttattataggtatattaatttaaaataaatttattacagatttactaatttgaagtttttcatactattaatccttttcttaattttgaagagtcaacttattagacgttggtgccagggtgtattcattttgagccctccggatgccggtgtcatcgctagcggcaaatttacgataaaagttgtctacttcgtcgcctccatcttatataattgtcggtaggacgatattgactaaatagttaacgtgggttgcggtgtgttaatgtgtgaaggg

SEQ ID NO: 92313 - DNA, 975 bp, Eucalyptus grandis
  Intron number 1 from transcript Egrandis_v1_0.047184m (loc us Egrandis_v1_0.047184m.g) derived from phytozome v7.0 (c hr-ID scaffold_7; pos 22521245 to 22522219)
ccgcaagtgggccgagaggtcaattgcaattcatgttcatgtatcggtttttgttgtgatcctcccgctcaattcagattgggagttatgatcgtgatgaggcgcaaatagacaaaggctctagtgctgaatacatcggttttgagcttggggaagtgagatttgtattgtgcatttggctgattaggcattttagggttgggggaagtcgtagactgtgttgtgcagctatagtgcttggtttaatggggcaaactatacctgaatgatccctcatgtgtacatttggatgttttcaaagcatatgactgacgatgttgtgttgtattctggttagttttgttaagctcttagattaccgagttcggatcaatgctaccactagaatatagtcagattgatcgaattcccttatatttgttcgatacaaatatttcaccttgctgtttctacttttggaatagaatttgtttagtgtctcatggtgattgactatcggctatttggcttttctctagtcgagtaatgaactgtaggttataggtttccttggagtagctttatgcaaaagaggaggctcatgttgtttacttattcccttttcatcgcattgcattgaatatatagctctttaacttcacaaaggacgttagaaatatactaaaatattgttttgagttgtttcctcaaagtgttcctctcatatgattttttccaggctgttgattcattttcagtacaaaggttgtgattcattctaagtaagtgatcctatttcaagtcagctggaagttgttggtttgaagttgtgggtttgcatttgaacaagaagtcatctcaagtgagtttcattggagcatctttttctttttttccctacttacctagttacactttatcttccataatagttttaagtgtcatctcaattaatttatatgatgctcaatcaaggtaaaatggcatcctagaaag

SEQ ID NO: 92314 - DNA, 422 bp, Eucalyptus grandis
  Intron number 3 from transcript Egrandis_v1_0.042507m (loc us Egrandis_v1_0.042507m.g) derived from phytozome v7.0 (c hr-ID scaffold_2; pos 8830156 to 8830577 reverse strand)
ggagctcaaaaaccacggacttgacccttccataggtaaaagcttcttcggaaataaagtcatgatcatctgcgtgtttataacgttccatattttcttgatcaagctattggttgtgaagaacatgtattattttttattgctgctcatctcataatgctgaagaacgtactcagtatgagttgatctcattttcagtcgttttagtagtgaatcggtataaacggtctttgcacgctaaggatcgacgtcgcatgagatctattttgattgaagatggtctgtttctttccctttctggcttccggcggcaaactgaagtcatgttcaatcttctcggtctcggctaatgtagattatcaatgtattgacttaatgttttcctcttcgtgactcctgatgtgataaaggctgggtggcca

SEQ ID NO: 92315 - DNA, 727 bp, Eucalyptus grandis
  Intron number 1 from transcript Egrandis_v1_0.042426m (loc us Egrandis_v1_0.042426m.g) derived from phytozome v7.0 (c hr-ID scaffold_7; pos 6524426 to 6525152)
ctgccatagcccacgacacgaagaaaaggaaaagggtatgtcggggaaaaaaagtagaatgcaggccctaatttgatttttgattttcttcgaaatgttctcaaatacgaagcattttcttaacctcatgggagtttaggcatccatagtagttatttcatcgtctgaagacttccaccagtttctctacttgacttttgtggtccatcgcacagggaacagaccaccttaacactattgtggcaggctttgagatcctaccgagcacgacatttctcagcttgggtcgcgccaatattggtggaagatttgcagatgccctattaaacgttcggtggcttcactggcaagggtgccctcgaaaatttgaagcaattaacgttcatttagagaacctagttattcttgatctttcatggagtaaggttacagaatcctggggaggttggaaaggaattaaggtggctttatagttcaattgttgttgtggttgtattggcccttaagtaaatcgagtttttttatgccatctgaacgttttcccacgttttgcagatggtgcatttgaaagtctaggttgtgcagacttactaattacccctagcttctcttgttacccaaatttggagatactgattcttgagcaatgttctcgattggttcatttagatccttcaattaatgatttgaagctcttggtttccctcaatttgacattctgctccga

SEQ ID NO: 92316 - DNA, 631 bp, Eucalyptus grandis
  Intron number 1 from transcript Egrandis_v1_0.035311m (loc us Egrandis_v1_0.035311m.g) derived from phytozome v7.0 (c hr-ID scaffold_11; pos 13603425 to 13604055)
tcctgcggataaatacaaagatttgcatattcagtacagcccaaagcacagtgcacaaaagcgcacgcgataaaccactccaaggcttataagtctcgtatacgtagcactacaggacagcttgtcatgtcatctaattcatagataaaggggacgaaagcaaaaaaaaaaaaaaaattgtggaaacaaatatccttcaactcaaggtgcatatgataccctctttttaatggatacctacccgaaatcatggcgtcatcgacaaatcaagaacatgtttattgtgcattataattttggctacaacgatgggctttagacatttgcagtgatttttttactgtagcttcctgaaggcttcaccaattaagtaccataagattagacacaaagatattaaagtctaacatttcttacttagtgttttggcacttttcacatttattatgactgcgaaaccagatgccagaagagaagcagatctactttccaatcatttccatattttttttccatttaaatcgtagatagcctactgtgttattttagttacactaaatcctatcaaactggccaataataaactgctcattcctccaagtgaatgttatgtcagtattggggagaataa

SEQ ID NO: 92317 - DNA, 764 bp, Eucalyptus grandis
  Intron number 1 from transcript Egrandis_v1_0.017565m (loc us Egrandis_v1_0.017565m.g) derived from phytozome v7.0 (c hr-ID scaffold_2; pos 20741747 to 20742510 reverse strand)
cctatccgcttcttgcgtggcgagaggtaggttgtgattctccctgttttaaagctcgcgagggtgcgtgatttcatgtgttttggctttgattgctggtgctttagtgaattttggggctgtggagtatttttgggtgcggtttttggagtcaattgagttaatgctcaccgggtggagttggattttgtgaaggaatggaaagtctctgtggtgtggttgcaggcatggtttgctttgtttcgtctgtgacttcaactatactgccattttaagggcacttatgatgaagtttcgcgggcaaatataggcgacgtatctgggggttatagagtcctgatacatgtggaaactcaggagtatgttgggcgctaaattaatggagattgtatgaaggcttgttgccgatatgaaacttagtttcaataaagtacaaacttttataagaaattttaccttttctttttcctgatttaacttggagatgcttttattggaaaaccattttccattttcgactaacttgaagaatggggctgtcatcttgtgccatcaagttaattgtcttgtagactagattgtgactagaatgttgtctctaaccgactggatgttgttgtttgcttttagtaagttggagtcgtcccgggcaagctaaatgtttgatggacctatatttctactcaggatgcttaatttggctctgacatcttctcctgttatgtacagaacttaagatcaagcacaaagacagtggccctgct

SEQ ID NO: 92318 - DNA, 767 bp, Eucalyptus grandis
  Intron number 1 from transcript Egrandis_v1_0.052936m (loc us Egrandis_v1_0.052936m.g) derived from phytozome v7.0 (c hr-ID scaffold_7; pos 11867837 to 11868603)
cacttgataaaccgcctttcttcttgatagaaaaggtacgatcgaagattacttcttttacttttatggtgaatattttgaagtgatgattaaggtcacaatcaagcatctcatacaagtaggtctacgtaggaagatgtaaactgtacgactcaccttcaatttatagaaatatttctacattgaaacatcacatgttcttcaattgttgaccgaacattcttgtcagatgtatcaaatgcatttttaatgatccccttttaataaagttttatgctaatttcgatggtttagctctctcctaagtgccagatgaaaacacatggcatgtgtcgtgatcttagcatggtacaagtgtattgtctaatttgaatcctataaagattaccaaagttttgctaaaaatggaaagatgtgacgtttttgttgacattaatcattgaaatttgtgcacgtgcaactgtaattaatgcataggttattttcacaagggatttatctttagaattgtgaacataatgagttgcttaagctcaaatatggatccaagttgaatataaagattattgataatgtttatttgatgtaggcacatttccttttattgaatcacatgagactcaacattctataaatgaagttattgcgcacaacatgcaggacttatatcatagtacatgaatgctcttttaactaagttggctttaaattatgatttgactattttctcagggcggattccctagtctccaagagttagaattgga

SEQ ID NO: 92319 - DNA, 527 bp, Eucalyptus grandis
  Intron number 1 from transcript Egrandis_v1_0.029236m (loc us Egrandis_v1_0.029236m.g) derived from phytozome v7.0 (c hr-ID scaffold_2; pos 4815292 to 4815818)
tgcattaattggagctgaccgattctttgagttcggttgagtgtgtttaccagcgaagtaaaacatgcttcgtgttatggtggaagtttatgaaatcccattgatcttgacctgatcgtgcttccgtattaatttttgatgtggaaaactaggcacaacttaactattgttaacttgatttctctgggtggttagaagagttgagaagatactcatcatgaattgagtgcagcagatgacaatgtttgatggagcggggcacgattttgcaatgttcccatgaagtaccttccttgaagagttgaagtttaaaggaaaaaaagaacactttgattgatttcgcaaaattgtagtcttttagctgtctctttgagttctttgatgatggaattatttgaaaatgtttcgctttgtttctctttttcaaattgatatgtgagttctgttgtttgccgctgattggtttattatgatcatatgacttcttcttttatgtgttctcttatgcagccatctggtcaagatca

SEQ ID NO: 92320 - DNA, 868 bp, Eucalyptus grandis
  Intron number 2 from transcript Egrandis_v1_0.010166m (loc us Egrandis_v1_0.010166m.g) derived from phytozome v7.0 (c hr-ID scaffold_2; pos 59404494 to 59405361 reverse strand)
ccaggttccgagacgagtacatcaagcagattaaggtcggtggattctggtcttttgcgattagtgtgcttagggaaatccctacactgataaatatcaatcgaatgaacttgcttttattgaaggattgacctgcgtggctgttcccttgaatctttgctatcttgtgtggatgaagtaattttgtaagagcgcgtcgactctttgaatgtgcttcaactttccatgtttgagtctcaacgtaatcaatgtatgggaaaatagctgttttatatagtccttcactttgaattctctggcggcagaggacaatgagtcaatgacatgtctccttggaaaagtatgcctgtagttctagaaatttgatggctgcacgaagactgctggattgattgctggtaggattttaatgtctctgcctttgaacaactcacagtcacataggaaaagctactcttggccagccagccagccagcaactaacaaattattttccttttcattatatgctgctgtattttagtttctgaaatgccctctcagaagcctccaaactaaccactaatgtcatatccactccttagtcggtccttcattactaatgaggccacgcaacaatctcttttttttcttaatagcgatgatgggcaatccaaaaacattgcagtcttagagacaatggcatgatggtaattaccgctagggcgagggcaaaatgttatcatgtcacattgcggaacacattcgacgtgccactttcgtgaatacaatgagtttcttatttaaaagtgcctaggacttctttatgatcacttaagaatttgtttactccaaaatttgcgcaggattctgcacggttgctcgtatt

SEQ ID NO: 92321 - DNA, 904 bp, Eucalyptus grandis
  Intron number 1 from transcript Egrandis_v1_0.047245m (loc us Egrandis_v1_0.047245m.g) derived from phytozome v7.0 (c hr-ID scaffold_7; pos 47500578 to 47501481)
catttcaaaaaattggaccactgtcaatttggtatgtacatgttactaacacctgctggagaccgttggttctgcggattgtttttgattgagcaataattgaatatgttattctccttctgtttgccaattttcttagtttatatcaattctccgcaccaatatgacagaacatttgttgaagaagcacatctcagcactggtttctgcatcattttgagaaggatatttaaatggaattgtcgtctttgtgagatgatatattgttgaatgaatatcacttttgcatgcaagagtgccttctgtagcatgtctatagaaaaatgaagataatactcaaactagtaattatgtcattaatatcattgtttttgcttataagagagcactttgttatcatgtccttatatttgggcccatcattttgaaagattttaggtagattcactgctaaaatgacgtttgaactggattaaagttataaatgggttgtggcctggagactcacttgactaacttctacctgctttaattttctagattttaagtggttatctcagatggttctagaggtagaggaggtttttagaatataacggcagaaaatagcacgtatgaaagattccttggtagtcagaaaatgaaaccgtgtgctaatagcactgatgtttgttgcaatcagtattcagccatcctaattgttgttccatcttctttttttcataacatttgtatgtagagtgtgacgttgattttcaattgcttcagggaggaaacatttaatgcatttccctatagcctaatccaaggacaatagtacataactgattagttttgatcagtattcaagatatgtcgattgcaagctaattaatttttatcaatgtaggctgggaccaggtgt

SEQ ID NO: 92322 - DNA, 726 bp, Eucalyptus grandis
  Intron number 3 from transcript Egrandis_v1_0.007455m (loc us Egrandis_v1_0.007455m.g) derived from phytozome v7.0 (c hr-ID scaffold_7; pos 9966333 to 9967058 reverse strand)
caagttgacgtggtaagtagaaagtgaatcgctgcaaaatatcgatacttctgcttaaacctcgtgcttatctggatacgtgcagttcggttgaagtttcggattcagtgttcttccttttcccctttctgtctacttcggcttttgaatttgtggaaaggcagtcttgaaattccgggaaaagtacgcgagtgtggaaataaagactaatgaacttaaattgaggctatcattgaagaaaatggcatcttcctaaaattttcttgggcagctcttttagtgtttcaagcgtccatcactcttacctgtcactgagtttcacttccgcataatgggacagaggaacagatgctcgatgaatgggacaattggacagaaacattaatctcctctggtgatgaggctctggagaattccaagttggttttcgaaatctaatgttggacttagactcaatatttggattgactgaattcacaagataatttctttagttattggttggatctttcacttatatctgcaattgaaaagtacttttaactatctatcaaataatggtccatgccactttcgtttcggattctagaatgctaatactgatcgtgatgcatattactgtaaaagaatttttttggattataccatattatcataaaagtgagactacttgtcaatgaggatattaacgctaggtttaacttatgttcataggtcaaaactgga

SEQ ID NO: 92323 - DNA, 664 bp, Eucalyptus grandis
  Intron number 2 from transcript Egrandis_v1_0.023300m (loc us Egrandis_v1_0.023300m.g) derived from phytozome v7.0 (c hr-ID scaffold_7; pos 32270561 to 32271224)
gacaggtttcagctcgtcgaggatcaggactccttgtgagtttgcgcttatttagtctgctttttctcgatcaatagtggagtaggagctcaggagttgtgctgttactgtcaagtgctttttaaggttacggagaatattggttttttgtttttgtcgcttatgtgttcgaccatttgcaactctgggtttgaggtcgtttaacgctacctattgatttgggcctgatttatggttaagactgagaagcgaagcatctcaagggaattagaatccgagaaccccccctcaaaaaaaaaaaaaaaacacagagagaaaagggagatttatggttaagactgagaagcaaagcacctcgaggcaattagaatctgacccaaaaaaaagggaattagaagatggaaaaggcaaaaccttttgtgggcattgggatgatcggaaactagcctgcaagtatatgttctttttatctctttgcttggggtaatatggtataggcaatccttgattctttcaagagattgatgttagatcttttaagtttctgaattctcaaattctctctatttaggcattactttcttgcttgatattttgcattaagtttgatgtgtcaatctgatacgctacaggttccctaagggtgtcccttgggttcgttacc

SEQ ID NO: 92324 - DNA, 483 bp, Eucalyptus grandis
  Intron number 4 from transcript Egrandis_v1_0.007709m (loc us Egrandis_v1_0.007709m.g) derived from phytozome v7.0 (c hr-ID scaffold_7; pos 51698369 to 51698851 reverse strand)
ggggagctcaatttaagaaggtatgttaatgaggagcagagacacgggtttgggatgttggatgataacagtcagtatctcagttggattgggtgttgaaacttcaaagtatgtggcatgctctctctctgaatgttgatatgcatcaacactttatggccaaaatgaaaaccatgtgtcagaacatgtccattccgatgcagatggaagattataatgttaatcaacaaactgtcttcagttgttctgggtggcctcaaatttaggatgagaattttgaaatgaacagaacgtcagtttccttatgaagtgacaaaagctatgtatacaggagtccggtgtgggcatcaatttttattctcactaggcaaaagatgtgctaggattatttctgccgacttttgtttcccaagcgttatccattgttcatctaattcccaatttgcagattggagaccttaaagggctttttggtttactcat

SEQ ID NO: 92325 - DNA, 632 bp, Eucalyptus grandis
  Intron number 3 from transcript Egrandis_v1_0.024185m (loc us Egrandis_v1_0.024185m.g) derived from phytozome v7.0 (c hr-ID scaffold_2; pos 48352166 to 48352797)
cctttagctggtgcgtaagagtctctgtttctctctctctctctctctctctctcgcgacatgctcaaccgaaaagcacgataatcatctacgagactttggacagtcaaaactgaaattactccacaaatggatggcacccactccgggatgatgacctaatgccacttaccccgcagagcgacgtttgtcgtttgtgacagatttgaatagaaagtactcagattgagtttacaaatgtcgtagtatttatgcactcagatttagttcattaactgtagctggtaggtttaactttgtgacataacagtcatgggtgtttgattataacctacttatatagagtatcggctacaaattgtcatatcacttgattttttatatttatagaccgattttatatggtctatagaattatacattacttggcatggtccccgtgaggtccccgtgaggtgataaaatcttgctcagcgggcatttgcatttcgagattataattattttatttgtttaaaggaaggagaaacatcactcctttttttttctttttttggataaaactttttttcgaccttcagaaaactcaggtactgattatgttcttcatttttctgaaaaaagaaaaagaa

SEQ ID NO: 92326 - DNA, 783 bp, Eucalyptus grandis
  Intron number 1 from transcript Egrandis_v1_0.040435m (loc us Egrandis_v1_0.040435m.g) derived from phytozome v7.0 (c hr-ID scaffold_2; pos 37161669 to 37162451)
tgacccttgctcaagcgaggctaacccctgcttaagtgaggtcaactatcgcttgtggttggcacatgtcacataagatacatctacatcaacaattttttgccaaaatttattggatggattgtattaacaatttgtcaaaaggtttaggactaaattagctagattaaaaggtttgaagttgaattggcacaaatgcaataaatttaggacgttgagaattagccatggatttcacaagctgccaaagtcgaccaccaaaagaaaacatagaatcttgcatgtgaaggactttgagaattagccatggattttctgggtttcttgctgagcacattgatgttgctcctttcctcaattcttacttcacaagttatggtggaaaccaattaagtacaaagggcaaaggcttcacgaggcacggaaggacctccctacttttggttgaaccttttgattatagtatagcaaatggatatcttctcaatatcaaacgcaaatagttttctttttaagtatatgtgttatatatatatatatatatatatatatatatgtatgtatgtatgtatgtgtatatgtatatatgtttttcacttgtaattagctagaattagcacacttaattggtcacagtcaggtaggttcaaggttcatctagtataatttaatattaaattgttctatattcaagctcttgttaacaacatgccttcatttcttagtggaatttattcttttccttttcttgatgatatgtaggaggaatttttctattttggc

SEQ ID NO: 92327 - DNA, 636 bp, Eucalyptus grandis
  Intron number 1 from transcript Egrandis_v1_0.045827m (loc us Egrandis_v1_0.045827m.g) derived from phytozome v7.0 (c hr-ID scaffold_7; pos 2952102 to 2952737 reverse strand)
gtgctgctaagcaacaacatactttcactgtgagtttctgcataccagacgtgatatataacttcagcaaactcgagcttttccacttcacttttgagcaaggttaatcacatcagtgtagactggtaaaaaggatattaagtacctagtatgttatgatattttgatcctagtgcaatgggattttgccattaggttcaactccataacgccaccagagttgaatcagaaagctgaagacttgcttaagacgtcaacagatcaaaggacgttagaaagttctcatctcactccagattcaatatagactcgtggtctgtatagtgaatctatttgtctccactgagcatctcgtcttgtctagagaattattctttaatgtgaaatcattggctgtgtatttcttgcgtcagtttatctttcatttcatccattcagctaatcatcttgtgggctgtaggcttgtgttgaaggttttttatttattttttatttttgtattctttccattagttatttatatgttaaagtatgagattactttctctctttcctttcctttttggattgtttaaaagctttgaactcattgaccaaatagagattcgttctctggaacaaaggagagaaaccact

SEQ ID NO: 92328 - DNA, 1037 bp, Eucalyptus grandis
  Intron number 1 from transcript Egrandis_v1_0.004505m (loc us Egrandis_v1_0.004505m.g) derived from phytozome v7.0 (c hr-ID scaffold_2; pos 7138426 to 7139462 reverse strand)
cgctgcgggccgacgcgttcgagaagttggagaaggtcagtggttcctaattcgattgtcgtttgagcataattcagttttgcggtatcctggaatagtctgttttgaaaaagtggggagggaagaggtttgtgcttttccatttttgtttgatagtcgtgattataagtcagttagcttgcagagttgtgctttattcttgattcttgtgatttcgttgttcatgataagtacgagccacttgtgaatttggcattggtgagttttagttctttttgtccgatggtgttgcgatggtttttttcatgttgatcagaattcgaaagtttcaattttctctgtggaattttgcggtgcttttcatgatttttctgatgcttgttataatatagaagaaacttttcaagccatagaaattatgtcttctatcctgtccattaggtaacttatgttctttggtggatatctcctgttgaagaaattacatttcgaccatgcttgccgagaaccagactctgaagtctcgctagggcatgcctgaaaagtaagcaggactctatttaagtcaaactttaagttagtttgctgagctacccatttaggagacatcgaatgctgagagtatatacattttcagttatctagcttcagtgtcgagtctattagaaatgcgcatcttaagtcttacctattttgtggagattctcttccaagtttgagcagagcattgtggccaattgtaaaaagtagctttgacataggaagctaatccaattcccttgccgacccttctcattaaggttgaagttaacactatcacgcctttgttactacaagagagccaatgagatgcaattttatctgttggtatgctgcaactattactgatgcaacctgcttctatatgatgtcctggattgaattttctgttttgctgcgaacttacatctctctggatatatcactaatattggttgttcttgacttctattgtgagaatagattggacagggtacgtatagcagtgtcttccgagc

SEQ ID NO: 92329 - DNA, 881 bp, Eucalyptus grandis
  Intron number 1 from transcript Egrandis_v1_0.003345m (loc us Egrandis_v1_0.003345m.g) derived from phytozome v7.0 (c hr-ID scaffold_2; pos 8459456 to 8460336 reverse strand)
aagtttattccgctacgtgagtatctctcccttttctttcagaaaatgtttcgagtttttgatggtttgatgcatttgaattgctggcgaagagctcaattgcagttttgccgatgtagtcctaagctttggtaaatggcaatctgctgagaagattagcagtccctagacgacctacttactaattttagtcggttcatcactaaattgaagctggtggcagtttgtctttctagtgctccaattctggtagctggaaaaaagggactatcaggagagagttttgactatgtcgattgatatgtattgctccattgtagctttctggaacatttaagcttcggatgagcgagattttcgatctgttttcctgcctagagagttctgatatgatgaattcttgctagagatcccaccacggagtttttaagggggttctgctctgtgttgctctttcttctttaaattcaagcttttcagaccagttttcacctccattggcattggcaacaagcatactgtttttttttttttttggtaagtacaaaaagcatactgtttggtggcacagaattaccaaaagagggaggatgtgattatgtattggattttggagtaggaatccaaaataatagaatagcagttcaatcttttagacattctcaagcttaatatttctaattactacaaagaaataggaaagatttgaatgtgcatttgaaggaagctgaagtaattcttttgttgagtaggtcttcaagttccctaggaatggaaatgctttagccttcttttctattttagatcgaagcaaagaatgatgctgttacttacttttgtcaacagaacagcagaattagtcgaagcagttctgcagggga

SEQ ID NO: 92330 - DNA, 702 bp, Eucalyptus grandis
  Intron number 2 from transcript Egrandis_v1_0.055270m (loc us Egrandis_v1_0.055270m.g) derived from phytozome v7.0 (c hr-ID scaffold_7; pos 16575472 to 16576173)
aacgagcatttgctgcttttaaaatatccttcaatgtttgcgttatcttttgtttttgggtgaaagtttgatgcatttatgttggagcattgagattggtgaggtcaataatgtgaagatgatgttttttttaaggttttcatttcatttgaaggagtgtacttcactgtcgattttggctaacaagattagtctaggttttatgcaaatatggtaatagtgcaatgaaaatttccatacttgtgctctctgggattgtactttgtatgaggctttcatgggatattgtgcatgattctacctaggtgttctggggtttctatgtttttgggccttctttgctggccagtcattgtagtttaatatcaaggcaatgtagcggtgcgatcacagtttcttgttatagttacaaagacgtatctgctggaacaaagcatacatattgggttaattgtttcttctggcatgcgcattgaaacttttgttcaggatctctttattgtattattatgattaagttgccacctaagtgatcttgattgggagaacagagaactgatggtcaactctgttgatgtttgaagccttgattgggatagttttttgacactgatgcacgaattcttggctttaaaatgtgtcaaaatgtttctgtcattgttctgataacttatagatgtagaggtcattaaaagaggtaga

SEQ ID NO: 92331 - DNA, 584 bp, Eucalyptus grandis
  Intron number 1 from transcript Egrandis_v1_0.003279m (loc us Egrandis_v1_0.003279m.g) derived from phytozome v7.0 (c hr-ID scaffold_7; pos 47594344 to 47594927)
gaaagccacgagctcagttctgcgatctatccgtctcggaaaatcttggttaacatccgaagcacaggtcgccataagtttcgacctcgtaccagcccttttccgacgtgcaaaaaagcagtgcattaaaataattaggagagggtcgacggttttaagactatgctgtcaaatcaacttcacgtgcgaatgacttgagatatttctcgtacaagcagagaccgtatggtcgtaccgcgtttctttcttgtccccattggctttttgcgttgggtagtggattagtcaactgtttaatactgatttcatggaaaaagagagtagaactcgcggaacatgaacaaaccttattgaattggctccctcgaggaagctgattcaagaaaacgacatttttagcaaactaacatttctttcttcgttaatatctagaactaatcatatcaatgtgttcccaaaaagactattctgtggatgctgtttttggagttgtcatccttcctttgtacacattggtggcagttctcattctaagctacccatatcaaaactgtgacaggcagtttcttacaggaggactgtgt

SEQ ID NO: 92332 - DNA, 422 bp, Eucalyptus grandis
  Intron number 1 from transcript Egrandis_v1_0.023611m (loc us Egrandis_v1_0.023611m.g) derived from phytozome v7.0 (c hr-ID scaffold_7; pos 44859199 to 44859620 reverse strand)
ccatctccctccatttcttcaagagaatcctcgaggtaaagctacaactttctctctctcttttctattgcttctccaattcgaggccgttttggttttggacagacatgattatgtctttggtttttgcactctagagggatttattcgttgagcatacaagtgccttgaggcactcttcaaggatacgaaacccttccttctttgaaatatgttagcactagagagttacgtgatatgtggaattcagatttgaaaacccttttcaaagtgttgcaaaatgcatttctaggacaactcttttcagttctcaaatgaaaaggaagcggggaatccggcaacttgtataacttctcgagcaaattcatttcaactacaaaacttttcctcaggtcttgtttgttcacaagtttagtggagga

SEQ ID NO: 92333 - DNA, 643 bp, Eucalyptus grandis
  Intron number 1 from transcript Egrandis_v1_0.021188m (loc us Egrandis_v1_0.021188m.g) derived from phytozome v7.0 (c hr-ID scaffold_11; pos 43466835 to 43467477 reverse strand )
cggagaaaccgaagccactcactccattcctcaaggtgctctctctcccatctctctctcccatcttcgacttctgtctgttccatctcatcctgcaacgcgaagaacttgcgagtagatacgttaatgtggctgttcgaggcgttctttcttttgaatttggaagggacctgaagcccagatttctctgctctcccgtcgacggatttggtgcttaaagttctcgtcttttttaatcggcttgccagttggttttccgttgtgttggaggtcatggttcatggtcaaactacgccaaggtgtttttttttttttttttgaagattcgggagtttccctctttttgcttagaggtgaaaagacgagcctgtcccccccgtcagacctgaatttttgatagtttcgtcgattcagtttccataccggctcgattcctttcctctggatcccttcccgttcagttttttttttttttaattttttataaagccgcaactgctttaagggttcagtgcaatgtttagagcatttctcggttcatctcatctgcctttcgtttcttctcttttgcctttcctaacccttcttttccatcgatttcgctaacgttttgaaggtaaggtaacgaaggaggggagagaag

SEQ ID NO: 92334 - DNA, 836 bp, Eucalyptus grandis
  Intron number 1 from transcript Egrandis_v1_0.013787m (loc us Egrandis_v1_0.013787m.g) derived from phytozome v7.0 (c hr-ID scaffold_2; pos 57672901 to 57673736)
acggaacacgacatcaaacatcgaacagtgaccaggttagagtaaacgtcgatcatcggaagacacacgattggcatatatcgaaacagtgatgctatcctttgggggaatctatctatgcatccaaccccaagttactttggcaatccttatgcatcagcatatgaaatggtagatgtgggaatttaactcgaggccttatgttttttaaagtatcagtcattttaaccttatgaattatttaactattgattttctggaagcattctctcatgccaacttcaatatgaaatgatttgattgccatcttgaattgcaaaaaacatgcaattcatgggaacatgccaaaaatgagctgatcttcacaaaaatgatcctattattccttacaagacagataattatcaaaaggatcaggataacaaaaacacctccatacaatgtaagagattccaaagagagcaaagtccccttctaaatggatcacaccatatccttgccgggggctgcatttattattccaaatcgaaaacttaccaaccttataacaaggcaaaatgatcacaaaagttatccaccacggcaaacatgaccaggagttcttatcctaatgaaaagtctcatttccatttccgtccgtccaaaacgatgccatcattgccatgaaagtgacaaaaaagaacaggcatgtgaacgattgatttgatcctccccacgttatataaagcgctggccttttcaagtctcgtccaaattcaaacgccacgctccttcactttgcacactcctccccacttgcagaaaacttctcctttctctcttctttcttggttcag

SEQ ID NO: 92335 - DNA, 984 bp, Eucalyptus grandis
  Intron number 1 from transcript Egrandis_v1_0.000805m (loc us Egrandis_v1_0.000559m.g) derived from phytozome v7.0 (c hr-ID scaffold_11; pos 15643527 to 15644510)
ggggggagaaggaaaaggacgggacgtaatctcaggtgaattgggtactactgtttaggtttctatcttgcctctgattcttaggcttctaatcggtcggcctcgagtttcgtgctcgtgggtacttttcccctttgtctgacctctgctcttttcttttcttttttctcttttatggccaatcagatccattgcggctggtttcttgattgttctttgatattgggtagttttttttcctgggtttctggggtgcttgagtgaagtctttttgatttcttgcgaattggggagggtgggtttccttcgctggggttgaatgatccattcgggttgcttggttttgattcgagctctgttcttcgcttcttctgtggggttctggagatctgggggtgttcttgttttggagggtcggatttgatgctttgacttgtgccgttggagctctcgcgagtgtagatagataaaagtgggcttcttgcctttttctttttcctcccctcctgttgtactttctgattttagcgtgtgaatgattgcgctggcgcgaaatgtgtttcgttagatcatgatgatggcaccctttttccgttttgatggtccagttgactttctattggtgaatgaaccagtcagagcgatgagttccaatttcattaatatagggttttgggagttctgcctcgaggttccgagattatgtctgtctgtctctttaaaatcagcagctgatgaaaggatgaaggaaaattgatagtttagcgttgatgttgcgtttattggtggttggcaaaccgaatactttactgcttagaatatgtccatatccttgatgtgttggtgccaaattatcatccccttttcactgattaatttgttacctctgtgctatgacatcattagattttggagttgtgggttgacacggatgttactctttatatttggcaccagcttggtgactttcgaggagactatttc

SEQ ID NO: 92336 - DNA, 586 bp, Eucalyptus grandis
  Intron number 1 from transcript Egrandis_v1_0.052618m (loc us Egrandis_v1_0.052618m.g) derived from phytozome v7.0 (c hr-ID scaffold_272; pos 18004 to 18589 reverse strand)
agttggtagtcgaaggagagacacctcactggctggtgagtttgtgtgcgattttctgtaatctcagtcatgtttttgcgtgcatgtgacaagagtcatatcttttcacgtcccgtaatcaaatttcgtgtccattctgcctgctctcatcttgccatgtgccagaataggaaagaaaaggaaattatttgtctgtttaaagtctggctaaatataagggcagctttatccaatcttcttttgtttcaatcaaagaaacgacagggaagaacggcgaggaaatgatcaagagatctctgttaatcttcaaagagtaagatttgtaatttaccaatgaataaaggttacgtgtggtcttacaacctctaaaattcttctctcagctattccactgtgtaaaataattagaaatacaacgtttaaaggatatttatacactgaaagaagtagattatcattgacactatagtctcgtgcatacttattgcccatgacaaatgcattggaattagctccggtgttttcaattgattagagaatctgattagttgatttaatcacatgtagaacggaagttatctaagga

SEQ ID NO: 92337 - DNA, 211 bp, Eucalyptus grandis
  Intron number 3 from transcript Egrandis_v1_0.025358m (loc us Egrandis_v1_0.025358m.g) derived from phytozome v7.0 (c hr-ID scaffold_7; pos 5169292 to 5169502)
acacgaaggaggggtttaaacgtaagaaaataaaatatggaaagctgggatttatgttctgtttctttctttctaaataattcaaaaaggaaattttcagacgaaagaagagtagtacaaatccattattgtttataagatactctgtgataacaaataacggctattttctggtttttagcccagctgtagagaagcttgaagttgtgga

SEQ ID NO: 92338 - DNA, 796 bp, Eucalyptus grandis
  Intron number 1 from transcript Egrandis_v1_0.054008m (loc us Egrandis_v1_0.054008m.g) derived from phytozome v7.0 (c hr-ID scaffold_2; pos 7878551 to 7879346 reverse strand)
aggttcacgtctttgacactggtgggtcataaagttcatcttctggagattctgcttttccttcaaagtttgcaatttttctgagaatgtcttcgatacagattggtattctctgcttggtgccgagagaaagattgattcttttcttttcttttcttttgttctgtctgatttggagctcctggcgtttttgggtgcaattctgcttgttgggatttttctttttttggttgtgttataacttgctgatgccttttgtttgttgttgactttactctaatcaatggattggctcttgaatcggtgatatgtggctaattttttgcattgaatgtgggggttgaaagagaaaattcatgatgttctatgtccagtgattgtgatatatggcactgctatgaccaatattttcctgtacttctttcatcttgaacaattactgaatatgtttttgactttctccccattcgtatttttctgctgtttatatttactgctggaatttcatgagggacggcttttggtgtacttccaactttgttgccttctactttttgtgtcgtgatcttgtgttccattggagcttagcctgtgtggcatgtggaagatgttgaactatgagaggtgatctcatttaccatattcttaattggtgaccttggggagagagagagggagtgcagggagggaggagggagggagggagggagatctgccattgtttgtttctgtatgtcgtgattttcctttttttcaattaataatttagttttttctgactcgcagtggagcaagc

SEQ ID NO: 92339 - DNA, 1024 bp, Eucalyptus grandis
  Intron number 4 from transcript Egrandis_v1_0.025880m (loc us Egrandis_v1_0.025880m.g) derived from phytozome v7.0 (c hr-ID scaffold_7; pos 10372394 to 10373417 reverse strand)
ttctgctcgacaagacggagaatcttcgatctcaggtaagcaatctatgatgtgtgattttcatcctggagctaattattgtatgtaagaagcaggatctggtgtttagaaactgaatggttgatgcatcaagagtgacggtttagaggcaacaattggattgcaaacacaagtatattacaggtgtagtcttcttccggtctcctgaaccggccaagctactagtgcaacctacttattcgggtcattggacaactgttgaatcagaagtacaaaagttttgcctatacgtgaactgtcattcttccctattcaagtcttgaatgctcaattgagcagattacgtaacaaaaccgggacagcctgaactcgcatcttctcgctctcgtgcaaatatttcatatcgtcacatcatttcagcctagatgctttatcaagggcaattgtcctctcatctagtttagcttctaaatagttcagggagaactgatggacatgaacaaagttgggtattatcagttcattatcctctgttcctattccttttctcattccttttgccgtatcgttgaaatattgccctaaatcacttgataatgagttatatatgacagcttaagctttaggattggacttccttacacatatcatatcttgcaattcagtggatattttactgctgatctacttttgattctgtgttgctagattttgcatcaaattattcctttaaagcacaaaacagcatatgggatgtatatttaccaagaactttccccactattataaggaatgtcatttgaactttggaaggttttaactgctattgctttccaatagtccgctttcctctgtccagtcttctcacatcaaatgtacgaaaggagtgtaaactgctgattaatttggagctagaacaaagaccgccctctttcactatgacagagttgaggatctcagtgtcctccgattgacatagattttctactttcaggcgcaagatttcaggcagcaggcgacccga

SEQ ID NO: 92340 - DNA, 935 bp, Eucalyptus grandis
  Intron number 1 from transcript Egrandis_v1_0.049774m (loc us Egrandis_v1_0.049774m.g) derived from phytozome v7.0 (c hr-ID scaffold_11; pos 17616386 to 17617320 reverse strand )
cgaaggtaaaaccaattatattttatctcaccaatctttgaaaatgcaacgctgtactaataagaagtagctctttggaagttgaagtggcttttcatgcaatcctaaacatccaataaagagacaaagctctactaattttgattgtcatcttttgttcagatgttgatgaatgccaagatcagaccaatcggtgccctgacggaaagtgtgtgaaccaaccaggttactatatttgtgtagaagagagcaagataattaagtttatcctcgtgggtaagcaaatttctacattctgtcatgagtattaacaaggataattgatcttttgtgcacacagatattcctgaatatcacatcctagaaacgcaagatttagtctataagagatcaaatccacaatttagaaaagcatgtagcataatacatttacagtggatcagatgttaggtgttcctatagagctcttcggaatccaaattcgctgtttgatttgggcacatatcttttagtaccattggagcctaattacttcatagttcaacttgatggactcatcgacgcatacagtatatcaaacctaataccgggctttttcctttttaccctcgatgtccctggggcatgaacaacataatttcgatcaagcaatatgtgtgttttatcttctggctgctgctcaactgattggatagctgttctgttatatgctaagtttttcataagaagactaattttgcaccaatcacattagcattctaattgatgaaatggaaggatatttaaaaggcttgtaaggttaatctcgttagtgtcagattagcattttctgctcctcaagtcagaggcaaatgcttgatacttacttttggtaatgctcataccactgtgacaaaccaggtattggaacaggcctggtgaccctacccttgctt

SEQ ID NO: 92341 - DNA, 852 bp, Eucalyptus grandis
  Intron number 2 from transcript Egrandis_v1_0.013033m (loc us Egrandis_v1_0.013033m.g) derived from phytozome v7.0 (c hr-ID scaffold_11; pos 2251884 to 2252735 reverse strand)
ttgccgcatccattgacagccgcaagcgcgaccctgtatgtattcttgccacttgtgagtgttgtagtgctactggggacttggatattcagtgcttatgcttatgttagtatatttgagtggattggcaatcatttttcaatgcctacgtaattttttggtgaaatgtatgtctcttcttagctgaatttatgtgcaccttgattggcttcttatctgctgcttttgataacttcttatggtggtttattttgtcaatatgccggacaattcgtttaatccctgtccactcttttttggctgggcgggggggcggggggtgctattgacatcgtattgacaatggcaaggtgtgctttaggcttctcaatttaataaagaggtggacataatcatgcaactatctgcatttgttggaagaatgcatttgcatttccaatgagacttcaaggggcacagatattgagaaatgatttcatggagtgtaatttattgtctcatgagtcagtagttttgcagagtctaggcatagctgttcgagtacttctatcacaagcattgccaattcttcaggaaatatatagcggatagctgatttgtgcagtgactcgactggataggatgcttgttgttacattggatatgctgcagctccttcaatgtgtctaactgttggaaccggtttagctcacgtgttgagcatattgttttgttttactattaggggcttataccctcactctttacatagcaagcatagagcccattatgtcattcgcatgttttaggaagcgtctgtagcttgcaatattttgcttaaatcgttaattgagctgtcttttgatcttgtag

SEQ ID NO: 92342 - DNA, 982 bp, Eucalyptus grandis
  Intron number 3 from transcript Egrandis_v1_0.039375m (loc us Egrandis_v1_0.039375m.g) derived from phytozome v7.0 (c hr-ID scaffold_7; pos 40206231 to 40207212)
ggcttacaatcgtgctctcaagctttctagaacaggtgacggaattttatcagtaatttccaactttgtctactaaaatggtttaaactccatgaaatttgggctgcagtagctggtatttaactattcatgctatggttctattgatttctcttgcattttatatctagaaagcgttcgactatattctcctactgctactgtgtatgtagaatgtcttttatttgtttctttcattatggaagtacattagtgtacattaagcagcagggaagtggtattctcgactagtgtgctcggcgatattcttaaagttccattatttcctagaagcggctctcttctgtagatttctgtgctattttgatgcatgatctggcaggacgtttcaattagcttgcgtgtcctagtatcaacgagatcaaagtcagtaaatgttgctgattttgcaagctatttcacacggtggaatctcttagtactcactcttgatacacatggattgagccccagtacaaatattaagctcctaagatgatgtaggaataactctaacaagggctcctataccagttgacttagttggagaagtgcaaaaagaacaaaagcagggctaaaatagagttgagttgaagctggaacagagaaaagataattatggtttatgaagaaccaatcatgtttattgaatgaagaaagctaatgagttagagacgtagacttatttatactgggttacagataatagatgatgttgatctcaagtaacatctccaaactcaacaatgcaatctaattgaacatttgcatgactattgtgaaaagagactaaacacttcgaactactaaaataggataatactcctacatcacaacacttgtcatgatatgctattccttgcttatgatgtcttatagagctgtgtctgtctcttcccactttgcagattccccagttattggagtgggtttcactggctct

SEQ ID NO: 92343 - DNA, 840 bp, Eucalyptus grandis
  Intron number 1 from transcript Egrandis_v1_0.016349m (loc us Egrandis_v1_0.016349m.g) derived from phytozome v7.0 (c hr-ID scaffold_11; pos 32609977 to 32610816)
agaagtacatctacaccatcgacgacgattgcttcgtgagtcttgctccccccctcctccccctcctcctccttctgttgctttggatttcgatcgtggttgaccgcgactagttgaatcgggaattgctggaacgtttcctttttttctttcttgttgttttttagcttggagatctagttgtggtttcgtccgttctgtgccgatctggtcactgtgaatttgtcggcggttgtttgggcgggcggatctgtgttttgactcaagtagcatgtgggaggaggtgctttaatcttgattagcagaagacttaacgtagttgatgtcaatctaggttttctcgagggctttgtagtactgttctcggtcctctgagtgttggcggggagttgggaaaggtagatctgttgattttccatcgattgagcgagtttgattagggacattgtggtaattccccttgtttctgtttagatttttatttttccctacctgtagacttagatccttaacgaaaaatccctgctttgctgtaattttgtacttttcctttcgccatccgcaagatcttgccttttctttgttttatgtaatgtcctaggctgcacgatctggacgaggtttgtcgctgaagtatgagtgaaactatcgacatgcttttgtcatgcggataacctatagaaaataagcgcattgcttctgatattgtggtgcatcgctttcttgttgttgaagttggcgagtcagggtggaaattagtttctttgtggctttatttatgaactctttttgtgaatgatggcaggttgctaaggatccaactggcaaggacatcaacgc

SEQ ID NO: 92344 - DNA, 586 bp, Eucalyptus grandis
  Intron number 1 from transcript Egrandis_v1_0.007496m (loc us Egrandis_v1_0.007496m.g) derived from phytozome v7.0 (c hr-ID scaffold_7; pos 47015643 to 47016228)
gagagccggggcgttgtgctggggatactgaaagggtaggtttacgcaaatttaatatccttacgtatagatttggtggttcacgcttatttcattcattcatttagctcaataattggacgagtgaatccaagacgagttacaaaaactggtttttatgtgtgaaaatgatacgtgaacaacatttcctttcaagctgttggtcaagagagaagaccagttcttgatcttgcaagacgattaatcaagttgcaagttttgaaattaattcactcgacatgtcttgctttatatactcgacgaagttttgctcgttatcacaagttgtgaattttctcattttgattgcatgcatcttctaacttgttgcgtatactcaatcatatggtcagtggaatcatgcaatatgcattctttccttatttccaaaagggagagacaagtttaaactcatacccctgtcatgaaagaaatttgagaaagttctgtcccctgaattgcctaacaagtttctttcactgattgaaaaataataagaataatttcgaataatcgttccatttctctgaactttttttgggcagct

SEQ ID NO: 92345 - DNA, 523 bp, Eucalyptus grandis
  Intron number 1 from transcript Egrandis_v1_0.006288m (loc us Egrandis_v1_0.006288m.g) derived from phytozome v7.0 (c hr-ID scaffold_7; pos 34394842 to 34395364 reverse strand)
tcgcggtgtcggcgcaggccgaggagactctcaaagtgagtgcttttctcccgggcgttcttcttgtgagagtttttttttcctgtttgcgtggaaagtttgagtttttgagttggagtgcctttggtttttcctgtgactggtgaatggaattgtgatgttctggaatctgaaggaccaatgtggcgggtttgagcttcagtggttcttttaatctttaaatttgagtgcttttgaaactgctatttgtattttgatatgctgctgggaagaaaatgtggagtttggtgtgattagtttggtttgtcatagcttcggcgaggccttcgaagattatgattggtttccttttccaattgaatttcttgtcgtttctttcttgggattctgctttagctgttttagatttatacagtcgatattgtcggtgttaccttccttggttgcgtacctttttttttttttcttttttttttctcttctacattgtgaggattgtggtttgtgtaggaaattgtgttgg

SEQ ID NO: 92346 - DNA, 856 bp, Eucalyptus grandis
  Intron number 1 from transcript Egrandis_v1_0.021104m (loc us Egrandis_v1_0.021104m.g) derived from phytozome v7.0 (c hr-ID scaffold_2; pos 55399187 to 55400042)
caggtttcaaacgatgtcacatacgttttcacttgtaattgatgcacgagtttgattacttgttcttgaaatgcatatgggtgatgcagtcttcaggtaattaattagtatttgtcaagcacaaggaccaattttcttggaagttcatacacttgaaatagcttggacgatcaatgggaaaacttttattataattcgtaaaatagaaagcttcattcctttgtttattatcttaaccctggtgtctagtcctttttcttgttttgggccaaccctggtgtttagttatctctcttaatgttctactttgttctgtcttgcgtacctcaccatcatacaatctgtgatcgctaagaaattactgtcaattaagacttagagaacacacacacacacacacacacacaaaagaatctgggaaaatataaattccgagattatgcattgttatcatcccacactttgtgtttgcctgatcttcttacatgaaaatgggtccagcacttctgcggtctctttagtacatcaaggaatgggaacccaataattattctatttctaactgtttcattctcttggataggagacaattatgtacttttccttattttctgaagcaacttggttaacacaaagaaacattacaaaattcgatataccaaataatgcgacacaatttggatataggtgcttagagtagaatgttacagaaaaagatctctgtgtaccaaatttcacaaaccttctcaatttacccaacaaagatcgttccttattttaacaaataatgatcgtctttgtatcttgttaattttacttatataatcaactcaacgccaacttaaaactgcttcag

SEQ ID NO: 92347 - DNA, 551 bp, Eucalyptus grandis
  Intron number 3 from transcript Egrandis_v1_0.034394m (loc us Egrandis_v1_0.034007m.g) derived from phytozome v7.0 (c hr-ID scaffold_11; pos 13235588 to 13236138 reverse strand )
cgccttgatagccttttcttgctttatatcttctggtgagttgctgcgatatatttgttttaattgattttgatctctttcccttgatataatgaggacctgaggttatgtttgtgcagttactttcaaagttaagagttcaaaatttttagggattatacgaggaaatatagattatagtgtacctatagagaagttggtggattcgtattcagggaaaataaaagtgctttagaaatgagtactattttcgtaattgtagctagttttcttctaatcgtggagaagagtgcacttttaaaaaaaaaaaaaaatcaatttctaaagtgcacaagcattcctcagtcatgttcatagtatcttggtagtatcgtagagaaccgtgagggcaccttgttgactggatgtctgtgtttgtgatcaatatcaccaagaaatgatgcacctcttgtcttggacatagatggttttacgtttctccacctttatatatcaataaagaagtgcacactcctcttttttgtcaattttgtaggccaaaccaagactag

SEQ ID NO: 92348 - DNA, 438 bp, Eucalyptus grandis
  Intron number 2 from transcript Egrandis_v1_0.040156m (loc us Egrandis_v1_0.040156m.g) derived from phytozome v7.0 (c hr-ID scaffold_7; pos 43808620 to 43809057)
gggttagtccaatgctctttaaagagagaaaatttgggaaacttattttcattcgattggatagtattttgagtcaagcatttcatttaactcaaaataccgtggtagacgtattgcgaattggaaatgaaaagtcaatttcgatcaccccttttttatttatgatttgtttgatttattagaatgattctacactctaaaatagtatatcctcaaccatttcatttaggcacgttaccagaaacattattaatactcgactattaaattgaaaatgcagcaaagttgactcttcaatctcaatattagtagtttattgatgatctcatttctcttccatttgactctctctctctctctctctctctctctctctctctctctctctctctctctctctcagggcattttacgttggagtatcgtcgacagaagagg

SEQ ID NO: 92349 - DNA, 708 bp, Eucalyptus grandis
  Intron number 1 from transcript Egrandis_v1_0.023088m (loc us Egrandis_v1_0.023088m.g) derived from phytozome v7.0 (c hr-ID scaffold_7; pos 46556830 to 46557537)
ccctcctgcgctcgacgacctcccctctagacccagtacttcgtctttgcctctggacttgcttcggctcttccccgctcataaagatttgattttgagtttgattggatgtgggtttgtgtagttggcctgtatcgccctttctcttcttttctttctttgtgtctggtgaattcttcgcgcacggttttggttcttgagatgcttggttgctgggaatttagaaattgggaatttgatattggttcgcatgtgggattggtctcctgacccggagaactatgatgttatgttttgaattactccgaggcgactccttccttgtggccatgaactacaaaactggtcgctgtttagtgcttcaaactactcatgggtgatgggtgtttcttctggggtgatttggttgcattctgcactctctttgctttgatcagaaaatagattattttactttaaatcactttattcatggtcttgcctttttttttggtgggttttttgttttttttggagggggggggggggaggaggagagggagggcggattactggagcttcagttgttttctccttgcatataggaagggatttgggggagccaaatgtgacatttttaagccaaacactgtggtaagcatgcatgtgcagtgggaattgtttgagaaagagttccttatggacgcttctcattctaagcgcaggact

SEQ ID NO: 92350 - DNA, 261 bp, Eucalyptus grandis
  Intron number 1 from transcript Egrandis_v1_0.042557m (loc us Egrandis_v1_0.042557m.g) derived from phytozome v7.0 (c hr-ID scaffold_2; pos 63876605 to 63876865)
ctcttcgtcagcctagaattgtctcggagatcctcgtgagtatttcattcaccctccagtttcttccaactttattctatgtttctgcgatttaaggacttgcggtgacattggcaattcaaggaaaagaaacaaggattattaaatgaacccaaagcaaccgctcactttgattttcctcttccttttctttttctttgccttttgtctcctccttattctgaagggtggagtgctcgttggaccctccgttctgggcca

SEQ ID NO: 92351 - DNA, 859 bp, Eucalyptus grandis
  Intron number 2 from transcript Egrandis_v1_0.047875m (loc us Egrandis_v1_0.047875m.g) derived from phytozome v7.0 (c hr-ID scaffold_7; pos 31847465 to 31848323)
gcaagtttactcgaaacccaacaccaccttcgggggtaagctttcttgataaacacagtgattgatgcgtggctctccgtatatatatgaatccactaatgattttatcttcacaagagaatgttcatttcatctttagttggcattctgctcaatgatgttggccatgcttactaatctcagtgaaaatctatttgttcgctctatatgggctatgaatcataggttgacagtatgagcagtgagggcatacaagggttgatctcaatttgtgtacaagtctgtctgcaattttctggatgtatttgcactctcattgatactctttccttttattgacatatcattgtcgtgatttgagctgtggaagaactttgtcaataaatcttgatgggtatgcaaatagtatatagaatttatttttctgatctatatgctctttagtgcattcgatggtgattttaaagcacagattggtcagttaatcttattttagtgcacatattgtgctcaattgctggactctttatcttccctgtggcaccatcttgtctctgccagctcgaattctacaatgcatgctttctgttgcttgttagttctgaagaagttcctatagtctgattttccttcttggttatgcttttcgacccttcttttgcttcttcctcttttttactgagtgactttattggcaattttgctttgtgctcactgcatgtttggtgctttgcagatcataagtaatgatgtgagcactgtattttgtcaacattgtagtggactgtcatacaaaaatcttatgcttcctgatcaactattttcttatccatcctctttttgcagattgagataattt

SEQ ID NO: 92352 - DNA, 634 bp, Eucalyptus grandis
  Intron number 2 from transcript Egrandis_v1_0.032356m (loc us Egrandis_v1_0.032356m.g) derived from phytozome v7.0 (c hr-ID scaffold_11; pos 7324874 to 7325507 reverse strand)
accaccgagcttgatcccagtaagcatcttgatctcctctttgcttccgaatcggttcttccatacagatctaactagaaaacatgagtgtttactattgaaagtagtctacgctatgtgaagggtcatatgtcatgacagcgaaagtaacaatcttagcataataccacttgcgtgaagattttggtagctgaagttacagaagatgagatattcttttgtttgttcaattcaaagagtgtacaaatcacgctttacattttataattaatttcttactgaggggcgatccgagaagctttactggtatgcgatctttcacatgggatctagagaaaagaagcaaaagtccatgtgcccaggaagagcgtgccttgggagttttaaatggccacgtccggaatcccatgcattgtcgagctgactcttatatcatggcccaacgcttaactttttctttttccttttcactttgctttccaaagattgagagaagacaaatgaccataaatcaataattgcataaatctcatcagtgctctcgattaagagggacgaagcgtaatcatcgggcggatcccgagaaaatctgtcaccgttctgctgactttacaagctgttcgattcgcaggtc

SEQ ID NO: 92353 - DNA, 672 bp, Eucalyptus grandis
  Intron number 2 from transcript Egrandis_v1_0.019749m (loc us Egrandis_v1_0.019749m.g) derived from phytozome v7.0 (c hr-ID scaffold_2; pos 36502243 to 36502914 reverse strand)
ctgctaatcaaagagcgatacagactctggagaaggtacggacttgttctccgccgttctttttttttttttggggggggggggggggtggggggttgatcgacccggttctctccccacttggacggcataattgcgtatcaattgtgatggtttttgctcgtgcgatttcaaatcactagctttggattctcattggtcattgcctgatcctagcagagcgccccatgttaagtatgcaggaaattggccaatgttggatttatggctgctttttttttgctcatgagaaattattcagaaatcttctgcatcgcacttctagggaagcaaaaaggagttattttcttcttgggtttgtataaaagaagggaatgcttgattggggaccttctttgttacctggccttcagttcagaaacttgcccatgtacttttgagttaagctcatcaaacaattggaggcttaaaccttgattgattatgctgaactacagtgagattcttcttgttcttgagtgggttattatggtaattggatgccatagaggtctcatctttcttgtgttttctcctgcttttttcaattgttccgagtcccttcaaatatgaaggctataaaacctcgaattgtatggtttactaatggaatttgttgatatgatttgaagt

SEQ ID NO: 92354 - DNA, 819 bp, Eucalyptus grandis
  Intron number 2 from transcript Egrandis_v1_0.022230m (loc us Egrandis_v1_0.022230m.g) derived from phytozome v7.0 (c hr-ID scaffold_11; pos 6123682 to 6124500)
tctggcatcaccgtaagttgtctctacaatttttgctcgcaatatatgtctgtataatcagttaggaacattttggatttgttcgtggagacgtacctgatcgcttgcttgcgtgtatttttctctgtttctgcaatgtcagcgaatgctatggatgtaaatattcaatccatagagtttagcgccttgtctttcattgacgtcgtttgggaatcagttcgatttcagtcaccacctaggaactaacatacatgcttcataatctgtgtattcaatccaccgattagctgctgagtggatcgagtcctttgattatttatctaggggagattgaactgttatgtgcagtgctatcttcagcgcttattgttttgctaatctatgtcgattccttcttacaacaaattgctgaatgtgtgacatggcacttttgtggaggacatactttgttttccataattttcaaaagccatccagacccatcgggctctttgcatgactgaacgttggactagataaatgatcacctcttggctcttcgtctttttcctgtaacgaagaaaaattagctttgtcctgtaataggaagcactgcagcagctggataagcttggttttggcatgttgtctgttctttaattcatttgtgacttgtgagagacaaagcccgtaatttctttgattcttgtctcctcacggttttcaatcgatggaattgtgatgttaagaactctacttatgcctgacctcgaccaatttgtaattgtgctatgtttgtgtgaaacagtaagaaccaaccctagcatcacagacgcagca

SEQ ID NO: 92355 - DNA, 440 bp, Eucalyptus grandis
  Intron number 1 from transcript Egrandis_v1_0.031049m (loc us Egrandis_v1_0.027959m.g) derived from phytozome v7.0 (c hr-ID scaffold_7; pos 48915300 to 48915739 reverse strand)
ttcaagtgcagccactgcaaaggcacattaaaggtgtgccattttttcattggtttacaatctgcagttttttgttagatgatactattatatgtggatgcaatgtctttgtcttgtatatttggtagacttgagtctagaagaagaaacttggatattgcatttgttgcaagtaattactcattgttctgtgcacatggagtgagtatataagcatcgtgttctgatggattaaagctgagtttaaaatgaattcctttgatctctgctatgcccctatttatgactaagttcactcaacaattcttgtcgggaaatgaagtcaacattatgtagtcattgtctgccacagattagaggtgcgttttaaggataatgaagcaaatgcatttgccttataaggatccatgtcatgatttcagctgagcagctactcctca

SEQ ID NO: 92356 - DNA, 910 bp, Eucalyptus grandis
  Intron number 1 from transcript Egrandis_v1_0.012247m (loc us Egrandis_v1_0.012258m.g) derived from phytozome v7.0 (c hr-ID scaffold_7; pos 39848786 to 39849695)
ttctttggccttcctctttcgatctgtatcgcgaggtctctccatctttccctccgtctctctgggtcgggcgttgtgtaaggtgggtgtcgatgtgttgcggacctgatcaagctgcttcttttccttttcggcggtggtgatcgtattagctttcgtttcaagcacgttaatttcgtcgagtgttctcgtgttgtttgtaattcacggtccggggaggaaggtggtcttttgtttctctctgggtttctctggggttcgacgatggtttaatcgctgcgacgcagctcgtgacaagaattgggaatatagatcgattatcgacactctgctcgcacttctggtgtagtggaaatgatatataagttcttttgtcctgcatatccactaattgttcggcggcggatggaaaaaaataaagaatttgtaggggacaaaacgaatccatgtgaatttcatacacttaagtttaagatcaccaaaagtcacaccatccgcgtattttttttttttttgtgcttcaattcgttcgcgagattgtaatacaccctgaatccaacggcgggtcgtttactgcaattcatgctggagtttattagttagtgtttgattcaatcacatctttaatcttactcgtgaatgggttttactttagcccctctgtttttgatctgcagaaggtactttagctttaccaaaggcgctgcatttttgtatatttgctttgtatttggagtaagtaatcattgaccctcctggtgtctgattgatttctttttcggactatgaatgtcctttcgaaagcttagaaacagctcctttcaagagacttttttattctttttttaatggttctcttatttgatgcatttcaggggtaaattctggtgattcacccatacggcaacgt

SEQ ID NO: 92357 - DNA, 487 bp, Eucalyptus grandis
  Intron number 2 from transcript Egrandis_v1_0.012461m (loc us Egrandis_v1_0.012461m.g) derived from phytozome v7.0 (c hr-ID scaffold_2; pos 44006139 to 44006625)
ttgcttccgcacgctcaagctcacgactcctagctgtgagttccttctttcctgaaaaggaagtctcatgtatcttttttggtttttttttttttttgttatacattaagatgtgtttatcggcgtatggtcctgtttgaaatagatcgttctttttttcatgatgagtacgcataaaatctgttagtgaatagttgagtgtcatgtttatgtgatggatctaagttgattagatggttcttttagatgacaagaacgcaaaagatctatttgtgaatagttgagtatcgtgtttatgtgatggatctaaatttgatagatggttgaattaattttgggagatatactggcggtaattggtgaagaaatatttggggctggtgtggtgtattcttgtcttgcatttaggcttatttgtgaactgagcaaacattttgcgtgttgggttgttgcagttggagatttgaatcacttgatatctgcaaca

SEQ ID NO: 92358 - DNA, 528 bp, Eucalyptus grandis
  Intron number 2 from transcript Egrandis_v1_0.041682m (loc us Egrandis_v1_0.041682m.g) derived from phytozome v7.0 (c hr-ID scaffold_2; pos 31480602 to 31481129 reverse strand)
aagcaaagattcaagctgctcgaacggctcttctcgtatagtcgagtacacccatcgactctcagctgacggttccatgcaaaaagagagtgacagagacagcgcccttcaatgttcgacattcatctcccgagaattcgatgatgaatcaaaatggggaggatgatgcagcccaagagtagctctctctaagaagaactgcttccattcgagctagacaaaacccacaatgtttctagtttccattcgtatgtatgtgtagggactttgaaagtaactattatctctagtttctagtttctggccccgtacgttctttggggttgtatacgaattacccctgaattctcactttttgcaatttactccctagccttttaaaatcggtggcaatgtgccccagcattgaccgggaaatttttctttgctttttcctttttctttttatgggccagatcattctttgtatttaaattagtttgtgacccatttttgtttggacttgttatggctattattctttgcagc

SEQ ID NO: 92359 - DNA, 809 bp, Eucalyptus grandis
  Intron number 3 from transcript Egrandis_v1_0.039265m (loc us Egrandis_v1_0.039265m.g) derived from phytozome v7.0 (c hr-ID scaffold_2; pos 31457355 to 31458163 reverse strand)
gatcttagtgataaccagcttgaagtgtctcagattcaccaatttactgcactcccgtttgatgcaggtttctgttgcttttctccaaattctcttgccccgttcgttcagtccatttagaatcattctgtgcaggggatgattatatctacagtgaagattgatttcctgccatgtgaagatgacatgtttctttagctacaacaaaataatgtttctgaaatcttttagaagcatgtgtttggatttttaccctttgaaaaagaaaaggaacccctagaagtatgttaggcaaattttacaagtctctgcacctcctttgaaacttgaagaaatcggagaaactgtcctaaaaatccttttaccttctgttcggtatgtgttgtaccatgaccaacctttaaaaataattttgggaaaagtaactttaatggagactcactctgcacgtttccatggagtttgcatttggcatgttattctgaaatgattatttctctaaaagcacttatatggttcctataattattgccgttgctcttgccatgcaataatgtactgacacaaaatatctgttcaagggaggttttgattaatattacaaactggaatgaaggtgaagcctgaattttttaatgagattagcatatgtgatatgtgaatttggttcttggctttcacagctttttatgtactacacagattatagttagcaaaacaaaattcccagatttcttcacaaaactgaatctgattgtaacacttacagtgattctgatgtcattcatcatcttggcaggcccaattgg

SEQ ID NO: 92360 - DNA, 868 bp, Eucalyptus grandis
  Intron number 1 from transcript Egrandis_v1_0.022808m (loc us Egrandis_v1_0.018126m.g) derived from phytozome v7.0 (c hr-ID scaffold_2; pos 37970206 to 37971073 reverse strand)
aagtcggtctcagtgaatcgaaggtaattcgtttctggtcgtttctttgtgatgtttgctcgtttccctttttctctttccttgttctagtgtgtttcctcggggtgaaagagatgatgagcacgggattgctctgtcgtcctgtcatcctgtgtagtggaggtgtgtttggatcgtggggttatgatgcttttttcgtaaagtcttttgccctttttgtgacttcggtcggagcttggaggatggttgtgtttggtatcagctgagggggatgttctatgactctgaatttgtcatcttgcttgtgaaaggtttgatttttctgacgttccggctttggacagtttctgtgatgctgtttggactggatgatcatttaaggggtgtctttctccttttgttaatctgaggtttgaccgacttatccgcgatggatgtaccagtttgggtgtttcgttttcgctatttcgtgaggctctgtgtcgatgaattcccaccgtatgatcataatacttttatatgcttattttatgacgtgttgttttgagtaatcactaggaacgtaggtcaatgatcttttgttagcttaggtcggtttgctactactgttatccattctgtactcaaaacggtatttacttacatatatgagcaataccaacattgtttgctgttttcgtctgcccagatggttgttcctctgaatatgtgggtcctaatttccaatttcaagttgaagtacaatcttctccgtcgccctgatggaacttttgaccgccatctagcagagttccttgatcggaaggttccggcaaatgcgaaccctgttgatggcatcttctcctttgatgttataattgatcgcacg

SEQ ID NO: 92361 - DNA, 666 bp, Eucalyptus grandis
  Intron number 2 from transcript Egrandis_v1_0.000130m (loc us Egrandis_v1_0.000128m.g) derived from phytozome v7.0 (c hr-ID scaffold_3; pos 77286290 to 77286955)
ttcatattgtaagctgctattggctgtggctatagcaaactttttcgtgcagtgtgtcgttttaattttttttgtcttgcattttgaatattcttacttcgacttcggttggctttgaaatggagaataggagaaaccaattgagtcgtcgaaatgacttaccgaggcaggacttttttgtggggatcttcttatgaatgtgctgatttttctcctctctcctataagcgattgtcggatactctctcctcatgaagttctcattttgctcgttacgggaacgatctatttgtagttatgttctctgcttcatcttttgggctgtaaatgattttgtgttttattttttcttaacctggtttgatatatgattgataggtgggttaatgcctgtctcattttaaggcatccattgttttttatatgaactgggtctattgaattctctgattgatggagaagttttaagtttttggtgcatcatttgattgtcctatcatcgatccattttgtattatgctatctatagttagatgatctttcatagataaagagatagatctactttcttatacacaacgcaatcctgccatttccttttctgttattgcgtgaatgcaatttgattttgtttttgtgacaatgaataggctctgaaattgagtg

SEQ ID NO: 92362 - DNA, 915 bp, Eucalyptus grandis
  Intron number 3 from transcript Egrandis_v1_0.012715m (loc us Egrandis_v1_0.011292m.g) derived from phytozome v7.0 (c hr-ID scaffold_5; pos 35677654 to 35678568)
cgtttcttgccgattcatcttcttcaggcaaagtattttactctttggatttcatcactgtctgtttctctgacatgtaaaactttttaaaatttaattttatttctaatttattttgggacatattgtggttgagtcagcctatcgatttgccaaagacttcctaagtagttatccctaaagtgcaaatgaatttacttgttcctcaagcctgcatgtttcttcagcaataactaacactaataattgggcaggatgatgttacggataattaggatgaatctgacaaatcttggtacttgagaggtgtgggagagcatcggtcaggatttgacattttgctctcttattttttttagctagatataaacttagttaggcattcgtttctgttgttctctcgtgaattgtttgtctgaaatgaatctatagggctagcttttccttttggttacctgtgcgaagcatctatttttatattcatttctgattaaatatatgttcaagtatgaaaacaaagggaggactagtatgattagttaagtgggtgcaaacaacacgacatattatcaatcttgttaagtgaaattgaaaaggatcagaattggaaacttttcataaaagtggaaacatccagatattcaaccgaggaaattggctcagcaattaaaaaagttgattcttttttttggaaaagcagtatttttctttttaataatcaaattccataaattttgtcttcagtggggcaaacttatcagcaatttctatttgtattttcaatctgcagaatccagcttgcttcttcaatatgctctgaaattgttattactgtcgtgtatcctgtgctaatgtaacagttggagtttgctaattgcaggaaccttcccattccagtccaactaatttggagac

SEQ ID NO: 92363 - DNA, 845 bp, Eucalyptus grandis
  Intron number 1 from transcript Egrandis_v1_0.036977m (loc us Egrandis_v1_0.036977m.g) derived from phytozome v7.0 (c hr-ID scaffold_3; pos 9264075 to 9264919)
gcactagcaatcacggtattttcactctggcctcggttagttctctgtaattgggatatgcttcgagctttccctttgttcaagacttttttttctgcttggatgctttttcgtgtttgatttatcgaggagactaaggtgatttgtgtagttcccttccttttcattcagatgtaagttgatgactgtgtgtgagttgactatgagaagttgaattagcttgtgaaaatcactagcctactgtttgtttgcacctttcagctagatcgagaatttgaattctataactatgacaggccaacaaaaattggttcattcttgacacatagatcaccaaccaccaacaagataacttgcgttggttctgtgagatgaggtattgaatgttaaagctactactagattgtgtttcctgagtataaaatgcaggtgcctgtgtagtctgccttcttgtttttggagtgcttttggcgtggactttattcaggaacattcaccatggtttggatccctgacctacataatgcaatacaagggggaaaatgattttttgttgttatctaaacatctctaaactctcgtcatcatattgaaagctaatttatcaattccctatgctcggtcaccattgctaatttttttaaaagattttttaatccttgtactgatcttctgtgcatcttactctaatatttggttcatgtccattcatcagtgatttttctaatgtatcttgcctgatgctgtcaaaatattctaaatctccttctctttcatacctgtcttttttcttttgatgttttatctctgactttattcggcaggaattcgtttttacatagaag

SEQ ID NO: 92364 - DNA, 630 bp, Eucalyptus grandis
  Intron number 1 from transcript Egrandis_v1_0.040901m (loc us Egrandis_v1_0.040901m.g) derived from phytozome v7.0 (c hr-ID scaffold_4448; pos 1329 to 1958 reverse strand)
agtaagctgaagttgaagtattgttagtcatacttctacagaatcatatactagctgttatgaacttcaatcaaagatatcattggtgaaggaggttgaataggtaaatgtattgtattgtttgatggttgagggttagcgttgacatggaaaatcatgaaagatttgcatctcggttctctccttttctaatcaatagacttttttgacggtattgtagttgatgcttgtagacatgaataatatgattcatttttaggtatataacctactgtgaatgtaattgtgggttgattaggaaatcccatttcttgttaatactttgacgattaaagcctgttgagatatgagggtaagaacaaaataaacagttaaataggaaaagatgagcatgggcgtttctttgaatagtcaggggtaaggcaacaaaagagcggtatatcatgtactatgttggcctacatagttggtagcgatctgtttctctaacattgataggtagcacttgatgtttttatttttaagcccttatctcttaaaatttacaatattatatgttcatattgcgggatgaagaatatgatcggggaaagaggaaaaaggtgaggcaaactaagattgattttggtg

SEQ ID NO: 92365 - DNA, 894 bp, Eucalyptus grandis
  Intron number 1 from transcript Egrandis_v1_0.010681m (loc us Egrandis_v1_0.010681m.g) derived from phytozome v7.0 (c hr-ID scaffold_5; pos 2828267 to 2829160)
gtgctgctcatattaagtggacttcggttcagcaggtaactctttgaaactttttgttatgagtcaattttttttcttttttgtagaattcttggttagatagctgagctccttgaagcttgacattaatgttggaaatgtcacaaacctgaacatgtggggatgcttgcaaagttggtgctttttcatctgcagttgtaagatagaggaatatccgttatgggtgcagacagtctatgatctccggctctgattgatggcacagcatttgtccatgagaacttgcttgcagttgcacttttgaaaatatgttcccacaaaaacagaatgccctctttttctgtgtgcatttgatcatatatctgctaactcaatccacaattttgctcggcctccttggtgcatctgagttctgttaattgagaggttgcttttcatgtgattaatctgatgaactccatcattctgtagtcttattattttgtaatctcctttaatgtaatctgttacttggtcttccttctccgcttgtcttggcaaatgacttcctattgaggtgtttaatagagcaaagttgcaataacagtgaagccttcccggatatatcgttcatccggaaggattgcttcgccatgttctcttgaatatcatttcctatctaagctccaactactaaggtgtagcgtaattccatctattaagaaataagggaaaaaaggaaaaaaaggccatgtgtgtctacttaatgcaagcattggcaaaggaaaccttgaatgtctctttgatgcttccactcccgttgataggatttttgtttccttctgatggaacaatgcaaaacttgaaccccattttccaggaagcagaaagtagttatcaactcgtggaggttag

SEQ ID NO: 92366 - DNA, 689 bp, Eucalyptus grandis
  Intron number 1 from transcript Egrandis_v1_0.041966m (loc us Egrandis_v1_0.041966m.g) derived from phytozome v7.0 (c hr-ID scaffold_3; pos 35198822 to 35199510 reverse strand)
acgattatgtaagctcactgatagctaaaatgaaggcgcaaaaggcgaaaaatggacttttaaaggaagagcttgcacgagtgaagaaagggaagatgctctatcaattgggattttttctatgcatgtgttatatcattatggggattatatttaatgtgaaagccagtgagaagtttctaagtcttccatagtacattgtttctaagtttgtatttaattactttatcccgattctcttttgccctgtaaaattaggaaactcatgttgcgtggaaatgtaaacaatttcgtgtgttctttcagtgaatgctatttggatgatgattttttaaatgttccatcaaaggaaaaaagacagcactctcaggtatttatggaaatgaagtttgggaagcttgttttcctctatataagctgccctcgcccttcgaacttttgcttcatcaaatcaaaagcatctagaaaggagagaaaaagtactgtttggggcatgaagtaaagggagttacgtgacagagccggctctttggatttttgaaagtttcaaaccccccgttcgggactttccacgccttgacaaattatactgcttttgcattctgacgaatgttagcttgcacgactctctctttcttggctttacatcataagaaaggaaagaactttccaagcaagccctctcttgt

SEQ ID NO: 92367 - DNA, 849 bp, Eucalyptus grandis
  Intron number 2 from transcript Egrandis_v1_0.019293m (loc us Egrandis_v1_0.019293m.g) derived from phytozome v7.0 (c hr-ID scaffold_5; pos 16218375 to 16219223 reverse strand)
ttactcagtccagacaactgtcatacccgaactgggttagtctttcttttctttcttgttttttcctgcctgatcttggagattcattcttgccatgagttctgatcaagtggagtcttagactgatgttttgtgctgagcgtgttgaaaacagtccaacatcctctgatctgtttgtgcaagcacattcatagtcaatagtggggttggcattcttgatcgaggatatatgtatatttcgtaaggatcaagtgtatttgactatgcaagtgtttcacatggtctgtgtatgggagaaataaatgcagaaagttgggttgtcaaccaatgcagaaatttttatatatttcgtccaattcgggcgtctaaggattgattccgattggaattatcatggaattatcattgaaaggaaaccctttttgctgccttttgaagcgtgagaaagcataagatgaactaaataatggcaatagactcagttaacaattgatctgattttcgttatatgatttatgtttacatttaccatatgctgaggtggccaaaatagaatctcttgctcttgttctacataataattgactgactctcccttgcaacagcttttcgtgcagtccatattgctaaggtatatggtgtaattcagggtactccatgaaagagacatgctgtattagttgattttccctggactggcttctctcactaacctgatccattgatctccaattaaatgtttgagcttttccgaccaaaaaaattgtttgagcttttttattcacaacgcaattgacggatttgttctgatcagaaggcagcagacacatcaacttcttgacaaatcta

SEQ ID NO: 92368 - DNA, 749 bp, Eucalyptus grandis
  Intron number 1 from transcript Egrandis_v1_0.010800m (loc us Egrandis_v1_0.010786m.g) derived from phytozome v7.0 (c hr-ID scaffold_3; pos 11772896 to 11773644)
tcgctttctctataggctcgcttctccacctcgaggtgatcaatgtttcttgttcaagcttcagtcttggccgtctttatgccttttcttttcttttcttttgattaaacccggtattttcttgatgttcgagagcgtttttgtgcttgctgctatagcctcggaggagggttgaaatttcggcgttggttttgattcgtatgttggggttctgggttgtcgcgtttattctctgaaatggcggcttcttcgattcgcctggtgttttgtcgagctgattatcctgtgtgagtacagggttagtgttagcccacatcaaggttgtgcgcttcttttgtttttggtcttttgggtttttttttttattgatggaagctccaaatttgctggggtgagaataatgtgggtggagatgcttgagccaggctaatcactgctcattggagtcgtgtgattatggtatgtgatgattacttattctttgtgggcattgtgtaaatgtcgacgtggttctgacgctagacctcgcttttctgagagtgcatctgagatgctgctcagaattgacttcctcgtgcattttgaaattagctggtttgaattttcttgaactggaactacttattcttttgggcgtttgagttgggagctagatttcatggcgcaagtggcaatgttttgcgggttttggtgaactgcgagtaccgtggcttattttcttgctgtctgtgtcctaaagtttcaggtac

SEQ ID NO: 92369 - DNA, 800 bp, Eucalyptus grandis
  Intron number 1 from transcript Egrandis_v1_0.022776m (loc us Egrandis_v1_0.022776m.g) derived from phytozome v7.0 (c hr-ID scaffold_1403; pos 2937 to 3736 reverse strand)
aacaggtaatttggcaacagccatggattggtcatacatgtaagcgcacttctctttcagtttgaaggactgatttttaaattgactagtggagaaaaagcctttcgaggaaaagaattactttgcgattgtttttaagcattttatctgctcctttttgttcttcgttttcatacattgacagattgcttttgatgtatatttcatccaatctttctacctgctgctgtctttgcaattgtaattgtcaagtatatttttaaaccagttgcataaccaatattaacatggctgccagttgataacgggctagaattggccacattgttcctatattgggatatccaacaaacaaacgtccgaacatctgaaacacccctaccagttgtttgagttattatttctgcacctccttctcaattccctgtgctcatctgctattcattttttaagacacccatatgacactgcttatacgttctatgattataaaagggttgtcttgtacaaattgacaagaacaaccaggctccctgcggtgtttctgtaatatgttgtaggctcccttaggtttttggggcatggcattccagtgtgattactgtataaatgtaacttttgtcgaatcatggacttcttctcttacaaatacagttccattgacattgttccattttgcatattaattgtgcttatattacacccctatgtccctaaatttccttgctcatcttatcttctctaataagacaggtctttcctttctgtgctcccgtagaaacttttgattgtaagagagg

SEQ ID NO: 92370 - DNA, 881 bp, Eucalyptus grandis
  Intron number 1 from transcript Egrandis_v1_0.010964m (loc us Egrandis_v1_0.010964m.g) derived from phytozome v7.0 (c hr-ID scaffold_3; pos 9344754 to 9345634)
ccttatagtcccgcgaagttcctgtacaggtctgtggatgtggaggaaattgctcttctatgaaattttttggataaatgtggatgcttgatggtttcttgttggtttttagaagcacatggatgttggaaattgtccaagaggctctgtaaattttgctgttgtgacctagtggctgtgaagatatggaagttgtttgatcagtgcatgttctgctatattgttagtatgatggacattacctaatttgcaattgcgctttgacctcctttgtatcacagcttagcttctccatctttttttatttttggcaaatggaaattggaaaatgtcagagagtgccctttgcacttgttatggtttgaagagtaaaaaatcacaaccatcttggttgagatgtgttgaacagctgagatcaattgcctttcaatccaacgataaaagattgctgaggcaccgtgccctgtcgggactatggctttgccccttatcagatgtgctctcaaaattttaaatttaccattggatgtattgccttagttaacatgtgtatttctctcattattttaagtgccttggaaagcattatttctgattttgctaaaattaacaagtgaccttttgggacatttgttaacaaggcctttggaaattatcttctttcatgaagtacttttgtctactggcttttctgaaaatggctgcagacataatggatgggcatcttttccttattctaatgatgcatgcttttgtcaagttccttgttgaccatcaatgttggactgagactttcttaactgctctatctaattgactttgagggaaatgtgctttatacttttttatattgatttggttataccacagttggtggcaac

SEQ ID NO: 92371 - DNA, 979 bp, Eucalyptus grandis
  Intron number 2 from transcript Egrandis_v1_0.008761m (loc us Egrandis_v1_0.008748m.g) derived from phytozome v7.0 (c hr-ID scaffold_3; pos 73824132 to 73825110 reverse strand)
gaattcccctgcagctaaggctgcttcagtggaaggtactttctttttctttttccttgttctttctatgaataatttgaattcgttgatcatcgggtgcctataatatttggtaaatacccaaatgggattcttcttttctttttcttttttttttaatgttcgagtatttatctacctgagctatgagaacccagtagctattttcatgaaaatgttgagaatttgacagagtgatcttgtggagcgagtgcaagtgatacagttaagattgtttctagtacgcctatagcctgatttaattaatcgtatcatagtaagtaaatctaattaactttactgaggcgtccatgttcgacttggtaactttctgcaatttattttttcgtgctaataatctgctacttgtaaagttgtgagtttctagaaatgagtatgttttatggtgaaaccgttggctcgtgccatcagatcaatctgcttccactaatacatatcatactctctgcaaagacatatttacatgttctgccttgaagaaaattttggaggattatttggtaggccaaataaaaggggctagctctgtcaaactattttcttggaattgcaaagaaactatacacgaacagaaaacaattaaagcagtcttgtgtttgtgcacatgagcatgcattgtactattgagaacccatccaaaccaactactcttggctaccccttgtcaaaaccaaatttgaatggccctgagtagatacagaagattattacagcttataatcttaagggattaagggcaaaaataattgcctatcctgtgtcctgagcaaaattgactggactttgttgcttagttttcaccgattgttcaccgctgattttttcttgttcatctcataagcttgacatcattccgtgtaccttttctgctcttgtaattgtagagagtacttctgcagtttcagctcagacagctgaa

SEQ ID NO: 92372 - DNA, 646 bp, Eucalyptus grandis
  Intron number 1 from transcript Egrandis_v1_0.037753m (loc us Egrandis_v1_0.037753m.g) derived from phytozome v7.0 (c hr-ID scaffold_3; pos 20325288 to 20325933)
cattgggaggtgaaggataggtaaacaaagttttcaaaaatacatccttgacaattgtgagtcatgcaagtaaatgtcattgctttgatgcttgcttctattatttctcccgctatgtctgattgtcacttgctgtcctagggttcaagttgctcaatacatgaagactgagtgaagagtgctcgcaatttccagtgttatcatattcgttgtcttgctaaggcaatctgcatcagaagataaagggttgttccatattcttatctagacgttccagttagtgttctttcctgattttcttctaattgcacttctccagccagtgatttatttcatcagatgctgtagggtgacgtgggaatcaatccattttttgtttctggaattaatatgtgtcgcatcctgattgggcgggtgtaattaaatgaggataatgtaatacttaactttacaggaggctggaccatataatggcaaaactgtaacattactagaactcctttcgatcatggtttgtcacgtcatgatgcttctttcattgctagaagagtctatgggaattctttggtcacgtaatccttttccgccattttgattgctcttctgtgtaggaatatttcgtcaaacaatcttaagggttccattc

SEQ ID NO: 92373 - DNA, 1029 bp, Eucalyptus grandis
  Intron number 2 from transcript Egrandis_v1_0.037753m (loc us Egrandis_v1_0.037753m.g) derived from phytozome v7.0 (c hr-ID scaffold_3; pos 20325937 to 20326965)
ttgagctttcccgaatttgggtatttagataccctgtaagtttagagttctttagttttatttattgcccatggtcaacacgcttggattgttgcttatttgtacttctacgcagggatctttccaataataagctcagtggttctatcccattctcttggtgacttggaacatctgctaaagctgtgagtgtcataaactagaaaacaacgatcacatggagatgggaggtatcatctgatcttgtgctgacttcagtgtttttctctttgcaggaatcttagcagaaatcacttgacaggatttattcctgctgagtttggcaatctgagaagcatcatggatatgtgtaaaacctattatcttagttgccgtaatttccttttgaagactgagaaattccggagtctctaatttaagcctctatgttgcagagatctttcaaataatcatctatcaggcttgatccctgaagaacttagtcaacttcaaagcatattctcattatacgcattcactccctttgataggcctttgatggttttcataatattcctaaactgggatatttggtgcttgagattgttattcacaaattcttcgttgtttgagcttattcatttgtcttagctgcctattctccaacccacatatttgacaaacatgaatgtcagatgcttattgatgttctaagctctttttgcatgtttgttttattcccctagtcaacagggatagactcacctagtgacctatacctgtgccctaatgccttaaaacccggtactattaggcagaaagccttatggctttcacgtcacttatgttcactgctgttttgctcaaaacatttgctagctcaccttgcaattgctattgtagttctgagtggttcattcatgtcaccttttgtcgtgttgtcatgtcggtgtcgggtgtgattattgattatcacaattgagatcctcatacttggattgcttgtgacgtaacttcttggtgccgctgaggggctttcgtatcttcacc

SEQ ID NO: 92374 - DNA, 456 bp, Eucalyptus grandis
  Intron number 1 from transcript Egrandis_v1_0.044471m (loc us Egrandis_v1_0.044471m.g) derived from phytozome v7.0 (c hr-ID scaffold_1194; pos 11766 to 12221 reverse strand)
atcgagtctgcttccatatacacgtccaggtatatgctaactggataatttcttgcttattcttttctctttggagatcagtacgtgttctagggctaaattcttttaccaccacattcatagtttctttcagcagtcttaagttgaattccgtagcaaaagaaaattatagctaagagtgttaccacgtcatcactttggtctaacatatagatacgcacacacaaaaaaatataatttagtacgaaaatacaaatgctgtaaccacaagcaacagactttttattggattcttctttctgaacgatacatatcagtatatcaattcaaagcagccagcatacttgcccttaattatcctttttagttcatattcccaaatgtgtacgttcataaaattgactgtgagttcctggaaaaattccattgttttgatattctctttcctctgtacag

SEQ ID NO: 92375 - DNA, 831 bp, Eucalyptus grandis
  Intron number 1 from transcript Egrandis_v1_0.042670m (loc us Egrandis_v1_0.042670m.g) derived from phytozome v7.0 (c hr-ID scaffold_5; pos 48520366 to 48521196)
tgggtaagttctatacctctttcttttggatccttgttgcccccttcaaagtataacaaaagttctgaacgatttgtgtatgggctatttgagttcttcaattttcatttttatcaattgaattctacaaattttcgattttgatcaatcgagtccgaaactcactactagtggccttttttaattttgaaaagaaaaacaaaaaaaaacaaaaaaaaaacaaaaaaaaaaaacatgtggctaaccatagaattgacaagttgctttttccaattataagaaattgatactaggacgtcatcggctgaaaagttcactgacttatttgaataaaattaaatgttaaaagcggatcgaccaatggacaaaatgtttagttttaatgcacttatcccatttcttttgaaggaataagaatgtttgcaacacctgataaaggtttattagtgtgcacaggccatggtgggcaatgacattatgcttcggggtatctaagagttttcttaatcgaaaatcttaaccaccattaaaagttctaaatagctctttttgattaagcgtatatatgaatcgcatatatctgtcaaaaagaaaattaagtacatcatcatgtatatataaaaagtatatgaattatttggatgactaaacgttgaagcttgagctcttggagttttaattcaacttgttaggaatacagattgttttggttgtgatcatcagaaaatgtgatgcgctgctttgtcattgttggttggtaattgctcgttattcgcttattcaaattgctaaaaacgatcctacaacttctcttttctgtttttatcagag

SEQ ID NO: 92376 - DNA, 518 bp, Eucalyptus grandis
  Intron number 1 from transcript Egrandis_v1_0.042292m (loc us Egrandis_v1_0.042292m.g) derived from phytozome v7.0 (c hr-ID scaffold_78; pos 174282 to 174799 reverse strand)
ccatactggtccttcggtatatggttttgatgagtttctttcaaatgttgctgcttacattttgatgaatttggttccactattgctcattgacttccgtagcttattttgcaatcactgtgagatttcgagcatgattatgtagtggggtagtatctagcataatgaagatggaattgaagagtttattgccattgacttgctttatgagcttttttaattttctcacggagatgacactagtcagactgtgcatgttatgctcaatagggaacaaatcttaaaggcgtgttattatcctttgaaaaccactgtttcctgacccccggctgatcctaccatagttttcacggatgttcaagaaatgtggtcgctttcctggtatatattgctaggcgtagatcagttgtaatgtttgattcacggtagatggcttcttctgcatgtgttacttgactagtttgaaatgttagttctactgataaagtatcattgatttactttcaaggatttcatca

SEQ ID NO: 92377 - DNA, 699 bp, Eucalyptus grandis
  Intron number 2 from transcript Egrandis_v1_0.033886m (loc us Egrandis_v1_0.033886m.g) derived from phytozome v7.0 (c hr-ID scaffold_5; pos 12213247 to 12213945 reverse strand)
tagaggtaagtttgttattatggatccgtagaggtggactgctgctcctgttaaaactaatgccgttcttggaggaacttatgagaaagaagagggggatattatcaacaaatgtgtattgctagatacttcagttttttcaaactcatgttcttgtggcagtagttggccttgtttttctcacatataagcaactcaaactttcatttgttctgttctacttaatcttttcctttttcttctcctctaattcatgatttagcatttggcaaaaaagaatatgacgccaataaatggcagtgaaaaaggttccaaatttatactgattcaccatttgcacaacatgcctgttgctctgcccttttcccagtcttgactatttttgttgattcatttgttcttccattgagactccaacctctagtcctcttggcatctcctaaggattctcccccatatttctttggtgctatgctcagatttttttttttaaataactcataattcagcaaatgaagcatcatccttgttatgtagaaaatggtcagtgtttgctgtatatttggctcatttgtttgctggccatgtgaaatagggatcatttaccttatgcacatagtatgtagacagtacatggtttgtattgcattctagtatcttgaatgtgaacattgaccatctattatcattatttgcagg

SEQ ID NO: 92378 - DNA, 983 bp, Eucalyptus grandis
  Intron number 3 from transcript Egrandis_v1_0.020109m (loc us Egrandis_v1_0.020109m.g) derived from phytozome v7.0 (c hr-ID scaffold_2; pos 964552 to 965534)
aagccgtcgggtaagtttttggtccctctttgtgtcaacccttcgcgttttcaccggccgtttgcaccttgttaactcgatcagaatcatagaaacattgccttccttttcccgtccgttttagcacttgactgtcgctttttctctttttccacggggggggggggggagagagagagagagagagagaaactcttgacttcattaattagatgatatggggacatttcttagctggtcacatgggttcatcacaagaaagcgtttacgtaagttatattaagttcgggatgcgttcgaaagttgctgttgatagcacatatcgcgaatttaatacgaagtggatagatatccttttctttttccctaaacgggtgtgccaaattaatatcttttacgtattcttgtccgagcggcaaaatgatacttcgatcgatcattaaaattagtgggaaaaaagagcaagggtatagcctaggctactttatgtaagattagtgtgcaatatgcaggcaaagcaaaagttctccgagaacggagccttttacttccacagcttgtctgccttcctattctgctttcacaaaaatggaaaaactgctcccatattctccaagcttctttatgcaaattccatagcttgtaaatagcttttagacatcaatctgatttcaattaaattggaaaaaggtatgggtcatcttttttaaaagaatgtaagagtcacatatcatgccacctactccgtccgtagtcgtagcgacttctgcaaagggtctccccagccttttcactcctttcattggctatactatagccaacattttagcaaaccgaatcaaaatcaaccaggtttcttcgaaacgaaggtggggagaaagatgaaggcggcccggttcgtgtgatgtacatgatgaatttgagtgctgaaaacatttgattttgaagggtggtggagagcgtgggggaggaggtggaggagg

SEQ ID NO: 92379 - DNA, 1027 bp, Eucalyptus grandis
  Intron number 1 from transcript Egrandis_v1_0.024647m (loc us Egrandis_v1_0.024647m.g) derived from phytozome v7.0 (c hr-ID scaffold_1; pos 3415741 to 3416767 reverse strand)
aagaagcccttcctcatcctcaccctcctctccaggttcctcccgttccttctccgagattgaccccgatccatcggtttcccgatcgcgacttcggtgtcgaagtttccgatcgctgaaatcgatctcgatcgtcgattttttgtgtcgtcggctctcgctgttcgattctccgcgcgtttgagtgaagtcgtcggttcgagcttcgattgtcgactactgcccgaggcctttgtagattatgttgtccgacttcgctactaggtcgttatagtgtttggtaaatgaagaaatgattatgatgctgtctaaagatgccgcggtcagtttttcgattgcaacttaggtcgaagtctgcggtcgattctctgggaagttggctcgagcagcgcggtgcctctccgcgttcgagctcggttttgaagttatcgcctactgatgaggcctttgtagattaagttatccaactgctggggtcctcgctagtagcatcgacgaacttttttcatcgggagtgagtcgtaataacttgtcaatgcccggggtcgttattgtgttgtgtaaatgtagagtggattatgctgctgtctaaagatggacctctaggaatgagcattttttattacattaatctgtgtaaggttgtgaatttcggtgtaaattttttgatatctctagtttaaatgcaaccatgggatattaaatatttgaggaaattgatctgctgtttgaggggcgcgaatctgttgcagaatgaattcttttggctaatgttgtgttgcttgctggtgtgctgttttcttaagcagcaacgaccttcttttttgtatgcattgattgtaccctgtcttgattagttaacgttttgttctaccagaaatgggatggcagagaatgagataatcaaactggaaattgctttggtttggaaaaaaaaaaaatttctatattttgagtgacatgcttcttttgagcatttatgaaacattgatagtcaggtctttttaaacttgcgcagtacacttct

SEQ ID NO: 92380 - DNA, 556 bp, Eucalyptus grandis
  Intron number 1 from transcript Egrandis_v1_0.013599m (loc us Egrandis_v1_0.010300m.g) derived from phytozome v7.0 (c hr-ID scaffold_2; pos 14812396 to 14812951 reverse strand)
tctcagtcggtgagtgctcagttcttttgtatttctttcttcggtttcttggcgaagtggtgtcgctcgcattgcgacgtttcttgtgaattttgacttattcgcgcttgtctcatttagctggaaaaagtgctctgctttttgttttgggttagcagcacaaaaattgctccccttctctctgcgaaatcacgaaccaatctccatctccatcaccatctccatcttctttggctttttccttcaagatcattatacacacgcgcacgcgcacacacatctactgcgtttttctgcaaagacccggcttctgaaactcactgccatttttggcaattccctcaagcttcacgtaagctcgactttcccctgcgctttctcatcaaacgcaggcacgcacgccctcttcatttgcttcatcatttcgatcatccttgcggacccggaaagaaagattcctcggtgatgacatttttctttgttggcctcggccctgatttgtttttcctttttttttgcagcaagaggtgtcgccaagaacttcagggaggctctc

SEQ ID NO: 92381 - DNA, 487 bp, Eucalyptus grandis
  Intron number 1 from transcript Egrandis_v1_0.040393m (loc us Egrandis_v1_0.040393m.g) derived from phytozome v7.0 (c hr-ID scaffold_5; pos 29375387 to 29375873 reverse strand)
ccttggtaataattttcatcttcttttcaattcttttcccattttataatttagatacaattcacgtcttcaccttattgacctgaatcatcaggttattcatgagcattggatgcaaaagatctcgattaaactcacatatttcaactcgacataataatggcatgccatgcgagaatggatgatccttataaatgaataatagtttgaatttaattgatttccttcacccatcagctagaggaataagatttccctacaattggcttaaacaaaaacttgtaatccatagcactattcacaggatcaaatgcttcttttcaaagtgaataattttttttttctcgaacttatcccatgctcagagctggtataaaaaaagtatacataatagagaacttttttttttttttgctcctttcctctttaccttaactcattttgtttcgtgcacgcaattcctgattaatgatgtgcaaaatgcagc

SEQ ID NO: 92382 - DNA, 784 bp, Eucalyptus grandis
  Intron number 1 from transcript Egrandis_v1_0.006369m (loc us Egrandis_v1_0.006369m.g) derived from phytozome v7.0 (c hr-ID scaffold_14; pos 744241 to 745024)
atccttcaattcaggtactgtttcggtcttccatccttctctcttctccatttatgagcgttttccctttctgggttttgctcccgttcgccttctagggtaggttttagcatctgggtcgccttcagattcgggatctgtgctgtggttccgcttaaatttgcagtcttgagatccagatctgattttcttccactgttgtttgatcgtatgcttatgtggtgaggcttccaatctcaacttgagttgtctgtagattaatcaagaactgaacgagcttgcatgatcttttggagctgactattagctcgtgcctttaccttgtagtggtccttgaagtcttttgctttacttttattttgccttcttttttttatcctttcgtattcgcaattttgagcttcgaatttctcggtcgaaatattgttcatggctcctttggtttcagtagctggagacgaatcccctagtctcttgagttattgagtaacggatacttgattttattcgaggtttttatacggctttctgcaacccggaatgtgatgttaagcactacattgttgtgaaagtctacatttttgcttctgatttatctcaggtggaagttaatcggtgcttttcaaaatctgatctttatttttctgttgggtatgttcttctgtgctgcctgaagtgtagggaaatatttgagtatgaaaatgatgagtttctgctaatttaatttaacatagttgatattttcccagtggagaaattttcgccacaactgaaattggaccac

SEQ ID NO: 92383 - DNA, 584 bp, Eucalyptus grandis
  Intron number 1 from transcript Egrandis_v1_0.031823m (loc us Egrandis_v1_0.031823m.g) derived from phytozome v7.0 (c hr-ID scaffold_5; pos 19286926 to 19287509 reverse strand)
actacatcccagttgctgtggtaagcctacatattcatagtctttaaagtaacattttagttgtctgcattgcaatggactgagcctctgctctctgaatcttgtactacaatttccttgctccagttagattcgtagatgaggctagcactttgttgaggtatattctgacagtgtttaacctgatttattggacattctaggaatgtgcttgcctatatttgacctgttgatgaaccacatgcaccttcctactgttgttgttcttgttggagttcaaaaactgatgttggcctccttacagttttatttaccagggaccagataactttcatgaccagtatggatgtcgtggatatcatacacttaatatatgggattttgatattgcttctttgattttgcttcatctttgagtttcctagccacagaaaattgatgcttcataagagggaaacataaagactggaggttgtgttgaatgataccataagaatgggcagttactctattaaagcttctcaattagttctaatcatgaagagcagttactcaactcttgcttttcttgttggattttgcag

SEQ ID NO: 92384 - DNA, 708 bp, Eucalyptus grandis
  Intron number 1 from transcript Egrandis_v1_0.009821m (loc us Egrandis_v1_0.009821m.g) derived from phytozome v7.0 (c hr-ID scaffold_1; pos 24960329 to 24961036 reverse strand)
tcggtcgagggctcctctgatccacttctcatcgggtaactttcttgtttgtgctgctgtccttgttttttcaggctctctgctttgtgttcgtgctccaagtggagaacagtggagaccagtgaaatttggcatctttagtaattgagcatctttagtaattgggcaggttgaatttttctagtgggtttctcttggatgctgaaggggttgggattaaagtggtgtgagatatcaagataactgggggagttctttcatttttatgttctgttggaagaaaaaaacaattggtttcgtgggggagaaagatgagacttctttgagaaggagcgcctctgccacagggtcaattcttggtgtctttggtgattctcactagctcaaatgtatgagggcttcgaattttgagatagggtcatgtttatgcagaatctttgccaggacatgaatggactttgatatcctctcctcctaatcttatttgactgtcaattatggaaagttgagcttctcgaatctctgtatttggaatggcgatatcgtgcttgttttcttggttccatgagtttaaatgttcttgtgcaaagtctggtgaatgctgtttataggtatacaaagttcagaaattgggattgaccatcttccttgtgaatgtgggctttatcggcaggctttattttacaaaggtgaaactaggctctcctc

SEQ ID NO: 92385 - DNA, 563 bp, Eucalyptus grandis
  Intron number 2 from transcript Egrandis_v1_0.054770m (loc us Egrandis_v1_0.054770m.g) derived from phytozome v7.0 (c hr-ID scaffold_3; pos 18161358 to 18161920 reverse strand)
ttggaatattgggtaaatttctcattcacagacaatttcccattatcaaaatcttttcaatgatacatgaatttcttcttaatcaaaaaaaactttacaagactctgctggaacagggaagagagctttagaggcgtgcttcggattttggcttatgcctgcttaagtagcagagctattcccgcagaaaatgttttagttgacagattttgacagaagaaacataagaattcaaaatggtattgaagtcatatggtttattacagcaatttgtcacagaagccacacatttcaaaaaggacaggtcttcttgatcggatcaagaaatgatgtagggtttatctgaccttggatcgacaataagcaaaatgtgctaccgttgggtgatacaaatgatgtctcaacctatgtcaagttcttgatctcagcctatcaggagacatcaaactaaaaaacatttgtttgcactgatgctctaggctaccaaacgctttttccccttctagttacgtttctttatgggtttttgcttgttctttcaggatactgtggacttacagcct

SEQ ID NO: 92386 - DNA, 390 bp, Eucalyptus grandis
  Intron number 1 from transcript Egrandis_v1_0.026065m (loc us Egrandis_v1_0.026065m.g) derived from phytozome v7.0 (c hr-ID scaffold_3; pos 65331148 to 65331537)
gccggtcgctggtcatggctgaggcgagcgaccggccaaggaaaaaagaagaagaaaagaaagagaagaaaagaaagaagagagagaaaatttatttctcaaaattgtttcagaaataataaacaagtttttttttattttttgtttctatttcaaatttgttaccgggaacaaaaaaaataaatttggaacaaaaaaacaaataaacttgtttatgttctttttttgtttctagaaaaaaaataaaatttttgttcataaacagaaaaaaagaacacaaacaaacacaccttagttgatcagtaaattctttaaaattcattaacaacaactctaataaaatcgccggggggtgggaattgtaaaacacaaaaagagaaagggggagaa

SEQ ID NO: 92387 - DNA, 990 bp, Eucalyptus grandis
  Intron number 5 from transcript Egrandis_v1_0.055041m (loc us Egrandis_v1_0.055041m.g) derived from phytozome v7.0 (c hr-ID scaffold_5; pos 73146128 to 73147117 reverse strand)
tattcaccgcaaccactgccattgttgtcctaacagtaagctaaataatagttttcttcgcagtcagaccattttaatatgatctttctccatttttttttttcaaaaacagcagatcatatcagctcatattctgtcaaatttcattgctcaaattttctgtaggaaaaaaatactagatataagcttgtgtgttgtttctatctgacatctttttattaattccccaaattttttgcatctccatatttcgtctttgactctagctttctaagagtgccaattagtctaggtcttgaggcaattttccaagaaaatctctgttcaccgattgccttaaaatggaattggggcaatttagagatacttgcaggtctatttgtcagtgtaccttattgaaatgattgattggtctggactttggaattttaatcttaaacatatagtggttggtcaaaaaaccttttgcggacttctttcctctggaaatagttgtaatcttctggttagctgttaacattttccgccttttcagtaattgagacaaatgacattcacagagttatgcgaagaggaatatgtagactgagctttgaaattcttatgctagtgaatctgtttcttgtttcatcctactgattgtaaatttataagtttcagaaaaaattaaaagtggcactctttattttagaatgtaacaatctagtcttaacatgattttcctcaacattttacaagcctctttttcttgttgttttctactttgtttgacgttttaattaagttagacattgttgaaatttagaaaagttgaaattagaattaacctcgggacatcatgtggagtttttcgagccatttatgtggggtaatatacacatcctacagaagatatgctgcttctggttctggtttgcatgtttttgtcatttatttctcagtatttgagatgccacacaggtcttactaattggaggttcaaccggtaca

SEQ ID NO: 92388 - DNA, 919 bp, Eucalyptus grandis
  Intron number 1 from transcript Egrandis_v1_0.020731m (loc us Egrandis_v1_0.018698m.g) derived from phytozome v7.0 (c hr-ID scaffold_3; pos 7949569 to 7950487)
gtgtccgagccagctccgctgttgccgttgagctggtacactttctaaaacgtcacgcctttcttttctttctctctcttttcttttcgccggtctactatggagttcaggctaagcagtgtttttaagcttgtggataaactgtaactatgtattttctactgttgtcttattgtaattctcgcgctcttattcctcaaaaaagaaagtaaattgtaatgagaattgacatgaagaactgccaagaccaacctcagagccagacagctaaccaataaaaactttgattgagccttacttgctgaattttgcagcacttttctgtttttgtattccccgtggcatgctcttcaaggtagtcaatctgattttgtgatgtgctggctttctgattgtagaaaccttgttagtccacaaggagtgtgatttcgcaaatctgacccatctcaattcgtcacttcatcgggagtatactacgtaaccctgaatgttgggaattcaaaagggctgcaacatcaacctagaaaggcaggatattttactgcctctttgaatatgtgagccaactaggaaatttcttcaaaggttgagtggccagtacagagatttctctagtgtagcaatttagtttgtgatgcattacagatgattactgttatggagcgatccaagtttgaccctgaagtatatttcattttaatgaatctgctgcagctgaaccgtctcagtgctcgatcttctagttttttaatggcagattatgtgcccaacacactcaacttttttgaaatgccatatctattgggatatatgcccataccaacatccttctgtgctagcttctttcttcctttagtatgcttgtgagtgaaaattctcatatctcaggacacgggaactcagaaagatccaactttgg

SEQ ID NO: 92389 - DNA, 456 bp, Eucalyptus grandis
  Intron number 1 from transcript Egrandis_v1_0.034149m (loc us Egrandis_v1_0.033474m.g) derived from phytozome v7.0 (c hr-ID scaffold_1; pos 15799498 to 15799953 reverse strand)
aagtaattggtatgtctgttttcaatcactggtttccagttttagtccaaatggattaagatttagaattcctgtcctcgttttttataatctcgatttctccctttattatcccttccgtccccctctttctctctctgcgccaatggttagatcccaattcaggtgagccaatcgtgtctgacaccaacactctctgaataaacaagcctgaaccacagctgacacctgaaacccaaaaaagaagaagtgggtggtgtttgtgcttatagaatcaaacaaggaatcagagaaaaagttccgatttattgttctctgatttatcggcatctgtgtcttggatgagtgcaagaatgtgaagcaaaatctggggaagactttgtttctttgaaagaaacgagcaacttctgattgttcatttttctggggggatttgatcttgtggtattcttgagg

SEQ ID NO: 92390 - DNA, 687 bp, Eucalyptus grandis
  Intron number 2 from transcript Egrandis_v1_0.053291m (loc us Egrandis_v1_0.053291m.g) derived from phytozome v7.0 (c hr-ID scaffold_3; pos 46307892 to 46308578 reverse strand)
gtcttcaggtgaatcgatcactttccttttacttggaaccctattcgaatattatcccaatgagaagacatgattttgtttcaaagactccttttttttttggttaagggtaagaatatatagctttaatcaacaattgtaaaagatccaacaccacaaaacttgcacttaacaagataacaagtcagagtgagtggaagggagctgaatacaaaagaggaccgcaagagaagcctgaggaagcagaaacagccaaaacaatggcgaaaggaaaaggaaagcagcgggaggccacagaaggccggatgaaccacaactccttttttcatgcctataatgcgataaacagaatttggtttagaataagtgcagacaagtattttcttgttcaatttgatctcactctttatcgaacttcaattagttagtacttagtaggtaaaatgtactggaacattaactacacagaaacttccgtcaatttaagtaatcatgctagacgaccatttgttcttagaaaacttgagcaaaatagtaccaactccgataccatgttaaacaaccagctgtttcaattgtttctctagcgcgttttatgtatagatcacatttcttgacgttatggtggaagctgagcaatgttgatgcgactgttggttccagatagctgtgaagaagttgaaggcg

SEQ ID NO: 92391 - DNA, 555 bp, Eucalyptus grandis
  Intron number 2 from transcript Egrandis_v1_0.007435m (loc us Egrandis_v1_0.007435m.g) derived from phytozome v7.0 (c hr-ID scaffold_1; pos 6253593 to 6254147 reverse strand)
cgtcggctgagaaggtagtttttgttgtgcccgtttgatttcaagatccaagaaactaattgggaaaattaaagttggaaagctaatctttttcttttggccttgatatttccatttttcatagaaagaaatgcctttgcatgctaaagttccgaatgcacccggtgtgaatctcggattcaaatggaagttcatgtagcttacagagtaatctgatttttgatcattgcgttgcatctgggaaggtgcatgttggaagtgcatggaaattcgctcctccaagcaattaagggctattaagggctgaaatgttaacttgtgctaccttttgctttacttctcgtgtgttcctcatctcgattatggaactattttctcttcgtctgtgcttgactttacatacccgttgtgtaaggttgaaagttgatgctctgcctgcactgtttatgtctttaatgtttgtgcatcaactctagtttggtcataatattaacagttttgtctgctcgatgtagtgtaggtgggtcttttgaaaaagctggcaacaacatactc

SEQ ID NO: 92392 - DNA, 451 bp, Eucalyptus grandis
  Intron number 1 from transcript Egrandis_v1_0.053720m (loc us Egrandis_v1_0.053720m.g) derived from phytozome v7.0 (c hr-ID scaffold_5; pos 18935995 to 18936445)
aaagtgcagaaaggaggactcgactggcttggccggtgaccctgaggaacttaatggctatgtcatgtcgtttcaacagattggaacttgaaatggacgagaatgagaggtattacgtgattatttttagtcttatgtaatgaacatgcgtcaagcgtcaagcgtataatttttgtttttgatttattaagttcttttttgggccccgggaggttgggaagggccaccgcgggggaggggggcggcggggttggggcggggtttaaggggaacaagtggaggtttggtcaaattttctggataggaaattgacactgactgctgctgctgctgatctttaacttccatgctatcgtactaataaatttgttgttacactgctttgaatcgccacctaagataatcatacatatgagaagatatgcgatcgctaatgcttttcttggaaaag

SEQ ID NO: 92393 - DNA, 934 bp, Eucalyptus grandis
  Intron number 3 from transcript Egrandis_v1_0.026484m (loc us Egrandis_v1_0.025370m.g) derived from phytozome v7.0 (c hr-ID scaffold_3; pos 47567092 to 47568025 reverse strand)
gcttgctcccagatcggcactggctaagggttctggtaggctgctcaaacactcatgttacttacttcatcttctagcagggtcagacagtttactatctgtagtagtttacaaattgctttctcttgagaatatgattttggtcactaacgctgtgtgtttggaagctggtaatggtgaaaaatccagttttatgtttttccttttgtttcatgtgttgtgccttcttctgcctttgcatgcattggtttctggctagtctaactagttaaagcatttgcttattctggtgctagacccttgggtgtaaacttttaaattgggatgagagaactatagagaaaataaagaacatttacaatagaaggaacagtcaattacttctttgtaaagaaaggattatctagattcgttttgaataggcctctaggatgaaaaactatccttactcattcaatcatgaactcaatatcagatgatccacatcaaatagataaatgcatgagcttcctttaaccctgcatttgatcaggttattatgaaagcatgcacttttatcaccttatccttcttttacaccttgaactatcaagagatttgattgagatgactctcactatgtaggtattctaaaatactggctcaacaataattcatataattgttcgatgcttttgccattcaaaataaaccaaatcgaaaattctattgtgtatattttctccacctttctttgacaacaccattttgggattgtgaactgattttgcattactttaagtaccatccatagctatgtggcttgaattcaccctggctcttttttatcctgtcatttttatttgaaggcgatgctgtgggattggatcttagaaacacatcacatgttgatgctacaggatcagaatcctcgtgtaatatcatacaaagagat

SEQ ID NO: 92394 - DNA, 690 bp, Eucalyptus grandis
  Intron number 2 from transcript Egrandis_v1_0.032107m (loc us Egrandis_v1_0.032107m.g) derived from phytozome v7.0 (c hr-ID scaffold_1582; pos 1096 to 1785 reverse strand)
tttttgctcacgaaccaggtgaagtagctttcctttcgaatgctcgaacttatcaaactgcataaattgctcatcaagaaaggggcagatagggcaaaagagaaaaaagttaagtgcacatgttcttcaccataatgaccattcattgtccacggtttatttaatagaaagcatcatttatttgactttttaggcgcaacttggttggaaattagtaaatattagttatgataatgagaagggacaaccgacattagtgaacacctgagtattatcagaagggcctcattcctgctatagaatgttcgactcaaattataacaactcaattacagaatgtttccagaacaatttgtattatcaagtagggtattaagagacggttccatgatatgctacaaagtttgaccaagatctgtttcaatttagtccctgagaagttaaaacttaagatggcttcaaaattaggctaaattgagcagaaaatttccctaagttttctgaagtaaaattttgcatctccagctcatgaagcaatactagcatggttgattgggaacgaggggatcctgttggatacacttgaaagcatcgcacgctgtctatttactagattcccagctgattctgggaacaaaatgacaaattaataaataattcagaaagcttaaattgcaggaaacataatcg

SEQ ID NO: 92395 - DNA, 1058 bp, Eucalyptus grandis
  Intron number 1 from transcript Egrandis_v1_0.007311m (loc us Egrandis_v1_0.007311m.g) derived from phytozome v7.0 (c hr-ID scaffold_1; pos 8861366 to 8862423)
ccgccctggaagccaggagcatcgacccttacaaggtgagatcctcgtaggacgcagttgatggccttgaattgcggggagggttttgcgtgagtggttcttgtttcggtttttttatgggaaggggaaggggaaaatgcgggaggtgcagggccattgaaggtgtggttcgatttcggaggcgctgggagattggaggaccgcttggagtggccgtgttgggaggttggtggcacggggcgtggcgtcggttgtgtacgtttgcgcgattaggtggttgattatgtgcatgaaagtgtctcttttggtgtttgagggttaagagcgctctttagtgacacgagtatgcgtaagatcacggatgcggtgtagcggcgatcgtaatatttccttttgtggtaggcttaggggaaaatttcccaggcagtttgaaatttttgttcgttggtaactcgaatttggttttgacaatggttgatcggttcgttaggtgcaggcaatatggaaaggtgcctagttttgcttcataaattcatccaattataatgtctttgattgtcataattgtttgcaaagactattagcagaggagcatcagacattggctacagagttcatttaaaagggaaatggtataatgggattttggcagcggattctgtggaatggcttctgctttccagtcgttgacattgtcaagctttagacttctcttctatagccctataatgttctgctgatacatagaagaaggatcccttagatgggtcaagtgccgcttaatggtagtgacatgcttttgagctatagttctacaagttaatttgagataaatcacttaatcagaagaaaaaaaggcgccggatattgataaataccatctgcatgttttaaattatttattttggatgttcttcttgatcctaagtcctaaaagatttatgtgtttctatgtgaatgccataatggtagagtgctctttaaatatgtcatgttgtaacattttatataatgtattttcaggttcttggggttgagaaaaacgctagtcagcggga

SEQ ID NO: 92396 - DNA, 560 bp, Eucalyptus grandis
  Intron number 1 from transcript Egrandis_v1_0.021161m (loc us Egrandis_v1_0.021161m.g) derived from phytozome v7.0 (c hr-ID scaffold_3; pos 77517302 to 77517861)
tcgttcttggcaattacgcgaggttcttgaaagaggtatgcttttgttgaaagcatgatcttttttgttatttaacttgatggattcgtttctttcttttgcccatgattctttgatttgggtttggttttgcgttgtgagaaaagaattgattttctgtcttgtttgtttagtaagtgaaaaaggtgagtgaagtgtagagttactctctactgttacaatcttctttaaaaagggaaaagaaaaaaaaaaaacttaaaacttttctgagagagaatggaattttagctgaagctcatgaattatgtgggcttcctcctctgtttgaagggactggagctcttagacgtatgatatacacatatggatataatgagtgaattgggttctggagcaacagctgtttgagacattgacttgaattgttcatctttgtgctgggttcatccatgtaacattgaggttggaacatgagatatgtagctgatttgttattctaatgatttggtttggaattggaatcaggttcgaggtgattttaagaaggccgaagagtactg

SEQ ID NO: 92397 - DNA, 886 bp, Eucalyptus grandis
  Intron number 1 from transcript Egrandis_v1_0.022781m (loc us Egrandis_v1_0.022781m.g) derived from phytozome v7.0 (c hr-ID scaffold_3; pos 19552502 to 19553387)
cccagttttacaacgagcaactgtcggctcttcaagtaaatattctctctctctctctcttcaagtaattgcgacagtttttctcttcgttgtcctgtgctgtttgaatttgaagttcacaacgcacacgaacagttattgtggggtttgtgttctcggtgattgttctgtcaagtgttgaatagagtgtgaataattgataggcaaattaaggcaattttgtgggaggaattcggttccttgcatgatgctagagataagatctttgaggggttgctgactaatgcttatggatctgttcaattgctcgttctgtggtccttgtggttgccttgcatagggtgatggagcatggtgctctctggatgattccttttgagccgaaaattttcgaatgaaccgttttatcgtgatgagggttttaaaatcgtctctgtttctacgcttgatcctgcatagtggctcactgcacgctcagttaggattccattctaagttctatgcgcaaattggagatgtgaccttgttattggccatgaatgatattgattataatgtctgttgaatcgaattgctgttatggcaaactagttaaacatcttgctgtgtctttcatggggaatgccccttccgatgaaactcctcttgatatcattaaactggtctggtgtaattgttgttgtaccaatttagaaactttttcataaatcaatgctgtcagggacttgtttcttatgctgctgttttgtttctgtagttaatcctatcacgtgtttgagcttgtcggtttcccctgttagtcattctctggttggaagtttgaaattaacaatgtgatgggttttctgcagtccgggtgttgcaagccgccagattcttgtggctt

SEQ ID NO: 92398 - DNA, 401 bp, Eucalyptus grandis
  Intron number 1 from transcript Egrandis_v1_0.028078m (loc us Egrandis_v1_0.028078m.g) derived from phytozome v7.0 (c hr-ID scaffold_38; pos 467717 to 468117 reverse strand)
ctgcagctggagcttgtactgtcattgtgacacaggtagttaacatgggctgttctcgtgtctaaaattatatacaatataggaggaagggatgggtgttatttatcttgaaaacacaagggaaatatggagaggtatcactagtagaattgtaatgaaggagtaaaaccattaggttaatgtctattgtgatatctacaacatctgctaatctttttgtgccattgatgaaaccagacatttagcccgttgaaaaggcactatttcgccaatatgtttagaattcttcttccataataaatgttgatgtcaagagtgaatagatctgtttttgtttgatctttttttagtagtctaatatcaaaagcatgatgcagcccttggatacagcatcatccagg

SEQ ID NO: 92399 - DNA, 812 bp, Eucalyptus grandis
  Intron number 2 from transcript Egrandis_v1_0.049132m (loc us Egrandis_v1_0.049132m.g) derived from phytozome v7.0 (c hr-ID scaffold_3854; pos 1116 to 1927)
tgtgtcacaggaattcctgcaggtactgattatttgatatagtttctgctgttggttatccttcagtttttcaatttttatgtccttcataatctcagatgcacggaaggagatttagaagcatatcacacaaaatggtgggaaatattctgcagaattgaccaggcagtgcactcatttaattgcagaaatatacttttcttcttcaagattaaggtccagtgatttgcttgcatattttccttttgatatctgatcgctgtgtgaaaatgcacatatctttatcttgtcttcgcttatgaaaagacttttaagagtttgaaaagaaaatctgtatcattttaaggtttagtgacaattatagtttgaaatgggaaataactatacttgatttaatcctggtttttggtaatatactttcacttgggaatttgattactcagatgaaaaacagtgaaacttcctggcatgagaatagcattgcctttggcttctaaatctgtcctaaagaattgtgttctgagggtcaaggaaacaaggcgttaaacaacgtacagtttgagctgacagttgttaaaagatcctcagccagttcttgctattccagtgtgagctaggactgcctgttggttgctcaaagcacattgctcagcaatgttattgccattgaatcaaagcacattgctcagcaatgttattaccattgaatctttctattgcctcatttatgatgctctgtagcactgtgagtcccattacgatgcacttgactggctgtaagctacagaagataaatacaaggtcgctaaaag

SEQ ID NO: 92400 - DNA, 813 bp, Eucalyptus grandis
  Intron number 2 from transcript Egrandis_v1_0.034109m (loc us Egrandis_v1_0.031500m.g) derived from phytozome v7.0 (c hr-ID scaffold_3; pos 23980924 to 23981736)
cactcgaaatagtacaaacaaggtacaaccaacatattttgctagcaggctatcattgttttaattaattctcttgaggttcttatggtacctctgacgcctaaaactgtgatcacagtgttatctgtgggtttgttgcctggctatactattgatttgttgatcattgtgttaagattttcctttggagttagctggttaaaagacccttacataaacagactgaaaagttagcggctttcttgttctttcagcagtttaatttgaacatgggacatgtttttcttgtgaattactaaatcccattgctttttgtttggagctttttctgccatcaaatttgacctttttggaagaactgattagaccttggtcctcattgatgcagtaataaaccaaagcttgcatatctttcaaagattttgattgcacttttaagctatggcgggtccctaatgaatttcttttggacatggtggagaatgctatgggagatgcaaatagtttcttctctagtaaacgagcagctctaagaggtagtattcttttgaacttttggactgttgaaatattgtccattcttaaaacagtccaaaaagagatttttctccaatttttttttctatacttggatgtgcttcttttatttttcttgattcgaaatatgcataagtaaaaaaatgcatctctattcatctttgctggttttacttcccttgggtgcgtatttccttcaattgctatttgatgtgtaaacattttcccttgtgttttccttttgttcttttactgtatgaacagttttggtgaatc

SEQ ID NO: 92401 - DNA, 877 bp, Eucalyptus grandis
  Intron number 3 from transcript Egrandis_v1_0.020229m (loc us Egrandis_v1_0.020229m.g) derived from phytozome v7.0 (c hr-ID scaffold_5; pos 2481134 to 2482010 reverse strand)
cgcgctatcaggtcagtttgaaggaattgcccttttctcctttcacgagtagaaattatgataagattgaattttttttatcaagaacagatcaggtgctattataaactgttgcccccatgtacttgctttctttttgttcttaaacgatagaaggactgctcgggttatgcatgtaatcagcttgtctttccgattacctgagatatcaaaaagcgaatgaactaaaattccctgacgtcattggttccatttcacctgctcatgaatatgttttctgtaccatcttgttcaaagcttttagcaagtggcaggtgtatccacctagtttccttagtagatactttatttcactactggcaatccattgtaatcttgtgttacctataagtagttgaatgggaatggcaatttgcattttcttcctccacttttagatgtggtcatcaaagttccatttagtttagaacaatttgttcatatactgagtaattgtaaataagtcaccaaagaaaaatatggtttgtgtagattgagtgaggtcaggacaataatggcttcttaatttactgtatcaaacttccacggatattcaaatttcgcttatgatacccctactagtttcctaatcacatactaaagaaagggaagaaaatcgagaaattatccttgatcatagatgcaaattggcattggctatatcttgatcaaaatatctgaatcttgctgtacaacatgcttgaagcttagaatatggtacttaggataaaatttgcattgttttttggatttcaaatttgttggtactggtccactagtaaaaggtaaatgaatggacacctagcatctgaaaattggaaaactttgcaggccctag

SEQ ID NO: 92402 - DNA, 458 bp, Eucalyptus grandis
  Intron number 2 from transcript Egrandis_v1_0.029272m (loc us Egrandis_v1_0.029272m.g) derived from phytozome v7.0 (c hr-ID scaffold_38; pos 270672 to 271129)
aggtaaattttccgtctttcgcccttttttcgaccccttggttgatctgtgttcttgggtttgtcttcttggaattcggggtgtcgattttcgtggttgttttggatggttttggccgatctaccgaaccctaggagcgtgaattttgtcagggattttgcgattgttggttcctctctaatcatacatgatgaaaggaaagacgattttcaatgcctgtgtatgttgcttattggaatttcgaggtgccactgtgggttctgctgcttaaaactgtagttggtcctgacttttccagtgtaatgagtataatgctgtttttaatattgcgcaatcagaaaacttattttgtttgaatctgcttgcgtaaaagcatcttagatctatctttttgattcagtacctttcttttggatcctgcaggttagcttgacattgaatatctcggcagacttgca

SEQ ID NO: 92403 - DNA, 924 bp, Eucalyptus grandis
  Intron number 3 from transcript Egrandis_v1_0.029272m (loc us Egrandis_v1_0.029272m.g) derived from phytozome v7.0 (c hr-ID scaffold_38; pos 271123 to 272046)
acttgcagtcggcattcacgtggaacacaaaacaggttaagcaactgaaaccttcacttgctttacgtctgtgcggatgacattgtgtttttgcgaaaaaagaggaaatattttgacatccttttagagtagactactgtgggatcttttgacaactattgggatttgaccttttgtgttttgaaactgcaatgcagttgagtggttattgtcatcttcttgtggtggaacaatgttagtgtgtgagtcagcttctggtcgtaaggtctgtggcatatacatcattacaacattaaactgctcgtgtgctttctttttagattttgatgctttatatgaggaccattatatggaatgggttttggaattatgactaattcagtatcttgtattttttttgtggtcatcctctcttactttggaatctggctccttttttgtgctatgaaaaactgctttgcaaattggtttacgtgccttggtacatcaaggaaacttccactttacttatcaaggagaagaatgagttggagttttattctgggaatgcaattatattgcctctgacctcttcctaaattgttaatatgcaaatatttgagcaaaacaacattgaaatttcaaaatttagggattagtttgataaataaatggatgttatgatcctctatccgaattgacaacccatccttaacagtctcccaacagtcctccctaggatcccaatcctgacaacctttctctgttgatgattctcaaattatttgtcagttagatacttgttgatgattgcttgttccatctagttgggccaataaatggaaaactgagactctcttattctaggtcatcaagtcattatttactgctctttaaattatttgtggaaaaaattgcaggtatttgtcttcctagcagctgagt

SEQ ID NO: 92404 - DNA, 901 bp, Eucalyptus grandis
  Intron number 1 from transcript Egrandis_v1_0.028084m (loc us Egrandis_v1_0.028064m.g) derived from phytozome v7.0 (c hr-ID scaffold_3; pos 48014060 to 48014960 reverse strand)
ctctctgacactccccaccttggacttcagcttcggtaagacgctgtttcttcctccaatcatcgccccctcttgtccttcccgctgtttcttggtttttttttcactggtttctttacccgatatcgtttcctcattacatatctctgcgcttcatttgccattcgttttctcctctgcctcgtttctttgcggttcggacgcatcatggatgtacaatttcttgctgttctcttcattcttttgttttctgggtgatatcaagacgagggcgagttcttgattttcatcatttgggggggcacgagagtggccgtaacgagctgcgtgtttcttagcgggttcaggggattttcggggtctagcgaaattgggtatgccctctttgtgtttgatgatatgtgtcaaaggtcgatactttagttcggggtgcaccttgcatccccactttgacggaggctctcttttatggagaagaagagttttcccgtaatgcccaatccatacgtgggtaagaagaagagaattcattcgagtttctcatgtagtccttttttggccctttttccctaagatgatgatgggatatggatcccattaatttgccaggagtttaatttcaggattcgggtttttggtataccgtgctacggattgaatggaagctttgaggaatgtgttgtggctcatcatagaactatcttcaaagcatagccgaagctctttttaatttggttgccgatgtctgtttttcggcagttcttgtgttctccgctgaaaaagagtcatttttccattcgtgtctcctgcatcttattcttatgtctagcaccatgtctaactaattttatgcgtcatttgtgcaggtatctccaaagagtaatctgtcgattccgtggac

SEQ ID NO: 92405 - DNA, 617 bp, Eucalyptus grandis
  Intron number 2 from transcript Egrandis_v1_0.049154m (loc us Egrandis_v1_0.049154m.g) derived from phytozome v7.0 (c hr-ID scaffold_1; pos 35651465 to 35652081 reverse strand)
aaggacatttatttgcctcgtgattactatacagggtaagtcatgacaacctttgcagatatatgtctaggtttctttgttgagtgggttaatgtttctagatgaatttaagtactgatatagcaagtactcaaagaacttaaaaagaaataagaagtattgcctatgattgttccatctctatatatttggcctcttgtcaagattgttacctttttcatcagttgtttattggagtttggttttgtcattgaaagttttgaagacaccagtgaagtagtgaggtgaaagtttgttgaagacacctattgaaatggtaagggtatggttcaaggttgtcttaatgtcaatgaagatttgaagaaagtggatatgacttcttatgaagaagttcaaattcttgaagaatttcaagaaattaagatttgctcgcgcaaggtgagcagctgcatgactgccttttcgaattgaatggaatgtgggcagaattactgtcgtgattcttcatcttcaaagatgacttgcaaattcacctgtgcccttggcattggtttctagtttatggctgatgatctgtttttgatgcagggatccccgcggttttggctttgttcagt

SEQ ID NO: 92406 - DNA, 414 bp, Eucalyptus grandis
  Intron number 2 from transcript Egrandis_v1_0.021167m (loc us Egrandis_v1_0.021175m.g) derived from phytozome v7.0 (c hr-ID scaffold_5; pos 2686455 to 2686868 reverse strand)
ttccttgcttgccctaccgaattaatcaagtgcaggtcagtgtctttggtgtttgcattttctccctacttgattcagttttttgaatctttgaacgcagcttcagtgctgaacacattttcctaatatatgctacaatgagtttcaaaggacgcttcttcagttacaatatatatatgcgtagaaaaagaggcagctttgtatgtcatcttattgagtgcatgagagcaccgtgctttatgataaattcatcatatctagcaatggttaagacatgccttgaggcgcctgtttagaaaatattgaaatggctcaatgtttctgtctctttccattaaaagaagggatggtaaaagttttatgaaaattgcaagagcaggttgcaggcgcaaagtgctctggcaagcgctggcc

SEQ ID NO: 92407 - DNA, 563 bp, Eucalyptus grandis
  Intron number 1 from transcript Egrandis_v1_0.049642m (loc us Egrandis_v1_0.049642m.g) derived from phytozome v7.0 (c hr-ID scaffold_41; pos 78854 to 79416)
ttggcgctcgtacttgcattgtgataaggaacccagtatgacctcctttccatctgcctatttttctgttctatcttttttgcttcattttttctcagtacgtgatcacgtgcaatttttttttatttaattttgcccagtctttttttacttttaacatgcccttgcatacagtagaaatggccgctgtaatgtttccatcttcctattgttctgttctcgatcttttttgcttcattttttagaattacttgattatattcatttatttatttgcccagtcttttttttccttttaacatgctcttgcaaacagtagaaatggcctctgtaatgtttccacttgcatttataatggtaaatgcatagctggtttacggtgaacaacatcttgttataattaaaatgtctcgtttgttgctaaactaatcatatataggttaatcaaaagaacgatttcaatcacataataatttggtccatccctcaactttttgagagaagggaggggagtaaaagggacaacaatctactgatgtaattgtgcaacttgttgcagtttc

SEQ ID NO: 92408 - DNA, 831 bp, Eucalyptus grandis
  Intron number 1 from transcript Egrandis_v1_0.007597m (loc us Egrandis_v1_0.007597m.g) derived from phytozome v7.0 (c hr-ID scaffold_1; pos 31179631 to 31180461)
aggcctggctctgaaaaccttaaaataaggtactataaaaggaaaaacaaaaaaaaatccatcttgatatgcattgctcgtgcgtgtaagcaccaggaattcatttttttgactctgcaattaccaccgccatttgcccaacatgttgcttatccagataaactgtctccccagatctgggccaagtttttctgcattaccatgattgagttgtcgcaagcttctcagaatttttttttttttttttatcaaaaacaagttaaaaaaaacaaagagctttttcagaaatcttttgcttctgacaattctttcccttatcaataccaataaactaacaaaggcaactgcccacgtggcaccacccttgtgcatcttcagattgcacctccaatgggtgagaagtcgtagatttcccaagccaaatcagcctcccaaaaacaaccgaaggaaaaaccaaaagaagaaaaagaattactaaaaccactgtggtcccttgtgcacagttttttttcccccatttttgggtattggggggggtgacaaaattacacgccgggtggggggaggtcatcgtgcgttacactactcaatttattgcataattctaaccctccttccctcttgactctctgtgtgctgtccttttctttctaactggagttaaaaggctccggtcttcggtcttcttccatttttctcattacttaatcatttcacaactgctattctttgtgtctctcagaaagaaagagagagagagagagagagagggtattggaacttgcaagtctcttagattgttccatcttattaccctgttgggaacaagtc

SEQ ID NO: 92409 - DNA, 696 bp, Eucalyptus grandis
  Intron number 2 from transcript Egrandis_v1_0.007597m (loc us Egrandis_v1_0.007597m.g) derived from phytozome v7.0 (c hr-ID scaffold_1; pos 31180441 to 31181136)
ttaccctgttgggaacaagtcaaaggttggctctggtcaggttcgtttgatttcgtttcacagttttccattttgggtgtttgacaaaactcctcctttctgaagtctagtctgttccctcgaatatctctctgtttttatctggtttgaagctttccactggttaatgggtgtctcacgtcttgttatggatcatatcatttggaattatttaattaatttcttaattgcagcacagtgcgttcgatagcttcagctcctgtgttccacggctctttctctctctcgctagaaattttgtttctttaatggttcttttctctgttcaaagagatgggtagattgtgggtgtttgattatttttgtctttcgttgtcaaatgaacaattaagtaaaagggactgttgccgaattaagaataatatctctgccttaaagttcagttaagtgggttgccgattaagttattgttcccatcctgcttttctcatgcgttgattgctgtgcttccaaaaatggcggtgatctttttttgctgtttcggtttcctgtccaagtcaaccaattaagtatcagtaaattaaattaaataaggtccctaaacggcatattctataaattaactgctttgctgcgttttggttaaagctccttttttgtgtttctgtgcagaaactttttgtccggtgcgcagcc

SEQ ID NO: 92410 - DNA, 585 bp, Eucalyptus grandis
  Intron number 1 from transcript Egrandis_v1_0.039790m (loc us Egrandis_v1_0.039790m.g) derived from phytozome v7.0 (c hr-ID scaffold_2371; pos 5473 to 6057)
aaggtttcgagagcctcggcgtcactttagttcacgtgagtagttcttcccgtgcgtgtgccatcgtgttcgcttcgcacctttggttctgcttcgagaaaaatcgaagcgtcgcctgccgttatgtctcattccgcatttccgagaaatgtttttagcattagaatcggagtcgatttttcatctcgatctttcgtgagatcgcggttgatggagtcacgttacgatttggtgtttctcttacgaaccgagtacatttgtagacaaatcttccgaaatttcccatatgttatgtactgtatagatgcatttttacggtaagatgccttgttatagcattttgaagatcggtagacaacgtgtggacgagcgttatactacggatagtagcttcgtctttttatttctcatcatactttgtctcgtctggtgaaggtattgaagttttatttctcattttcttagtcttcctgctggtcaaaaataggattttttttttatgattgctaactttattgattgtttgtccatgctcttggttatttgattctcagggagacatatacgatcaagagagtctgttga

SEQ ID NO: 92411 - DNA, 898 bp, Eucalyptus grandis
  Intron number 2 from transcript Egrandis_v1_0.008483m (loc us Egrandis_v1_0.008483m.g) derived from phytozome v7.0 (c hr-ID scaffold_3; pos 12615223 to 12616120)
cgatcttgctgtggagtgcgctgaggccaaccaaggtatgttttccttgaattgattcccaacttactaatcttttagtctgatctggaaaatttcggttttccctaattgggttttgtgggtatgattatatgtcatatatcaagctaggttcaaagagtgtttttgaaattcgtcacctcttcataagttgaagatttaattttcctctctataaataaaagattcttgaattcttgatatgattttccatattgataagagtgaagtttctcttataggtacctgcctaaggacatgtttgcagtacatacgcgtacacgcactgtgttagaattttaagtcaagatgattgcagcgaggccaataaacaataataacgactataatatcaaaggacgaacaaataatcaattgataattattcttgacgctgactttgtggaaggcgtcaaatggttccctaagcagcgcagtgacatctactgaacaggaaaattgactctttgaccgcacgtttcctctgttctttcccttttttttagggtttgtggtcctctctctctctcttcttcttggagatgacccattttttttctcttaccggaacaaatacatacctcaatttgttctaagtctatgttttccgagtgcagcaccttgatgtcaacaggtcaaaaaagggcaaagacggagacacagatctcagtactaaaaaattcactaattaaacccttttcgtcatatttcttgattattgttgttgatgttgttgtggtgctgatggccgccgccatcgtgatgggggtgatggtgggggttctgtactgaatgattaaccttacgctgaactttaattctatgcgaacaaaaaaatatcagggcccgagggacaagc

SEQ ID NO: 92412 - DNA, 876 bp, Eucalyptus grandis
  Intron number 1 from transcript Egrandis_v1_0.009054m (loc us Egrandis_v1_0.009054m.g) derived from phytozome v7.0 (c hr-ID scaffold_3; pos 8477836 to 8478711)
ccttatagtcctgcgaagttcttgtacaggtctgtggatgcggaggaaattgctcttctatgaaattttttggataaatgtggatgcttgatggtttcttgttggttttagaagcacatggaggttggaaattgtccaagaggctctgtaaattttgctgttgtgacctagtggctgtgaagatatggaagttgtttgatcagtgcatgttctgctatattgttagtatgatggacattacctaatttgcaattgcgctttgacctcctttgtatcacagcttagctactccatctttttttatttttggcaaatggaaattggaaaatgtcagagtgccctttgcacttgttatggtttgaacagtaaaaaatcacaaccatcttggttgagatgtgttgaacagctgagatcaattgcctttcaatccaatgataaaagattgctgaggcaccgtgccctgtcgggactatggctttgccccttatcagatgttctctcaaaatttcaaatttaccattggatgtattgccttagttaaaatgtgtatttctctcattattttaagtgccttggaaagcattatttctgtttttgctaaaattaaagagtgcccttgggacatacggtaacaaggcctttggaaattatcttctttcatgaagtacttttgtctactggcttttctgaaaatggctgtggacataatggataggcatcctttccttattctaatgatgcatgcttttgtcaagttccttgttgaccatcaatgttggactgagactttcttaactgttctatctaattgacttagagggaaatgtgctttatacttttttatattgatttggttgtcccacagttggtggcaac

SEQ ID NO: 92413 - DNA, 866 bp, Eucalyptus grandis
  Intron number 1 from transcript Egrandis_v1_0.039841m (loc us Egrandis_v1_0.039841m.g) derived from phytozome v7.0 (c hr-ID scaffold_5; pos 67277478 to 67278343 reverse strand)
ttcagaagtatctggacgcctgcatttccttaaaggtacagttcacaacatccatcctgtttggtttgactttgggaaaatatttttgaagaaatgcaaatgcctttgggctaaatgagtttttcaaaatgtaaatagtatttggtaaactatatttttaaaacacattgagaaacaactttgacctaaatgttatatagtaaaaatatactttgcaaaagaacttttgctaattttttttttaagtctccaattatttgatagcggaattcagccgctttcaaccaacctcgtctgaggtcatgcgacccaagcaaagcagcctaaggtcacactacctcaagtgaggtttgggttgcatgtcccaagcatcgcttggggtctagcaaccttaggccatttcattttgaggttggtgacctcaggcaagggtggcagtagtggctagtcagtgactcgttggtaggtaagacctccactgacaagttaggattttcaagaacatctcccgaattataaaagttgagggaggcaaagttggaaagaaatatatatatatttgctacttttcaaggtatctccaagcctaccttggactaaaggccttcaaaagtatttctttcaaaagcctttagaaatgcaattgtattttcccaaagtttagcaaaaaatgaatcaaatgccatttgtatttgtgcaagaaactttagagtcacaaaacccatttacaatgttgaacgaaatgaggctatcgtatgttaaaatacctaaatatgtgtttgtttcccttaagcctgttgtgattacattactgaaaagctaatgaaacagattagggtggacactatactcattgagagtgacaa

SEQ ID NO: 92414 - DNA, 920 bp, Eucalyptus grandis
  Intron number 1 from transcript Egrandis_v1_0.017726m (loc us Egrandis_v1_0.017726m.g) derived from phytozome v7.0 (c hr-ID scaffold_5; pos 4260945 to 4261864)
ccgatcacctcgacgtcaacgcgcaggacgtgcaggtaccgtacgggcaccgcccatttcctttattctgcactttgtctttttgctttatctgctttagtttaccggctcattattttatttaatatttagctactttagcccgcattttacgctgatatattataataataataataataataataataattaattattatttccatactttttgaattgttcatctattaataggagctgtgatgaaaaggggaaaaaaagagagagaaatttgtagagtaattgtcatacttgtgaaaagcttgagattaatatgtggtggaaaaaattgcgataatgttaatgaaagttacgtgggaaatgggcctaatcacgaaaggcaaaaaagcatgaataaataaaaatatgtgatctatgtgttttaactgaaccgcaactttaatgtctttatgcttgaatactttatggcaagtttgagatgaatatccacattttttgtaatattaaaatgactcgagttatttattccattggatctaaagaatttattaaattgcgttttaaattcgaaactaagtttcattttcaaatgaggtcgacaggatcaagtcttgaaaaatgacggtttcccctcttgtacacttttcccaagcaagttggcatcaacgcaattattattgttatcttcttttgatacgaatctcataataatataattttcctttttttttttttggtcgaatatatttttgcctgtttaatggtcgcaatcgcacaatatgatatgacataatcttcctagaaatggttcgctttggcatttcgagaattgttgtacaattgttcttcgttttcacttgcgaattcaatcgtcgttcttaggcctacatcgtgggcgagcacggcgacagctcggt

SEQ ID NO: 92415 - DNA, 406 bp, Eucalyptus grandis
  Intron number 2 from transcript Egrandis_v1_0.041453m (loc us Egrandis_v1_0.041453m.g) derived from phytozome v7.0 (c hr-ID scaffold_3; pos 18441468 to 18441873)
cttctctaaggcttcaagaaagggtcggagtgaaagtggtacagatcttttgacaagtggagttcgatgatttttcttttttgggtcaaagagttggaatttagtaggctatgtttttggcactatttgtccttctttttccaagtcaatatttgtatgcctttcttattgcctttgaataaagaaatgacttgtcaaatgtataatacctatgccaaattctatttattcaccctctttaattgcaagacataattatctactcaaaaataattgtattagtaaagctttgattctcaagggtatattgcatttaaacattctttatcatcttaccagccattgaaattgttcatcttcctgatttgtagcacaatttgaaggttctaagcgacttcgccctgag

SEQ ID NO: 92416 - DNA, 933 bp, Eucalyptus grandis
  Intron number 1 from transcript Egrandis_v1_0.041938m (loc us Egrandis_v1_0.041938m.g) derived from phytozome v7.0 (c hr-ID scaffold_3; pos 51350243 to 51351175)
gttttggtcaaatagtgtgcatggcaacatttctattccagggaactatttctactccgggaacaatttctaagtcaaataaggtatttagtaattatacaaaatttatattctgggaatagaaaaataatagaatgcgtttgtaaaaatttataaatttttgtatttatttgtttttttaataactcacggactactgactgctgcttggcgcatgattgtcacacgactgttgcgtgattgtcgcatgatcgccgcatgattatcgcatgaccgttgcacgatcgctgcacgactatcgcacgaccggcgcacgatcgccgcatgatcgccgcactaccaccgatcgtcgctgccaatcgccgttgcaggattgctgcctacagcccacatgccgtcggagggagcggtggctggtgagttgtgggcggtggtcttgcggttgtggttggcaacaacggtcggcggttgtgcggcggtaggtggcaatcatgcggcggtcagcgacggtaggctacgggcggacggtggcagtcgttgaccgatgggctgtgggcggcggcctgtgggttataggcggcggcaaccgtcgctagagatcggctgctgacggtagccgtgggcggcaagaagtggtcgatggttggcaggcaaccagcggtggccgcaacaaggaagaagaacaaaagaaaaataggaaaaaaaaacttatttctagaaatctattttttttttgtttcttgtttctgttctaaatttattcctcagccacttttctattctggggaatagaaaaataagttggcattaccaaatagatttatattctttttttgttccggagaacaaaagagcagaactcacgagaaataaaaacgttacaatgcaggccttaaagaagtctttcttggtcaaggctggaaccattagcac

SEQ ID NO: 92417 - DNA, 897 bp, Eucalyptus grandis
  Intron number 1 from transcript Egrandis_v1_0.023183m (loc us Egrandis_v1_0.023183m.g) derived from phytozome v7.0 (c hr-ID scaffold_3; pos 72668700 to 72669596)
atcagttctttgctgctcatatctcccctcttgaggtgaaaggctctgtttttgccctgttttgggtgattttaatgactgtgcaactgctttctttgccttgaatcttggatttctagggtttcggcttagaacaagaaacactctgatttaaagttgcacttttgaagtgcaggtcatggtagatgactttacctgctgttttacctgcattgcatgaggattgtagatttacattgtttcaagatttgacattagagtagctgtaatttctaaccccaagatgaaactgtttcttgctcattcttatccctaaagtggccaggaaagaaaatgagaaaaagagacaaaaagatgggtgcacgtggcattgagttctgaggacaccagagtcaagagacactgacactaccttctagttgcacacagccacatagcaccatgtgattcagtgaattctaggtaacagactgtccttaggaatcaaaacagggcctaccaaaagtctagattctagcaactgcaagtgaaattttcacctttcttattttagttaatacaaatcatggaaacaatagagataactgattacttggtttttacccccttcatgcaaccctttagcttctctactgtggatcaaggaataacaacaatcagaatatccgaaagtgtgaaactatggaaatcattttacctcacaatcacaagtcataaacaagtattctgggggaccacttgtgaaaaatatggaggaaaaagaacgatatcaagataagatttttattccccgagcttgtcccctccttcttgctccctattgacactgtttcttttcttgtccttttttctttgggcacagtctgggtgctgcaagccaccaacagtgtgtggcta

SEQ ID NO: 92418 - DNA, 967 bp, Eucalyptus grandis
  Intron number 2 from transcript Egrandis_v1_0.051987m (loc us Egrandis_v1_0.051987m.g) derived from phytozome v7.0 (c hr-ID scaffold_3; pos 77582015 to 77582981 reverse strand)
agaggatttatcggcggtgtccaacttgcagagcggtactttgcttgcccaatactcctttcccatgcttatcctcgccatactcaactagccatatggtcatcctgaatgagattttttcagttgttactgttctaaaacttaaatttttggacacgtatgcaagatttgaactgagtacttaaaagattagatcaaaggcattcctgtggcagattatatctaaaaccacaactttgcccaagacaaatacctttctcacatctgcatcgtaaggccatcatatctaatctgagacttttgatggaccattttgcaagaaactgaagatatagcttggattttatgttatgttccagaattcagaatttctgattagctgatatcttgcaaccgtttctctcttggcttgtatttagattttacgtgtgtccttcacatttgcatgcagcacttagttttctgtcaactgggatatttaaccacatagggcatgttccacagttcagattttgcagctgtttcactactttgtgatgcctataaaacagtgtagacgagttctgggattgaaattgaagtgtccatatgcatgcctgagttgatatgatggagataacaacacagcatgtgaatttggaaattatttggaaattctagtcaagatcttttgttctcccgattatgtgcttccctgagtttcactctccatttaggttcttctctaacatgccatgagatgagcactcacaatatcagtataagaaatttaccttaaaagatctcatcttcgaaaaagatacttttcaagatacttccgttgtagacatttcacggattatttatgtttgttctgtttccgcaaacgtcctgatgatatgtgaaatatctctaagaactctgaaggtttctgcactttcatgtccctgcagattggagtcgtcttgtgttcaaagtgcaaggtatt

SEQ ID NO: 92419 - DNA, 453 bp, Eucalyptus grandis
  Intron number 2 from transcript Egrandis_v1_0.007864m (loc us Egrandis_v1_0.007864m.g) derived from phytozome v7.0 (c hr-ID scaffold_5; pos 44688295 to 44688747)
ctcgttctcagtaagctcctgcatttcttcactggctctcttttgttcttctagttccgtcctgtatgatcctggccgatctgttagtggtttattgtagcagttttgttaggttattattttgtgcttttgaagtgtatttgagctacatttttatggtagcaatgccttctcccaccctttttttcctcaaggaaatgagcattgtcattgcaccaaatttggtttttggagaggggcagggttgggagacaaggagcaaaagaatgggaaaaatgatattttgagcttgttttcactctactagatgtgtttgggcacattcgtgctttgggatgacaatgatgtggtttctagtaaggttattgtcgccagtcttatgtccctgcgaataatttcttaatgttgcatggaacagaggattccttgaaacgtgaatctggaagcaaggta

SEQ ID NO: 92420 - DNA, 628 bp, Eucalyptus grandis
  Intron number 1 from transcript Egrandis_v1_0.010131m (loc us Egrandis_v1_0.010131m.g) derived from phytozome v7.0 (c hr-ID scaffold_5; pos 47970634 to 47971261)
cgtgcttgtcgactcgtactccggcgttgcatcaagtatcaatcggttttttccctttctttttcttcagttctttttgtgggtcgaaatctcttcttcttctttttttttttttttttcttttgctgatttctagcttttgtttcatgggtcacgtttcttgctgtcgctcctatctgatgtgccaaggttttcttggtttgcgcgtacgctgttctttagcatttcggcggctgcccataatttcgttgtcccagtagtggtcgagaagtttggatgatcgtaaagagcaggctttagattgatgtaatctgttcagattatgaggggacagaacttgatgctgtgaaaaacagagcggattgcgaaagacaagtagaaatgttaatgttgtttttcactcaaatgttgtaacgatggcaaatttttttcctttatatttggtgcgaaagaaaaaaaaagagtataatagtgttcagagtctacccattattctcaccactcaatgcgttgtcgatttatcggaaagtttgtactttgatcttgaatttaaaggaagcctgccaaacgcgcaggtcgattttggagttctatgatcatgtttggttttgactactactgcaggata

SEQ ID NO: 92421 - DNA, 361 bp, Eucalyptus grandis
  Intron number 2 from transcript Egrandis_v1_0.051425m (loc us Egrandis_v1_0.051425m.g) derived from phytozome v7.0 (c hr-ID scaffold_133; pos 71054 to 71414)
gtccaagacgttttactctctacaatctccgtgtgcttccgtgataatgcgtgcctattgaatgcatcgtgtgaattatttcgcataagactttctttgtttgattagtgtggcccaaatgactctctgcttcaaataattgccggtaaaaagaaaagggccactcctcatgaggtttgttatattgacaccccaatttccacaggataagggtagtatagtataaatagttttttttagttctgtctgctgttctggattaattgttttatgtgcagcgatccgatttatcgtcgctttcttctcaccaaaaatttgttggttttgtgtttaaagggcctaatcgaagaggaaaaactgg

SEQ ID NO: 92422 - DNA, 784 bp, Eucalyptus grandis
  Intron number 1 from transcript Egrandis_v1_0.045058m (loc us Egrandis_v1_0.045058m.g) derived from phytozome v7.0 (c hr-ID scaffold_3; pos 14657176 to 14657959)
atcaatcggtcagcttagacctcggaaaactgacggtggagctcgatgctagtcgagagatcttacagagagcgagatcgaggaggaattggcgctagtaatcaagcaatcagtgatctctcttctccaatggttgaagaaatggttcttgattttcctttttttggaaaactgacgagtagatatacgtcctcagtctccctatggtgaccgtgctttgagtctgtcttcagtattagcaagtgattgtgtgattgtgtatggtattgatacgcaaacgcataattcgataataggctggatattcatagtaattcataagcgttgcggctgattttactcctgagagtgagggctcttgttttgttttcatggggaagttatctgcggctatgtgtgctagttttcccagcactcgccatcacggttattcagtgcattgaattttcgatctgattattaatgggttgaaaatatttattaatttcccaaggagtccattctttttctgtggagagtctttgatttcccctaacgttttctctaatcaagaaatgcatacttcgagtacttataatggtaaaacgtgtgcttttgcgtttgtttatatggagatgtggatttctacatatttagattataggctttcaagaggaaagattgaactttactccatctgattaaccacggcaggttatctttttctctatttaaatggttcagtcggacctgtcctcctttcagtgcagacacttggaagcctgtcaaagaaggagaattatct

SEQ ID NO: 92423 - DNA, 742 bp, Eucalyptus grandis
  Intron number 3 from transcript Egrandis_v1_0.023770m (loc us Egrandis_v1_0.023209m.g) derived from phytozome v7.0 (c hr-ID scaffold_3; pos 50768790 to 50769531 reverse strand)
gctccggggtgccccgtcaagaagaaggtataaatcacgttcgctcaaacacttcgtctcttctgtaatacaacggcgcttgtggagtagtatctcgtcatagatgcaacgctggatctaggaaataaaagtctcaaaaatgttaattaaccagatctcttccagttaaggcactgcatttcttagcatggtacaaaaatagataggactcacactcttttctgatgatacctaattacttgttatttttttagatcttctgtaatacaacggtgcttgtggagtagtatctcgtcatagatgcaacgctggatctaggaaataagagtctcaaaaatgttaattaaccagatctcttccagttaagacactgcatttcttagcatggtacaaaaatagataggactcacactcttttctaatgatacctaattacttgttattttttagattaacatgcgatcaacacagattatcaaatggttaccaaaaaaaaaacacagattatcaaacccttaccaaaacaaaacacagattatcaaaggacttaactccctcatatttcatggggatgtcataaagaaaactcattctcatactcatgcatccctgagaaagtaattcctgcacattggattcccaccagaacaaggatattatttgcgctgaccataatttcgggcgattctcaatggatattattataggtccaaaggagcgcagaagacaggactcttcttgt

SEQ ID NO: 92424 - DNA, 1067 bp, Eucalyptus grandis
  Intron number 1 from transcript Egrandis_v1_0.019165m (loc us Egrandis_v1_0.019165m.g) derived from phytozome v7.0 (c hr-ID scaffold_5; pos 52720754 to 52721820 reverse strand)
agctcttcggccccgacccctgggccttcctcaaggtcggccctttcgccgtcaaaattactgcttgactcggttttcttggtgggttcgtgtctcgtggaagtgggcagttcttgattcgtccggggaatgggagtctttgtgtgggtttagtgtccccctcgtgggttggtttcgcttgcgttgcattgcatttgcatcgtctctttagtgatgatttgctcttattctcgtgttggtgtccgtctcgatctgagctacagtgggatctttctctttggttttgctgcgttcgtgcgtaattatgagtggatacgatgtcgccatccgaatccacctagtccgaagtaggtgcggcgattcggggcctatttaaatgtttgaagagattcctcagcgggattcccttgtgggtcttccccttttgtagatctcgattggcatgttttccattgttgctttcttgtgaagaaatggaaaagagttatttttctagcttttagccttctattggcatattaaccttgattttacttggttaggggtttctcttccatttttcattttatttgaaagggctaattcaactaggcttttggctcctccattgctgattgcgcagcgcaagctgctccacgattcattttatctcgtaatttcttaagggggtgtgaactgtctctccttgctttttttttttggtgattcagccttgcataatgagatgaactcattcgccctttgttgccctgaatggaaaatttaaataactggtctttggtaacttcagtgatattgttatttcttttcttgcaattgcgtatgcatcagaaaccactggagaacatttgcgaatctacattatcctgatttgtggaaaggtggtcgcttttaagatgttttggtgaatgtgacttgttgagagcaccttaatgcatacgcttaggagtaatgtgccaattcgtgcaatatatgtcagctgtgtcttttaactttgatcgtctcatatattgtctttatcattttgtgcagattactgttgcagtgctgctacagctaggaaccgc

SEQ ID NO: 92425 - DNA, 724 bp, Eucalyptus grandis
  Intron number 2 from transcript Egrandis_v1_0.019285m (loc us Egrandis_v1_0.019285m.g) derived from phytozome v7.0 (c hr-ID scaffold_2; pos 61406831 to 61407554)
tcagggatccgcaggtttggctctagaacaatataccagtccttgcagaggagcttttttcccctttcttcttaagccctttattgctacaatttccttcatcgtgggctaaacacatgcttcatgtttattctgagggagtagggaatcatttgctattaaccaaattcacgaacttggtcattcctgtttactttagttgcatttgagtctgtacccgtttaaagttcattgagttagaagttgttgaatgataatttcgctttcagctaactttattctgattcgcatgacgtgttaggtaatcagtttcctgaaccagcttccaaactacatattaaagctcttccatgcaaaaattctccttgttctctttactggagaaataatgttcattagtatcaagtatgtggctggttggatcgttgcttgcccttgtataagattgtggatgtcaaaatgctgcctgttcattgagtttctatattgtcccttgtatttttatttttatttttttatttttttatgtcttgttaatattgtgcctcaatgtgagaagccttgaattggctagtgataaaaccataagaaataaaattagctgaagggaactattagtgatgcaattcatctctcatctttttacccattttatgtctttcggcttatgaatcctcatcatatttcaggcagaattacttgatcctgccttgaaggggactct

SEQ ID NO: 92426 - DNA, 959 bp, Eucalyptus grandis
  Intron number 1 from transcript Egrandis_v1_0.048133m (loc us Egrandis_v1_0.048133m.g) derived from phytozome v7.0 (c hr-ID scaffold_3; pos 19248620 to 19249578)
ggcaagtgggtaaatatgaactatgaggccactttttctttcctcgagtcataaagcgactttcttttgatgaatttactttgaatggttatacctaaattgcttttcactttttactttttatttaatttaaaattttgtgatcgtcggttatgaattcagaatcctcacgttttaacaacattcaactgttgatgtgtagttttacttacaattttttccattatttttctcaaaattgttaaattttgacgagaaaacaaacaaaaattctttctttttccttttgcttggatttaagcaaacaggcttcagaagaacaaataaatctacagatgtactatctttgccaggactttcaatgaactaaattaattcctataacagttttaatgaatggatgataaacgctctctcagacgtaaaattagcgaaaagaaatttaattgcattgcaaatattcctctctggttcttgagtatttagttttttggttcatttactgtgcatagaaaaagtttatgcacgttgtgtatgatccttgtgtcactcgacacatgatgcatccaatacagaccaaatgaaaaatctggagtctttctagcgaatgacttgtaggataaacagtgcgcgcattcttaactcggctgtgcgaaattctagcagattgagagacttgacgtatgcaatgatgtatgcatttgtgcagttttgtgtaatctcttagtaattgttcttcagaagcaatgtgaaaaattttcgcactgacatttgcattgatgtctagtgagcacacctgaacgaagctgagatgagtttgattagttggatttccttggtaatcagcaccgtgttgcggctgttaaaaagcctgtgggtgggttgggggattcagctcttggttgccgcaagccttgcctgcgagattgttctcgcaatattaggcaaccgtcggaaat

SEQ ID NO: 92427 - DNA, 1008 bp, Eucalyptus grandis
  Intron number 1 from transcript Egrandis_v1_0.027780m (loc us Egrandis_v1_0.027780m.g) derived from phytozome v7.0 (c hr-ID scaffold_3; pos 13098620 to 13099627)
catcgtcctctcggaatctcacctcccctctcaatgtaattttcttgaaaacccaacttttcttctccttatttctctccgaccgttcgagtttcagtggcgtttgactgcggttttgtgggggaatggcgactctttgactctgctcggactgcgttatttttttttcctgaccatttgctgcggctgttgattcgaagttttgggtttcgttttttcttggaaatctttaatgttatagtcttgtaatccgttcatgggttcatcgcaagagaagctgcttttggctgcttggactttagatttagatgctgaagtttatagtttggctgagttaggaccctgcatatagtaaggaagaaagcatgaacttctatacttcagaggaatttaaaaaaaaaggaaaaaagaaaaaaattcctgaatgtaatggggcatttgcatgatctaactggactactctatctaaaaggtttcagagttagttgttattaagatttgggtttgctaatgaaattttgaagttctttctcagcattctcaaattgtgagttagatttttatatctacttctgcaaacaccggtggccttcaacttgtacatgatggatctttctatatgaggctcaatcccatggaggttgctcctgcagtgcccctggcagagccgtgacaaatggcccgaccactggcattgctttcccgccatttgggggggcacctattggcctggaaatgtggaaagattgccaaatgtgggttgctcctcctaacctttcgtcagataatagataagggaaagaagttttgctgagaagaaaaataactctgcatctataactgtaaatcatctgagtctgcttagattgtcatcggataagtgattgataggtgaatgtttgatctattgttatatgttattcgcccatatccagatcaatgttttatatgtgtgactcatgagtacctgcagacaaagtcgatcgtcctgtgagcacatccatttac

SEQ ID NO: 92428 - DNA, 999 bp, Eucalyptus grandis
  Intron number 1 from transcript Egrandis_v1_0.000515m (loc us Egrandis_v1_0.000473m.g) derived from phytozome v7.0 (c hr-ID scaffold_3; pos 33633106 to 33634104)
ggctcttggagatttctgaaagagtttacggtgagcttttctttgtagggtgaattattggtaggtttcacttttaggagcttcttttcagttcattttagactgttggttgtcgatggattgaagtggtgttaaaggagatagcttgtatggtaattgttagttgcttcttttcccgctatcaccatcttattaggtattcggagaagctattttgttttgtgcacgtacccgccagcggtggcagaatctgcttggtctaatgagacatatgtatttgtggaatgataagaaattaccttaaatttgagcccatgggacatgccaattgtttaccactgcctggggaaagagtttctctgatggtttttataactgaaatgcataaggctaattcttccttaattttgctttttaagtgctgttggggaactgagggagtctagtcttgtggactacggaagtgcagttgttcctttaacggtggattctttgtttgtcaggaattcaaataaaatctcgtgaaaaggaattactcatgaggttgcaattatgcatcatctctggtcgagtagtttctttttgtgactttaaggtgtagagatcaactgtctacgtattctacatggatgatgcgttctaatgtaacttgcgctgaaaggatttctacaatgaaagggtgtagttgtcttgccatgaatggatttcctgcaataaaggactgttgcaggccctcgcttgatgttcttttttcctatcctttttaagtaaattctaatcattgtcaacatagctcacagttctttgtcctccatttttctgagatgtgcgtaacctgcggattcaccattggtcctctagggagttgattcatttgtgtcctgttatcttttcagatgtatcttgctttttatcatcttctctaggaaaaatattcaccagtcttgttcatttatggtggaattgtaactgcagtgtttgattactgttttaccactg

SEQ ID NO: 92429 - DNA, 960 bp, Eucalyptus grandis
  Intron number 2 from transcript Egrandis_v1_0.000515m (loc us Egrandis_v1_0.000473m.g) derived from phytozome v7.0 (c hr-ID scaffold_3; pos 33634747 to 33635706)
caaaacggagcaaacttgttaggcattacaagcaggtagctttgcttttattctgcttgatggaataaccttatatcatcatatttcagaattcatcatctactattatcgctatgtcttaatttccttgtgctttgtttggattctcaaatcctgccttagaccctaaaaattggattgcaacctcgcttgtgggagagcagctgatgcacctgcactattagtgatacttcttcaatttttaaatggctttcatgcttctcttctctgcagaaattttctttgaattttcttgatgatgagcagctaatttgaacgaaaaggatttgtttatacgaaaatggacagttcatgctgagtacatgccaatctatgattaaactcagtttcttgtctatgatttgctatggtcaaaattatacatcatctagagcctatagagtcttgcgaatagcctggaggtcacaccattgtgacttggatgccatacctggaaacagcctttctacagaggcaggggaaaggcatacactcaacctccccatacacaatgcaggagtctcgtgcactaaaacaccttgtatttagagtggagacagagtcaaagaaagtctaagtaacagcatgatgggagcttgaacttggaacttcaagaaaaactgctgtatctctaactgcatgaatgtatacaaccatgttgtggtggtcttggttcagagaattgtttcattcgtatccatttcctcccatgatggtagagccaattttatttgcttcaaggcactttatgagggccactggagagtcctcaatcattaatcttttttttttttaattacatcaactacattagtgctgatccatgcttgcatttcataataaagtcagcacaacatgaatgtaatatgcatatatcccaatgcaggcagactgtgagctagttaaaattgatatccattg

SEQ ID NO: 92430 - DNA, 703 bp, Eucalyptus grandis
  Intron number 2 from transcript Egrandis_v1_0.049054m (loc us Egrandis_v1_0.049054m.g) derived from phytozome v7.0 (c hr-ID scaffold_3; pos 37049695 to 37050397)
catttgggatccatctcagagtgggcgagtaatcggtgagtgaaattgagtaagttcgactgattaaccaagcatccaaatcccaagctagcgcttacttcaatttaagttaatctaattagactaatgctgctaggtgtatcaatacctgatgtagcacactctgatctggtactgaatatgatccgcttgtctacattcttactcccccgcttgccacattacttaatgtttcggttttgttgataaatttcagcgttctagcgttacacgtatctcataactcagtttttccatgttggatcactgcattaaatggaaggcagcggttatagttttgattttatgtcaatatggtccaggagaatgttcttcctcttggaatctgcatccacaggaaatctaactcttgcgagaaaatgccagtgtagagtgataccgatttgcttaatttctgtggatgcaactgacaacctttgcatcccatcatattgtgctttgtctgtgttgatttagcaaaaacacgtgcagctaattgcgtggcctgtttgtttaaagctgatcgatgtatgatagttttgtaaaggaaagagtggtctttttcttgctaactacttcagagtttcgacattgttggacttacattaatctctatgcgtgtgacttgtgccccatgggcacgcgtgatacagctctggcacaa

SEQ ID NO: 92431 - DNA, 668 bp, Eucalyptus grandis
  Intron number 1 from transcript Egrandis_v1_0.007873m (loc us Egrandis_v1_0.007873m.g) derived from phytozome v7.0 (c hr-ID scaffold_5; pos 65252986 to 65253653)
gataacctctgtgttatcttaccctgcttccacaggtaagaacatgcaatctatttgaacttacggttagcaggagaagaaagctatagttcctgccattaaattaacttctatgcttatacaatttgagctatggtccgaacaaaatagaaatttgtggagaaagttaatctgcataatgggtgttcttagacttttatagttaaagttctctttcaaaatgacacaggagatatctacaagggtcaagatcttagaaatttgtgtacaccattatttcattcacctccaatgaagaattcaacttttagcaaattcatttttctagtctggccccgttttctcagaaatattattagttgcctacatcgcttttattcagtcagggatagcctatagcgaaacttgtaacatagagaatctaaagaaacatagagaatctaaagagacttagtttacatatccttgattatggaaatagccaaatatgcagaaaaattactgaggtaatcagctcaagctgaacatttctaataagcctctttattattatgggatgcagttcaccattagtgtagacattagatctctcttcatagccaattgatattccagaatattccattaatcaagatgtttatttgactcataaaaggaacgggggataa

SEQ ID NO: 92432 - DNA, 404 bp, Eucalyptus grandis
  Intron number 1 from transcript Egrandis_v1_0.003325m (loc us Egrandis_v1_0.003325m.g) derived from phytozome v7.0 (c hr-ID scaffold_5; pos 73600454 to 73600857)
tacagagaaaaggtattttgggatctctcaactttttccagacagggtatacttcatagcttaagagaagaggattatctgctttaatgggcaacgaatcgattcaattaatattctctattgcaaagtttgggacgttctatttacctttttactaatttggactgtgtatagacaacatttttctgctcccatttgatcttcatccgcttagtttatgatttcttcttttgttactcttggatgtaaaatgtgttctcattagtcggtacctataaattgtggctgaaagtgaataaatgatacaaaacatgcatcatccactggttttccgattaattctggcagttaatttgatttgcgcttcagaaattttcaacattgttgcttcttcggcttgcatt

SEQ ID NO: 92433 - DNA, 947 bp, Eucalyptus grandis
  Intron number 1 from transcript Egrandis_v1_0.000525m (loc us Egrandis_v1_0.000525m.g) derived from phytozome v7.0 (c hr-ID scaffold_1; pos 15683699 to 15684645 reverse strand)
tactttcgtgatctgacttctcggagaagcttcaggtgagataatgcgtttctctctctctctctctctctctgtgccagtctgcctttttggccgcttacgtctcgttgtgctcggagcttatctggaggacagtgtcggagttggtgaatgattcctgactctgcctgagggataggcttttgcagaatcaaggttcttgcaaaacagaaggtagagggaaaaagaaaaaaacacagttgattttgctcttttgtggtagttcagatcaaagttggttttggcacgaatctgatgaatccatcgtatcaacctttcctcactctgtgtcttgtgaatggtattcagagtattcagacatagtcgtccgttaactaatctctcctgtgggatttttcttgacagcttctgctttggggaggcttgttgtgcacccttcagtttcttgtgtctccatttgcgttcacactcgcgcacacacgacagattttaccagtttcacaactaattaagataatgattgatcattctaattgatatttttaagggtgctcaaccaatgatatcaaactcttctcgaaggacagtcctgtagatcagcggtctttgatctttgagctctgtaaatttgacttttatggttgaaagagtgtctcgcatcttgattgcttaatagctaatccattcaaatcccacgagaagatactcatgatatattttccggaaattgttctgagaagttttgtctttacttgttcagagattcgagaaaattgactgcagtgcagtttcagttttggttaatcaatttgtgctcaaccgtccttcaactgcttcatgcgcagcttgccaatagttggactcctttggcttgaattataaattgctgattctagatgtttaatggtgcagatatacagattaaacagttgcataacagatctgtg

SEQ ID NO: 92434 - DNA, 1018 bp, Eucalyptus grandis
  Intron number 3 from transcript Egrandis_v1_0.010010m (loc us Egrandis_v1_0.010010m.g) derived from phytozome v7.0 (c hr-ID scaffold_5; pos 2608915 to 2609932)
cctgcgtcactcgctcggctcccgctctccgtccggtatgatctttttttcgctctcttcgagctgtttaacgtttcgattgcttgtggcgctgtgcccgtgctgcgctccggaattgtacttgtctcttcgattcgcgagttggcgtcgtgtggtatggtactaggatcgagcgttcggcttggctccggagtttgttttggttgtttggaaactcaggcgagggtgcttgagattgaaaataggaatgtttgatggtggtgctggtggtagacctgctgggagcagaggcggtggcggtgaaggcgacggtggatgttttagtgatgatgaattggatgtggcagtgggggaggcggcagtcatgctatgttggcaagcgacattaatagcagctcttgtgtgatttggtggcgaaagtggagtgtagcggggtgggattgggcttgacgttggtgttgttggtggcagcagatagatgtcgtggcagtggcgtttgcattggtgataatagtagcatttacataattaatgttctaatttcgtggtaaagcgaatgtggaagctcaagtctgcattctggtgtggctgagtttgtgaaatgtttgtaactataattgaattccaaactccagcctatataacgtcagaccaaatgattaggttaaatttgatccctgtgtatggttccaaggcttaattcaatgtattagaacagaggcttaatgtgctcattccaaatatattgtgcgtataaaaataaaccaaacttgctgccaatttaaaaagatagagtttcaacctcttattgcaagagcatggaggtgctgtataccttcggatcttgccgtgagcctgcagccctagagaagatctcttaggttttatggaatagcctctcaaaaggggctttttttttttttttttgcatgtagcatgcctgtagctgagagtggaattctgatagtaatctatttttgcagatctcagtcacaaggacgcttcgtcaaagaacaac

SEQ ID NO: 92435 - DNA, 571 bp, Eucalyptus grandis
  Intron number 2 from transcript Egrandis_v1_0.010595m (loc us Egrandis_v1_0.008235m.g) derived from phytozome v7.0 (c hr-ID scaffold_3; pos 14847414 to 14847984 reverse strand)
tccctcatttctccgattaccttcccaatctccctgtacctctctctttctctctctctctaattctctagtagataacttggttaaacttgcctgtttgatcgatcaatttcgctttttcatggtccggaataggagaaaatcgaaaagggtatgaatgaatttaactttctgagcttccaagattcacggaacagaggcaaaattttcttcttgtttttttttttccaagtggaagaaaagattttgactttagcttagcttaatttgtttatttcaaattgatgacgttaagtgtagtaatgtaacaagggctgtcctccaataattaagctgccgatcgatcgactgtgttggatccatcgcttcattttcggagttgtcggtgctgttccgcagcttcaaaatgtcctgtaggcttctggtttgctagcgttgaaactggttaagcattcatcaagtttgaatcttgaaggttcattcgtggttaattgatcgtgttctcatctgctatatgttatcttgttgtcttgcagacttattctaatccgctacaagacaacccttcata

SEQ ID NO: 92436 - DNA, 406 bp, Eucalyptus grandis
  Intron number 1 from transcript Egrandis_v1_0.007421m (loc us Egrandis_v1_0.007421m.g) derived from phytozome v7.0 (c hr-ID scaffold_5; pos 64142117 to 64142522 reverse strand)
gagaaaatctatttgtttgagttgcacatgtaaaaacaggttagaaatggtttcattgagatgcgtttgagtcgacatcaattgtcttttgcataactctctttcccttttaaggaggatcgttgcaggaagccgttatcatcagcctgtgtactgttgctgggatcctgttctttgcagtatttgtttttggtctttgcaaatggagagctaagaaaagaggtacaaaaaaagagccacatcagtgttttcagaggttgtgctcctattttgtttaatcttatgttgctatgaaaatagtaagctgattcttcaccaataataaacacaaaaaacttcagaaaaatcttaaggctccttgacttgctaggtaaacctgaaaagccgggcaaactgctacaaggaa

SEQ ID NO: 92437 - DNA, 880 bp, Eucalyptus grandis
  Intron number 2 from transcript Egrandis_v1_0.019518m (loc us Egrandis_v1_0.019518m.g) derived from phytozome v7.0 (c hr-ID scaffold_5; pos 16177056 to 16177935)
ggtatgacttagaaacttcatttacttgttctcttcattatatcaatttcatcaagagttcattacttatgatataaaacttgtcacaagttgagcaccgttcggataatttgctgatactcattgcaatctaaggttttgggaccttgaattcagatcttctggttgtgattaggtctaggttttatactcaatttcacatccttgttttctcaagttccaatgagagatgtctgtctgactaacttctttttcaggatgatctattcaagtttttatccactgattctattcctaatttctagtaaatccaatctgagatggaatgctcttgtaaccactttgttgaaggaaaaatggcatctttctttctgttttcttccttaatatattctcctgactgaactatcttagacatcaatgtgtttgattgaacttgctggtaatgctcttgtaaccatcttttttctattttcttctatttaatgtcacatggaccttcaacttgaaatgcatgtttgcatctcatagaaatgtttctcgtgccacatcaggtggcaaagtgtaaaataatgtagttggagacttatatgcccaatgatattctttggaagctgtctgggtaatctgaatgtttgctttaactttggacacccccttttaatttgaaacttaagggctgaagctatagttccaaatgttgtttctttagttagtttgtgaaccttgtgataattaagtaagaatgctttgtttagtctgttgcgaaacttgcgctactctggtaatgcgtgtatatatgagttgtttgagtttttctctaacccatggaattttaggtttttatagattcttgtgtgattgtgtattctaaacagtt

SEQ ID NO: 92438 - DNA, 976 bp, Eucalyptus grandis
  Intron number 1 from transcript Egrandis_v1_0.000033m (loc us Egrandis_v1_0.000033m.g) derived from phytozome v7.0 (c hr-ID scaffold_5; pos 402492 to 403467)
cttcattcactcgctcgaatcctccagattactaggtatatctgaattcgattcaattgtcgtttttccttttcgttattccgcttaggcgtctctagaccattggagttgagtcacagatcgtggaacaaatcataggttggcatgttttggcatttctctggatatatggtttacagggataatcgggaaaatagtgatgagtgtctcgagtcaaagctgtccttcttttctcaaacattctctgatactttagattcagagtctctgcttgagctcacttgctttctaaatgaggcatgcgtagttatggagagttggcttcccacgccgaagttctcattattctaaggacgtgtataactagaatatgcgagactggctcattagagttgtttaggtggtagttggatccattcctgaaacatgcctggtggatggttttacgctgtctcaatgaaaaaattgagtcttttgaagagtggacatcaaatggatatccccagctacaatcttcttcactttgtactgtagtaaaatctcagattctacatttaagagttttttgaagtcgccatattgttaagtttttcttctcaatattgcttttactgcttcttctctaatctcctttattggtatctggtcaatttaattatttgcgtttgacctcaaccacttagttgtgctccttcgtcagtcacaagcaattttatcagatggttctggcttctaagggcatgtgtatgtacctcatattaacttcttttccgtttctgcgcacataagcacaaatcaaggagtagacaatgatgagctgttgcagacatattattttttagtagtatgtttgccatggtcattttcttctttggggctctcgtgaactaatattccacagcagttatattttgcttttgaattttcttaaatttaaatgttttgtactcatcaggttctttttgttggagccaga

SEQ ID NO: 92439 - DNA, 917 bp, Eucalyptus grandis
  Intron number 2 from transcript Egrandis_v1_0.014482m (loc us Egrandis_v1_0.012055m.g) derived from phytozome v7.0 (c hr-ID scaffold_5; pos 8981900 to 8982816)
ccaattacctcaaagcttactgtaattccccaatcttaagttcagagagcaccttgatactgttaaaatgtagttgataactgcttgtgacctgttacagagctttcttctttgacagcactcatattcaaagatgggcagcccgctttgattgttgaggttttagttaattcatgttggataaatcaacagacaggcaaatgatgcgcaatgcgtttccatagagagtaaagtttttctatcgagcctttcatcaaaaaagccaagcaagagacatttcacactgaagtgacatgctggctgagggatttttgtgtggttgtttgtgcctgtcacggtgcattttatgctttacgacacatatgacttaacctaacaagtatatagaaacatgaagaaattcctctctctcatccactcgcctataatttcgggttgatgaagttgccatgttgataatcatgatcttggaatttcggagcattttgttgaggggaaggaattggaccgtttacttgaattaacattatgttaggtctatctgctgtcacgatgcattttatgcttacaacatgtatgacttgcactaacaagtatatagaaacgagaagtagttcctctctctcatccacttgccttcaatttcgtgttgatgaatttgccatgtcgatgacgatgatctcggaatttcggagcaatttgttgtggagaatggaattggaccgttcgctagtaataacattatgttaggtctatctgctgagttgaatgaatgagcaataactccctccctaacctcaacattggagacatttatatttggatttcaagaccagagtcatctctagattatttaatggtttacagaaagatttatttcctgcaggaaaggtttttccacattctgatatcttcaa

SEQ ID NO: 92440 - DNA, 582 bp, Eucalyptus grandis
  Intron number 2 from transcript Egrandis_v1_0.029122m (loc us Egrandis_v1_0.029122m.g) derived from phytozome v7.0 (c hr-ID scaffold_3; pos 54452753 to 54453334)
ggcggtccaccactgtattcccagaggaaaggtatttttcctgctttcctattagtgtcgtgtagcgattcgcatttccatttgaggctaccaagatgtggtgatgtccatcgtaatggtctgtagaacaatttgaacatgtcggtacagctatcagatgagattatgtgtctacacaattagaagtcatagtggcttccagctttgaaagtcgaggcttcaagaaacaagtagagattttactaaagtcatgtttaacctctcctcctatgattcatgtctatatgtttcaagccttttgtagcattttctgtttctgaagagtttgatgtagttgtgtctgatttacattgagcatctttgacatggttgggacaagtctcgtttctctgaagctcatttggtttattctatttagagaactcattcttttgatctgattttgtccccattcagggatattgatgactgaatccctgttactttaatgacactaatcttggactacagctaaacatgtttatttcaaacattgctgattcggcaggtcatcctgcattaattgggcgccatcgacccttt

SEQ ID NO: 92441 - DNA, 899 bp, Eucalyptus grandis
  Intron number 1 from transcript Egrandis_v1_0.033040m (loc us Egrandis_v1_0.033040m.g) derived from phytozome v7.0 (c hr-ID scaffold_3; pos 50362862 to 50363760)
accttctcgggggagcgcaatcactccatcaattggtcaatagtccaggccaacgactctaaatccctgctcttcaatttccgaagcactatggagaagttgcttggaacctatgcatgtgcttctttgacttgacttgattttcctattaatttttaaaaatagaaaagaaaaccatcgagaatgcctttaagacacattcaaataaatttatcattttcaatacacatcagacttcacttttcaaaatatgttttttttctctctcccgaaataattttccaaactagacttcttctccatgccacatcatgcctaaagatgacctaatcataccctcccatcctagtcacttttttctgtccttaaattaatgtttgttaacatttgacattccttttaattcagtgtcgcattacaaatttccggccaatgagttctctatgatcgaatagtttattcaatgacatgttctcttttctatttcattgtttgatgagctttttaatattatgttaatgctcagtttgtgaagggttaatgtagataacaggtagaagggtaacacgtactttctaaaatatttcaacagtgcttcgagagaaaacatatttaagaactaattcatcttttcttccgcctctgacccaatttcatcagccaaaccacttatgcttgtgtaactcgtagtttttggaattgcttcctaaatcatttcacaggatgaatgcacttttccttttgatatgatcattccaaaaattagtaaaaacaaattttcacgagttgagaaattttaagtcttgcttacattcaaaagttaggcatgataggtcaactctttctaattttttttttttttgggggtctggtccctatctatttacaagccactacgt

SEQ ID NO: 92442 - DNA, 920 bp, Eucalyptus grandis
  Intron number 2 from transcript Egrandis_v1_0.037799m (loc us Egrandis_v1_0.037799m.g) derived from phytozome v7.0 (c hr-ID scaffold_5; pos 14829209 to 14830128 reverse strand)
gtcggaaatataaaggtggtgctgcttcgaatgattttgtcctcgtaatcactgttcgtttagcatttgactgatgatacaggttgtgttagtttaattctttccttctggcataagtgcaacaccttctccttgtgagcttcgctttgatgtaatgggatgcattgactcatttatctgtagaattcacatcttttttcatcttaaatggtcatgactttgtgtagaagtccctgtgtgtttgggtttcctctaggtcagcaaagaaaaaaacgtaagaagtttcgatcactcaatacggactctggacatgtatcccagcgctttgatcatgaattcgcagggaacatgaactagtttaaccttgaaatggtccttttcaggagtattgttgttgcataatgttatcccacgccacttactgggatagtacttagtagtaactgttgttgctgcgggtggttgacagccaacaatgaatggaactcagcatgctcccaaaaggcgatggactttcctctgatattttagcacttgtgaaaatgtccatccaagcaagcagcatgtttgcatattttatgcttgacagttatctggctgccgcctaacatttaaatcttcactttccatttcttccatttttctaatagcacttgggctagaatttgcttaattgctgaatcttttattttacttatgatcgtttttttactccgttatagtaacatattgacaaaaaaaaagaagaagaaagaaattcagtctcgtataagtttgttttgttttattttgccagaactaatataattttgtcggataagggcaatgtgctctaaattttcgttgttttccaatagaaatgtttcttctgatttggttatttttattctagagattcttgccttcagtgtttggaaatc

SEQ ID NO: 92443 - DNA, 598 bp, Eucalyptus grandis
  Intron number 1 from transcript Egrandis_v1_0.037799m (loc us Egrandis_v1_0.037799m.g) derived from phytozome v7.0 (c hr-ID scaffold_5; pos 14830215 to 14830812 reverse strand)
aaggtttcaagagcttaggcgtccacgtagttctggtgagaagctattcccgtgcgatcgccttcgtttccgacatctggttctgcttcgaggaaccgaagcgtcacctgccgttaaatctcgttcgccgtcctgagatacgtcttcagcggtagaaccggagttgattttcgtctccttcgctcgctcgatcgagttgattggagtcatgttgcgatttggtgttgctcttcgtcatttttcacgctgcctgacaaatcatctcagcttcgcgtgttgattcgaacgagtgcattttcagacaaatctcacagaaacttccttatgttttagccgtttatgagacagctatagctacgtagctgcactgacctgttcttcagatgccatggacgagaattctgtagtagcttgttttttatttgtcatagtatttttttcgtctgataaaggtcttgaagtatgaatctctccttttcttagtcttcccactgccaaaacaggatttgttgatgattgctgatttcatcgatagtttattcatgctcttggtcatttgattatcagggagatataaacgatccaggtactctgttga

SEQ ID NO: 92444 - DNA, 859 bp, Eucalyptus grandis
  Intron number 1 from transcript Egrandis_v1_0.024981m (loc us Egrandis_v1_0.019665m.g) derived from phytozome v7.0 (c hr-ID scaffold_3; pos 74707470 to 74708328 reverse strand)
agaatttgacactgcacgtgcttcccaaagtcaaggtatctcttgacattgatagcgtatttatctatcatttattaaccttttatcaccttcaaacagcatttggcttttggatcccaattcttgtgtcacttctggtagtaaattattccatctcaattgccttctgaattctttaatgtgtaacagtaaaatgttcagtcctaggcagaaaaaaaaaaaaaaaaagagtgctgggtaggcccgtctttatatggctattgcagtggacttggggtataagtgctggcctgatcatcggccacattgtttttttgacagatgcttctagggctaagctgaggcttgtcccttgcctgccctgtcttggcgattaataaggtccagccaaggccaactaatagtattccagaaaaatcgatttcaagttgccgaagaagcttcttttaggattatgcttctgagttaggattaggttttttatttgacttacaactgcagagatctatactcttcaagtattatttatttaaggtctttcacgttagccaaagtcttttcttgttgttgtgtccattaattgaacttcttgttgaccatgtcaactatatttcatgcagtgagcagctgcatctcttttgaggttgttagattgtgctatccattatttatgttacctgtacaaactatgtgacagatttactaggctagtcagctatgatgtagatgacctgccacggtatatattgtttagattctcattataagtgcaccatctcctgcgtttctattagcaatctgcttaatctgctgctttaataaagtaaacacatgaaatatttttcagagattcacttgg

SEQ ID NO: 92445 - DNA, 512 bp, Eucalyptus grandis
  Intron number 5 from transcript Egrandis_v1_0.007466m (loc us Egrandis_v1_0.007466m.g) derived from phytozome v7.0 (c hr-ID scaffold_3; pos 63100086 to 63100597)
gacccaggttggtgtgcatttatacaattgggatttacccttccataatttgaacttaagtcaatattctaagattgattccctccctgcttgcaaagaaaatcgaaatgattgtttctttgtaggatctattatggctccttgaccacatatgattcaaccaagtgcataagcattgcatgacttatttaatggaagatgtaacgaaagaattacaacgcaactagtatgcgaggaactgcaaaacgaagaggagatacactgattgggttctcatttatatctctgtagcaggtcacttgcaatcccagctatcaatccatgtccacgtgaatgttgtttgttttgatatttgtgacgatcaaccattgagtttgtcaggggcaataattataaagcatgtagtaaagtatcttcattcacatacacaatgatttcatatccactgacccagttctctctgcaacctgaatatagtgcttcaatatcttgcaagtttactttggaacgcc

SEQ ID NO: 92446 - DNA, 587 bp, Eucalyptus grandis
  Intron number 1 from transcript Egrandis_v1_0.046729m (loc us Egrandis_v1_0.046729m.g) derived from phytozome v7.0 (c hr-ID scaffold_5; pos 62825080 to 62825666)
tgcctgcaggtttgttcctatgagtttcatgtcgattgcaatagcaaaatatagtgttgctatttatacataagaagacaacttttttgttgttgttttgtccagttacgtggaagccctaaaatttccaatattttgttaaggatgaaaatggacaagaatataagctgattttttttaaaaatatttcgctgatttaaggattggaaatgtttaattgtgatgaactctctaatggatatccatcaatgcatgttacatcgtggacttatgccagatattaagcaatgcattagtgttctggagttttgttcaaatgggaaagtaagaactaattattcatatcacaaaaaccgaattgaaaaaacctagatatatgcccatttccttcacttattctctttttttagtttctctacattaaaaaattaaaaatttacatgagatgaaatagttttaaccaatttaggatttttttttcgaaaccaaagtatgcacatcataattttgaatgagtgaagcgacttataaattagatatcagactatgctttttgatgtattagagtccttgtgctttttatgcag

SEQ ID NO: 92447 - DNA, 1009 bp, Eucalyptus grandis
  Intron number 4 from transcript Egrandis_v1_0.010133m (loc us Egrandis_v1_0.009799m.g) derived from phytozome v7.0 (c hr-ID scaffold_2; pos 3712546 to 3713554 reverse strand)
acaggacaatcaaactctggaaggtatggttatgtctggtcagcaaggccttccatgttccagtcttcaaattttcgagacatgttcttagaatcttgaaattcacatgacagtcaaatctaatgctcagagtatgtactcattcatttactatgtttggatgggatgaattcaaaagtggggaaatgatttagttatctctagggagaagtaaagaaaagaaatagatcaactcatgcatcgtgtttggtaggggtgattaggagaaaagggaaatgatttatcatctcattttttggaggacttcactacttactaagaatgatttatggtggaaggaaaactccagatcctttcttttcccttcactaaaagaaaccaaactggattatctatggataaactgcttagctcccttctcttctcttcaaaaccaaacatattgtgttgattcttgctaaggtgaagaactgctcgtggttagtgggaaaaaagatgagtagaatccctccaggcatatttctatatggtgataacatgtatagtttggacgtttcataatttatcggatgaacagagaatcattcttttaattcttttccacaaggtttttggaactcagcagtcaatatcagatgcttttcctctccttatattgttatgattttttcaaagatcaagtgtttcatctatatgtttgaagagaatgtcgatggtaaatgtactgtaactccatgagcgtgtttgtcaaattatagtatatcaataaggaaagacgtgaggaaataggcagtggctagacagacgcttgatatttgttgcttgtgggtatctgcatttgcatctatgattattgaatgagggtaattttttaggccttcttgactaccttttcttaaccccattttgcagtttcatttgattgttctcctactcaagcttagatgtgcttttagctgtccaatttgttctgttttgttattttttaagccaggtaaaggagcgtagg

SEQ ID NO: 92448 - DNA, 859 bp, Eucalyptus grandis
  Intron number 2 from transcript Egrandis_v1_0.012968m (loc us Egrandis_v1_0.012961m.g) derived from phytozome v7.0 (c hr-ID scaffold_3; pos 16844443 to 16845301)
tcgccgcgtccatcgacgaccgcaagcgagagcctgtatgtgttcttgccacttcagtgcttttactttttatgcgcatcttagtatattcgggaggattggcagtcgtttttcatgcctgcgtaatttttggcggaatgcttgccttctcttagctgaatttcttctgtcggctgcttttgattacttctttagcggggttattttaaagttttcgttccttgtcgatatgagaaccgccaaggaattcgtttatccctgtccattattttgttggggttatgtgaggggttcttgattgcaagttggaatctttcagctattgagagcgtattgacggtggaaagatgtgctttaggcttgtcaatttagtaaagaggtggatatcatcatgcaactagctgcatttgttggaagaatgcatttgcgtttctgatgagacttcggacaggcacaattatcgagaaaggatttcgtggagtgtaactcgttgtctcatgaattagtagttttgcagagtccaggcgttgctcctccagtgctttgacagtacttctattacaagcattgccaattcttcaggaaaaaaatagctgacttgtgtggtcactcgactgaatggcatgtttggaattacatcggatatgctgctgcagctctttcaatatgtttcactgtcgaaactgatttggctcaagtcttgagcacatttatttttgttttactagtatgagcttataccctcaatttttacataaaaagattggagcccattgtgtcgtttgcatgttttaggaagattttgtagcttgtaatacgttgctttaatcattaattgggctgcattttgatcttgcag

SEQ ID NO: 92449 - DNA, 398 bp, Eucalyptus grandis
  Intron number 2 from transcript Egrandis_v1_0.013428m (loc us Egrandis_v1_0.013428m.g) derived from phytozome v7.0 (c hr-ID scaffold_1; pos 23939898 to 23940295 reverse strand)
ccatttgcaacattaccctcaatatcagcctgcttgtaagattccttttttaaatttcttttgacactttatcaactagcctgttgtttctgcttttctgggttctgttttcttttccatctggtgaagttgatcaagcattgatatcccaccgtctcatattttggttgttttgactgttgtattatcgcccctaccttgctgatatagagaataagcggtcttcttgatccctaacgtgacatgtttcttgaaacgttttgttgcgggcactggtattgttatgtagactcggatctttcaaaagtgtcttggaccccttgatatttaatctcctcttatgtcccttttcgggtttctcgccagtgttgcaggcagggtactggggcagagcctcc

SEQ ID NO: 92450 - DNA, 478 bp, Eucalyptus grandis
  Intron number 1 from transcript Egrandis_v1_0.040926m (loc us Egrandis_v1_0.040926m.g) derived from phytozome v7.0 (c hr-ID scaffold_3; pos 48673391 to 48673868 reverse strand)
tggagcttcatcagcaaagtaagagttacagatatgggagtcagaagcatatttgagaagataatccccccaatatgcctggataaaaatttgctgattggcattcagtgatgcggcttgtttcttgagcaggagacgaagatgggattgctgaaatctcaagagacatttctttttcattactctccaggtgactgaacaaatatcgacaaagaatactagacggtagagactctttgagtgtcgaaactgtatttatcggtatttataagctatagaatcgtatgttggactagtagatagaacaaggagcaaacgtttattttctcaaaacaagtcctttgattaaatttcgtggttaacataccatattattcaaagtgtactatgcagaagttgaatttctccatgaatgcggccatcgaaattgtgcgaactgtcagagctacattcttagtgtgtggtccccttcacggta

SEQ ID NO: 92451 - DNA, 781 bp, Eucalyptus grandis
  Intron number 1 from transcript Egrandis_v1_0.015536m (loc us Egrandis_v1_0.015536m.g) derived from phytozome v7.0 (c hr-ID scaffold_3; pos 11987774 to 11988554 reverse strand)
gacaaactgaggtatgttcatataaccaagcctttacattagtcaaattcattgagcttatcaacaaaaaaaggtggttttaggaaacatgaatgttccagaaatattcgcaagttaaaagacatctatttattaatcactggggaaagtgttaaaaaaaatccttaacattttaattatgtcaatttagtcctaaactttttgatttagtatcaattcagtccatcggactaattttggccaaaaattactaatatcgacgccgactgtcctatgttgcacagcgatgctgatatatataatttttaataatatatttttttgatattatttttctgattttgttctttccttttttccttttcttccttttaccgaccactaaccatacacttccgctcgactaggtctcaactaggtttaagacttttcttatactttttcctaaatcatcacaggcttgatatttgggaaagaagtcatttgtccatataattaactacgactttacgcttcacgttattttcacactaatttcttctagattagaaggaagatagaaacagagaagcagaagaaattcaacaagaaatgagattcccttttgaagacatcacataatagtcacaaacatttgaggacttaaaaacactagaagcaaacttagtcctcaaaagtatataacatgggcttgtctagttcaaacttaacatcaactggtacattctgttgttattcctctgcagactataatcttccttactaataaaggagtagaccc

SEQ ID NO: 92452 - DNA, 846 bp, Eucalyptus grandis
  Intron number 1 from transcript Egrandis_v1_0.028966m (loc us Egrandis_v1_0.026393m.g) derived from phytozome v7.0 (c hr-ID scaffold_3; pos 26315886 to 26316731)
gagtggaatcttggtcaatttggaaaagcaggtaacaatacgttctccttttgcattatgagtagggtgatataggtaggattaaaacttgttttggcatttcgtattgccactcttgtgttggcttgaatggaaactgtatcttatgaaatgtcaaagcttgtcactgtttgtttcaatttaaggctgcttgtgtacttgcttttgtgtttcctttccccatctttggctttttaaagctttctctgttcactgcatcttttgattactgagtaagtagttgacaattatgctgctgaagaattaaaaattatgtctcttcttcaatttcctcctttatgcatcagaagataggttcttgcagtggagagggtgttgcatttttgtttgccaaactatctgaatgacaagaagagtgttgttttctttagcaactctattttaatctgtgtatgtagtaagaattatgctgagaatttctagtctattgagtagtcttcccttttccctttcttttgctagcatcgaagcacgttattgaaaggcattttattcacatgtgttgtacttttagctgaatctatgactttcaaggaaatgcattatgtgtctggtcttttgtgactacctggctaatgactcattctgaagtgagatctctgcactgtttctgtttttctgtctagtctaacactgagagtctttcgaagatttattgacttttttatggggtggtttgagctagtgattgccatgaatttagaggaagctaactgattcttcttttcttatcaaggtaacaccaggtgaaactttcttcatatgaatttgtcttttgcaggttcc

SEQ ID NO: 92453 - DNA, 566 bp, Eucalyptus grandis
  Intron number 1 from transcript Egrandis_v1_0.030532m (loc us Egrandis_v1_0.030532m.g) derived from phytozome v7.0 (c hr-ID scaffold_1; pos 14280868 to 14281433)
ttaggtgacatcaagattaccccatgtgtgtctaataaaatcggaaattataggtatgagaaaatcaccccaattgcactgttttaagatctgctgcaaattaataacaatggacgattgatctttcaataattatcaaggaaattttcaatgtttttgacacttgcttgctaggtcatttcgacacaatctcggagttaatcacatcttataagagtttgtttggaatgactttcgcttcttaattttcttcctcaatctaagtcttgcaatttgcataatcacttttttcttgtttttaaatccgaaactcccgaaaattagtaactttcgtttttgatttttgacatactaaattttgaccaggaaaaaagaggaagtaaaaacgagaaccggttcgtcagctaaagttcgggaaggacgggagaacgctttggcttggccttttgcttagtgtgtacgagctcctgcgtcgcgacgcgccttcggaagcatcgtcaactaccgcctgctccccctcctccttcccagcatcttcttactcctccattctttctataaatctc

SEQ ID NO: 92454 - DNA, 1035 bp, Eucalyptus grandis
  Intron number 3 from transcript Egrandis_v1_0.018540m (loc us Egrandis_v1_0.018540m.g) derived from phytozome v7.0 (c hr-ID scaffold_3; pos 39127271 to 39128305 reverse strand)
gagaggatagatcctccaatcccgaaagccaagaggtatcaccgagttcgttatttctcccaatctaaaaaaaaaaaaaaaaaaacttgtgacttgttgattcgcgtctgcataagatgctttctcggatctatcaagttagctttccccatttttcagcatttagcagtaatttacgtagcttgggtatatagtttgaaagtgttgtcttgattctctgatggcctcattttgccatgttcatggttgaaagccctttatgatctgatcaatgataggatattaagaactttctttctgtaaagttggtattttcttttgcaacctacctacccaagtcagtttagtatgggatggacaaatcttcttagatctctggaaaaagaagtaagaaagaaagaaaattgaagccttctaccatttggtattgttaaggagaactccaatcgaaatttcaaaactcatcaagaaaatgtaactgagtattaaattttttaatttttgtaattaaatcctaaaacttgtccaatttgcacaataaagcacctctttagttctgtccaattttagcaacgagaaaatgttgatgtggctttttcttatttctttctgttttctatgtggctattctgttagtgaaaaatacaacaatgaccaaagacgttgtttgctcctcataataaataaaattattatgagggcttaagccgcctccaactatgtcgacaagggtaggcaaagtgctcgcagctcctcaccttttgcacttgttgaaagatttttgatttaattctaattcgcgacactttaggacttcaattgcactcatcccaagaaattatacatacataacatattcgtatttcgcagaaagatatcaccaatcaatcgttatatcacctgttaccatagattcatcataatgtattcctaaaccctaaaaacgagattataaactattaattcagtcatgcaaaagttttatcgatcataaaacctcatatatgttgctgtgtttatttcagatatccaagt

SEQ ID NO: 92455 - DNA, 657 bp, Eucalyptus grandis
  Intron number 2 from transcript Egrandis_v1_0.014233m (loc us Egrandis_v1_0.014233m.g) derived from phytozome v7.0 (c hr-ID scaffold_5; pos 22535600 to 22536256)
gacctagcaaacagttctcgtaccaaggtagggcttctgattttcccatgttggttgataaggttaatctttcagacttttaagattgatttgccttattccggttgctaagcttcgcatggacatttgttcttgtatggcttgaggcttagtatgtgtaaagatgactttaatgtttctaatgtttgactatagatgatgtgtattttaaaggtaaattaccgccatgacactgcatgtctaaactttcttctgagtttatatttgctgaacatccatatttgctcttgtaaagttatagatgtatgaccataattgtagatcaaaatggtcaaaatttcttatgagtttgtgagtcgccttctctttttatgtgatattctgtcttaatacaagggagtcagattggcctcgtttgaattattgtcgataatttaataatatgttattgttgaaaatttagttgtcattcttttttgatgctaagtgctagtgaatctggggagagttacatagtgcgctgccgtgtttctgtgtcacagtatttcctccatatattcaacttaaaagctggcagtatctattgtttccatactttatcttctcaccctggttactcccttgtaacttagtgctgtgtttcatatataggagtgg

SEQ ID NO: 92456 - DNA, 668 bp, Eucalyptus grandis
  Intron number 1 from transcript Egrandis_v1_0.043209m (loc us Egrandis_v1_0.043209m.g) derived from phytozome v7.0 (c hr-ID scaffold_3; pos 18144503 to 18145170)
tctctccagcttcttctccctctcaggagccccaggttgcttctctctcttctccgcagcattcatgtcccgagttcatttcgctgttagacttgtcaagtttcaattttttctgagccagagaaggcatatttgaacgtgcgagtttccactttgctgtctttcttcttaaggattttgattttctctctctgtctcgtagcttagcgagagttccgtagcccttaagttggtatctggaattgcattcattttaaacaatgatgctggaccatctcttgatacttcatgagctggtaatctgtgggtgactggttaatatttgatgagaaattgagctctctaggaagagaaggtccaatttttgctgttcagtagtggtcgctatatggattatgggacggttgtgtttatggatcatgtctgtgggttactgagggctctaggtctgattttttttttttaatttaacaccaggatgagagataataaggaaccagagaatgcaagcaaagagataacagaaggggtgtagatctcttcttcataggaaaatctttaatgacctgcgataatttgttaaatcaaatctcatgttttgatgaattcctactcatccttttctgtgttgtagaacatgacgatgccatttcaagtgtaaagtgggg

SEQ ID NO: 92457 - DNA, 861 bp, Eucalyptus grandis
  Intron number 2 from transcript Egrandis_v1_0.043209m (loc us Egrandis_v1_0.043209m.g) derived from phytozome v7.0 (c hr-ID scaffold_3; pos 18145324 to 18146184)
gaaaggactgagaaaaggtgcagttgtcttgcacatattctatttaaggttgataatgttgttcatgaagtcgtgtagtacatgtctgagcataatcttgcatttcttccggaaaatcaaaggtacttgataaggtgtggaaggatgatatttgatccaagtaaaggagtcttggctgacatggcaaaagccggcattgtaaatttcagtcatataactttttggaaaatgaagatggaggaagtaggaatatggggtttagtttgcatggtagccataatttcttgccaactcaaagttcaagcatcatgaggggggaagattggcaaaccctcttgaatcatttcacgtgcatgcagatgcacagtcccatgtttttctatgttgtacaagtagatcaagatggcaggttgacgaacttattttggagagataatttgtctaaatttgattatgattgtttcagtgacatggtgatgtttgataccacatattgtgttagcaaatataacatgatttgtgcatattttgttggggttaatcatcatctgaagaatacctcatttgggtgtgctctcttgttagatgagatggtaaattctatggttatttgatatatttttggaggcaatgggaaatagggcacccaaaacgattttcactgaacaagatgaagctatggaaaaagctgttgaaaaggtgtttctgtatgcacaacattgtgtatgcacatcacacattgcaaagcatgctgctaaaaacatccccaatctttatgagaagcctgagtttagggacattttctcaaaactactatttggctgtgaaacagagtccatatttgaatccacttggaaggaa

SEQ ID NO: 92458 - DNA, 608 bp, Eucalyptus grandis
  Intron number 1 from transcript Egrandis_v1_0.005771m (loc us Egrandis_v1_0.005771m.g) derived from phytozome v7.0 (c hr-ID scaffold_5; pos 34429249 to 34429856)
ggtagctacataatgatactgaaacatttttactgccagcaacgtgatgctgatttcctcttgaattttcctttatgcatgcatgcatgagagaattttgactcttattctcatattttctcctaacaagtaacaagatctatttcttttcttatatatggcaaaccttgtgttggacagccttgaagttccagttgggtaagacaccggttttcattaaccaggtgcattgcatatatgtaactttattttctaattaagatgataagtatttcagtcttaattagtgaatgatttcatattggactctttgattgaacagctgtgtgattgtcgaggatgggaacgttagtgtggcaggaagaaaccagataacatcctgtgtgtcctgcccacggggacaacaggagcagaggagcctgtcgtcatgatgagatttcgcgccgttttcccaaatctcagatgctcctgcacacgttcatttccttcttcatggctcggttcatccgaaacctgcacccatctctccaagcacttcttcagatgtgcgagtcatgtgacccgtgacggtcccacagtctctggacaccttaggaaagaaaacctag

SEQ ID NO: 92459 - DNA, 452 bp, Eucalyptus grandis
  Intron number 2 from transcript Egrandis_v1_0.024230m (loc us Egrandis_v1_0.024230m.g) derived from phytozome v7.0 (c hr-ID scaffold_3; pos 76475210 to 76475661)
cttcaggctcgtcatcgtcggtgacggaggcactggtgagttcttcctcattttcctagtttcgatttgattgaacgactcgactgctcgcttgtgttttttctttgtattggttttctcgagtgcttttcatgtgattgtgtgtgttagggggatgggatcgttgcttttggtagtgatttcctaattttttcggtgtagatgcttattatctggaattaatggggaagtgttcttgcggaaatgtatattttgccttttaaaacttggttgctggaatggaggtgaaaatcgattttttatgggttagggctcccctaatttttatgggttagggctcccctaagaatcttgggcattgatgttcttgatctttgtggggagtgttgttttagtttgcctcataactatttatgcatttcgcaggcaagacgactttcgtgaagaggcat

SEQ ID NO: 92460 - DNA, 748 bp, Eucalyptus grandis
  Intron number 1 from transcript Egrandis_v1_0.022461m (loc us Egrandis_v1_0.021819m.g) derived from phytozome v7.0 (c hr-ID scaffold_5; pos 3188912 to 3189659)
caagtgctaagtttggtcaccctaccttcgctctcgtgagggagtccactctctccgacccagccgaggccaacattgctgaaggtttcaagagcttagttcttctgatgcaatcctgttcgtttctcgcatttggtgctcctttgatgaattgaagcgtcccctaccgttaatctcatccgtcgtttcgagaaatgtctttaatcgtaaaatcagagtcgccttttatctcaatctttcacaagatcgagttgatatttgctgtttcattttccctcctctagtaatttgtccctgtattattggccatttttcacattgactaacgaatcacctcagcttcgcattctgatacgaagtacgaatagaatacattttaaaacaaatcttatgaaaacttccatattttacgtactgcctaaatgaacttgtatataaaagtgaatgtgactgacctgtaattcagatgtcaccgcaaatcccttgctataacctttcaaaaaatttggtaggcaatgcatggacaacaattctgtggatgcttcatttcttattatacttttttcttgtctggtgaaggtattcaagtcttatctgcatcggacttcatatctatcctttttcgtagtcttcgtactggccaagataggattgattgatgattggtcgcttcattgattgtttgtccatgctcttggttatttgattctcagggagacatatacgatcaagagagtctgttgactgc

SEQ ID NO: 92461 - DNA, 699 bp, Eucalyptus grandis
  Intron number 1 from transcript Egrandis_v1_0.002214m (loc us Egrandis_v1_0.002214m.g) derived from phytozome v7.0 (c hr-ID scaffold_3; pos 57683756 to 57684454 reverse strand)
gcaccgtctcgttcaccgccaaagcgtcctcccaggtgaagcgtctcgatctccccggcgttccgcggtggagagagaatcgccgtatcgtgccctgtctaggcttcggtcgcgagagatttcgcgaaatcgtagctgattttgtgggggagcgatcgcttggttttgtcgtgaatttattcatctaaagcaaagaatacgagtttacgtgcctaagacgtagcctctgggtagacgtttttgttcaattttatttatttatttcattaaaaatgtgaacttttttggggaaggaaggaggtttgcgacgtgtttaaggatagcaggaagatgggcctttctctgtttgtatgcgacttgcgatgttgcttcttcaaagttctcgttttgattttgggttggttaaatggagttttcaatttgatttatcggttccctttcgtcttctgtttattcagcatgtaaaatggcatcgttgaatttattttctaatgatgaatgcattttaatttggaaaaaattaaaaaaagagatcatgggttcgctaacagtgaagactgttgttgtgaagtttggagatttaaggttctgtcttattttgtgttacttggtgtttagaggatttggttgtaaagtgacctgacgatattgaaatgctgagcaggtgtttgagccttgtaaagtggacttgtttgagca

SEQ ID NO: 92462 - DNA, 817 bp, Eucalyptus grandis
  Intron number 1 from transcript Egrandis_v1_0.003111m (loc us Egrandis_v1_0.002752m.g) derived from phytozome v7.0 (c hr-ID scaffold_3; pos 60442875 to 60443691)
cagaaattcaggctctacgagactcgatcggtaatttatcttcggctaatttgctcgtgactgagatcttctcgatttgacattatgttcttagctctcgtgatgtttcctcggtagttgaggtagttgatgtcgtggggacttggttctagatcatatcagcttagtttactttgagttgctgacggttatattgatttggtcagcctttagttgagcgatgtgggtgtcagtttcgttagattagacaataacttttgaggaaatcggatgaacttcatttgaaagttgtttagttgttatatcattggcttgatcggataataccggcttcagttatttaacagcacactaacgaggaagatacaagatgatcaggaaggacctgaattaaatcagtgatcccccctttttcttgtgtcatcttgagcattgctatttgaatggcattttgcattgacaatggcaattcagtctccattattataagcagctacttgaagtattgcgatgctgatgcaaatgcttgcatatgaatgcatccaattcagatgtattacctgattgtatggggagtggattgtctgttgctttagccttgagtaggaataattgtctgcaaaacttggaagagctgcttggtatatctatggttcaaatgtcgaactgtaaaagctttttcgccgtcagaatcatcgtcatgttcaaagtcttgtttccagcatttacttagcttctgtgaactggtatgctcatttgctcccttaattctgatccggaagtttggcagctaactctgcaattttcaatgctacag

SEQ ID NO: 92463 - DNA, 592 bp, Eucalyptus grandis
  Intron number 1 from transcript Egrandis_v1_0.008110m (loc us Egrandis_v1_0.008110m.g) derived from phytozome v7.0 (c hr-ID scaffold_3; pos 8387801 to 8388392 reverse strand)
tgttgctgctgaatacatcatccaggttcttctctccctttcttccagtctttccctttggcaagaaacaaaaaggattgcctttatgatgtggttgtctagatgatttagttgtttgaattgggttcctctggtttctgggttttaagcacttttcctgtatgtataccaagtttattcttattccgggggctatgagttggctttgttgtgcttggcttctctgaaattcgtgcctttatgtgtgtttatgcgggtcaacactgtttagagtaagggtttttttttttttttcaacagtgaatataggattctccaatcactcttcttgattctgagaatatgtgtgaaaaaggaaatctgagtttttctttttggtgataatagaattggtctaatcattgagagtggggcgtcaactcacaggcattaacatttaacatcatgagttttcaaaaattaacttgcaagatattgttctgtggatgtgaacgatgttaaggtcagaagtttttgcaggagagtgatcgagtagaatttgattgtgtatcaaggataattggtgtctaattcttctctgttcttttccagc

SEQ ID NO: 92464 - DNA, 682 bp, Eucalyptus grandis
  Intron number 2 from transcript Egrandis_v1_0.007743m (loc us Egrandis_v1_0.007743m.g) derived from phytozome v7.0 (c hr-ID scaffold_1; pos 21252948 to 21253629 reverse strand)
gaagaggctcagaaatatttccctcaggtatgcctttatacgtccccaacttttcttttcttttttctattgtgaggcataagcttcgtattctttcaaatttacgattatgtaccccgctaaaattagtgctcagtattgaaggcttcattactaacagccccctcttcatgaaaagatcgcataattgtttgggccattatttttgctcaacctccactttgaagagccacatattgatctgtgattgtttatgatgtttcttttaactcaagtcaatgaagcactagttaatgttatctgggtttttttaggctattattggtggtgaaagatttcttcttatgtggaggtggtttttggttttctttgatgatgccatggctcatattcttactcctagtacgaggctgcagacattagatccaaagtggtccctctcttccccagaacccatgcatgggtgcttgctttaagattttccgttgcttagaagctgtgaaaatttagaacctcaaaagaggaaagaaggaaaagaaaggagcagaaagcatcaatatattagtacacctagtggaacatgagatcattttggcttgacctgttgtttatcattgcattttgtaatatatcctcgaaatttttgcatgacttgatgattctgcttttatttctgcagtct

SEQ ID NO: 92465 - DNA, 492 bp, Eucalyptus grandis
  Intron number 1 from transcript Egrandis_v1_0.046201m (loc us Egrandis_v1_0.046201m.g) derived from phytozome v7.0 (c hr-ID scaffold_1; pos 33877612 to 33878103)
tgcttagcttgaccaagtaataatttattaaatttctgtaactctcatctttttcttaggaaggccctgcataaagcttcatgtgtttgagtattctctttgcaatttgagaagataattgaaatttctcatcgcgttgattgcctatgcaaattattgaattttgatatgctatttcaggacctgagtttctcattcctgggtttggtaactgatatttccgttaatgtaagttgagaacatacctaagtcccgaattctgcagagaaacatattatatctggaaaatttgttttcacttaagtgaatcaaagtggctgaatcggcttatcttgagaaaagaacatgaaattccgctaaatcttgatgcacatgtgtgtgtaagaacagtgttgatcagtatattttctgaaaaacttttatggtattgtcaatgcctctgtttcaatctttcgcaaattggctacttgcagaggccaaccaccatctaaa

SEQ ID NO: 92466 - DNA, 669 bp, Eucalyptus grandis
  Intron number 1 from transcript Egrandis_v1_0.026200m (loc us Egrandis_v1_0.026200m.g) derived from phytozome v7.0 (c hr-ID scaffold_5; pos 25357322 to 25357990 reverse strand)
tctctgctggtgtattcttgagcaataggaccgcaagtcctttccacttcatattcttcctaccctttattcctattgttgatatatatatatatatatatatatatatatatatgtatgtatgtatgtatgtatgtatgtataattatttcttacatcatttacacatgcactgagaattaacttcttacaataagatggtgactgtgaatagtaaatgaacattgaggatctcttgattaactccctaccaatctatagtcttcacctatatatattgcaaaaaataaggttttttctttgctcaaatccatgtcgaaagacaggtgatcgtcggaagtgagaatactgagccacttttcgaaataagggatttctgatatgcaatagaaataactagattttggaaagaactattgctgctgaaaaaacttcatgtttaccattgtcacggatctcaatacaacggttttgcaacctagtttatttgcttttcatgtatggagtttcgataattaaagtacgttacatggacggtgaattgattcttcgaattaacttttgatttgcgattagatacgagaagtaggcaagtagattcgatgtgtaatgtcgtcctgataattcaatattatggcagaaacactgggtggaaaaggaatcgaagaa

SEQ ID NO: 92467 - DNA, 755 bp, Eucalyptus grandis
  Intron number 1 from transcript Egrandis_v1_0.018578m (loc us Egrandis_v1_0.018578m.g) derived from phytozome v7.0 (c hr-ID scaffold_1; pos 1321155 to 1321909)
cgatcgattctccaccgctcgagttccaggtccaggttgctccctgctccctcgtctacgagcgattttcacgtgtctatgttttgctcgagtttggtgtcctttcgattgcctgcattcatgtccacttcgtttgcatgattagtttagttatggtttaggatgggttctggttgttaagaataacaaacaacacgcatcactcgttcaaattcaaaatattttgaattcctcgttgcagtaataactaattgataaaagtattaattaatttaaaatatttgggatttgaatgagtcatgcgttgttattcttgacactggtaacagtgaaggtctcaggccatggaagctatcgagagcatttgtccgtcgtgcttatcgaggttcgtatgatcgtttggtatgatcctttcttgttagccaatcaggggatatgtcgtttccatgctaggtttgtttctagccagtcgacggatttgacgcggcaatgcttgcgtgatggtaaatcacatggactgcatcccgaggggaaaaaggccgtggcatttgaatgatccggggattcggcaagctgatttaggaagtgaattcgactttttgcgacgcaatttttgccgcatatgaatttaggaaagcaaatggcttgtacctgaaagaaatagatagcctatttatgtcggtttgacttgtggcgattgtttaccaaaggcattggcatggctcaggttgacagaagttgcctcttctgcagtt

SEQ ID NO: 92468 - DNA, 917 bp, Eucalyptus grandis
  Intron number 1 from transcript Egrandis_v1_0.000945m (loc us Egrandis_v1_0.000263m.g) derived from phytozome v7.0 (c hr-ID scaffold_1; pos 40219342 to 40220258 reverse strand)
attctaattccaagaaggattcggtggctaatcaggtagtccgcgctttcgtatcttgctttcgcaactggaatttcgtcttgtacctgcatattcatccatctgttgaggtccagcatggtccctatcgagttcgaggcaaagacattagtatcggcgagcaaactggtttttacattcatttgtggagggtatatgtgagttctagttgtaggtaacgggttggttcggttctgtccttagattggaggaacctgcctgtttgtagatatgggagctggacggtatgctgaacatccaaagttccatatcagtttgaagaccacttttgaagcgatagagaccgatccataaatggccggcactcgaattatcctggtgcttggctcacgtgcatcatttgggtggttatgggcggtggtggaaaacccaatgtagcccctctaaacttccccagtattttcttttctgctgctgtacaagtcaaaaagggcttttgtgtttctatggcgtctggtgtgcgaagtgtgttgccaaataaggaatgtcaagttgtcaaccgaccattaatggccacatatacagtggaccgcttctcttctacttctaccataattcatcctgggttaagtttaactttggaatacacgtaacctttcaagccagaaatatggcttttgcatggattgattacacatgagttaaggataaattccagaaagtgtcgcaaacaccatacttgtgattgcattttcacatgtcttcttctgaaaattgactagttggtgttttgtatgttctattgagatgttgcttccatttcccgctgtcttcgtgcgtctgccttttcttgcctatatacagttttactaatttatcttattcttttggtttgaatggtaaggtaccatctccag

SEQ ID NO: 92469 - DNA, 426 bp, Eucalyptus grandis
  Intron number 1 from transcript Egrandis_v1_0.030312m (loc us Egrandis_v1_0.030312m.g) derived from phytozome v7.0 (c hr-ID scaffold_3700; pos 777 to 1202)
cagtgtgttctgcaaaattcccacaggcaagttggttttttatgtagcatttacttgcccatgcaaagctttaggaggaattgcaatgcccattgaagcatttgcatcagtatggtgttgaccaagtgccattttttttaactgttggtatactttgaagtcttttgtataatgtttttctttttggcaaaacaccattgatagtatcaactttcttccatatatatccttattccatgttaattagcatgtcaatcttctcgattttattcgctacagttagttgcagtcaaagatatttttccgctttcatatttaatttgatctgaattgcaaacctttaatattaattgtggtgaatgcatcttgtttgtatgtaatgttacgaatgtttaatatgcatccaaaatttcttatgggacaggc

SEQ ID NO: 92470 - DNA, 917 bp, Eucalyptus grandis
  Intron number 2 from transcript Egrandis_v1_0.005069m (loc us Egrandis_v1_0.005069m.g) derived from phytozome v7.0 (c hr-ID scaffold_3; pos 79879236 to 79880152)
gtctaatacaatagaaggaacaattactactcaaggttagtcaaatccgttagtgaaagtatattcaaaataatgcttcattcattttgcggaaaacaactttcaagaaaatgttttccagatttttcagtgttctggtcatggaaaataaataagtaaaggaaaatattttcctttaatggaaaaagcctttttaaaagtggggaaaatgaggaaatgattttccattctcttttttttttttcacataagcctattttcctccatgcactctttttaattatattttatttttccaatttctttttaaaaaaattgaattttaattttaatttttttctttctttctttgttttttttttccttcttcctcaattgatcactggctacaacgatggctcgcaaccaaccacaagtgagggacaaactcgccgaaggccaaggccttgccgatttgacaaggctcgagcttgtcagcctcgggcaatcttgacctcacttgtggccgatgattggtcaaacaagaagggaaaaaaaaagaacaagaaaaaataattaaaaattctatttttaaaataaaagataaaatattattgaaaggagtgcacggatgaaaatcaaatgagattttccataccaaacggtgaaaaataatttctagttcattttcaagttttagccaagcactagaaaatattatcattttcttggaaatgacttctcgaaaaacattttccagaaaatgtcatatttttcgggaaatgaacggagcctaagtttttattaaagaagttccattcactcatgatatttctgtaccatttcttgattatgcttgtgtaaggaaatctaatgttcggttatctcttgtcgtttgtgaagatttccataacttcagtaagttggaacagctcatc

SEQ ID NO: 92471 - DNA, 965 bp, Eucalyptus grandis
  Intron number 1 from transcript Egrandis_v1_0.009646m (loc us Egrandis_v1_0.009646m.g) derived from phytozome v7.0 (c hr-ID scaffold_3; pos 13075781 to 13076745 reverse strand)
ttctcgctgaaggagcggttatactcgccattgaggttggtgattctatcttagtgaatttcgcaagcagtttgatgctctgtttcccaagtagcttggttgactaattctagcgagctagcatgaaactagtttaaaattagttattttttgtttgatttggattggctgtttcagcagaagtagaggatgaggatgttgttgagattagaatgggataatcagcaggaggactgtaggttctataagggaaacgagcatgatggtttcagagtgtaggtgacatgtgctgctgtccttctaggagaatttgtttgtccaaaagaagaaaggcagctcatggttggatcttttgtaaatgctgtaggagtctgtattgatctcgagatcggtcagcggatcaagcctcttatgaactaagtataccaaaaaaatgcggaagcatgtttctagaatggtatgatgatgtatagtacttggattggtgataattgaatgtcttggcagtagtatgcagactactccttctgtcattgatcgacatcacaccatgacctatatgttcattaaaagcggggaacaattgtgatggttctatagatggtcttaattctcatttgtttttcaaagatacctaataggctgatgagtgctgtccatgcgtgccttatcgtggctggtactactttggctgtgtgtcttcggaatttgcatgcatttctacattctggatataggacaggcggaagtatcaaattagttgcctgtatttggggtgtttttggagggggctttgttcctataggatgccttttaatctagaagacaaaagagtatgtgttggaaaaatatcaatactactggttgagtttttctttactgttcgtggatctgctaaatttaatcaaactttcttgtatattttcctttttgtctgcttacaggatcagaagtactggccgttg

SEQ ID NO: 92472 - DNA, 835 bp, Eucalyptus grandis
  Intron number 2 from transcript Egrandis_v1_0.043395m (loc us Egrandis_v1_0.043395m.g) derived from phytozome v7.0 (c hr-ID scaffold_126; pos 10151 to 10985)
cgcaagaaagctggttctgggcttgccctaccgctatgttagaaaatatggtttcgaaattgggtagtacaatgaaattggatcgagtaaaacaactcggactttgaggcgtgatatcactttctttaaggatttatttaccccacaacgttgctaatggtcaccggcaaaaatcctccaggatacaacaaagtctcggatgagaatactagatagcaattcaagtatttctccagggtctctctaagaaacaatcgaaaaattggctgctgtatttcagaaagaaaactcgaaaatgaccacacattttctttccaaaaaatgacaagtatatatatgaaacagtcttgcaactcttcatgaaaattgcaaacaaacacgtctttagaaaattgttcggataaacaaatacgactcttcgaaagaagtcgaaatacgaacaattgcaacccttcgggaaagttaaaaccgaataagtaattttccaaaggttgtcttgaaaagacacaaacaaaattctgaataattaattaattaattatttttaatttcgaattttcattttatatattttatttccgaaattctcaaaataaaagacaacctttgagtttactaaaaaattaataacaaaagaaaaatagaataaataacaaaatcgcgcaattattcgcgcacccgcacgcgggtatggtggggtctagccccacccaatcactcctttaactacaaaaagaaaacctgcatttttaaattagcccactccctcccacttttcctatgtgggacaaagaaaactctctgtttgttttaacaaacaaacctccaataggct

SEQ ID NO: 92473 - DNA, 449 bp, Eucalyptus grandis
  Intron number 1 from transcript Egrandis_v1_0.052995m (loc us Egrandis_v1_0.052995m.g) derived from phytozome v7.0 (c hr-ID scaffold_5; pos 30145609 to 30146057)
gagaaagctcagccatcgaaaatcaacaacttgaggtgggtaggcaaaacctcaacatgatctagtatgttttttttatttttttgggtaaagaacatgatccagtatgtttgaagtcaccaaaaccagagtatgcaatcaaaccccaaatttaaaagcacaacatcccatgaagaaacaaaaaccaaaaagcccatctttgcagacctctacatagctcctctcttttggctcacacgaagttcatttctcatgcgagtgggggcctctcttttttccgaagccaacaactacacagcaccataattatgtcctttttcctctcttttttcaacaggtgggattgatatgtcctttttcctctcttttttcctttcttatagatgcctatctgacataaaagtatttgaaatcttttgtacctgttccttcacaggcttttctgttcg

SEQ ID NO: 92474 - DNA, 916 bp, Eucalyptus grandis
  Intron number 1 from transcript Egrandis_v1_0.000604m (loc us Egrandis_v1_0.000382m.g) derived from phytozome v7.0 (c hr-ID scaffold_3; pos 76238746 to 76239661)
cgccgccgcttcgaagcgtaatgattgctcaacacactcgctgcttttgagtttagtagtgatcggtcttgaggtgcgacgagaagagcgagttttagtcgagtgcgcctccctcgcgtgaaaatttttgttttctcttcttctctttcgctcccggcgggaaagtagcggcagagaagcgacggctgttttttcggttcaggaagctctgcatcgtagacgctgctgaactaagacttctcctgacttcgctacttgtggttttgtttctggtgcgaggttgagctttcggggagattgtgtcgtactcattgcctagcacttgcagaacggtagaagctaatgaaatgtgctttgagattttcaatttttggaaacgctgaatgatgagataggaaacagagcacttactgggggggagagtgagtcagatcccaatgggagaaaccagttatttgcaagcgaaaaggagtcttctttagcatctccacttaaaaagtcgtggaaacggaagatctacaaggcgttttttttttttttttttaatgtgttttgtgtgaatatatcagctttgtctactaactgatggacagatacattgctccgttgttcaaatgttttgggatttataatcctgaagcattatgccgattatctagtctcaggacagtcttacgtttggtgacagaagctaaatttgggatttccgcctctaaatagaagattctgctgttgtgaatactcggttcttgcataaaaatctggaacatctgtgctatttattcagcggacgtactctttgcactcgattgcagtcatgttatattctattattttcattattcaatgtgctaattgtatccttctaattttgtctatagagtagatttggaatttccaaagattgaggttcgct

SEQ ID NO: 92475 - DNA, 418 bp, Eucalyptus grandis
  Intron number 1 from transcript Egrandis_v1_0.045647m (loc us Egrandis_v1_0.045647m.g) derived from phytozome v7.0 (c hr-ID scaffold_3; pos 24339231 to 24339648 reverse strand)
gagccaacacacgttcgaggtcggcgacattctaggtgagttagaaaccggttctcgcccaacattaatctttcgaattcacatacatttacgagtgcaaagtatgcatgatatctaaatttatgttgaagaagaagaagatccagaactatggcaatttcagttcgtgtacctttttgttttgtaagtagatctctcatcagaaagtcatacgacgtttgagcacagatctggtcaacatgtcaagaagtgaaaggtttgaatgtgatcagaccaatccatctctgcccctgatctggggtacttgcgttgaccatgatcgataagctttgactctttgatgctcctgatccttcaattcttttcccttttttttggggcagtgttcgatttcgactcgagcgacaacgacgttggg

SEQ ID NO: 92476 - DNA, 572 bp, Eucalyptus grandis
  Intron number 1 from transcript Egrandis_v1_0.027027m (loc us Egrandis_v1_0.027027m.g) derived from phytozome v7.0 (c hr-ID scaffold_5; pos 5426029 to 5426600 reverse strand)
tattgctgagaagaattcacctgcagtccctcaaagtaagtaaaatctctctctctctctctctctctctctctctctctctctctctctctctctctctctctctctttctcagagtaatccacatgaggatgtcatgcaaactttgaagaaatgattactgtcttgtttagttttccaaaagattgtgggtctgaatgaactcgtgccaatttggttcattatgggaagccttacgatcagtagtcccagttttgttgattgttttcaatgttcaggtgatatcaagaaaaacatattactgtttgaatggatgagctgatgctggaaagtatctctcatactaggttagaaactagtaggtagattttgattaagtttggactgattgacctataataacggtacacatcatgagatacagcatttgaaaaagaaagagacaaggaaattgtctagaggtagacatccactcaaacccaaatttatctattgcaaaaaaatctagtctttagttgagaattttgttgtttgcagaggtagcagatcctgtggagaaatattcaggggga

SEQ ID NO: 92477 - DNA, 953 bp, Eucalyptus grandis
  Intron number 1 from transcript Egrandis_v1_0.036506m (loc us Egrandis_v1_0.036506m.g) derived from phytozome v7.0 (c hr-ID scaffold_14; pos 998048 to 999000)
caagacaaagtatgtaagtacaatcctccaagcagccaaaccccctaatttcgggactgaattaaatcagaggttgtcaaagctccagagtgatgacatcgagattctggaacctttctaagattgtggtaacatcttcccagctgatctttcccatttcctctagcttgtctgcaacaaactctgcagcgctgcaaaaagaaagcgccagcaagaaactcagacacttgctcagattagtttatttgcataagtgaatttgtagcagatgattaaaattcacctgacaactttgtcatcatcaagatcagcagcctctaaatcgaagaatgtaagatttcgtgtgagaacccattttgtgaacgatctttgcctactttctgtgcacagttcagcaaggtagaagaaaaaccgacccacgcaaatggtactagccagtatccaaaacacggcaaagattctgccactggtggtcgagaaactttgatctccatagcccagagtagtaatagtagcacaaacacaatagaaagcatcaacaaatttaaatttctcggtgaccaacatatacacggttccaagtacagtgaggaccacgacatgaacgagggaaatgaggaaattgtatctgattttgtaggtttcgacctccttcaggatttcagccagaccaaccatgtcattgatatgcgtagctcttactagaagaacttgctgcttttcaagaatgtaatcggctgctttgcccagtatcagcccaccaagagccattcctgtgaaaacatatgttgaggctagaagttttgccaatgtgctacttgggacgagatctccatatcccacagtagtcatggtaacaacgcaaaagtaaagggcatcaagtagaccattcatcttcttgcccgagatttggttcctcaggagaaagaaacaaaaacttcctacaccaaggt

SEQ ID NO: 92478 - DNA, 679 bp, Eucalyptus grandis
  Intron number 1 from transcript Egrandis_v1_0.000127m (loc us Egrandis_v1_0.000127m.g) derived from phytozome v7.0 (c hr-ID scaffold_3; pos 5001602 to 5002280 reverse strand)
agccaaaggagagaagaagaagaaggaagagaaaggtccgttttgcattgttactttctgttctattaccccctatctactctgcatttcatttcctcgttcttttgatactttgattcttttattttttaaatatattttccgcttcatcacatagtttagcaactgcctgaaagagagaagtaaaacaagattatttcagcactaaagtttaatgttgggcaagtctttaaaagtcttacgggaagaaataggcgcgggagatccatcttggagatcccgcaatgtcacttttatatttcttctctctttctcgggaagacaaaaataaacataaaattaaggagtcttatagtagtgaaggtagacatcggtcaggattttggttctggctacctcgggtaggcaggtatagcacaccttacggtattacttacaaccgaggctaacttagtaccccgattgtgagcagtgagctcaattaagattctggcatgtcaaccttacttggacttctagaaaattgttcaaaagaaaatgttttcctagctcccttcctaacccagctgtgtctgcttgcgagtcttttagatacccgtttgattcagcaactttaaatgattctgcggtactaaactgtgcagttttgcccactgtggtggagattactgtggagaca

SEQ ID NO: 92479 - DNA, 514 bp, Eucalyptus grandis
  Intron number 1 from transcript Egrandis_v1_0.053912m (loc us Egrandis_v1_0.053912m.g) derived from phytozome v7.0 (c hr-ID scaffold_5; pos 20910459 to 20910972)
gcaagtgagatgcacgcagtcctcgtttagtgaagatctatgcagccagtgagattagggggttataattgagacgaaatcaccaattacaaagcttccttcgaagcgaacaatgatcttggaggtgctttgagatttttctcgctttgtaatttctgatttatctaaaaagccattcaatgaccaaaaaactttgacctttggccacaaaccaatgtcgcatgattccaatgccggttttcctttaaaacgtggtcctacttggttggatctgtgatttgatattgtcaatatcttattgaatagttgggttatcataagtggttgcgtgcatggaactttactgttgctagtcttacttcatcattcactaatgaacttctcaatattcggaaactctataaaatggatcaataatttaatagatgtccaagtccaaagtgtcccgagaagagagagaggccattattagctccgaatggagcgaagttgttagaagcagctcgaaacggca

SEQ ID NO: 92480 - DNA, 925 bp, Eucalyptus grandis
  Intron number 1 from transcript Egrandis_v1_0.053697m (loc us Egrandis_v1_0.053697m.g) derived from phytozome v7.0 (c hr-ID scaffold_36; pos 121194 to 122118 reverse strand)
tgtttccttatctcacataggaaaagtgggaggaagtgagccaattaataagtgtggagttttttttttttttgtatctaaaggaatgattgggtgtgggctagaccccaccatacccacatgcgagtgcgagtgcgcgaataatggcacaattatttggcacacttagcacttagcgtgcttgcggtttaattagcactaacccctttgttattttattttattttatggttatcttattaattttaatcaattcaaaggttgattttgtttttgagaattttcggaaattattaaaaaaatcgaaattttatataaaaaaattataattattcagaatttttgtttgtttcttttcaagacaacatttgaaaaagatactcattcagtttacaacatttcctgaaaggttgcatttgtttgttttttaacttctttcgaatggatgcctttgttcatctaagcaatttttcgaaatgatacagttcgctttgtaacttttcatgaagagttgcctacgttgttaagactgttttatatatacatgtcagtttttagaagaactgagcgtgtgatcattttatcttttcgagtcttcttctgaaaaaaaaaaaaaaaaactacagccatcttttcaattgtttcctagagaaatcctggagaaatactagaattattatttagtattctaattttaagactttgttgtatcttggagaaaatttgctggtgatcattagcaatattgtagggcaaataaattcttaaagaaagtgatatcacacctcaaaatccgacttgattactctaaagatccgacttcattgttctacccaattcgatgccatattttcccaacacttcccatgtcaacattgttaaactactaggtttttgctttcgcaaaaccaaaagggcccttgtt

SEQ ID NO: 92481 - DNA, 901 bp, Eucalyptus grandis
  Intron number 1 from transcript Egrandis_v1_0.010266m (loc us Egrandis_v1_0.010204m.g) derived from phytozome v7.0 (c hr-ID scaffold_3; pos 43778962 to 43779862 reverse strand)
tacgacggcgatcttccattctatctcgaaaccgggtgagtgtctctctctctctctctctctcccttcttttcttctcgttttcaaggaggacgtgggggccttggttctttctttttgaggcgtggaaccctgccgacaagcattagatgcctggattttgttagcgagtgtacggacaccttgttgagaaaattttgtacttttcaatgtcgtccatccattttctgtcttatactcgatcaatactctagaaatcgaaatatttccactccactatatgtgacgagtgccttgacgagaccccctttatactgaggttaatgatacaacaaaaaaattcaaattagtacgtaagtaacaaatttatttgaaattaattttttgacaacaaaaaactttaaattgatatacttgtgatcaatttatcttctcttaatttttttttttaaaattttacagtcaaattgtcaagttggatatacgtattgatttaaggttttatcctccgtttataccaagcataccgatttgtagtattttttcatattaatctaatttaatgaaaaaaataaatgataaatttatcacaatcatatcactttaaagagttttgatggtaaaaaaaaagtttaaagtagatttatcacgtacgttttcgtgacattaacctctaaatatatttgaaaagcacgcgaaacaaggtgacgagaagtgtgccgcactaaacactatgtcagaaatgacaaagccgacctggttttccattttgtgctcttgtcataattatttagcagtagacattgattgactgacgatgatacttaattttttaatgttgtcgttgtcgttggtgtcgtgtgaaggtacataggcgtaggagaatccaacgagtcccaac

SEQ ID NO: 92482 - DNA, 1005 bp, Eucalyptus grandis
  Intron number 1 from transcript Egrandis_v1_0.012093m (loc us Egrandis_v1_0.012093m.g) derived from phytozome v7.0 (c hr-ID scaffold_3; pos 15600269 to 15601273)
ctcatcagctacgtcgatagcctccccacggggtaaccacgtttccttctttccatctctgcccatcatttggttttagcggcagagccgacgatttacttcaagagcgacagcaaatttttcccgggtcttgttgttcaacgaacattaaatttcaaaaaataataataacaataatcgtgcatgtcacgaattatgattaaattttttgaaaattattatattaccttgtgcctagaaattttgaatgagctagtaagatagttttggtgagtttcggtcgtgtctttgcttctaaccgtttttattgaatgtgactgtttgtagaaagtcccatgtagtgtgttcttcgtttgacttgtttggatttgattgactaaaggtgtttgattgacaaagagattatatctaagtggtggagaggccttgcttttgggatcatttagacacaaaaattcgaaagggacgaacttgaattacggtttgctgtctctatagtctctggttccatttgaatttgtagtggtgatggagccaaaagcatagagaagaattgccgcattcagtcagtatgattttctttcttttggttcagatgattcttagtccttgcatgggatgagaagattagttgtcaaggcagttttgtgcatttgtcgactgaaacccagtttgtgcttgattctgagaagaaacagggcattctgggctgtctagactcattttggtttactgatgatacttgatgaaagcagctattatctgcttcaagtgtttgatgcttcccctgcaaaattatgtaaaacatttatggcattggaaacagcattcagggttgagggccattttgtatattttggaataaaggttgggtcttcaagcgcgattgccaagaacctagagacagtccatactatttagcttgctgtttttttcttatttttcccatgatgatgaatccaaaaccaatccttgtctttctaagggacgagaaagggttatatt

SEQ ID NO: 92483 - DNA, 769 bp, Eucalyptus grandis
  Intron number 2 from transcript Egrandis_v1_0.006884m (loc us Egrandis_v1_0.006864m.g) derived from phytozome v7.0 (c hr-ID scaffold_5; pos 5698336 to 5699104)
ggaatcaatacgagctcgtgagtacttgctcttttttttttctttctcctccgttcgctatctggttactgtaaattgaatggagtgatgtatgtgttcgtttgaagatgggaagctcgtcaattcgctgcttgatgaggtgttgaagggaggcctggaactggttcctctccataaggtttttagggttttcactcggtgatttctacatcggatgggattgttcggttttctctctctctctcttgtgttgttttaggttcttcacgggttttgtgttggtctactgagaattggcttttcagcacatcaaattttgccttctttttttctttggtttagtggaaaagatagcttcgactacggtgtcatgatgtctcctttttcagcacattgcattcctttggtcaggatgatcacttaggccgtgtaattcactgaaagatatatctcttgcttttcttaatctagtaaacctattttcttgggttttccttttcacttcagatcacttgttgacgtttgtttgcttgtttgttcagtcttgtttgatgttgtattcagtcttgtttgatgttgtaatccaggataaatgcttagacaacttaaatgatataatcctctttggaaaaatcttcactgcttccctctaatcaaattggaagtctttactttccttcttcttcaaacttttggttaacttttcttcttattgtatcatggttatcattcaggaggatcctgtacttctagtccctgctgaaaaaga

SEQ ID NO: 92484 - DNA, 756 bp, Eucalyptus grandis
  Intron number 2 from transcript Egrandis_v1_0.020851m (loc us Egrandis_v1_0.014575m.g) derived from phytozome v7.0 (c hr-ID scaffold_5; pos 17716981 to 17717736 reverse strand)
ccgatacttaccttgtaagattgaaagacacacctatgtatatttttttgtggcatttggtggacaaattttgttgctagcaaagctttgagcgtgcattctctttcctgataaagttttataagttagccaatcttatcatgatgtagcaattacttatcatgcttctatgttctcctatcaaaatgtgataggctcccttatctgtctgcactgcttgtttaagggagatttgggagcttgcttgcttctgaatttctaaaaccatcctgttcagaagaatgaaataatcaaaagacagtaagtttgacacagaaattgaaatgtaccgcgatctagttgtagtaagtacttgtaataatcacaggaaaaataattgccagcataatttgagagaaaaaccctccatggtggcaaagacacatcgaaaaactttgaccacttttcagcatgcagtttctggaaaatctttcacattctctgtttagatacatttttcttctcttctaaatgttagcaatctgaaacgtaaaaatcaggtggagttcactgatttctcatagaatgccattgttgacccctatggatacttttggaatgaatcaaagtttttccaggaagcagtgctttcatctgaattcgttattgctttattaaatctttggctctatttggcaagtgctaggcattgattattgatagttgcctctgtgcatgtcagatactttggtctagacgtttctgtgacatctgccg

SEQ ID NO: 92485 - DNA, 585 bp, Eucalyptus grandis
  Intron number 1 from transcript Egrandis_v1_0.020851m (loc us Egrandis_v1_0.014575m.g) derived from phytozome v7.0 (c hr-ID scaffold_5; pos 17717986 to 17718570 reverse strand)
agcaggaccgggtcggcgagagcgacgccaatcaggtgggctttcggtcggctgtgtctcattaggaaatccggaattagtccgtgtgattgttttcttgactggtgtctggaattgttcgatgtatgagggaaaaatggtacttttttgcgctggctccatcctgagtgcaaatgataaggttgtgaataacgcacttttagttgttagtagttaagaaaagggtagttccttacaattggatgggggcagaaacagcagtataggtaatgtgtcaattttttctttctttgcttagtttcatgcttcctctgctggaatttgttacgtaatgcaccgtgtctgtgagaatttagtttgtatctgtcttttaatgcacgggatgagtatctgcgggtacaggacatggcaatgtttgttgcttgaatggttgataaatgaagattaataagttgtggcattaggtctccgtggcccttttctatctctagatgatattttcacgataatttgattgtaaagcaatgctgaaacggaatgttttaggaagtagacaaaggccatcaatcttcaccacaggaagag

SEQ ID NO: 92486 - DNA, 752 bp, Eucalyptus grandis
  Intron number 2 from transcript Egrandis_v1_0.014865m (loc us Egrandis_v1_0.014865m.g) derived from phytozome v7.0 (c hr-ID scaffold_5; pos 11290709 to 11291460 reverse strand)
acccgaatgtaagtcctttcgaagtcccgcgcctggggtgaattattagcattaattggtaccaagtaaatgaacccatctctgaaaattaatcttcagacctacgctctttattggtctccatgatatttgttttggtcggtattggtctccatgatatcaattagtcgaatccggccgaagaaattacttgaccagtagatgatttactttttattgagttacatgtgcttttaaaatataacttaaaagcttaacataccactcaaaacatttatattgtctgtccactttccgtttggaacgacatattaatggagcttgtacatataattagaagataccagaaagatgtttagaaatccaaattggtcttctgaagcattatttgtatgaactgttcgtaaaactcttttggaagattgatcttggatagagaacgacaccatatatgttaaagaaatccaacccaaaaccttaaagtaattcgacatagaggatggtacgcgtgcacttggcataatcaattaacctgttttttgctttgtccaccaaatgaaaacatgactttttcttcatcaacttgttgacagaaaaacatcacatcacgtgtagagaataaaatgtcctcacataaatcaatcactctctactctaatgtagtcaaacgcaccgtggaaaatcaaaacgattcggccaaacgttataatcccttgtatttctaaaaaaccaggctctgagtccagctggag

SEQ ID NO: 92487 - DNA, 973 bp, Eucalyptus grandis
  Intron number 2 from transcript Egrandis_v1_0.007849m (loc us Egrandis_v1_0.007567m.g) derived from phytozome v7.0 (c hr-ID scaffold_2; pos 56870740 to 56871712)
cagtcgtgaattctacgaacgaggtgattactcttttgctgtctgctagttagaaccttggtttgttattacgatggctagcttttcatttgttgctttcttgttcacactacttcttttttatgatagtcataactggataaagaaattgctcctaaactgggaacctaaacttaggattgcatgtcagaatgcaatattccgcagtgtgattccttttgacttcttatttatggcacaacatctcccctgattgagtttgtgaaattttgccgatggatgcaatgaaacttgcaatttctgattgtgcagtgctaaagtttatgattgattctggtgttgtttctctgctttgatttctgttgcatcacttgagctctctggttctggttttgggccatattgggtgagtgttattgtttgtatgagtttgagtcttgtgctggtgagttgggctggctttgggcttgtgtaggactattctgcttctcacggtatcgagctaagctaataaaagtaactcactcacctggggaaaaaaaagttcatgattgattcttgttcagggctctgtttgtgagggagttgagtttcaaagtatgtcccatttgctaactatgcaaacgaactgttcttctgttgtgtggattatcgatgccaactattgtatcctttgatgcaagttcttcattaatagacatgtttgagcatcacatgaaagcttcattgtgttaatagtttgttcatcgcatatgtcatatttgttttcctttcagtcactacatgcctattattggtacttgcaggtcaattggcttcatatttaaacatgcattttaatgaaatattgcattgtatggaactaactgagttcagtgactggaccttgtattcatttgaacaagcgaaatgactatttttttcttctgagaaaaaggcatgacatgtttactcttctcatgattgttagagt

SEQ ID NO: 92488 - DNA, 585 bp, Eucalyptus grandis
  Intron number 1 from transcript Egrandis_v1_0.042020m (loc us Egrandis_v1_0.042020m.g) derived from phytozome v7.0 (c hr-ID scaffold_3; pos 41679780 to 41680364)
tgaaccggtaattagtttatctctgaagtacagaaactgaagtccaaaagagagagagagagagagagagagagagagagagagagagagagagagagagagagagagagagagagagagagagagagagagaagaaaggaaccaaaaaaagtgctggcaaaccaaccggccaatttccatttggtttgttttctcccgaattttgggtgcattctaggtaccacgtttgtgggataatcatatgacaagcgttgatgggcagaacacttggcgactcgtgacccttgcccatttggcaatcattgaatagctgtgatttttgtgtgctaacatgtcatgctgacgagatattactctatatttaggtttcaatattcaaaactcagcattatgagagaatgtcattgacgcggtgataggaacgtgctcgtggtatcactgtcacataaaatactaccgttggtagaaataatattgctgtcttctttgcatttcaatttagacttggcggaagatattaaatttcaaattagcccttggaatctgaaggcaagacaatttcgtgcaggagggtgaacgaatcc

SEQ ID NO: 92489 - DNA, 783 bp, Eucalyptus grandis
  Intron number 1 from transcript Egrandis_v1_0.028729m (loc us Egrandis_v1_0.028729m.g) derived from phytozome v7.0 (c hr-ID scaffold_3; pos 26248569 to 26249351)
gacctaaaggagccaataatatcaaagtaactaaatttgagttctattgcatctcatctgaaatggctcaacagctttatggcatatattagtgcacaaactcctttttccaacattttcagcaaaagtttagtcccatcccaagctgccataattaacaacaaagagtaaacaaaggaaacaaaagacagaaggaaaaacctattagagcaaaaacatgtttcccgttctagcatatttgcccttcctaagttgcaagacgattgacgcacaatgacactttttcaacaagttgtagacattaagaacgaccttaaacatatacaatgaacagtttattagttagaacagcaccatcatttccatacactctcacttagtgctagtcaacctaaacttttgcatgggaagtacatcacaaatttattggtcaatgaaacttaaccctgctttaagacgtgttctccatatatggaaattccaacaagttgaattaaagagcatcaagtccatttctctccttattaaggtaaaatttcaaatggtcccatgaagtgcagtcattgttttctcaaaagagtatccaaactaaactttgtctcaaagaagcccgttaaaagtgggtgacttggtaaaaaattacccccccaaaacccagctcaccggcccaccaattcttccctggccaatgagcacatgcaaatcttgtggcactttccagccaaaggccaaaggcattttcaaccaggattatttttttatcatattttttcttttcttttc

SEQ ID NO: 92490 - DNA, 1019 bp, Eucalyptus grandis
  Intron number 1 from transcript Egrandis_v1_0.025055m (loc us Egrandis_v1_0.025055m.g) derived from phytozome v7.0 (c hr-ID scaffold_214; pos 45512 to 46530 reverse strand)
aaaaggtgactcctttgacttttttcccccagtttttgtctttttcttctttttgggtatgtgtctgcagtttgttcacgttatgatgagcatgagttatgatggagcagttgttttactaaatggtttttggggaaaattcagagtatagtttgcaatctgatgcaatctagttgtacagacggttttctgttgattgacgttcactcttttgcccacaaagttgattgtgagagttgaattcgaattgctgtgccgatgattcgagtcgagttcaagcttgttgctgaattggctcgactgtctgttagatacttcaattgattgttcactacaaaagtacaaaaccgtgccacaaaattcctcgggttgagaattgcatttcttttgtctgagcaaaggttaaagttccctgtagggaggaaaaccatattaatgtaaaggtgtgacgttgggggtggtatgtttgcttgccttgaatcttcagattccgtatttggatgcactacattgataaatgccagctccagaacagcaaactaatggcaggatcaatactttataatatggatgaagctcttcgtaatcaggacttactggtttagacaatgaaaaaagtttactccatgaaaaaagttttctgatgaaatcatcttagcaactgagaaagtccactgaaaagaacgaacccttaaattcaatagatggagaaaattaaccatagaggcggctttgccaagggattttctattcatgtattaaaagagttaatgttatgcaatcctctttaacagttgtagatttgttggctctataggtcaaattttcttccggcaccaaaaaataatacataatccacatctttgagagatacgggactttatgtcatgcatgtttgtggccacagcagaattactttctcatcgagtcaaataattcttcttgacaagcttgctttttttccccccgtgtcattgagaacagtgtgtcttcggcgcttggggagcctgttgtgccga

SEQ ID NO: 92491 - DNA, 326 bp, Eucalyptus grandis
  Intron number 1 from transcript Egrandis_v1_0.052908m (loc us Egrandis_v1_0.052908m.g) derived from phytozome v7.0 (c hr-ID scaffold_3; pos 16104967 to 16105292)
ggctgggcacgggccgcaacccttgtcggcattcggtgaggctcggccactgcaaggaatccaaggagaaagaagagaaaagaaaaacaaaaaaattaataaaaaattcaaacaaatagaaaaactattaaaaattaccacgttagcgttggtcgctggcatctatgttagtgtcagctggccaaaattggcttaatggactgaattgatacatatgtaaaaatgtttagaattgaaatggtctaattgaaatgtttaagactgaattgatatcaatactacaggtttaagacttttttgatacttttccttgtccgcctctcgtc

SEQ ID NO: 92492 - DNA, 706 bp, Eucalyptus grandis
  Intron number 2 from transcript Egrandis_v1_0.031604m (loc us Egrandis_v1_0.031638m.g) derived from phytozome v7.0 (c hr-ID scaffold_5; pos 44425954 to 44426659)
acacctgccaatctgacttgaaggttgaagaattggtactctcctttaattgtaaagttggatgaaatgttagttcgtccctgtatgagcaggagtgatggaccttaagatgattaaatttgacattaggaatgtaatgaactcaaaagttaatgcaaagagcagttttaggagtttctcattactgtacaagctttgggtttgccatagcgcctcttatatattacatatattcaatgtaaaactacgttatgcatattatgtttctcctgactattatcttgtcatttcgccttcagcatctttgttgcttcaattactctgcaagatggttctgctctggtacaacttatgatgaattcacagcttgtttaaaatcacacttcttcaatttggagctacttattttttgccctgtaagtctaacgaatgtgctagttaagggtccttccctggcttatctgcacgctgatgttctgcattttccttttcctgagattacttctggcaatacatgcttggttcaatttagttcctattttttagtgtgatggtagatacagagaatttttctcgacacttttgcatattattattgttctcataactaccgacttctgagcatcagtgacttccttgatcttttcatgaattctggatttcttctggaaatgcagaagcaagtctggtgactgccaaggcgcca

SEQ ID NO: 92493 - DNA, 872 bp, Eucalyptus grandis
  Intron number 1 from transcript Egrandis_v1_0.041386m (loc us Egrandis_v1_0.041386m.g) derived from phytozome v7.0 (c hr-ID scaffold_119; pos 11764 to 12635)
tgttggtaggattgtcaattcacgatcacatgtcgaatttaggctatgaattcttgcagttggagatgtgacgtatgttaagagtatagtataatacgcgcttccacaatacatatatcgagacgacgcattaaaaattgacagctcaatctttaattttaattgacaaaccaacattccctttttccattggctaaatgccgttgaaagtggagatcaattttatataagtagcgtcccacggcgaggaactttagtcgaatttttgttgacaaatggtaagaataaagaatgaagaaaatggaggcgtcaaagtttgtaatgatcatgctttttagcacatcgttaaggcgtcccgctttcacgttcccatcatgacttcatgatatcgacaacgttaaagcggtcgaaatcttactagtcagaaaaaattccgcgactatgttctgccatgtaatctggactttggggaatcaaaaggaaattttttaactgtggaatggtttttaaaaagacaataactaaggaaaattgttgattatatgattgtcaatgttattattgctcaaggaatattaaaaaaagaagaagagagaacaatcacttactgatagagctttcatatttgcaatctgtgagagtgttaagatcacggaggtaaattattaaagatagggaaaaaaaaagatgtacatagatgcctttgctccattgaaaatttcatgataaaggaaaatatttttcataaacattattttcaaggaaaattgttagttttcatttgctttgatttatggggaaagtgatttccttcttgctaaaaaggggaagttgtttctcctcaatttaaatttattgctttcagatgtagt

SEQ ID NO: 92494 - DNA, 564 bp, Eucalyptus grandis
  Intron number 3 from transcript Egrandis_v1_0.023702m (loc us Egrandis_v1_0.023702m.g) derived from phytozome v7.0 (c hr-ID scaffold_746; pos 459 to 1022)
cttcaagttagtttacaataagagctactaatatttacctttaagaagattctagcaatagttgaagttcttatgtctattgtttctgaagtttaagatctcacacttctcttggaaaggagacatgagttcagtggatgatttacttatagtcactcggttgttttctgcaattgatcccttttagatatggtgaacttctgtagggaacgggctatgctctatatgccaatgatcgtgagtctataacagtcactgttgaagaagtgacccctagatcagtgggggctcttatagcattgtatgagcgagcagttgagatatacgcctcattagttaatattcatgcctatcatcaacctggtaaatagtttaccttataattcttatttaaattagatgattgctatatgttttgggcttgttgctgttgagaatatgtgtggcctctctgagtcaagaaatcaaatcaattcatccaactggctgtcttttttcttggcccccgatgtgcgactgaaattcttaggtgtcgaagctgggaaaaaggcagcagcagaagta

SEQ ID NO: 92495 - DNA, 656 bp, Eucalyptus grandis
  Intron number 3 from transcript Egrandis_v1_0.040729m (loc us Egrandis_v1_0.040729m.g) derived from phytozome v7.0 (c hr-ID scaffold_3; pos 8153423 to 8154078)
cctacactcaagctaaaaacaattagtttcgacatcgattatttcaacttttcttcattgaatcaattgatataactagtcattggcctgctcgtttgcatgtacatattttacaaggatgaatgtggaagctttttccattggtgcacaatagctttactcatctatacatgcctagattcacattcttgaaaatgtatatgacggagcggatatagagaaaatggtgcaaagaactaatgggaaaggagagagatgagtgagattaatatgcttgcgagggctctgttatttcacaatgtcactaaaccatctcctcattcatgagccaggggtggagtttgtgggggagcaaatgcactcatgctggcaataacatcaaatttgctttttattacaaaaaacgcatgtctagattttctctttctcattgatcgatctggaacaatgacttcctcaaatactctggcttgtcaaatgtgctaagcgatgacgatgatgaagaaatcatagtgtgattgttcaatttgatcttttattcatagagcaggttgtgtcgtccacgtaggtatattggagttgtgaaattgagacctggtgggtgttgtgcagatgattattcgagccaggagtgcagccaaaacttactgaactgc

SEQ ID NO: 92496 - DNA, 804 bp, Eucalyptus grandis
  Intron number 1 from transcript Egrandis_v1_0.013670m (loc us Egrandis_v1_0.013607m.g) derived from phytozome v7.0 (c hr-ID scaffold_3; pos 13046659 to 13047462 reverse strand)
tgtaccctcaccccggcctcctcgccgccccccaggttcccctcttcttcttcgtctcctcaatctctccccccccctctccggctccgcttttttcccctgctcgattcggccctgcgatgtcgcgtttctcgtttgatttcgacctcggttcttggcgtgtggtctcgtcgatgtcgtgaaatgctttagcttaggagtcgtgaaagtgatgtcgtcggaaacctatatcctcgcggtttttttatggcgatggccgtgcatttagtgccgatcgaggtcattttgcgaattaagggttactttgctctgagaattcgatggaatgcttgtttttttcgtggtatggttcgttgattatgtaaatatcagcttctctgagtttagatatgtagagcatttcatttctaattcgttgatagtgattaatgagtgagggcatggattgttttctgaggggtgatcatttgagcctagagttgcgaatctgttgaattcaagttgatttcattaatgttgaggcagctgaatccgtttctttgatatataatttgattgggagtaaggaaatcagtctgcgatgaggaatgtgaggattttagtgcaatttattgccataaacggtagagaaaataaagagtgcaagcattcattatacttatgatttctttgggggcacttagcacttaaaagtctgggagtctagatcttttagaattttttgggtacttttttcccttcttgtttttttacatttttaattttgcagatagagcctatcttgagtgggaatctgcctcctgg

SEQ ID NO: 92497 - DNA, 598 bp, Eucalyptus grandis; identical to SEQ ID NO: 91567
  Intron number 1 from transcript Egrandis_v1_0.046016m (loc us Egrandis_v1_0.046016m.g) derived from phytozome v7.0 (c hr-ID scaffold_2; pos 14480700 to 14481297 reverse strand)

SEQ ID NO: 92498 - DNA, 410 bp, Eucalyptus grandis
  Intron number 1 from transcript Egrandis_v1_0.039857m (loc us Egrandis_v1_0.039857m.g) derived from phytozome v7.0 (c hr-ID scaffold_2975; pos 899 to 1308)
atctcttcagcgggtaagtgtgatcgctcggttgatattgctttacttgtatagcttgcggaaagaaaagattggagaattggcttgcatattaagatgctcaccacgctctttctgagatccaattaacttatggggatttcatctttttcttaacctttttaatcgccatgcatgtgtgtagatcgtactgtttctctctgcagtcttcctcatttttatttttatttttatatcttggttgattgatgtctccggtgacctttttgtaacatcaaagagggagtcactgctgccggtcacctctcccctccccccatctataaaaaagaaaaaaggcaaacttcatttctcattttgtaggtttaaaaaactagagggtttcgttaccagacttgtggatctcttgc

SEQ ID NO: 92499 - DNA, 382 bp, Eucalyptus grandis
  Intron number 3 from transcript Egrandis_v1_0.053666m (loc us Egrandis_v1_0.053666m.g) derived from phytozome v7.0 (c hr-ID scaffold_5; pos 7058615 to 7058996 reverse strand)
caggaacaagttcgtcaaagtatctgattgcgctggtattgtctgttcttaaatatttctctctcttaatgctggtgtttccattggattgaaatttgacaactcgtactcgtacatttgcaatgttgtgctcatcatctaactgtattatcgtataatccacttggttttccttttaaagagatgagaagaccaaagaggacaagcataaacagcagacgatcagactaagcccatcgcggataattattagaggttggcgataaagtcctacataatctctctcttaattgcaagtaaatgctggataaaaaacttaccacgtgtgtttcttttgttttttttgtttttcttttgatttctagaattcaagaagaataaa

SEQ ID NO: 92500 - DNA, 630 bp, Eucalyptus grandis
  Intron number 1 from transcript Egrandis_v1_0.002046m (loc us Egrandis_v1_0.002046m.g) derived from phytozome v7.0 (c hr-ID scaffold_5; pos 15944094 to 15944723)
ccgccatttcgaacaacgcgcgcaagaggcaccaggtcggccgttttccttttctctttctttcctcccgttctggataatggcgaggtcgatcgcctgaaaaaggctctgcggatggtcaaaagctagtacattgctctcggatgtggggaaaaattagagcctttgctcgtaattcgagtttgaggtggaagtgagtccttgtttctgttcaaaatttgattttgatcatcccaatgcttgagttgccgggaagcgaattgtcgtttcgtcgttagcatcttggaaaggattgcttttttaattccttagtcgtggaaatagatgaattatctttactgagtaaggaggacattggaggttacttggcagactgttaggctagctttctggttgttctgcagtaaagtgtatcaattgatgaatgcaactagcgagaggttttgtatgtgtctttctattattaaaatttttaatgttgttgcctcgtggtctgaatatttcagttaaatatttgtcgaatcgatgaatctcgtcagagcactcttcctaagtgttatttttatttatttatttatttttaatgctagtgagcctaacccagtagagatttgaatttagggctcaaat

SEQ ID NO: 92501 - DNA, 958 bp, Eucalyptus grandis
  Intron number 2 from transcript Egrandis_v1_0.045544m (loc us Egrandis_v1_0.045544m.g) derived from phytozome v7.0 (c hr-ID scaffold_2; pos 9350474 to 9351431 reverse strand)
gtcctcatcctcgaagctgcagtaagtggatgggggagtttttttttttttttttcctgtttttgcttcttgactgagttttcatatctattgttttgcttgatcttcctttcaacatgcagaggttggtatatgtgtcccacaagatccaatagttaaaaagtattaagtgaagctggagctacaccaaattcacagtaaaaatttcaaatgttggaccaaaataacttgcttttttttgtgggattttcttgtgcatacgaccaaacaagaaagaaagaaaggaaggaaggaaggaggaaggaaggaaggaaggaaggaaagagagaaagctcccgtctattctagtggtgctaaaatctgacgaggtgttcaatcgaaataggtaacattgatcgatttgaactatacatataattaactctatcatgctatatgttttgattgtgacatgaccttatttataattagcataagcactataatgagtgtggatccaagcatggaccatacatgctttgattcgatacatatgcatgcttcccactttctgccttgcttggtgttggcttcaaagttgaagaactagcacacaacagtgataggagttagaaccaattcaaaccaactccatttgatttttttacaaatgcttttcgcactctctcctacctctttctcttatcctccgcaatcgttgttttcgaaagaacagaggagttgacagcaaaagctgtatatataattcagaaaactaaaaaaatgcttaatacatactaaaacttaaccataaacccatgttgcccacttatagcttgccttgtccacaaaaccagcaacaaactaacagaatagctaaaaaagtatcaaagtcacagtagatcaaaccatcgaagcatacttccctcattgggtacgtctagagctccaagaagagattggactactcaggatcaca

SEQ ID NO: 92502 - DNA, 774 bp, Eucalyptus grandis
  Intron number 1 from transcript Egrandis_v1_0.021508m (loc us Egrandis_v1_0.021508m.g) derived from phytozome v7.0 (c hr-ID scaffold_3; pos 7109465 to 7110238 reverse strand)
aggtattttttttctttaaatttcgtcttttgtttttgtttttttattcaaatttattgtgggagatgttggttcttgttttctggggctgtttgatgggtggttgctttgattcttgtgttctttctttggatatgtttcctcgctttggtagatatcaatgatttcatgagagcgttgtgttgttttcctcctccttgttttgtttccctgtggttgatccgtccttaatccaacggttggtaaaagtttagctcttgagaatatatgattgttttattagctaatggtggctcggtcatcaatcatgagaaatgtttttcccaaacgttgagcgtgattagtagtggttaaaatttcaatcacgaacgatttgcagcggaaatgatgaagagtttcgtggcaaaatggtgacagaaggtagaatttgcgaagaatgctttctttggtttcccaaatcaggttttaccttctgttccgtcaattttggttgccatctgtcctcgaaaacttttcatggtatgctaaagctcaactatcgaaggaatgaatatgccggtgataaactgataattgtgcattcgggaatccttgtgctggtagtggtgatgactctgagaatctctgtgtgaaaagcgttcctgctatttgttttttcagcttgcgtcatttatgttacatgatacatatgcagatgcagatgatggagttatttgcccctgataactaaaactttccttgattatttactggtaaattctgttatttgcagtt

SEQ ID NO: 92503 - DNA, 972 bp, Eucalyptus grandis
  Intron number 2 from transcript Egrandis_v1_0.002988m (loc us Egrandis_v1_0.002988m.g) derived from phytozome v7.0 (c hr-ID scaffold_3; pos 40751477 to 40752448)
agaagattgatcctacaaggtactctttattatgccagcacttgccattcgacatattcttggcacttatggtgtttcttggaatgtgcattccacatttgacgacaatatcctctctaattcgtgttcttaacttaaagatcatcattgtcatagcatggattagaagctcatgatgtgcatagttaactaatttttcccctgaatttggtcgatatagatgtcattgagtattaggcaaataacttgtcaactttgtccccgtcattgtggttgactctagatagaaatcagcatttaacaaatgcaaactcactagaaggcagagaaaccgaatatttatcttgaaactctaacttgaatatatttcttgaccctgtttacatctcacgtgcatctatcagattgtgaaccagtatggagagaggatgggaggaaataaaactttatgagtagtttgttgttatgtcatttatggtcttttgaagaggtgtgtaaccttgcttaggattgttacgaaggtttcttgtacagtctcagtcattttcttggcattgcatttctccatcaagcatagttgaaatggtgctttatggaattagcagcgactttagaaacaatcttttcaggtgtaaattgttacattgtgatgaaccaatatattaaatccataatcattaagttgttactgtatggtcggcaaatattttgtaacgcatagccattaggtcatgcactgacacagatattgtcaatcaaacaaaagaggagaaagataaactcaattactatttggttatccttgcaagaagtacctcaattcattccttcatcagcgaaatatcattcaccctcctactacatgcctagtcccctgctcagatgaacatgttggttgctattgctgtattgtcttttattactccttggctcattgaattgggttgtcatccagtgaattggtaacgtctt

SEQ ID NO: 92504 - DNA, 308 bp, Eucalyptus grandis
  Intron number 3 from transcript Egrandis_v1_0.051228m (loc us Egrandis_v1_0.051228m.g) derived from phytozome v7.0 (c hr-ID scaffold_5; pos 7291214 to 7291521)
ctgcaattgagctcagattctcttgtgttcgacaggtgtgctatataagggctcgcataccctctgaattgccatgtgtagggtctaacaaattgcaactcaccaggaagcattaagtttctgaaaatttgaaattactctagataactccatgtcgtgctggagtatatcacattgtaatggaagagcaaaagatattttaaatagtagaacctatcctgcttcaatgataatatggaataatgcatagagaacaacaaataatggatttgattttcaaccctgtctatttgttttagagactacga

SEQ ID NO: 92505 - DNA, 1009 bp, Eucalyptus grandis
  Intron number 2 from transcript Egrandis_v1_0.040645m (loc us Egrandis_v1_0.040645m.g) derived from phytozome v7.0 (c hr-ID scaffold_3; pos 23774753 to 23775761)
ttttgtgtcggtaatccaacttcaaaggctgaaaatcggaggagatcccgaggctctgttgtttgagcattcgtcaggtagtcgacaacgtcttactctttctccgtttcctgttctgattgctccattttcttttgatgagttatgtaagagtttctatttttgtttgaatgtagcttcgagtttgactaccgagagacatttctgctattcccagatctgggattttgtgtatctctcctccgtttcctactccatcagtctcttttaaaatcctcttgagatgaaaagaagagaacccactcattcaaaagattcgatctacgaggcgtcttcctcatcaacctctccacttttaggtgattatgaaggaaaaactaaaaggccaaaaggaaattactacgatgtgttcttgagcttcaatgggaaagacactcgcaaaaggttcaccgatcatctctatgaaaggcttgtcaaggcgaaaatttgtgtgttcagagacgacgataagctccctgttggtgggaagattggtccggaacttcttcgcagcattaggcagtccaagatctcgattccgattatctccacgaactatgcttctagcaaatggtgccttcgggagctagcttggatgttgaagtgtaagagaagcggagggcatatagtgttgcccatcttttacaacgtgaatccctcgcatgtgcgccatcttacaggaagatttagaaagggtatcgaggcacataaagagacagtatagacagtatagacgaaaagattttgaaggaatggaaaaaagcgctcaaagaattgaaggaatggaaagaagcactccaagaagttggttctttgaaagggtgggaatctaagaaatataaaaacgggtacattattctcaaccaaatcgttgtttaatttctcacaaatagattttttttttttgaaaaaggatataaaataaatatatatcccctcatatgctgaaattcattgttatttgataggc

SEQ ID NO: 92506 - DNA, 576 bp, Eucalyptus grandis
  Intron number 1 from transcript Egrandis_v1_0.019051m (loc us Egrandis_v1_0.015685m.g) derived from phytozome v7.0 (c hr-ID scaffold_3; pos 17576463 to 17577038 reverse strand)
ccatcttccagaacaagagccatttcctcggaaaggtacggcctttccgggttttatggtggaaatgtctctgcttttaggtccgttcttgttgtgggtttttgctgttctggttgttctgtaattggttcggttgtgttgtgggtcggatcaagtcgagtccttttccatgtttttggatgtctagtggatgaaagcttaaaactttagtgttcttttgctgcggaattgtttgctttgttgggaaagaagggagttcatagtttgttgtcaagtgaagcttttgctggtgctttcaatttctgatgtgtctgagagaaatttcgtttcgcgcatggatgatatacaacttagcatatgcaagaaagaatctgttcgcactgttgggatgaattagtgacattttgattatgtgggtttcttcttgtccttgggggcagagtttaggagtgttgaagttctttcttttaatcatgagctgcaacagaactggaaaacacatgaaatgcttttttttttcttttaaatgttggaataagcactgacttgatgaatttgtggagaagacggtgctgg

SEQ ID NO: 92507 - DNA, 909 bp, Eucalyptus grandis
  Intron number 1 from transcript Egrandis_v1_0.012827m (loc us Egrandis_v1_0.012827m.g) derived from phytozome v7.0 (c hr-ID scaffold_5; pos 2103278 to 2104186 reverse strand)
aggagaagctcgagaacgagctcaattcgtatcgagtatgtcggtttgttctgtcttttctaactgttttgatttgttgcttttgtgtggttggcggttgtgcgctttgtgaggagcgtgtttgttcgcgtgtgagatcgtagataggattgggagaaggaagaaaaaccaatgttccgtgagattttggaaatggatcgattattctgctgtgattgtagaaagatgcttgtggaacgttcatagcatgtcagcttgatagacaagctttagaaccattttgtggtacggtattgttttcactcaagcctttgttctggtgaatgacttttgatagtgctgatgttgcaaaagcaccggaattacaaatttcttttcctgtactgattcttgaagtgacgtgggccaatatcgttcggccatgctcgtgctatttgattttgccagttgtcatatgactctgattgttttgttgtaaactcattggtgattcactctgtaattggttatgttcgtctgttattgatgattatggagcagcctttggtattttggttgtgtcacggtttagcagttggttggttccggaagatggttttgctcacaggacgagcttgaaatcaaagtcccctcctcagggatgatgttttattaagctaaatatgctggacagctgatgattatggcttataaggaggaaatagatttaaatatcacccctcttcatttatttgtttacgattggcatcctaatatggcactatgaatagacatgtgtttctgcgtgtctaacatctcatcttaattgggtgcataagcttaatgattttaccatttcctcctatctgatggtgcatctaacatggagtatcttgtttgcagacaaatctgatcaaggaaagtataagg

SEQ ID NO: 92508 - DNA, 710 bp, Eucalyptus grandis
  Intron number 3 from transcript Egrandis_v1_0.025125m (loc us Egrandis_v1_0.025125m.g) derived from phytozome v7.0 (c hr-ID scaffold_5; pos 26999101 to 26999810)
gaggtgtccatgtttgagcatggtgggcattggaagagcgggcttgtcgtcaaaggagttctcattagacccaagaataggaccgtggtaagtccactccacttcatatccttcctaccctttattcctgttaccgatgtagatatatatctgtgcgtatgtatgtatgttcacacgcatgtataattatatcttacatcatttacatgtgcactgagaaatcacttcttacaacggttttgcatcctaatttacttgctttttgtgtatgaagtttcgataattaaagtgcattacgtggatggtgaattgattcttcgaattaacttttgatttgcattagataggagaagtaggcgagcagattgatgtgtaatgtcgtcctgataattcaatattgtggcagaaagactgggtggaaaaggaatcgaagaagaattgcttcatgatatatgcacgaggcgtctccatcacatgggctgagaacaactcttactggcaatggttgaccgaaaaggatgcacctaggtgaaaaaacgcatataaatttcaccaatacttatgaacttatgtcgttcaatgctctgcttaatcacgtcaaaattttcgcagcgacgacgccccggtggaaatggccgagctcctcaacgtgtgctggctggatgtgcatggtaggttcgacgtgtcgaagctgtccctggggacgacat

SEQ ID NO: 92509 - DNA, 465 bp, Eucalyptus grandis
  Intron number 1 from transcript Egrandis_v1_0.001742m (loc us Egrandis_v1_0.001742m.g) derived from phytozome v7.0 (c hr-ID scaffold_3; pos 58567712 to 58568176)
cgaaggtaacccattccatgctatcacgttccgtattttttattttgatatataatagggaatgtactttcacattccgtatttatgggcatcatgcagtgaagtggtttgtttatttctagatttttctgagaagaacgcattcacactgtataatgattgtatacatgcttttctaccttctttttgttagttttttcgcccaagattacacaaagtgaacgcactttcaaacaaaattgatcaaattacattgataataatttactggaattacaggggaacaggacagtcctttagttacaagcacaatattttagtcatggaattaacaatttatgaggaaatgtgacctactagtttccgtaattttactcaaggagatcggttttgctgttaatatacttgctgctggtttcacaaccatcaggagctgcacctcgaccatcagaagctgcacctgga

SEQ ID NO: 92510 - DNA, 583 bp, Eucalyptus grandis
  Intron number 2 from transcript Egrandis_v1_0.030152m (loc us Egrandis_v1_0.030152m.g) derived from phytozome v7.0 (c hr-ID scaffold_4434; pos 327 to 909 reverse strand)
ggcggtccaccactgtattcccagaggaaaggtattttttcctgctttcctattagtgttgggtagcgattcgcatttccatttgaggctaccaagatgtggtgatgtccatcttaatggtctgtagaataatttgaacatgtcggtacagctatcagatgagattatgtgtctacacaattagaagtcatagtggcttccagctttgaaagtcgaggcttcaagaaacaagtagagattttactaaagtcatgtttaacctctcctcctatgattcatgtctatatgtttcaagccttttgtagcattttctgtttctgaagagtttgatgtagttgtgtctgatttacattgagcatcttcgacatggttgggacaagtctcgtttctctgaagctcatttggtttattctatttagagaactcgttcttttgatctgattttgtccccattcagggatattgatgactgaatccccgttactttaatgacactaatcttggactacagctaaacatgtttatttcaaacattgctgattcggcaggtcatcctgcattaattgggcgccatcgacccttt

SEQ ID NO: 92511 - DNA, 833 bp, Eucalyptus grandis
  Intron number 1 from transcript Egrandis_v1_0.037761m (loc us Egrandis_v1_0.037761m.g) derived from phytozome v7.0 (c hr-ID scaffold_3; pos 32552657 to 32553489 reverse strand)
caggggcggtgaaggtaaatattatcagtatggatgctcaatttttgttccattggaaagtgaaaacttgaggtacttaggcaattttgattgtccacccagaggatttgggatctgaaattgtcgtccaacaatgggcatcatctatccaaaagcttcctgaaggagactttttttttttaggaagtggttggagggggctgacttaggggaaagttataggacagtaaataatgcgcaaatcatatgatttcaaatttctcctacaaattatcctatccagttgagatttaagttctttgtaaatattctttcactaatctgatattaggtgaaaccatcttttgtgggtcattttctgtaaaaactaccagttgttcaaatttctaagtgttacacttggccttggcttcgtggttgttgtttgatcaaattatacctgatatgatgacttaagagaattaatgggatcagatttatgggtagtgaatgcagatgaagtggatcaatttgttgcaacctgcatgtcgttccccttttgatcagttgatttatctatgtaagtttgaatggcaagtaggtttagcgcaatggttgatagttagcgttttagataaatggcttatctgcgtataggtattggatattattctttccttgcactctcggcatgtcttttttcaaaaacataagtcaatcaagttgcatcttatccctttcttcctttattattgtgattttcctatcatggttttacgatgactttttcaccaacaattttatattctctttttccagctattgctgtttctcgagaccataaaccggatcaa

SEQ ID NO: 92512 - DNA, 738 bp, Eucalyptus grandis
  Intron number 1 from transcript Egrandis_v1_0.029804m (loc us Egrandis_v1_0.028475m.g) derived from phytozome v7.0 (c hr-ID scaffold_5; pos 55444145 to 55444882 reverse strand)
agctccactcgcttgttcctccacagtgtcctagggtctctctctcgctctctctctttcactctctatctttctctctctcccctctatgttcttttcaaggttctcatctgtcaaggtatagttgggtcttatagccaaattttaattttctttcttatactaaattggtcctaattatttggaacctctcatctttctgctccttattttaggtagaagcatggaagatcattccttcatttcaaggttttcagtttcccagatggtattttagtcatttatacatgcccttctggcccttttcagtcgaaaatgaatcagaagaaactaaattcccctaaacacaaggaacttatctagggtttagtctgtctctcatttggtcaactactgattaaacacaagaatttggcgatgtccccacatttgatcttgccggaaaatgtctagcagggtgtagattgtaaagtggtaaacatagttaattacaatttcaaaaaaattaatcacaagatttgggttccgtgttgacggtagtttttaagacgggattcagtatgaggttcgccattggaatgtgattagttttgtggatgaggggaagtttagatggtgtcttccctcagttcaaagtctctgttgtctcaacaatatttgtcaatgtaatcttatcaaatttaagttaacaattgtcctttcttgcttatgttttggttttaggaatcaacattgtcg

SEQ ID NO: 92513 - DNA, 919 bp, Eucalyptus grandis
  Intron number 4 from transcript Egrandis_v1_0.012650m (loc us Egrandis_v1_0.012650m.g) derived from phytozome v7.0 (c hr-ID scaffold_5; pos 73121108 to 73122026)
caagatctgtgaagtccacaatccttcattttcaagtatgtttatacttccatcttgtgatcttatcttctggttgtgaggatgttgaattctgcaagttgattcttgttggttactccccaagtttcatgtagtggaatttcctcttctttgttttttatttttttggtctgtatcctcttctccttaagcaggtgtacttgaccaggaatttcttttggaaacttatgaatgtacatacgttcttggatgagaaattggctgtaggtttaatgtcatgtcaccaaactgatagtgagggacatcctataaaaatgggaagactgtagaactcgtgctttcccttagctgtgagctgctactattttttggagtcctaactttgaataggtacagtatgtgcatcaggtgcttaaactttaacaggagcttgacaatgttgcatgaagttctgcatgcaattgttttcaggataagagataatttaggtttggactagtcattaatggcaatgtattttgtggtgaaatgtatttatccatgattgagtgaaacttattttggctgttgagattgttgaggatacaaaagcattaggcttcttttttgtttgtttttcaattgtgatgttttgcttgtgtgttgtctcctgttctgttcagggggaaccaactttaaacttgacagtgtacatatattttagcaactggagcttgtgtttgctttagagtacacctcaaatttggggctgttattgccaattgctattacggacatggctacaaactgtttcttttctctttcagtttcaggaattcctgacacatatctcgtcatcctaaatttttgttgttaaaacctctcttgaaccattacctggaattgcagttgagaaacttggtttggtccacaacaaagc

SEQ ID NO: 92514 - DNA, 979 bp, Eucalyptus grandis
  Intron number 1 from transcript Egrandis_v1_0.022040m (loc us Egrandis_v1_0.022040m.g) derived from phytozome v7.0 (c hr-ID scaffold_1; pos 34776282 to 34777260 reverse strand)
cggagtcttccgcggccgagacgagcttgtacgaggtgagcttgggaaaactcttgcgtcccccctccctgtcttttgcctaggtcgtggttttgggatggattgatggggatatgatgtttggtactcgtgatgctcgatcggattggattggattggcgttttccatggtcgagtccaatttcggtgctccgatttctcctgttctcgagttcattactcttgcttggcggggatggataattaaggggctggtgcaatctctagtagggattttgacctaggatttttgctaattaggtttaggtttcagcgctaatcgctgctcacatggtgaaagcggaggtttactttagctgggagtgcagatgtgcatgatgagtaattgctttaagctgaatgactcaactgtgcggttcaagagaagatgcagtatttgttttttcatttcagttgctgagaggatgctgtaagcttcattcgagaatttcaatgttggagagccgcttagaaaaggaactgataacgaaactgagagctgctttgccggttcattttcctagttttctttttcatgttcttagatggttagtagatgtagcttttgagcttctggaacttctcttgattggcatgctgtcatttctgatgcttcgtttccacggaagctgattactctgtccacgaggcaaccgtcaggatcagttctttatcttcagttttccttaggaagtttatgatccgtaagcactcattagccttagtctggtacttccgggcaagtaagcttcctctttctaggatcacgttggctgcataaggatcagaaaaaaggatatgttcatgtattgggaataagagtgtaatgcatttgccatgttttgtagctgcatttgcttaagggtgaatgggaggttattcaatgaagatgttatgcattgcagattcttggtgttgaaaggacagcaactcagcagga

SEQ ID NO: 92515 - DNA, 725 bp, Eucalyptus grandis
  Intron number 1 from transcript Egrandis_v1_0.044876m (loc us Egrandis_v1_0.044876m.g) derived from phytozome v7.0 (c hr-ID scaffold_5; pos 71824748 to 71825472)
ggacttgtaatcatttctcgagtccaataccagcaatttgccgccaccgattgcagccgccacgatcgatcctccttttcttcctcctccaaatgcccaagtcataaatggttggctcaattttacacgaactggtgatttagaattcatgaattacaattttcatacagggtcaatgcctacctcatctgatatacatgaatttgccagtttgcatgtatcaattgggattagccgagccaaatttctgatgtccgtgctataagaagaatcgtttgaatctgaaatgttagcaatgattggtttccatttcaaattagatgaaatgcgttgtttggttttggcaggtaatatgtcgaagtacctgcgcattgtcattgctgcagtaggttcgacagttctcttcgtggtggttatcgtctgtgtgttttgctttattagaaggagaagaagtaatccatgggaggtctcatctggttagtgaatttatcagttgttctatgttctgtaattgagttgtcattgaatgacttcttatccagcttagcacaaggattaaatagtgtgggagggacaatggcgcgattttggtctatattccctttgtgagagacggttgggaatctaaaaccaatcctaaatgtttgttaaagtggagaaagtccaaatgacatgttaagaacaagaaaatattcacttttttctgatcggatcctggagatctc

SEQ ID NO: 92516 - DNA, 629 bp, Eucalyptus grandis
  Intron number 1 from transcript Egrandis_v1_0.031399m (loc us Egrandis_v1_0.031399m.g) derived from phytozome v7.0 (c hr-ID scaffold_3; pos 60083145 to 60083773 reverse strand)
agcacaagcttcggcagaatatcgaagttctcaaggtactcttggactgcctgcaaacttaacgtgtttcagctacattctgatgcgggacacctcaagatttgtttttaatttgttatttgattgatttagggttttattattgagtattttctttctttgtccaacttaattttaggactttttgaattttggataacattctggtttgttaagtagttttattttcacttttaataattatccgatcaggtcttagatatatcttctggttttagaatatattactttccgtttcaggagtcatatgattagaatattttgtatttactggattttggttttctagtattcaatcgttttgtttttcatttgtaatacaacttatccattgatgaattaatgaaaaatcgagagattttctctgttgctcttcatgcatgtgcgccatttggcatgttatggctgtttattagtcttggcgaatttccattttgcgtaattacctgtttccagtgggtcactttctaattcacacgggtctcggtcacatgaacttcaaccatacaaatacacaaaaaggttgagctcttgtcaaaatttttcctttttggcaggtcaaagacaag

SEQ ID NO: 92517 - DNA, 764 bp, Eucalyptus grandis
  Intron number 1 from transcript Egrandis_v1_0.005207m (loc us Egrandis_v1_0.005207m.g) derived from phytozome v7.0 (c hr-ID scaffold_5; pos 51170233 to 51170996)
cctccaccaccaggtaagttggctcttgttcgggagttacgtacacggcgtttcagtcttttcttttctataaaaatatgcaggtttcgcgtgagattcacccaatcaaattcttcatatagcttaatctacatgctctgttaaaccacaagattctttttattaatatatgctcagtagatcatgtaatttttaaatgctttttggcagaaggtacgggttgatccatatttttggcagaagaatatatgtttaatcattgatgcatctacatggatactagtcaactatcacagtcatgtcatctaagggagagacagagatctaaatcgagctagggttacgatccatagccgtgacctgcatgtatatattggtcctatatgtgcacattgggagcttctaataactctgcaaaaattttgcaaacttgcattggatattccttgccccactctgtttctgtaaaccattttaccgtctttaccctgattttcataagaaattgatgaaagtaatgaaattgaggtcaaaaaggcatccgcgaaaacttaaaaatttagggaaatgtgatatattccgaatcttattaaatgaaaattggtgggatgacaaaatccataaatccgaaacactttcccctgagttatcagagaatcgcgtgatgtatctttcacatagtaagcagcaagcaatgatcataaacgtaatgtgcctttgctcttgcagttggaaagagcaattcgacgaggactgggatcatt

SEQ ID NO: 92518 - DNA, 709 bp, Eucalyptus grandis
  Intron number 2 from transcript Egrandis_v1_0.031638m (loc us Egrandis_v1_0.031638m.g) derived from phytozome v7.0 (c hr-ID scaffold_5; pos 44425951 to 44426659)
agtacacctgccaatctgacttgaaggttgaagaattggtactctcctttaattgtaaagttggatgaaatgttagttcgtccctgtatgagcaggagtgatggaccttaagatgattaaatttgacattaggaatgtaatgaactcaaaagttaatgcaaagagcagttttaggagtttctcattactgtacaagctttgggtttgccatagcgcctcttatatattacatatattcaatgtaaaactacgttatgcatattatgtttctcctgactattatcttgtcatttcgccttcagcatctttgttgcttcaattactctgcaagatggttctgctctggtacaacttatgatgaattcacagcttgtttaaaatcacacttcttcaatttggagctacttattttttgccctgtaagtctaacgaatgtgctagttaagggtccttccctggcttatctgcacgctgatgttctgcattttccttttcctgagattacttctggcaatacatgcttggttcaatttagttcctattttttagtgtgatggtagatacagagaatttttctcgacacttttgcatattattattgttctcataactaccgacttctgagcatcagtgacttccttgatcttttcatgaattctggatttcttctggaaatgcagaagcaagtctggtgactgccaaggcgcca

SEQ ID NO: 92519 - DNA, 975 bp, Eucalyptus grandis
  Intron number 2 from transcript Egrandis_v1_0.019421m (loc us Egrandis_v1_0.017446m.g) derived from phytozome v7.0 (c hr-ID scaffold_1; pos 17887773 to 17888747)
cttcgtcctcgtttactgcactgccggcatttctggtggctttctcttctccgtctctgttttctggtttcattagaaaatgttgggtcatttcaacatttttttcaaaaatttttctaatgatttgacctaaattatataaagcgaacataaattattttcccttgatatgttatattatctcataatttttttagataatattttaaattttgacggatacaatcacacccacatttccatatgctttcatatgataattaatctgtccatgatttttcattcttgatattttcaatattgaatcgaattgaaattttacttgaaaaagacattagaaaaaaaagtaagaaaattaagggactgcttcgagtgatttttattttttaaacttttctagaaatatgatgttagaatttcatttcacgctagacacatccgattttgagataccctcttaagctaagactatttttctaatccaagtgaagaaaatagataaatcgaattctacttgaaaaagagccagaacatagacctaaaaagcaaaattcatcccgatgatcgcatgcttattaacctcataatggaaactctacctcaaattacattagtcgatcgatgaagcaccacaacccacgttctccttgtgaggaaagtggatccatgttgatgtagtggcacacaaataacgctgcagtcttaaaagttctcaatttatcgtaaatttatcaatttaattttaaaattttcaatttggtcataaatcttttttatactttactaattgagtttatttagataatattagcgggaaattgtagccaaatcagtagaagtgtaatagactttttgacaattttccccatatctttgcttacagctaaattgggagtaaacgctaatacatccttgggtattgttgtgttgtctttcacaggaggtcacataaacccggcggtcaccttcgggctg

SEQ ID NO: 92520 - DNA, 737 bp, Eucalyptus grandis
  Intron number 1 from transcript Egrandis_v1_0.012761m (loc us Egrandis_v1_0.012761m.g) derived from phytozome v7.0 (c hr-ID scaffold_2; pos 57228204 to 57228940 reverse strand)
tcgacaacgtgcaggacttacctgtggctgttcaggtatattttttttccagattctattctcgtcaagctattaaaaaaaaaaccagaaatagatatctgaattgtttttccctcacttggttgatacatacttgcaagcctcgttagttattttgccttcaatttagataagagaacattagatactatacattaaattgtaatacaccacgggtaactgcataaaccaaacttttgacatacctacctcgagaatgggtgagatacagaaattttctatgaaattttgtaaattaaactgcatcatgcaccaattgatcaggagggttatggtccctgctagcctctatcgatacatagtatttatggtctggtgcaaatccgatatatttttgcatgcacattatgcatcctttcttggaatatatttacttatatataaatatggccgatgaggtaaatggagataactatgaattcaagtccgcctatgtttggctatttcttttgatgcactctactcgattttttttttaaacacaacatatatatatatattgaccgacgattttgcgaaaaagggccgataacttattttcccataatctctcaggtgcaaacttacttgcaactttatattctttactatctgaacatgcaacatcttccccgccttacgatatttacgttcttgacacaggtcaacttcttcgagtgcggtggcttagcccttag

SEQ ID NO: 92521 - DNA, 662 bp, Eucalyptus grandis
  Intron number 1 from transcript Egrandis_v1_0.005054m (loc us Egrandis_v1_0.005054m.g) derived from phytozome v7.0 (c hr-ID scaffold_3; pos 47583682 to 47584343 reverse strand)
ggtggccaacaagagaagtttgtaaggtagtacacaaaatagccatattttccatctgaatgcaatgtacagtgaaggtcctatgttggatgatggctaatagctttttcgtaagaaaaaatttagaaaagtggtcaattttgaatatatattggtgaaggctgagggtaaatacctgcatatcaatcaggcattttgtggaatttggtaaattatgggcaaacatttgagtgcttatcattaatttcttattcctgtaagtactaatcgccgaggctcttcagaacatcgctttattcttgtcttgaatgaaagttaacatcgtcaacttttctttttgtatgtatgagcgagcatattgtcatttggaaaaaaattgaatgttgggcatatttgatttcagcattctgagacagttaaccaagaaaaaaactgtggcttattcatctaggttcatatttttgctttctgaattttgaggcaattttgaagtgtgatgcttgctgagatttttaatttttatattttacttcttttaccattccatgaatagagttggactggatgctttaaaatgataatgattagttggtctcttccatgctaacactgtttttaaacttctaggctggacgatttggactctagagtatcatcatctt

SEQ ID NO: 92522 - DNA, 586 bp, Eucalyptus grandis
  Intron number 1 from transcript Egrandis_v1_0.020232m (loc us Egrandis_v1_0.020239m.g) derived from phytozome v7.0 (c hr-ID scaffold_5; pos 54753823 to 54754408 reverse strand)
cggccacaatattgaattgctagatcaggtataatttgcattttttttttcggtcttgattttgatcttttgatctctctctctctctctctcttttaattattcttttttgcatttgatatagattgtttctggatttggcatgttccattttggatttggcatgttccattttatcttcgattgcactgtttgatcgactaactttgtacttgaatcaagaagacaattagttagatcaacatgttttacggaatagtatttcgcttaggacgcattcataaaggaaataaaggaaataaaaaaaaaaaaaactgtttttttcctgctaatggattgttactgcttctgaaccttttttttttttaaacaccagaaaaaagaaaatgcaattacacaggataaaaatttcaacagaaacataagaggaccacgccgaaataatgtgcctaatctcattcaatatcgcattgaaagtccattaaatataaaaatccttagaatttaaagtccttaatatgggaagatcctcttcattgaatagtttacttgaaattctttctttttttccaaatttgattagggc

SEQ ID NO: 92523 - DNA, 411 bp, Eucalyptus grandis
  Intron number 4 from transcript Egrandis_v1_0.015749m (loc us Egrandis_v1_0.015540m.g) derived from phytozome v7.0 (c hr-ID scaffold_3; pos 4147975 to 4148385 reverse strand)
gaattcagagactccgctaacgagcagcggcagcggtacctccccatctcgtctcgtcttcttccctttctccttctttgcctcattttgatctaataatgatgagacaatcgttccatctgggcagatcgagctcaaattttaaattttttgctgaaaggcacggtcctttttgttttgcttagatcaatttcttggcttttcttagccttttagcataaatgattgctcgacaatgtggttaagtagaatctgccattagtacggacggagtacttttttgtagcgtggcttggaaggagtatatcgggaggaattgaaatggtgccgggtatgtgatctttgcgtgcattgataagttttttctgtgtgatagattgctttcggacatctcgagattggaagccaaag

SEQ ID NO: 92524 - DNA, 935 bp, Eucalyptus grandis
  Intron number 3 from transcript Egrandis_v1_0.024900m (loc us Egrandis_v1_0.024540m.g) derived from phytozome v7.0 (c hr-ID scaffold_5; pos 6066646 to 6067580 reverse strand)
agaaggctgtgggccttggtggttggcactggctggtatccattcattaactttttcttagtacatgttgacctaactaatggttccttacgtggtagcacaagtggagcaatattaactccttacttttaggtcagctgcttttttatttgctaaatctgatagtgtgagaatttccatcattggaattttctgtccttggtgatcacatttctactttggtcggctgccatgatccaaatactgaatagtaaatcgcgtcgttcttgaacatttgctttcattttaggaattcatctgatgtggttgatcaatattgaattagttgcttataaatcataaagagtactgaagttcagacgtatcggtgtttggtggttcccattaaggaaaacttcagcaagaagtgattgaacacgattcatgtttgattgaagatatgctctatcagtgtgatggatgattcaggtcaaaagttgtgctaagcctcggactttaaggtcttacgttggctcatatttgtaactcaagcttgtttcccttattcatctagatgataacagttacaggtgaagagcttaggtagttaatatatctcttgtctggcttccacaggatgatatagtcgtgacagaaatttttagagtgcttgcttttaagtgactgatttctgtgtgaaaaaattgctttgcatgtcaaaattgggttctatccgttgcataactcttagatttggatctgatggacaaagtttcttctgttttcccatctacttaaaattggtatcctcgtaaattaccatgctggttttctagtcatcttgtttatggaaatcttttaaatgaacttatattactgctttgcatttttagccgatgaagttttgaggatgtgctttaaaactatgggtgctttctcctgcaaggttctgaaaa

SEQ ID NO: 92525 - DNA, 749 bp, Eucalyptus grandis
  Intron number 1 from transcript Egrandis_v1_0.024900m (loc us Egrandis_v1_0.024540m.g) derived from phytozome v7.0 (c hr-ID scaffold_5; pos 6067885 to 6068633 reverse strand)
ggcgagctccctctcgtgatccttgtgtctgccaggtacgtgggcagtgatcaagtcgggttcttttgggttctcccgtcacgcatttcggtccccgagttgcgaattgtatcgagctcgtcgccactgtttgtcgagcggggagcgaaatgcgtctcggtgggtatcgagtgtttttgcgtcattgcgtttcgtcaacctgttgttatctcggttttgggttttgggttgaaattgattgggtgctgggtggcttcttgtcgtgtcattttggtttttcttgggaaaagttttgatttttttggatggttgggtcggaggagtccgagctgaggactctaaggttgatgttgtgggtaatcgaggcgatttttgcttgaacggagtagttctagttccgaatttggtgcaaccgtgtcttgaacggaggatgtttatctcatgagttatcggcactgtattgacgtagatcacaacgatgggttcttcaaaactcctcttttttttttttttttaatgaactttgtctgtgattcactccttctcgaactctcctaatcagtccttaaaaaatttgtgtcagattggtctctctctctctctctctctctctctctctctctctcgtgattctacattttagcagtcgttacttgcttcaatctgtttcactgtaggacatgaatgtctacatgacacgttgtcaattctttattccactctgcaggaaagcttaatcgagggaagcc

SEQ ID NO: 92526 - DNA, 794 bp, Eucalyptus grandis
  Intron number 2 from transcript Egrandis_v1_0.006361m (loc us Egrandis_v1_0.006361m.g) derived from phytozome v7.0 (c hr-ID scaffold_3; pos 4045037 to 4045830 reverse strand)
agaggcggcgcaaggaggaggagaaggctaagctggtatgacgttgcttccctttgcgctcgtgaatttcccgtcagtcgttctagaaactggttccatcgagacgtcggccggagagtttttccgcttttttctttcgtaatgtggaggagttttgtgcatcagcggtcctaagtggccttatctggagtacacaaattccataatttttacaaacctagtgcatatatagttaggcattttgcatcaacaatcggcagctagattgcatttggatttgtctccccattgttggatgtggataaattatcagtatatcatgcagagcaaatcagatggactgcgcacgcaagttcatagtaaacaatcttctgttttctgttaactctgttggatagatgtctttttagaagagtcttaatcttagtacaaagaaaaggatttgtttttcttccttttatttcttttggttttcttttcttttttctttttttttggggggggttggcacttttctgattatagttgcttgcttatttttgtcctcaaacctgcataaacgaagcctttaaatataaataatgcccaaggacacttattttgaataaagttgaatggcaaagatgattatttcttaagtagatggccattttagatcttgagtggatcaatcctggtccgactcttgttaatgttggtattgtcatttctttcaatgacttgaatcctgatgctaatttgacttgtacaaatgtgaaggccgctagcaaggcaagttcccagtctcagaaacc

SEQ ID NO: 92527 - DNA, 665 bp, Eucalyptus grandis
  Intron number 1 from transcript Egrandis_v1_0.052664m (loc us Egrandis_v1_0.052664m.g) derived from phytozome v7.0 (c hr-ID scaffold_3; pos 56491217 to 56491881)
actggacggagtgcctgtaagcgcaccccggcgagaaggcccgctgcagggacccgcgccggttcctccactccggcactgcatgtcccgatttccacaaaggcaaggaaaacagtaacacgcgatgcagaagagaaaaattaaaaaaaaaaaaactgcattttctcgcgcggttttgtttggatctgtaaatatatccggattcaggaggtgcccaggtgccccagttttggtatttggcgatttgtttaaagaagattgaatttttttacccattttggattattttaaggattctcggtcggattaaggaagatgggcggtttttccttttacttttattttgttttatattatcgatgcaagacatttagttaatatttgcaccattccgagatttaacaaacgaagaaaagtgaaatcttttggttaatttccgatcgggttttgatccgggtgaaatgagacatttttggccaaaatgtcgattctgattccaggccttgcatgttgtttgcatcattttaaaaattttaatcgtgaattatggaggatttttgggttttttgtgtgacgaaatttgattacattcagtttttattcaagtgagattttctcgattttgcgcaggtgcgtgcaagaagggcgtctcgtgcgagctcgcc

SEQ ID NO: 92528 - DNA, 858 bp, Eucalyptus grandis
  Intron number 1 from transcript Egrandis_v1_0.023595m (loc us Egrandis_v1_0.023595m.g) derived from phytozome v7.0 (c hr-ID scaffold_3; pos 29647375 to 29648232)
tggaccaagaggaagggcatatcgtcaagtgggaggtaagtaatttctttctcacttttcttgcttggttttcatctccctagatttttttataattttgaattagaaatctgtgggtgagatttgaggcaacggaatccagtgcaccaggagtgagatttaacaatttacgatagcttgttttctgtgaatgggtgaatggcagagggtgtgattcatacttgttgaattagtctggtaatcaatgaatgaatgaaatggttctgttttctagcatcttactggtaatcatgcaagagccttaccaattgagggcttgatcaaattactcatggggttgagctagaaagacgaaaggatctgagctggatggtaaatttcagaataacgagccgcacgatcaacttgattggtatttgtgtttcaatgcttatagaatagcacggtggaaatatcagaagacatcatcttggaattttataatcaggcctgcacatcactatgaattcctttctgtttcttgaggacagaacctatttcaaaactgagattttgctcgtgttcggtatatgatacggaacaaaggtgctttggactgataaaatgccttaggaaggaccagaattctgaaagccggcaactccattaacacggtgctgctgtttgtgataactacccccttttccaactttttcatgcgtgtctttgttcggtgtctttcctacttttcttctaatttaaaagcaatccattggttttgctactgtgatactcttaacttgaaactccagtctcattcctcatgggtctcattggagtgtaggcattgcaagatcgggtagcagaggtcgagggcat

SEQ ID NO: 92529 - DNA, 969 bp, Eucalyptus grandis
  Intron number 1 from transcript Egrandis_v1_0.011949m (loc us Egrandis_v1_0.011949m.g) derived from phytozome v7.0 (c hr-ID scaffold_14; pos 374622 to 375590 reverse strand)
tcttacatattgccgtgttaaaaaagcagcccaaggtatagttcatgccactacagttcatgattttgtggttgttcatgcttttattgtacaggatcaacttgtttggtttcttttaataggcctaacaatattttggttggaggataaaggagtgatgtagagatcaccttgtctgcagtttatttattggagagtaaaggcatgattgaatttatttcccttcgaacccctataaaattcagtttttagtgagatcaaaatctctaagttatacctaataacttaattcatcatcgtctattcttcgtttttactattgattagcaattttttttccgtctttcgaaatcggtcaatccaaacatattgtatgagatagaaactagtgcggtgcaagctaacatggacaatcccatacacccatagaataatcactttgtagaccggaaaattactccctgaccagttgaatgttatgtataaaggctataaatataactatctaagctagtcttcctcttcacagcttaataaatatacacgaagcaaattgtaattgaattctaaaccttttagttgatgtgattaagttctaaacttttatgaataatcatagtcatttgattcatcgcttatgtgatcatctatgttataactcacttgggcaactcctactcatcatgtggataattccaggtgaaaggactaaattacactttttgaaaagattttggattttgctacatttgttgaaatgattgtgtttgataaataaggtctagtaaacttttttcctttgtatatcagttgttggatcactagcattattcaaacttatggcatgagttcactttgtgcacaatggttaagctcgtgacaaagtactgattcaaattaaaggtatacatacttcattttgttccctatatttcttccagatcatcaagcagttgattaaatatacgg

SEQ ID NO: 92530 - DNA, 739 bp, Eucalyptus grandis
  Intron number 2 from transcript Egrandis_v1_0.030496m (loc us Egrandis_v1_0.030496m.g) derived from phytozome v7.0 (c hr-ID scaffold_3; pos 76776911 to 76777649)
ggtatggattcttattcctcttttgccttgtttcaatcgctttcgattcgtagggctgtgtttgtgggtgttgcgtttcgcgcttcaagactgtgcatatgccgattagaatgagacgatagtgtgcgcttaaagagcggtctcctcatgtccaaattggaaatctcgatggcaatgcttgtatgcaagtccattcttcctctgtttctgctttggccttcattgtaactgaaagtttcaatgtgcaatcccctttctgattgctttttggcaaaaccaatcgcccgtatgccttgcggtttatataatcatgtaaagccggcaatatagtcctcagttgttgaggaattcatgcagaggtttgtttgaggatctatctgctcgggtttacagtatctaggggtttctgtggttgccattgaaccttcttttgtctctttggatgactagactggtccttattggacagactaaggcttgtagccttgtaggtatatggtttctgttgctgggcaaaatgattcccaattctgggttagttggtgatgattttgagttaactggtaatgcgcgagattggctaaatggtgcaccgttaattgctctgtgtattctttttgattttgaaaggggttcagctacctgtctgctcattgtggcaattggctttttcagtttttcatgccatggttttatatgtgcagctattgcgacagtggtcaccatcgcggaaattctg

SEQ ID NO: 92531 - DNA, 510 bp, Eucalyptus grandis
  Intron number 3 from transcript Egrandis_v1_0.028408m (loc us Egrandis_v1_0.028408m.g) derived from phytozome v7.0 (c hr-ID scaffold_3; pos 14685929 to 14686438)
aaagaggtacgtcattcacctcgacgtttttcctggatagataccttttacacctttgcttttgttatgttttttctcagagttgcttcatttgctcaacctgtccactggttattagaaatagagttttgtacacgataattcggttcaaatccacatgaacttgtccttacgttcgttatttcattgtttgtggcagttgaagcactttgatctgtcattgcattctgatctgtactttcctttgtataagcgtgaccttactactggatagcaatcttagcacaatcaattctttcaccattacattttgttgtttgtggctgcaacttcattttctatcatttcgcctatagtgcttgatttcttttcccttgcaactatgcaagattttttttttctttcatatgatacttgaagctatatgatggcatttatcaattattgaagtcggctagttgttatcttattgacgtaaagttgtgcctttgggaatgcagctgcatctcg

SEQ ID NO: 92532 - DNA, 650 bp, Eucalyptus grandis
  Intron number 1 from transcript Egrandis_v1_0.002540m (loc us Egrandis_v1_0.002540m.g) derived from phytozome v7.0 (c hr-ID scaffold_5; pos 42519361 to 42520010 reverse strand)
ttcccacgcgaagtcccttcgtgcaatttcagccggttagtcaatccttcatgcaatttcagccggttagtcaatccttgcccttcctcagtttggtaactgcagcctgcaataattttgactttgtttgttaaaaaccaccccaagtctgctttgagattatgtacctgttgttacttttttctccactgcatgtgctgaatgtttactgtaagctgttcagtttagtaatattgctatacaatgagacccttacagaatgagttgtgtatttaagacaccccatgattatgtcaaaccattcaccaaaaaagttatggatgaacttcctgattcttttaccatttattgcagaaaagctagtaaccatttctttattgaccaaattgtacttgatatacacaaggatttagaagcttttgcacgatttgttataactacagtaaattgatattcttccttgaagattgtatctcacgtaatgtccattgagatgaaataatctcttccaagaacccaattaataggggtaaataagtgatatgaacagaagaaattggcaaagaaaattgccctgaatccagaaattaagtataatgatttcccctttttttccgttttaacagctgaaaagctgatcaaaaggaaga

SEQ ID NO: 92533 - DNA, 811 bp, Eucalyptus grandis
  Intron number 1 from transcript Egrandis_v1_0.007046m (loc us Egrandis_v1_0.007046m.g) derived from phytozome v7.0 (c hr-ID scaffold_1; pos 3244727 to 3245537)
ctgactccgacgtcttcaccgctcgtcaccatcaggtgagacagccggcctcctgtgcggctgcctgtgcgcggtttgttttggttgcccggggtgcgctgtttgttttggttgtccggggtgcgcggtttgttttggttgcccggggctggggagggggggaattagaatggggaatcgggtggagctggagctgctgtcgctggctagagctttctagttcttcgtttcgtttttgatcataagtctttccgtgatggggtgatcattcttttattgctcgatgatcggacgcagctgaagttggagattgaaagtttggttttttgtgttcttttttattttatctatggtgaactatggcagaaatctgttgctcggtgatcattcaccgtaaacggggtacgaaatgacgcacatgaccgggataaaagcacttctttttttttggctgtttgcatcatgaaggacggaagacttgctcgcgaaatgatattagtattgttgtgggtgtgaattcttctgcttcttcttcttccaacaatcgagcttaatgggtgaacgtgcttatgtcctgaaaataacttggagtaattgatcatgcgtgttcaacacattggatgaactgcctttcctttatctgtttcgggagaactataatttgatcaagagagcacccgatctttgtccttcaacgtctttgctgttacttttgttgtttttattgtgcatatttgtttgtctgattatgcttttttatgtttctttttcttcagcaaaactatatcattttaaaggaggaagatatacg

SEQ ID NO: 92534 - DNA, 883 bp, Eucalyptus grandis
  Intron number 1 from transcript Egrandis_v1_0.026172m (loc us Egrandis_v1_0.026172m.g) derived from phytozome v7.0 (c hr-ID scaffold_3; pos 77318274 to 77319156 reverse strand)
tgagggcatcgttgacaagcctgattttccttactgtgagttcgtctttctgattcttgatcgccatgctttcctttttttccccttctttctggagttcaatttgattttgcttttgtggtccaagaagactttttcctttcaccattcgatgaaaaagtggtgggttttttgtggaggctgtcgagtttatgagattttgatccggtcaagttcttgatcgattgtgtcgattggaagcagcatcgacctagattggctagcgggggttatcgtctctgatttgtatggttttaggctgaatttgttgttctctctcttacatttagttgggatgaagtgatcaggaagaagggattaaaataataatgggagaaacagagaaatgacatgcaagataatttggacgattgcaagggaaatgagttaaaaaaaaatggatatccttcatatatcaacatagagatgtaatatgagaaagaagaatatgatacacaaatccttccgaatccctccacaaaatgttcataaattatagtttcactatttttcctacctgaacatatatgtaaagttaaaaaaaaaaaaaaaaagagagagagaaacaaatttgagatgtttatcgaatttcaccattcaatttgatattcgactcatgattcataaatttgatactttgcttcatgatttatatctagattagtttatgccctatggtgctcctcgaaagttaaaatatcaagcatctttgatgaacacaatcagatcttattcatagctataaccttgattgttcttggtataaatattaggtcacatcccttcattagttagatgaatctttggatttaactttgctcttactcttttcatttgatttcag

SEQ ID NO: 92535 - DNA, 609 bp, Eucalyptus grandis
  Intron number 1 from transcript Egrandis_v1_0.041608m (loc us Egrandis_v1_0.041608m.g) derived from phytozome v7.0 (c hr-ID scaffold_5; pos 6913834 to 6914442)
atagtcagtgcccgaggatgtgaatttgaatctgattacctcttcttcatcgtaataggtgaaaatactctaaactttggtatgatggatgctttccagttgccttctttagtttctaccacttaggcaacttcacataatgatgagctccacatgaaatagagtttcaacttttcggatagcttgaaggcactttacatagatgggtttaccttaaaattcgattgatgtttctttatgttcaaatttatcaattttcatatttgtctttgcttatgaacaagttacttttctctacttttttggcctattagataaaattcctcatgatctagtctacgttcggatttcaaggtgaaaaggtttggatttgtcttgcatgctaattgtagcctttttcacttatcaggatttgaaggatcttagaaagtagttatactcagcagctgattattttgaattgtcttacaacagacacgattagaaacaaatgtgagacatataggttttcacttcattgtcgtgtattggatgagcattttttttcctgttgcacatttattaaatgacctagacaaaattgtagagtggtgaacacattgaaagatt

SEQ ID NO: 92536 - DNA, 880 bp, Eucalyptus grandis
  Intron number 4 from transcript Egrandis_v1_0.017557m (loc us Egrandis_v1_0.016591m.g) derived from phytozome v7.0 (c hr-ID scaffold_5; pos 11902799 to 11903678 reverse strand)
aaaggtaattgcttattgacacagtgttattaggcagcattttgcactgtgacagaattccaaatcatggtggccaaaagatagatttcatgtcatgtcttcttctctgctaattttcttcttattctgattgtgaccagaagtggcataatgcataggactgtgaggaatggcttttaggcattagttgcatcttgtggaaagggataaagatactttctataactactctggagagtctttaagtcctctgtatccaattactattcaaaccattcaatggagaattggctttattaaatgcaaaaagaagttctttcttttcaataaccattgttaagaatggaataagctgtccttagattgttagagttagatcataagtatcagatcaaatgggtagctaaatgtatgtgctttcactaattcttgtatctgatagagccacaggaatcttgagtcctttggagaaattgattgaaggaaatacagaaattacgtgttcagtcaagcatatgtgatatgccaccagtttcctttcttagagcaagtgtcttttcttaattttaatcgagcgtggcctcctgtatgctgcaattgctttatttacgttgctacagcaagaaatgtttgtcttgagcaatttgtggtcagaacaaggatcacagaaacaacatgatgctgaattgtggtctaagcaagtaaaattcccaagcatgcggaagataggatttctggctccgtgatttgattccttttagacaacaaagacaggatgctgattctattgggaaatcacttcctgtcttggtgttatttggaaacttaattgcggtgcttcattgacaggtattgcttcaggattccagaaaactacccg

SEQ ID NO: 92537 - DNA, 911 bp, Eucalyptus grandis
  Intron number 1 from transcript Egrandis_v1_0.012919m (loc us Egrandis_v1_0.008116m.g) derived from phytozome v7.0 (c hr-ID scaffold_1; pos 38170181 to 38171091)
gtagcgactgtgaggaggaagtcgttagtctggtatgcttagttattgtcttgttcttgtcttgttcatccatttggaacatgttctagttcgatgttatttggacagcatttaaagtcccattctttgttgtggcaactaatgctacactattgtcaaccgtatggtcaatttttaggtaaatttttgtcaatccaaatcctgtggttcacattatatatcatctagtattgctttaaatacaacaaattctgttatttgagaggcaagcacgaggtcagcgcagatgataatacacaatacctcctttgaaacttcctgatctgtaatgtgattgtttatagggaaaatccattttgatagtgcatataaggacctgtccccagaaacacataaatgatgaaatgctttgctgaagagaaacttgagtaacattcttgtaggaggtggcagcaatcttttctgttgtcacaagtgctgacatactgcaaacttttgccataacaaatttataagctagaaaggtagaaaagaatgatctctgtttaagtttcacacggtagaggcattgctttgtgtgtgcaaggtgcacttatatgtgtctctctctgcctattcatctgtgttttttacatgtgtggttgcttttggccgacgggatggtccttctaaaaattggtgtataatgtcattattcatttttgtcctttcatatgtttttttttggtcaattattacttcacttatttcaatttggtgaattactggcatctgttttgacatttaagaaaaactagactgacgagagaacattgtgaatggttggtctgtaaaggataccggtagagtctttatgggataccctaatctgatttgtttcttttgaccaggcttcaactgtagagacaata

SEQ ID NO: 92538 - DNA, 618 bp, Eucalyptus grandis
  Intron number 2 from transcript Egrandis_v1_0.007279m (loc us Egrandis_v1_0.003656m.g) derived from phytozome v7.0 (c hr-ID scaffold_3; pos 24596062 to 24596679 reverse strand)
ttctccaggtaaatcaatcttttgtctaaaggttaaatgtactatgtactaaattgtcctggtgcacgttaacctgtgaagtgcttcgtctttttgagttcatgcatatgtatctcttttctgaaaagtcattcgcgataatttattgtgcaattttatcttttgagaagttttgttgtcttacctttaggttctttagtgagggaggggaagggtaaagatcagaatgatgacctcttaggtgttggtgagggggaagtaccaccaggccaaaccttgtttctgtagtttgttctgaattgtataccttttgcagagagtttccttctttcttctggtaaattgtctgtttcaaatatgcgcctgcgacaacttaaagtgggcaggtggaaaatggtggaaggaaaatttggttttgttggaaaaatttcaacctgctttttagaaattactttgtcctttactctttaatggcttattaatcttgcacagtaattctggttgacaatgtataattgatagggactctgaaagttaaccaacaagatttgtacataatactattcaggggatgtcttttttgttccatgccttgatggtttttatcatcatgcagcg

SEQ ID NO: 92539 - DNA, 889 bp, Eucalyptus grandis
  Intron number 1 from transcript Egrandis_v1_0.009622m (loc us Egrandis_v1_0.009622m.g) derived from phytozome v7.0 (c hr-ID scaffold_2; pos 57624477 to 57625365 reverse strand)
gctctgacggctaacttcacttgcaggttgggcatagtggtcaagattaagttatctatctaattatactgatccatcttaacgacccacacccgatccaatccaaccaacccaacccgattaaaaactgattagcagtttttctcttcatatatggaaaatagcatattgaaaaacctaccgattaaaaactgattaaatatgaagaaattagcgaatagtaaattaccaaaaaaattgacaaatcaaactatgataagatctgttatttctcctggcgtgggaaattagaaaatgaagttgtttttatcatttatataagaaaaagaaaactttctaatttaggaatgattgtggaatagagtatgtaggagagagaatttcaattgtggaagtgacgaaattcgtcagttacgaactcttgaatatcgtaaggaatttggaccccgcaaaacccatgtctagttgggctttactactgtaagcacataccgacttttttttttttttttttaacttttcactaaaccacatataactcaacccactaaatttaagttaaaaagtgagtttttaaccgatctttccatctttagttactactcaaattcttcgaggtttgacaatatattgagcctggttctatgaactagagctcaacctgacagtgagttctatgttcgaacttgactatactcgataagattcagtgtcgcaagttacctgattgtttagctattatcaagttcagacttgattcaagtcaataccccaagccgaagcttgtctagcctgagagccaagcatgaatcgctcacaagaaattctgacttgattacacaccttacatgcagggtcgcatttgggaagccatttcaggggacggagt

SEQ ID NO: 92540 - DNA, 986 bp, Eucalyptus grandis
  Intron number 1 from transcript Egrandis_v1_0.010604m (loc us Egrandis_v1_0.010604m.g) derived from phytozome v7.0 (c hr-ID scaffold_5; pos 258485 to 259470 reverse strand)
cagccccacctccctcccaaggtccccagtgccaggttcgtttctcactgagcgtctgctttagttggctcgtggaaagttcttgattgatgttcatattattgacagtctcatccctgcattcctttgcccgttctcgttccgcgcgttttgaatgaaacgcagcatgccgtgttaagtggaagatgctgctgtgtttctgtcaatcagattagatgaacaccacgagagcgagccagtgcacgatccactttcattaatgggattatccgttgctctgaatctcgatgacgacattatactaattttctcagctcaaaatagcttggtgactggttttatttgtacaagtagaaccctttctagctagtgtgcttcgtgaaattcagagcagggtatttctaccttcgatgctgaagttcattctaacctttttatcagtttgattaatgggagattgacatcgaatgcagccaaagattaaattcttcatcccccgtgaagactcttcatctataggattttgtgcaattgatcccatattggttgaaattacatttcgttggatgaagatgcgaaaattcactaaatccactcgaagactagaacagatacatagtctaattaaatttttgcctcacgtgtttggcatgcagagctatatatgcctgggttggcttctaattgctaggtatatcaatagttcttctgcagttcttttttcagggagattcattgacaatttgtgacacttatcctcaactagctagaatcgctcatcagctgaacatgatgtttgatgatagaaaattctgaaattcagctttgtatggtgtccagtttggatttaatgcttctccaattgatagggtgtactctgtagtctttgcttcaattaactcacccaaccaatgttgatattctgaaaactaccctgtgatacttgtcttttcagtgccagcgtgttcggagtttctgccaagtca

SEQ ID NO: 92541 - DNA, 905 bp, Eucalyptus grandis
  Intron number 2 from transcript Egrandis_v1_0.036474m (loc us Egrandis_v1_0.036474m.g) derived from phytozome v7.0 (c hr-ID scaffold_1064; pos 5676 to 6580 reverse strand)
ataaggtagtcttgactccttccatctcgtctcgacgctgtttagttttcttctactgtcgtcgccccgttcttctgtggccgaaccaacagccttactccgtcatgcaacttatcttgttggtttgacgttactatctgacttataaaacgtgctcctacactcagcaaaataaaataaaaaatgtggctagcttttcaatggacttatgtataagtgggtttgcatatatcatagactttgaagatctcaagtcccacatgtacagtctcttctcatactgattgattgctcagctctgattggagaacattgtccatgtaaaaacaggcaagtgccttcatttgagatgtgatatcgtagagctgattcttcgacaaattgcctccccgccattcatattgaaagggagtttcgatcatgattgtttttcttcttttggtttgagatcaatgaattagtgtataattgtcttcttctttgttagtggctgttaaagtatgcatctttttggttagtttcttttgatttggacagtttcttttcgtgcctttcagataagtgtgtacttgcacaagcatttgaaactgtgaacttgcacgaacctttgaaattaaaagcagcttgatttttaacatggtgcaaactcactttcttgaggaattctattgtttaacttctaagccattaccatccacatatatgcatgattgtaaggatgaacgagtcatttttagtctgtcttttcctgaagtttcctgtccacatcactcatctgcaggcggagatggatgctccggtaaccatatcgttgctgttattaaatttgttgaataatcttgttctcgcttctcttttgaatgatcgtaggactcttctggaagctttcaagagggttaaaatca

SEQ ID NO: 92542 - DNA, 1028 bp, Eucalyptus grandis
  Intron number 3 from transcript Egrandis_v1_0.014610m (loc us Egrandis_v1_0.009718m.g) derived from phytozome v7.0 (c hr-ID scaffold_3; pos 19404749 to 19405776)
tgccaggtatgatgcgccgagcttcagtagaagaacaaaagtctgctgcctcctgataactatttgtggtgttttctggtggtgtgcgttgtttggtatgtgcatcaattgatatgtgaaagtagatttaccaaaaaaatggtgaaactagcatttaagcggtgcatgttcgattgagtgtcaaatgcctactgtatcttctagcagatgttcttgttctgtattttctcatcattgtttttaccacctctctttcctagtttgagagaatttttacaaggatataggataattgatctttaattagtgaataccaaataagttctaaatgacagaaaaaatgaactaataatgtacatgcgcatttaagtttgaaaaggtgcattccttaaccttaatatttgggagacagttaccgaattctttatatgaagttggtatcttactcagaagattcgtgtgtttaatgacaagaacagagaacactgattcctatatgctcaatctattacactattaagtgacctttaattgaagtgatattgagtaagataatctaaagtgaagtttctgttagttcagtagtttaaataatgaagctcatatgattagctttccggttggatgtgtcgtttgtgcatggatgcatatgaatatggttcaggaaaaatgaggtaaagacaaggtcaaattcttactatggtggttgacagtagccgtttgaagcatccttttcctcacctttcatactttaaagctcttgttatgttagaaaaattgttattaccttttgatgtataggaattgcaactcctgagttgagtttcaaatcgttggcaatcgccaaaacaaaaatccatctatttcatggtttttggtgggattgctcattagactccataagatagattactttctggactggcttgagtttgctgtgtgcaattgtttctagttggtattttgttgaatgatttgcacattatgattttttcaggtaggcactctgcaagagctacaaagacttt

SEQ ID NO: 92543 - DNA, 550 bp, Eucalyptus grandis
  Intron number 1 from transcript Egrandis_v1_0.047709m (loc us Egrandis_v1_0.047709m.g) derived from phytozome v7.0 (c hr-ID scaffold_1012; pos 3756 to 4305)
tgaaccggtaattagtttatctctgaagtacagaaactgaagcccaaaaaagaaagagagagagagagagagagagagaagaaaggaaccaaaaaaagtgctggcaaaccaaccggcaaatttccatctggtttgttttctcccgaattttgggtgcattctaggtaccacgtttgtgggataatcatatgacaagcgttgatgggcagaacacttggcgactcgtgacccttgcccatttggcaatcattgaatagctgtgatttttgtgtgctaacatgtcatgctgacgagatattactctatatttaggtttcaatattcaaaactcagcattatgagagaatgtgattgacgcagtgataggaacgtgctcgtggtatcactgtctcataaaatacttgcattggtagaaataatattgctgtcttctttgcatttcaatttagacttggcggaagatattaaatttcaaattagtccttggaatctgaaggcaagcaaatttcgtgcaggagggtgaacgaatccgtcaccagaaggcagctcc

SEQ ID NO: 92544 - DNA, 829 bp, Eucalyptus grandis
  Intron number 1 from transcript Egrandis_v1_0.012296m (loc us Egrandis_v1_0.012296m.g) derived from phytozome v7.0 (c hr-ID scaffold_1; pos 7880000 to 7880828)
tcgccgttgtcgctgagttttacagcttcggaagagtaagtctgacgagaaagagaaaggaaaaagattttgatttctgtctactttcggaaataaaaccatataatcggttttagggtggatttctcaccctgaacctaaaagcaaactgcgcaggacagtttccagttggcgaaattgggaaccggccccacttggttctggaatcagactaaaccaactgttttagggcggtccgggaaccggacttgggaccgatgcatacttctacttgtaatatctttttcttttttttggaaaatagtttcataacattaagtagaacacagtttcttaacaaagacttgcggggagctgaaactttcaaaatcccaaacccagatagagaaacttatctttttaattccttcttttttaccttacttaattttttaaaagaaaaaatcgatagattgtaaattatgttctccaaacctaattgacaggataaaaaactttgaaaagcccgaccgactgaagagagtcaaatgtaaaagaaaaaaatttaaaaataataaggaaaatgaaatgttggacacaagagttggctccattagaatacgaacttcattatgaatgggccttagtgattttaaaatacgtgggaaaattaaagaatcgggtgctcaagattctactgaattcttcaatttccttgcctgccatataaaaaattaggtaatttactattttcagaagttagaagttcatttgatgcgctgaccgaagtgagtttgtgctgcgtttgcatgcagccgtgggtcttcgctttgagccttctgggactcac

SEQ ID NO: 92545 - DNA, 885 bp, Eucalyptus grandis
  Intron number 1 from transcript Egrandis_v1_0.011260m (loc us Egrandis_v1_0.011260m.g) derived from phytozome v7.0 (c hr-ID scaffold_5; pos 465127 to 466011 reverse strand)
agctcggcgaaagtggagaacgcctcatttgtgaggttgaaagcgaaaccctaccgctctgctttgggtagattgcgttcatcgactgcatgtacagcaagtgaactatttcgcctgtcacttagtttttgtctgctaattcatggtgagattgtattcagttgcaccaattgtgtcagaaagccatggatgtctgggtttgtgaagaggtgcctatgtgtatttctttaaggttccgatcgcgcacgcacaagcatctcttgtgccagacggtcaaatggagatttctttttcccccgcattcttctgtagaggacagtcctagattgggcgaagttgatagttctgcaaaagctttattggatacagtctctttgtttgctgaggagaacggcgagtttacattttagctgtctagtgtgctgatgttaacttagggagcattaaagaggagttcttacttctgaagccctgtggctgccagtaacatgggaataagattggtgaggagtcctaattggaggaaatacgacagttttagacaaagtcctatcggcagtagtaaatccaatattgtagattctcacttggcagtagtagataagtgcaataggcagtcgcaaattgaacattatagattctcacttggtgggtattgtctttcttggatttttcgtggttttccttggttggcaattgggactcagctcgagaacctcttgagggtctacttgcgttgctgttaaaagagttggtactgatagtaacattttcattatattcctcttgtggccgactgattattctacattttgtgattggataagccacatcaacaacgttgaaatcatcatttgatgttggtgtagctttcagataggaggt

SEQ ID NO: 92546 - DNA, 545 bp, Eucalyptus grandis
  Intron number 2 from transcript Egrandis_v1_0.037972m (loc us Egrandis_v1_0.037972m.g) derived from phytozome v7.0 (c hr-ID scaffold_1; pos 40248696 to 40249240)
tgaggtaagcttatattccgtagtgcggcgtgattgttctactgaagcatatgctgaatttgtttctaacatttatgggttcaacttcacttggttttgatttggctgcactctcatgtttaccgcgaatgtccactgtattgcattgcctaccatgctattttcacaaatttcttgttatttgaatgggagtgatgtaaacatgatttcatgaggatcatctcgcaagtcaatgctccttttttgagagcatgagatgtaaagtatttgttatgtgtgttttggctttggtgcattggcaaaatctcacgtgtatatttggaatgatatattggtttgagcaggtataatgtgtagccaatgtccatattctctgtacatgtaaacatcttcatcctaaagttgttatacgttctttgttcatagcctcatctgtatctcaatcatgaccctggtgtaatccaaaagtcacaactaatgttgagtgccttatatgatgaattaaaggtttgagtgctgagggcttacagaatctttgtagaaac

SEQ ID NO: 92547 - DNA, 476 bp, Eucalyptus grandis
  Intron number 1 from transcript Egrandis_v1_0.047732m (loc us Egrandis_v1_0.047732m.g) derived from phytozome v7.0 (c hr-ID scaffold_3; pos 55056266 to 55056741)
agttggtagtcgaaggagagacacctgactggctggtgagtttgtgtgcgattttctgtaatctcagtcatgtttttgcgtgcatgtgacaagagtcatatcttttcacgtcccctaatcaaatttcgtgtccattctgcctgctctcatcttgccatgtgccagaataggaaagaaaaggaaattatttgtctgtttaaagtctggctaaatataagggcagctttatccaatcttcgtttgtttcaatcaaagaaacgactgggaagaacggcgaggaaatgatcaaaataattaaaaatacaacgtttaaaggatatttatacactgaaagaagtagattatcatcgacactatagtctcgtgcatacttattgtccatgacaaatgcattggaattagctccggcgttttcaattgattagagaatctgattagttgatttaatcacatgtagaacggaagttatctaagga

SEQ ID NO: 92548 - DNA, 914 bp, Eucalyptus grandis
  Intron number 1 from transcript Egrandis_v1_0.042582m (loc us Egrandis_v1_0.042582m.g) derived from phytozome v7.0 (c hr-ID scaffold_5; pos 12645575 to 12646488)
gcgtcttgccagatcgtggacacctccagaagagagtacgcgatcctcttcgtgagcggagacccttcttttactatcgattttcttgtggaattaggttgaggcatgttatgcgttttgctttggagggggagatgagttattaacattatagagctcaaactatgacaccgcggattaataataaataaataaataatcggcgaaccctctctctctctctctctctctctctctctttctctctctctcgaatttctagcataacgaaattcgatcgctctgacaggaagaattttttattttcggcctcgttaactaaagaatttgagatgttctgatgttgaggcagagggatgttggcttttagttttaccatcgccccacggatggccctgaaagaagttcaagccttagtctatggaacttgttcatgaactttgttttgagaagctttcttggaattaagcgtagcctgagtttatgcacttattcaggttatatatgtatattatatcagaatgtttaagtgggtcctcttaactgagtattttaggcacttgcaaggcatgaaaggttttcttcattaccagggaaaacgaatagttttattcttacattattgattctatataacaggagcattagtataattgaaactgcaatctgggtttgcttatttgtgtagcaaatatcctggatgcactcgtgaacaagctcctattattaagtatccgcgattctgttgcttttattttgttgatttttcaagctacccttgtttattttgctctctgaaagttgcaatttgaatttggttgctgccttgtggccatcgattttgtcttagctaatttgcttccttcatgttctgttcagcgtgcaagtactgattttgtcacctacgagggatt

SEQ ID NO: 92549 - DNA, 876 bp, Eucalyptus grandis
  Intron number 1 from transcript Egrandis_v1_0.022118m (loc us Egrandis_v1_0.022118m.g) derived from phytozome v7.0 (c hr-ID scaffold_3; pos 5123180 to 5124055 reverse strand)
caggactaccaagatctggaaaaggtaaaaaatttccatgggggttttcgttgaaattacgcgttttgctcagtttatgtcatttctgtattggtttggcatggatctaggttttcttcatgtttccattgataattatctagtatgccctgttccgtagttgtttcgttgctgatcttctgatatatacctgagatggtgattgcaagtttggttaattggaatggatggttttggatcggtgtatgattcgtggcttctcatggttgtgtttgtttgccttatttttagctgcaggatgattaaaaatttccccttttgtggagaataaacgtaccttgtgaatttcctttctgttgaacttaattttgagttttatcaattgctttctgagaactttttctggtttgctgggagactagtagaggagagagatggcttaatggactaaggtggtcgtagatttttctggctgctagagttttttttttttttcatctttttaaaattttgcctacgcccgaggaatttaatccctcaaaatttttgcagcatcctcttttttttcagtggtttaattctggtctggcagtctgagaaaaggaagaaaaattagatatcttgaaggttttcttttgcatatcgagcgtgtaagatgaaaatcatgtgcttgatttgattcaaggatgatattagtcagcttcgtgagcggaccatctgcggtttatagtgattttaatatatttgaagttacgagactgtttactcattgtaggttttgccctgtcttctgctgtaacttaagtactatttctgcaagtcctcgattctgttgcatatatgggctcatgccaatacttgttttataggaaacga

SEQ ID NO: 92550 - DNA, 438 bp, Eucalyptus grandis
  Intron number 1 from transcript Egrandis_v1_0.002379m (loc us Egrandis_v1_0.002379m.g) derived from phytozome v7.0 (c hr-ID scaffold_3; pos 50250355 to 50250792 reverse strand)
agagtgttgcccttcccgttgcagaggattttcaagtaagtttttgaaaagaaaaatgatcggttaacagttttttatttactgtaagaataacagtctgttttgaaccacaaaataccaaatcaccaataattataaattgctgtgatttatattcattctaaaattcgtggctcaaaacaagctattattgttaagtaacttaaaggttgttatgctagcaaaactctacgatttaatcttgaagagaagagaaagggatttgttcctaacacaatttagaacgcgtagtggatacctaatgattttataattttgatttgtctcactccattagaagcagtaagagaaattagagtttttcaacttactcgtacgttttttcccaaccgacacttggcagggtactataagtgtcaaaggcatcggtctcacggt

SEQ ID NO: 92551 - DNA, 569 bp, Eucalyptus grandis
  Intron number 1 from transcript Egrandis_v1_0.022132m (loc us Egrandis_v1_0.022132m.g) derived from phytozome v7.0 (c hr-ID scaffold_3; pos 68172799 to 68173367 reverse strand)
tggccgtgcccttgtctgttgatcacaaggtgagctctcgcttcgtgtttgtttgtttccattgaagctgtgtagctcaggggatctgttcttgttcttttcccccccaaaagacactttatttattccaacattttgccagaaatcttgaagtgacaagactaatctgatctacaagtcttatcctttttgtctacttcgtgtcatttctaggttatacttccaaaagttcacttggtgttctttcaaaggtgcttaatttatcttatggtgttggttttatatgaaagcaagtgcaagatattcctaaaatgtctgattaagattaggttgactttggggtcatgctttgcagggttgacatcctatgattaggggaacttaataagctctgccattctttgttttttgttcatggttatgtagacaggctgaagcccatcttgccctgttggtttaatcagtaaactagaattcgtccctgtgatcttttgcggtcagccccgctttgttcattctgcaattctttgatagaacgctgctgaaatcacttcaagtcgccacaaacg

SEQ ID NO: 92552 - DNA, 583 bp, Eucalyptus grandis
  Intron number 1 from transcript Egrandis_v1_0.009040m (loc us Egrandis_v1_0.009040m.g) derived from phytozome v7.0 (c hr-ID scaffold_5; pos 21724444 to 21725026)
ctgctgctggaaacccggttagttttctctgcatctttgggatctgtaatgtttcttgaaactgctattccactaatccggtggaattagtcctctgcttgcgattcgacccagtaaatgctaaaaatcgtctggaaagttacaaatcttcttcgacatgaacgattttgaaaatcacgagatcctatccaaactccccgcactatagatactgtatgctgggcctgtttagcacttttgctttctcctaagatctaagaatattatttaaattttggaagtattacgaaaaattattacgtgtgcattcatgtatcgacatttgagtattatgaatgttttgagtattttggattatttaaaaaggtcaaaatgtccaagtcgcaagatccaggtacagatcacttgctgaggttcgcctccatcagaaccacaaaactatgtttttttttttccttcttcttcttttatttggctagaagcataagactttgtctgaacgactatgtctgccgtgtgaagcggttttagtttcctcaattggacaggaatcatcttcaacctcatcgtcatcgcctagatt

SEQ ID NO: 92553 - DNA, 864 bp, Eucalyptus grandis
  Intron number 1 from transcript Egrandis_v1_0.028383m (loc us Egrandis_v1_0.028383m.g) derived from phytozome v7.0 (c hr-ID scaffold_3; pos 78082491 to 78083354)
tgcaagcgagcgagcgaacgaagagtaggttgcggaagcatttctctgagagtgtgggggtgttttcttggagggctttcgcatcatgaatgatgctgaatttaggtcgagagctgtgtggggggagagttgatttgtttgctgttgctgccgctctcttcatcgaattggacgatcagtttttttggcctttcattatgatatgttgattttcttttatgttgtctcacagcatattgtcggttaattgctttgccgagggggcttgctgtctggctttagctttgatgtctgtggctttcgtgtttatattcatcttggaagttcagaattacttttagtttgcaatggatctacttgttaattaacctagtttgaatagtatgccttatgtcctctgttttgatgaggtgtaatttgcaaagcaatatcgtttatctaagaattcgatatagttttttcagtctatgggcatgcttgaagttctctatcttgatgtctcttgccctttgtcttttcagtaatttccacgacttgacgttggtgtttctgttggtttctagattggactgcttcttgttttaggtagattaattggatggacaatgttcacagttgttgacattgtttgccctttgctcgcaaatttgacagaacaatttgacatggggtggctaatgtctcatgacccttttctctttttccttgatggaaaacacccatagggtgtagcttggtccactgtcacaatctgttgcttttcacgtaaactagcaaacagtgatcgtctgtaaacttacacatacagtcctgtattgccttgtggctgaagattaagtgtatgttaacttgcttatgtagata

SEQ ID NO: 92554 - DNA, 767 bp, Eucalyptus grandis
  Intron number 2 from transcript Egrandis_v1_0.038581m (loc us Egrandis_v1_0.038581m.g) derived from phytozome v7.0 (c hr-ID scaffold_1870; pos 5135 to 5901)
aggtcagttctgggttttgtcattccgtgatatatatttcttcagaaatgggattatatgatgcatgctaggtgtttgggatcagagaatggcacaaagatattgtattactatgcttaagtcctttttcttcaacttgcttgtaattaagtttaagattagttctgattttgcatgtggtcttttgctgttggtgatcatgttttgttgcagttgccgctagaattaagttattctatgagatacgatttggtcaaatagtgagaactaccatatattatttcacttttcctttctgctgaatagatactttgtaatttcatatgagtagttttgattgctcagaatcttcaaagcaaccaatcaactttttcttttccccaaattgtagaaaaatacagccacatgtctgcaaatatggtagatccttatcaatgcaattcaattaatgacctcttttaagtgtcgtatggccatgcttagatacgcaatcattgtaatggacattttgcaaaaaattctaggcatgtgttttaaagtgagaatagaggacaagataattgggttattgattcatatagtaacgtccattcatattgcttgtgtttgttaatgggattaccattgtattggttgagtccacattggcagatcgttgcatcaagtatttgtattattgaccaaaatggtcagggtttacatactacaatgcggttagcattgtttacaattgtctaaagtatgtccgggccatctgttgcagtctt

SEQ ID NO: 92555 - DNA, 766 bp, Eucalyptus grandis
  Intron number 3 from transcript Egrandis_v1_0.003191m (loc us Egrandis_v1_0.003191m.g) derived from phytozome v7.0 (c hr-ID scaffold_3; pos 60525780 to 60526545)
gaaggtcagagcctttattgcctattctttctcttcctttttttttcctcgtttcttggtgaatataaagaactccgggtcacgtttcttcacgctattcttgtttttattgtttcgagaaaacattagttgaattgaatacattaaataggaggattcgtattgaacactccacaggagctgaaccactttgtgaaattcccattccgttcaccgggcggcacgtgtcgcccgagggccaccctcccttacctcacgtcacccctacctctcccgacgacacccttcggccgccgacgacacaccgccgtctcagtccacctctcgccaccgtttcactcctccttctcccccctgaagatctgttcgctctcagtcatttcgtttcacctgaatcctcctcttcgcgattaagtgaaccggagcttgttgtttatggtgggtcgaagtggatctccgatgcggaagtgatttcggcgtcgattccggcgaagaaatccaagaaggtatggagaaaggaagagaggaaagttcggggtgaatgttgcgctgtgggtcgtcaacttggagagagagagagagatagatagttctccatagtggggaacagaaattttgattgttcaactggtaggtgggcccacatttgccacgtttcgatatgtgcctttgttatgtattaaatgcacctaataatttcttaatgcgagtttatttgtcttgtgttgcagcttgaatcctgattctgagccacttactgccactt

SEQ ID NO: 92556 - DNA, 669 bp, Eucalyptus grandis
  Intron number 1 from transcript Egrandis_v1_0.002204m (loc us Egrandis_v1_0.002204m.g) derived from phytozome v7.0 (c hr-ID scaffold_5; pos 669465 to 670133 reverse strand)
ttatcagtgcggtggttgcggagctgttcttcggggtaaagtttcttttttttttcccttcgtcttttctcttgtttcgcgcttgctgggtaattttgagtcttgcttggtcaatgggaatgtcgtgggcggtaaaatggagatgaatggttcgcgatttgctgaaaagtcgaggcattgtgttagatgcgttggtcggaactttgatgttgtgccgcagagtgatgattcgtgattggggattgtgaattctttcttttcgaacttcgataagtcccccggttttaaaatgatggctttgcctgtgcttgttcattgggatttttgcttacggtctgatagagggcttcttgggattgattcgattggaaaaggaggagaatgagagaagaaaaagcatacatttttcactttaacatgataaacaaagccaaatcgtagaagactagggaggtttaggggacattaaaagtacctggtcgaactcaaaaccctggtacttgtcatttctgctgcagtcagaagatttggaactcaatgtatgtggaaactataaggtgggtaagttaactaggtttacacataatagaaacgttgatcttcaagctgaactctttcttttcttgacatgcagcaaaacctatagtccagggatctgattgcttatct

SEQ ID NO: 92557 - DNA, 620 bp, Eucalyptus grandis
  Intron number 1 from transcript Egrandis_v1_0.039022m (loc us Egrandis_v1_0.039022m.g) derived from phytozome v7.0 (c hr-ID scaffold_5; pos 69622901 to 69623520 reverse strand)
gcaaaagcctcaacgaagggtctacaaaggctgcagtaagaattctgtgagtttatttatatttaacgatagcattttaaattatgcaaaaaaaaaatagaatttcaaaagggaaaatttgtgatttgggtaatattaagaaatgaaatttaaaggccttcaaattatcatttttttcccattatttggcaatatgtagttattgttcgtctattgttatgcacgggagtttgcacaatcttctcgtaaaagtttggcgttgaaaaatactttagatttattatatattaaagagagattctagcggatttttaattatgtgcacataataataatgccaatttaatttccaaaccatgttcttgtaatgaatttttcaatttcttatgcacaagaaaggtcacagatcatctaaacaatggcagccgagcggacacattgatgatcagcaagcaatcaaacacgtaagttaaattagcttagtttatcgtctttccgttttcttttttcgaaaaatattttttcaatattttttcgaacatacaaatcatttcatcgatcacaggatgacggacggatctccaaagtcagcaaattcgccaaaagctaaaaagtacttc

SEQ ID NO: 92558 - DNA, 737 bp, Eucalyptus grandis
  Intron number 1 from transcript Egrandis_v1_0.027290m (loc us Egrandis_v1_0.026870m.g) derived from phytozome v7.0 (c hr-ID scaffold_5; pos 1811189 to 1811925 reverse strand)
aaggtcaagtacggcctccagcctccagcctcgaacctcaaaccctctctctctctctctctctctctccattgcactttcgctgatgttcttcacgagcaaggcgcgccgggccttagtcatcgatttgacttctgaacacatcgcctaggaatgatgataaggagcttctgctctggagtcttgggactcgctcggacgaactcgttttcgcggtcgttctggcgagattgaactcgcctggcgtgctatttcgcgctctgagctttggcctgcgagtgatgagctgttgcgagagggaataagttcatagttttgactagctcggtccgactcgatttgaggctagagctcttgatcgttaagctttttttgtaatttcatgtgcctccaggtgtcgaatacgcggaatcttcattttcatctcttgttagtagttgaccttgccttgattctcgatgcttgtacctgccactgtagagttcggtaatgtgttcgtattaagtgttggagccacggagcggcttcaggcgccggtttgcggactaaattttaggctatgagtctagttttgtggtgattatggtttgtttgcaaataccatgaaccgcaatctttacaattggcctggcatccgggttgattttgtctgaccaatgtgatgtcttgtttcttttttccaattttttgattgaaatggcaagcatggtagctaattgtttctagtctgcagctac

SEQ ID NO: 92559 - DNA, 657 bp, Eucalyptus grandis
  Intron number 2 from transcript Egrandis_v1_0.021147m (loc us Egrandis_v1_0.021147m.g) derived from phytozome v7.0 (c hr-ID scaffold_1; pos 26022009 to 26022665 reverse strand)
atcttcgggtaaaaccgaccagaattatgatgatccccgccttttttcttcgaaaaacatgctaacatgggaaatgctaacaattacaagccctggtttccttagaaaagtgttaaatcctcaattttaacaagagcaaatgagtaggtatttgacgcaatatttatcttgaacttctaatatttcatttcggaaaagtatgaataacgtcatttttaagtcaccttatttaattttcaagatattcaagatttgaattaattaattttctgattttaaagtggagtttagaccttgccatgctccaaggtgttctgtgtcctacatatgcaaaaaatgcataagtagctcccaatcgatatgactactgaataggaaaacggatcttggaacaacttcaactttcatatgacttgggtttgtttctttttttttctaaaccttctccgacgatatgatcagaagctttaacgaaaatctcattatggacccacatgactatggtaaaagctagtaaatattcgccctttgacttcatttaatctgtaataagtgtccaaccggggaagatgaacggtctctccttgaccagaaaacatcaacagagaaaaattattgagcaactttctttgtatcgattgcagcttcggtgggacg

SEQ ID NO: 92560 - DNA, 302 bp, Eucalyptus grandis
  Intron number 3 from transcript Egrandis_v1_0.042528m (loc us Egrandis_v1_0.042528m.g) derived from phytozome v7.0 (c hr-ID scaffold_3; pos 72560768 to 72561069)
attgcgtttggcttcgttgaaatcatttgatctcagatccccaatttcgatcggctgtggtggctgtggatcggcgccgccttcatgtcctttacctacaccatcattgaacttggcctcagtattgccaaacttgcaggcacatgaaattttttcttgctagactgctctatttatgtttctaagctatctccattggtgatagaaccgagtcgagttatgaagttctgatttagtgttctcttctggtttgttttatcttcagagacagggaaaattaagggaagtctcactggaatcaa

SEQ ID NO: 92561 - DNA, 912 bp, Eucalyptus grandis
  Intron number 2 from transcript Egrandis_v1_0.017208m (loc us Egrandis_v1_0.017231m.g) derived from phytozome v7.0 (c hr-ID scaffold_3; pos 54494808 to 54495719 reverse strand)
ctacaacaacagtcaggtttgtgctcgaactcagaaaagaaagaaaccatatcttgcacaaccaagtaaaaactgcacctcatctagttttaattcgtcaagaagctgaccgactcaaaactaaaaacatgacgtatggaggtaattcttgtaagtcacatgtcagcatgtaccttcaatttctcaatggattcccagaaaatctgacaactaaaaccgggaagatccaagttttttatttgatagatataagacaagatgacatttcatgcttgtctaaagcaaaagtctcattcctaatggtaaaagccataaaaaaaatcctaaattatgtctaccgtaacatatttaccataaatatgtatttatgtaacatatttaccctccatcaaagttctattaatggaaatcgttgaaaatctatctacgtggatgcgagaaaacaaatagtattaacatgacgcccacatgacttaaataaaatgaagatgatgttattttagctgaaatatcatctaatggaattttgaaggaggggtaaatgtatcgcataaatacaagttttggattttttacgtcataagaaaaaatttatgataaatgtgtcacaataggcatagtttgaattattattattttttttagttttttccctatttctaataaataacttgttccaatttatatgaatgaaatctaatcatgtagatttgcatggcccggctggcctttgccacgatgtgcacgtcctctctcaattttttatgagcaatgatgataattgctctaagaaagtattaaatgagcttttataaacaagctgaccacatgtagatcaatcttagtacatctatctttattattctctgatactagctgagctcaagtccacttaccgatgttttagacttc

SEQ ID NO: 92562 - DNA, 1011 bp, Eucalyptus grandis
  Intron number 1 from transcript Egrandis_v1_0.021451m (loc us Egrandis_v1_0.019097m.g) derived from phytozome v7.0 (c hr-ID scaffold_5; pos 2129287 to 2130297)
tcgctcgctgtgaactcgccattccacacttgcaggtcgcttcaatcaagctctgttttttattctctctctttttcccctttttttatgatcgtttctcttgaattttcctctgactttgggatattagacagttctatcattagctcatgctaaaacatacatgggatttttgtgttgagtaatgctggggacatcaagcttggttgcgaaatcgatatattgaactgacgatactaagaggagttggctaaaatccaagcaatcaatgggagtgtggtctgccacgttaatttctataccaatttcgcgaacggtcttagggtctctagcattttgtatctgtcactgcttatttctgtgctatatttctagccttgattgctgacgaaacgggctcatgtggaatgggttctcccggagaattgttcgaattggggatgatgggtactttgtatttgattgttcattggagaatattgatagcggtttagtcttaatggcacaagcacaaagcatgatgagaatgtgcataggatcgaatgataactgggcagcagtctctttaggtagctgagaattctcaaatccaggtcttcggcatgttaggaatagacagttcccaggatgctgctaagtcgatagtccggagtctgtaatgccgctacgtttcttgccccgtggcatggttttctcaatctgtctctctattgaagtacagtgatttacagggtaaatcaatttattgatgcaatgccagtcttgagtgaaaaacgtgatgcaaagtcatgttataagcctgtcaataaataataagaatgctgctgctgcttcacttttgtactagcttaaacaataaggaaggccaactgatatcatcgatttgggatgtacagaactccatggaagccactatgctgcattgtcttgcgagatgtctggtgttattaacttctgttttggcttgattttgtttgattcatgatctttcttaatgtagcagtggcagca

SEQ ID NO: 92563 - DNA, 837 bp, Eucalyptus grandis
  Intron number 1 from transcript Egrandis_v1_0.004443m (loc us Egrandis_v1_0.004443m.g) derived from phytozome v7.0 (c hr-ID scaffold_5; pos 40643734 to 40644570)
cgagcgttcgtcacagtgcaaacgtcacgggcctggttaatatctattatccttgctttgctttccgatagacttcaatcgaggtcgatgttctttcttttaagattaaagcacgcgttgggcgcgatcggatcgttgccttgttccgaatgtcgctggttgatcttactttgaatcaggccgtgaattcgagcccgagacggcgtaattttacttcgcaattttgttgaccaccagatgtttgataatatgcctctaagtcgcagacattgaatagatggcgatttcgttgacccatccttttcttagtgcattgattctgaacgtgtaccgttctgtccgtctctcctttgtattggcatgtttctttgctgctttcgatgacgatggccactgacgagagggatcggcattcaaacggtagaaatatgtttgtgtactggacctgcaagatcttgatcttatagctgcaagctatggattcattcctttagtagctgcatattgatactgaaatttttctactgttggcaacttgatgctgatttcttcctgagttacctattgtcctcataattttttctcgtaatgagaaacgagacctatttgcctgttttgtataaagcacagcattgaagttcctgtcatgtaagaaactggttttgggaactgggtgcatttcagatatgttgtttattttctattaagatgattagtatttcagtcttcattagtgaatgatctcaaatttgtttatgttatagtttgattgaacagctgtgtgattgttgaggatgcgaacatcattcttgcaggaagaaaccggtgtagtgagac

SEQ ID NO: 92564 - DNA, 765 bp, Eucalyptus grandis
  Intron number 1 from transcript Egrandis_v1_0.030079m (loc us Egrandis_v1_0.030079m.g) derived from phytozome v7.0 (c hr-ID scaffold_3; pos 46513175 to 46513939)
ccacgcttccctcctcgcctcgccacccgtctcaagtaactctctctctctcgctctctctctctctctctctctctctctctctctttctctctctttctgttctcgagtagtagctgagaactgaagcctcttgcgattcgttccgtggggggtgttcgcttgcttattcgttccatggggggaagccaacccagtgcttgttcttgacgggaacgcgtggttcgctccgagttttggtggggattccagtgcgctgctgctgtctttgtttcgtgggatcgaaaatggagacggagtgaattttgatgacatgggttgcttctcgtttgatccctggcttccctttgcagggtgtagtagggggatggatgttctaatgggctgctcctgggaattgggcttgttcaatttttcggaaaaaaaaattgatttttatcgctgtgtgagtgtaaatgagtaggtgctttggtcttgcttcattgaattatagtgtgtgtatttgcttttggaagtaagatctgattgtaatgactatcgggggattttgggtctcccgaaaaaaaaaggctttcttttttcaacttgctgttcatgaatgataaatgcgggggatgctgatgagctttcccttttttcttttcctgtggctatcatcttgttgtgtcatcttgcgctaatggtttgaagatgttctaggggactaaagtgaaaccatgataacgattgatgttgtgactggactttgtgatgcgaacaggttat

SEQ ID NO: 92565 - DNA, 1023 bp, Eucalyptus grandis
  Intron number 1 from transcript Egrandis_v1_0.003178m (loc us Egrandis_v1_0.003178m.g) derived from phytozome v7.0 (c hr-ID scaffold_3; pos 22695620 to 22696642)
aagtacttatttcatcttgctttttctttatcgttctttattaattataggatggttttatctataaagagaagtatcttattgggggatcgattatctgttatgtatggaatgcttttctcaacattcgtaactaaatctgtcaggcttcttatgttcatgaaagtaggaattttcaattttcctaaattataaacttaagttcgaatatattgcccattcttatgcgattctctttcctaattatctttctttgcatgccattgaatgaaaccttttgaaagcactctcactttggtgctattgcggcatatgatcatgcattgggaatctttaggagtgtaggggttatttcacatcggttgtggaaggagaaggtagtgagtttataagtgtaaaggaaagcctcaccctttaagctagcttttggggtgagataagcccaagaccacccaaaaatgataaacttttagttttaaggtttctcgatacccttaactttcatgatgtgaacttaaagaaataattgaggattggaaggattacaagaaagtctgatggagagaaaaatgagcaaaagggctaaggttgtcaatttatatgtttgattgtcttaattgtgtttgttaatgtgtcaattcatcatgacttctattggacatgtcaaaccattgaattagacgagagcatgtaaatatatctcaaccaactagttagatgtatggtgatgtgtcatattttggttgtgtctgtgtttttcgtgtttggtactgtcatgtaaacagttagtgttaatattggtagcattaatgaggagtgtggattgggaaggtgttgattgcatcttctcccatcacacaggcattgtgctcgcgtatgctagtaaaataggggctctcatacaagttttgcatcttttgagtgccatggcttttatcaattttctaaaggactaactagttttgtaatctttatgacgtcctattaggtgaataatttgccggcaaacattctgcctatctc

SEQ ID NO: 92566 - DNA, 939 bp, Eucalyptus grandis
  Intron number 1 from transcript Egrandis_v1_0.009507m (loc us Egrandis_v1_0.009507m.g) derived from phytozome v7.0 (c hr-ID scaffold_649; pos 6775 to 7713)
ctcaagaccaactttaagaattacgggaaggtacgttggggttcagggttgatcatggattttatgaagtggtgactattgtcaaagtgcgtgcgtcaatgaacatgtatgtcttgaattcaggattttcgcctctgatatcatacgatgtttttgaccgtcaaatattctaaaaacttgaatcaaatgttctaaaaacttaaatgattagattcaaggcatgattttatatttaaatattctatcacatctcttcaaaaatacggagaggcgtgcattgcaaatatttgataataactggaacatgtttacaactaaaacgacatcaattcatcgattcttcccattcagtgttgatgggccagtgaccggttgtccattcgcgatgctggtggtcctattttttgcatggcagcgtggccgatttagttcttttaacggggtgggctggcaggtcccctttagagccggtggccacggtgaaatgtcggcaccaccgatgtttgtggcatgttggacaggtagatagttggggttgttgtttgttagctaataccagtgacgttagccaagcagaaactagacagtcaattagtgttcaatttgctagtttgaagaatatgagtttacactggttaatggggttccaagattttgttgatttcattcacgcaagaaatctacttaacagttatgcttttaaatctggaattgtatgacaaaaataaaataaaatctggaattgtaataacaaggtgaagtattcctggatatcatttctggctattaaaatgagccgtgagagagacggatgataaatagctggttattcatggagatttctgtgcagaagcccaagtttgaggattgcatgatgtgacttaaaagttaaaactgtgcgcagggacggtacaactacagccttctaaaggatctatt

SEQ ID NO: 92567 - DNA, 861 bp, Eucalyptus grandis
  Intron number 2 from transcript Egrandis_v1_0.020274m (loc us Egrandis_v1_0.019104m.g) derived from phytozome v7.0 (c hr-ID scaffold_3; pos 4247996 to 4248856)
tgtcagatcttgccgaggcggcttcttctccgacggtgcgcccctctcctcctccgccgccggccgccgccgctccgaagaaacaggttaggtcgaagcggccgcgtgggtcggattcgtcttttgttttcatcgtcgggttttgtcgttcacctagaaatgagaatgcattggagcgcacgaatgaagtcaatggttgctgttagcgttgctccgtctgatgaagggggcttgtccttgcttttccgatgatgggtttttggtttttctacttctcttgtcaattggcgttggtgtcgtcggtcttggccaaatgggtcttgcggacatcagatgcaaggtgtggtcttttgattggttttggctgaaagttagtgagcgagcggaagttggttttgtcgactcctcttcatctgatttagttgataaccggtcgtagactaattgatgatgaatgggttcctcatgtacttcaatgaaatcggtgttttgatgtccggaaagaaaaggaagctatagtgaaatcgggtgtcgaggtcaatttcgtgcccatttggtattgttagggagtgaaggaaaaagttgtcagagtggataagtatcaaagcatgtgaagtaatagatatttcagattgcagggtaaaatttctacatttctgtttggtggagcagtcatcacaattgtgacttttgatatgggatatcttttttcgtgcatgttatcattcaatcctaacgataatctaacggttgctactcataatccaatgcctttattgaggttttttgatgttttgtgactggcatatgtttcttatcatggtttttttggagcaggttgtgctttcttgcttaataaag

SEQ ID NO: 92568 - DNA, 415 bp, Eucalyptus grandis
  Intron number 2 from transcript Egrandis_v1_0.000624m (loc us Egrandis_v1_0.000624m.g) derived from phytozome v7.0 (c hr-ID scaffold_3; pos 15883235 to 15883649)
ctcgtggcttttttgggtaaatttttcaagctttccttttgctttgctttccaaggacacgaggtgttttgattcaaagggtgcatggtaaattattctcacaagacccacaatctataagttcatcaaagtgttgtactcaaatggggagacaccgttgtcactagaatggacaaacaaagtataatttaaagaaaagaaatagactactttggagaatgtctttggtgggttttcttgggaaaccctaaaagcccaaaaaatttctagagaaagtatctcaagttacacagacagtaaaatttacccatgcttttaatgttcttgaaaaaaagggatcaatctaattgatggaaagttcttattataaatgcttgcagaaggatattgttggagcaaaacgagcgagcgacag

SEQ ID NO: 92569 - DNA, 915 bp, Eucalyptus grandis
  Intron number 3 from transcript Egrandis_v1_0.003536m (loc us Egrandis_v1_0.003536m.g) derived from phytozome v7.0 (c hr-ID scaffold_3; pos 79621392 to 79622306 reverse strand)
caggaatttttactttgagaacattgtttgtaaaggtgaaatttcatgcctttggcatcttgctttgtcggtctctaagtgtattggtatactggaagttaagttttacctaaatggtggggatgcaccagggatttttacattgagaacattatatgtaaaggtgaaatttcatgcgtgtggtttcttgcttcgttggtctctaattgtatatttcttaaaatttccttattgatgtttccataagcatctcttcctatcctagatgtgagagcagagcctgattggcttgtaagagagtataaacatggttatgcttgtaaaagagttgccatttgagttaacacgttcttttacagattggcatgcgtgatatctattgaacattgccatttttatcttgtatgtttttatcttcatctatttaatctattaattattcccattcgtcttttctctgtactcccctctcttaaagcagtgaggatgaatctacccattatttctgatcagctcgttgacgattactggcctaaaggttcttcttgagacttccttgagaccagtgaaatatgtaggactaaaatttgttttggctgacctagaagaggagtatccttaaaatagaacttacctaataccctcaaattgcaagcccttttgaaattttgactatcttcaggaatataaatattttggataacaaaaacaactatgttcggcggattcttttacagttcaatttgcgatgtcagtgctagttcaagctttatttgcatattttcccctattcctggaagtttaactgttcagctaattttttaaggattttctcccttaagtttgtgagagtctcatgggggcatgttccaatcgacagattattgggagcgtttgtgcggtgtcatcatctct

SEQ ID NO: 92570 - DNA, 543 bp, Eucalyptus grandis
  Intron number 1 from transcript Egrandis_v1_0.040866m (loc us Egrandis_v1_0.040866m.g) derived from phytozome v7.0 (c hr-ID scaffold_5; pos 34147522 to 34148064)
agtaagttgactggagttaagtgagtataaaaactgtttgtgaaaataaaaataaaaaactgaatcgacatgcacctaatgtaagtttaaaattttaaaacttggtcaacccatggccaaaatgttaagtagtgttattacgcttacgccatttctttggaaggaatgaaaaagttcatgatgacatcgtgcttcggggtatttgatagttttgaaattttgatcatcattcaaagtcataaaaagcttgattaagtgtttaaataaatcacacacagcaatcgaaaagaaaaataagtaaattgttgtgcataaattattaaaaaaatgaatcacttggatgactaaaaaatgaaccttgaacttgttttgattcgtgtggagctccaagttctaattcgattgagtgcgaatactttgttttttctattttatattttttatttgctgtgattatgtgaaaatacgcatttctctgtcatttggctagtgattgcttatttgaaaataatgttacaacttctttttccatttttgtcagag

SEQ ID NO: 92571 - DNA, 1015 bp, Eucalyptus grandis
  Intron number 1 from transcript Egrandis_v1_0.018353m (loc us Egrandis_v1_0.013915m.g) derived from phytozome v7.0 (c hr-ID scaffold_3; pos 17073962 to 17074976)
ttcgttcgcattcgccgagcttggttgagatcgaggtgcgatctctctctctctctctctctctctctctctcctcttcttcttcttctttcgttgcgttatgcgttttgatccggagcactgggccgctcggggacctggggtatggagatagcactgcgtgtttcgttgacccctcattggaatctctctctctctctctcttgctcgctctctctgtgtcctgttcgtgttcagggcggtgatggatgatgtggcgcagggtgcacatcgtcttcttcccttcgtttcttcggttttatcaccgcctgaatctggcattttttgtttgtttaataaggtcgttgagggtcgtttcttgcgttaggcacgaaaactcctaattcgcatgttagttttccaggttttctggccagatctactctcgtcttagtacttttcctttttttcagtttctctgcatgccatgttgctattattttcctgatggcgtacctctggtccgtgtctgtaatgtgttcaaatcttttcgctttcttccttcggcttggtagatgcgggggtactctagttttgctttttggtgggcacagttttgtaaaggacacaagttcgagatttgagcagcaatttggctgcatttcacgctgtccattgctaagaggaggtgtgcttcctgtaaaagcatagaaaataggatttttggaagaagatgtctgtctgtaattgccgaaggtttacagctgagcaggtttttctcctatgctttgaaaaaaaaaaaaagaagataaaaaaggctgtttttaagggaatttggtcgacctgttttaacccacagtgccgaatgatttgttcgctgtagtctcagtacattaccgcattccaagccagaaattgctgccttttctaaaagtttcatttgaattctgatacctgaatttcacccacagactgaattaattctatgtctctctttctaggtagaacgtgtacgattgggaccatcgcttcattt

SEQ ID NO: 92572 - DNA, 835 bp, Eucalyptus grandis
  Intron number 3 from transcript Egrandis_v1_0.018353m (loc us Egrandis_v1_0.013915m.g) derived from phytozome v7.0 (c hr-ID scaffold_3; pos 17075911 to 17076745)
cagattttggtagatcgatatcccagctggtaagcaagaaatgtctgacaaaaaaatggaagatgcattcttggcttgattttttgatgcatttcgtgacacatgatattcttgttctaagggttgatctcttactatgtttttaagccttgagattaggaactggcagtgtgctataatgaacatttaacctaagctagtttaaagtagtgatgattaactgtgggcaactgcctccatgtaatgtaggacaatattttgtgttttgacatgttgcaggtgaatggggaattagcttacctatccagtgactcttttaagctataacctataataccgttttcatgtaaatctgaagcattgaacaggtttaaggtcaagccaattggttagttttgacctaagatgtaaggtgcttttggatcttcaaatctttacaccatgagactggaaaaatttagggctttgttagtgacttgtgcaagtatgtactctacacggttttagatttgcattctttcctattgcctataacttttagtatactttagcttgcatctttctaaagtctatatacacctgatcattctgttgcgcaatttgaaaattttgaagtttggtgaccttctagaagatgggtatcgtatgtggtattaggagactggtgaccaccctattatttttggcaagtaaagacttgtgttgtcggacttgattgttgtaaccaagaatcgtgggttctatgtgatgcatgagaaggtttgatgtgaagtgatttttgggttaatatgagcaaatgacaaattattaaatgtttatgttgcttgcaggggag

SEQ ID NO: 92573 - DNA, 887 bp, Eucalyptus grandis
  Intron number 4 from transcript Egrandis_v1_0.017602m (loc us Egrandis_v1_0.017602m.g) derived from phytozome v7.0 (c hr-ID scaffold_5; pos 11817932 to 11818818 reverse strand)
aaaggtaattgcttattgacacagcgttattaggcagcattttgcactgtgacagaattccaaatcatggtggccaaaaaaagatttcatgtcatgtcttcttctctgctaattttctttgtattctgaatttctgattgtgaccagaagtggcataatgcataggactgtgaggaatggcttttaggtattaattgcatcttgtggaaagggataaagatactttctataacggctctggagagtctttaagtcctttgtatctaattaccattcaaaccattcaatggagaattggctttattaaatgcaaaaagaaattctttcttttcaataaccattgtcaggaatggaataagctgtccttagattgttagagttagatcataagtatcagatcaaatgggtagctaaatgtatgtgctttcactaattcttgtatctgatagagccacaggaatcttgtgtcccttggagaaattgattgaaggaaatagagaaattacgtgttcagtcaagcatatgtgatatgccaccagtttcctttcttagagcaagtgtcttttcttaattttaatcgagtgtggcctcctgtattctgcaattgctttatttacattgctacagcaagaaatgtttgtctagagcaatttgtggtcagaacaaggatcacagaaacaacatgatgctgaattgtggtctaagcaagtaaaattcccaagcatgcagaagataggatttctggctctgtgatttgattccttttagacaacaaagacaagatgctgattctattgggaaatcacttcctctcttggtgttatttggaaacttaattgtggtgcttcattgacaggtattgcttcaggattccagaaaactacccg

SEQ ID NO: 92574 - DNA, 672 bp, Eucalyptus grandis
  Intron number 1 from transcript Egrandis_v1_0.002282m (loc us Egrandis_v1_0.002274m.g) derived from phytozome v7.0 (c hr-ID scaffold_5; pos 1473858 to 1474529)
cgagctttacccgttcgagagattgaacaatccgagtgagtctctattgcattctctctcgagaatcagcttcttgctctgtttgatttcgtcctattaattaaggcaatctgagttgggaggcaagtcatttaatgcttttttcttcttttttttgcttctagttcgtcctcatgtttatctgcatgtatggtgatgacggttatcagaacagaggagtgattctcctgtggtagtaatttcctggaagcccatctcttttgttgattaaactgttagtcgattcgcctgtattgaggcgtagcttcgttcgtgcgacacggtgttgctgcataaattagagaattatttcgaaagggttgctggaagttttaagtttctgtgctgataattcctgcgttgccagtcgattaattcagaatgtttatatatttaaagcgtgttgtatcaaagattcagaaagtcctgtagacatgtattttgctgcgactgaatttgatgagattgtgatcaagtcaccgggctgttcttgtgattttgctacggtgtggtttgacacgtatgttctttgctttagctcatagacattgattgtcttgcacaaatttcccttaagcgctgcatcttccttgtacagcagtcaatatcccgcacaattctaacactttgcga

SEQ ID NO: 92575 - DNA, 935 bp, Eucalyptus grandis
  Intron number 1 from transcript Egrandis_v1_0.004816m (loc us Egrandis_v1_0.003185m.g) derived from phytozome v7.0 (c hr-ID scaffold_3; pos 30323371 to 30324305 reverse strand)
tgtattctaaattaaacttgaggtgagttgatggtaattgatgattatgaaatgtcaaatgataacgataaaagatatttggtgctcttagtttcggatctgaaaatgaggacggtgattagtttgttggtgacaatgaattcaaatggctcttgggatgccagtgttctgtttcagttttgttaattaattgtagcacattctctctaaaattatcagcttggctgaggtagcgtctgggcatgtaagttggagaacatcgtggttccaaaagcgcatgcagatgccattgagctaatatttgtttatagatgatctgaaaatttgtttgcaatcttacttttcttcctgctcgtacaatgatctagatataatatacatgtcatgtcacaatcttttctggtgaaaaactgaatggctttagttatgtgaaaaaaagtaaggatggatattctcttctagtgccctgttataaaggttctcatggcttgaccgtttttgtggccgagttgtgctctttcctttcatttaaagaactgattggggttgtttgcagtttaatgaagtgataatttgttgttcactgtcgatatcacatgtagcacttcatgttgtcctcttgctctgagtgttcaaaatttgcttcatgtttgggtatttgaatggtaaaattatgaatatcctcattgtgtcctacattgttttgtgcaaattggttagctgttgaacaggccatctttgatcttcaattcttggttaggtgatctatgatagaggatttctctgaaaatgtaggactctagatatgtgtggataatgcacagttatgagatttccttttgggtgcaaaacctcaatttgctttttcgacgttacctaatgaagtgtattttttttgggtcactgttttataggaaccagtggagaaagcattt

SEQ ID NO: 92576 - DNA, 840 bp, Eucalyptus grandis
  Intron number 2 from transcript Egrandis_v1_0.043761m (loc us Egrandis_v1_0.043761m.g) derived from phytozome v7.0 (c hr-ID scaffold_3; pos 31519617 to 31520456)
aaaacgtcagtgaatcccttgcgttacagtttttctattacgtgattgagaatggctttctgggttgtttgaagtgtgttgttttttttttatggttggcttatgggtgtcggtagtgccatcgatattatgcaatggtgcatttacgttgctctccatcttggttctaagtctaacgaatgtgcagtacaggtgaattagcatttcctgctgtggacaacgaattaagagttagtgcagcaaatagtagagctttgaatcttctatttcactagaagggatatcgattgcttaagataatctagtctccacgttgttctgtgttaccatttctctgcatcaattgttaatgagacagagaacatactgaaacaccagtcagagtattgtcatcactcatcaagatatagaaagtcttattgtcactttgctacttacagagttgaacgtcccttctttgaacttttcagaagtttaatttctattatactgatatagaagggcactgatactcatcattcttagagatggaatagatggttatatcctaactggatgcaatttgtaatggtatgaaagtggttcttgttggtataaagaacaagttttgaactatgattgatgggaatccacatgcatgcggtccttaatgaagctacatttatttatggcgtggctatgccagatacaaaataagctctttaatcaatgcagaactggtattgcatggaaattttaacagaacttgcttttcggttattatgattcttgtatgcttatgtgaggtcatattatgttaatgcaggttgtggcaattagagatattattccaccgccaca

SEQ ID NO: 92577 - DNA, 790 bp, Eucalyptus grandis
  Intron number 1 from transcript Egrandis_v1_0.051390m (loc us Egrandis_v1_0.051390m.g) derived from phytozome v7.0 (c hr-ID scaffold_5; pos 15325889 to 15326678)
ccgacattgtcgctcgtgtattttttttttttgttgatattgctttagttatgattattggtcctattgatttctttgcctagttgtgattcactttatattcctcaagaatgttcctttattctgttctgttacagtgatctttgaaaagtatcttttgagagttttcctaaactagatgactgtaaattaatcacgttatgtacattgaatcctgtctagaaatacgaaagcaaggaaatggtagatggtttattttatatttgccgagtatgtttactattgatttctttccttctttaagagaaatatgaaaaacaaggggatgttctagtagttggatctccaacaaaaagaaacattgcacaaacttgagagtcctgttcttcaaaagatctcactttcttgttcgactgggtaaatgatgcttttgttattggctgaacagtttccatgttaaggagctttgttgcattttgttttttagtgtccctccaactgtaagcttgcgtcaatttctatatactcatgatttccctttatgagatggtaagagtatggcaaccttaaactgtgtcatgtaacaatgggcagatggtttcgcttaagagtacacgtaaaatactgcagggagttattctggttctagcaagtttcaatgattgggttgatccatggagggcggatggtatgttgccacttgacaggacttgaagactgtattttccttcttggaattcttggattccttgttgtgcttgcaggacgtattaaagaaagggactggtga

SEQ ID NO: 92578 - DNA, 806 bp, Eucalyptus grandis
  Intron number 2 from transcript Egrandis_v1_0.043318m (loc us Egrandis_v1_0.043318m.g) derived from phytozome v7.0 (c hr-ID scaffold_5; pos 45645953 to 45646758 reverse strand)
caggtagaggtctggtttcagaacaggcgtgccaggtaattgatagttttgagttctttttgcccaaatacatggctttacatctgcgtctcatctgcatcattctgatcattgtggaagaaaaacgtcaggagtgggagagaggcgggtaggggtgggggtggttggttctctcttaatcatttgatggtagttcaacagcgaagtttttctttatagtgagtgcatgtaatctttgggtccacatgtatcccagttgggccatcttgcacacgaggtgtgtgagcgtgtagcgggagtccggtgatgtgacttgtcacttaatctaggagtacacttctcgttctcactttagtatggagcaccaatatgtgggatccataaattctaagccgccaggggaggaagtgaagttattagggagtactcaaatacctaaaattttattatacaagggcccccgtttagattcatgcactcatgatttacaatgcagctctggaaagctctgtttatggttaggataatgacgttgggtcttttgcatcaaagaattggtttgatgaagcagcttctctatgttaagtttgagcaaatgtgcaattcttttgtctaatagctgccatcttgattttcttaatcacatggaaatgggctgaagattgttattcataccttactagattgagctgataatgtgttattatcatgctgtagtttggcaccaacaatctgtgtgggtagctctgtataaggatgtaccgtaacatctttttttccttttaccaatttagtgtaggtctaag

SEQ ID NO: 92579 - DNA, 922 bp, Eucalyptus grandis
  Intron number 1 from transcript Egrandis_v1_0.026829m (loc us Egrandis_v1_0.026833m.g) derived from phytozome v7.0 (c hr-ID scaffold_5; pos 13122606 to 13123527 reverse strand)
ttggatttgcttcgattcatgtcgggttcgaatatgtttgctttcgctctgtttctatccgcttagtcggttgaaagtttccgcatcattcgcaactagtccgttccggatttgccgacctcgagcttaatctgtagatggtcttcgcccaatctaatcgggccattagatgttgttgattcgcgggtgtttgttttcctgccgaatgtattgtgttgaaaatgctgtgctttgttttctctcgattggattattttttaatgtgggttggtgaaaggtgtctggtgatgcattgtgcgaagtagctgtttcctatttctgggctgaggaggtaggaatcgagtctcgatggttctgcttgtcgagattttttgcaacgtagcattttgttgtctagtgtgcagtgggagtgtggaggttcaagaatgtcaatgccctgaatggggattttaattctaaattcagacatggttcttgtactgtgaatgagatttacttggatttctgcagtctaggaatatatcctgatttgagctcagtatgtttcagcttgtttaagccgttggtcgacaaaacttaaaagtgatgtcatctaacacgatattgtttggtttactcccttattatgtcattctttctcttttgcgaaaatggttattccggattgaaattatcacgtcggcaatgtggcagattgtgtgcccctgatatttagttttctgaatttctatctaggcactgaaaaccacttttaaaatttcagagtgaaataacaaattttctgtacttttcattaatgagtttggatcataatctgccaagtattgactgtccgatagcttttgctgataatatatatccacatctcagagccatcttaaccttaacaagctttgtctttttttccctttttaggtaagtc

SEQ ID NO: 92580 - DNA, 509 bp, Eucalyptus grandis
  Intron number 1 from transcript Egrandis_v1_0.038351m (loc us Egrandis_v1_0.038351m.g) derived from phytozome v7.0 (c hr-ID scaffold_5; pos 24859153 to 24859661)
taccaagtacatgtccagacaatgtcttctccagtggccgccccaccaccctcaaaaggcagaaaagcgcttccaaatagaagaaaagcgctacaaaagaggccgaaaaaagcgctgcaaaaagctgtcctgaagaatccctccttcttgcaaatctcctcccagtttcaattagcactgatcccgcctcttgtttcttcccgcttggctttcatatccacctgtttccttgtgctttgagtcatgaaaatcgtgggcattagttttgcaaagtttcaatcatgccatttgcttctttatattgctcttgcaatgggttttaaccaagtctccaccactaatgaaacagacaaatttgtgcttctccaattcaaggctggcataatcgaagatcctttcggtgtgctcaactcatggaataatagcattgggttttgccagtggtatggtgttacgtgaagccggaggcaccagagggtcaccatcttggatttgtcatcccaacggct

SEQ ID NO: 92581 - DNA, 819 bp, Eucalyptus grandis
  Intron number 1 from transcript Egrandis_v1_0.001050m (loc us Egrandis_v1_0.001050m.g) derived from phytozome v7.0 (c hr-ID scaffold_3; pos 72077300 to 72078118)
gagagaagacgagcgatcggtgcgttttcgccatccgtcggagaaatgcccggggatttcctgcttgttggtttttggatacttttgctacgtcgtttggtgtttatgctttgattttttttttcttttttgcttctatttttccggttaatttggcgagctgtaagctcgaggaagagcgtggagatgaatatgaaccaaatgcattgcgctgtttccagtttgattgatgtgttctggcgaggaaaccacgtcgatagaactcagctggatgctagtttgattttgtgaaaatatgcttttagtgattagcctatgttcgagctgtgtcattgtgaaggtgagggtctctcgatatgcattttattttaggtttgtgacgtgatacctgctttagcaatggtttaggttgaaattcatgtgatgtgctggttccttgacgtccctttgattatgccccatgatgtcggaaccctggatagttgtattgcattccaagagagaggtatgaagtctgtataaggctcttgtttagaaatgatctaacacaaacaaacaccataattcctgtaacaagaaacttctctgaacttttctccttgtgcccgcgagagtgtgtgtgtgtgtggagataagagctacttttatttgttttcatcagttgcattgatgctgatcctgtccgttgtgatgtctctatgcccatcaactgtcattattatatagatacgtgtttttaccctaattagtttctctttctctattgggttacttgaatttacgtttgtaaattatgcaggaacaattcacagtcacaat

SEQ ID NO: 92582 - DNA, 565 bp, Eucalyptus grandis
  Intron number 2 from transcript Egrandis_v1_0.023621m (loc us Egrandis_v1_0.022645m.g) derived from phytozome v7.0 (c hr-ID scaffold_3; pos 76649513 to 76650077 reverse strand)
agctcaacgaccgccgcctccttcctctcctccgggtgagccccgacttctcgggatcattcggcttgtttgttttggtttttgtgagatgaacgtgattgttttagcggagaaatcttacaacttttacgggctactcatggtttgctaatatagcattggttctgctctgtctgctgagtggtgtcgttatggttctaaagaacaatgtgtcctttcctgacgaagtagcttcttgacatgtgcgtgatgctcgtctgagtggaaagatttgattttgcatctgttcttctctccagtttgattggaatttctagttctgttctggaagcagtgggaatttcatggtgatgaactgacgtatcggctctttcattcttatcttatatagagactctgaagttttatgttaatctagtgactagacttcccttttagttcttaccttttctctttttgctaacgatgacttgcactgatatttctttttctttgcattcccgtattctctgctattcaattctgattagactgcaaaggagaactttgagttggctctggcggc

SEQ ID NO: 92583 - DNA, 400 bp, Eucalyptus grandis
  Intron number 1 from transcript Egrandis_v1_0.032762m (loc us Egrandis_v1_0.032762m.g) derived from phytozome v7.0 (c hr-ID scaffold_5; pos 7862593 to 7862992)
acggtgagatttctttttgtccttcgagaagttaattcttttttggcatattgtgtgtatcttccgcacttctctgagatggggttcttgatgttactctcccctgggttttcttgaacacttcgctctgtatctctttgtctcaagcttcatgagttgtcgtttcgtttctttctttgctgttgtataaataataatgctcggaataataaaacgatgctttgaattcctattcattgtttgattatatacggccaactttgtttaatcgctagtgtatcacaccacctgtgaatgccgagttcagtcatcgtaagagattgaaatttgctcaagatctaactgggttttgctttcctcaaacttttgcagaagttggtggtgaaggtgcatctacgga

SEQ ID NO: 92584 - DNA, 789 bp, Eucalyptus grandis
  Intron number 4 from transcript Egrandis_v1_0.028174m (loc us Egrandis_v1_0.028174m.g) derived from phytozome v7.0 (c hr-ID scaffold_5; pos 22314922 to 22315710 reverse strand)
ctttgtaggatctatcacgactgttgtggctacaggtcctccactcatgcttcacaaatataccatggcactttggttttattttcatgttaatctatgagtatgcaaatgtgatcaattctttggaacacagaggagtaggttatttcatgttgcttttgtgctcattggggcatcctccactagtcttaagatttttggagttaaggatgtcatcaatcatcatctggttgatccagtaaattttccatttaaatacttttggctttaaaagaacagttcttaagaattcctcaatttgcaaacagaggactcatgaatttaacatatggacatttttgctggataattttggtgattcttttgggtggatacttgcatggaacatcaatttgcctatgacagacctggtaatattattatatagtttggcttcacacaacaacatgaaggcaaatttgagaagtggttgtggctaatctgtttgataggttgacaaaggtacttaaagatgcctgtgacatgtttgtcaagagtataggatgtgatctagactggttttgtaatatgggattgactattgaaatactgagaattccttacgaaaaagtcccagaaaattccaattctgactgctagaattagtactgtaattttttagagtggtcttttccatattaatttgagacacgagatgcctctctgaatggattagaagaatttgttatgagaaattccacccttacttggagagctccataatttatctcgtgcagttattttctttac

SEQ ID NO: 92585 - DNA, 707 bp, Eucalyptus grandis
  Intron number 3 from transcript Egrandis_v1_0.028174m (loc us Egrandis_v1_0.028174m.g) derived from phytozome v7.0 (c hr-ID scaffold_5; pos 22315894 to 22316600 reverse strand)
cgggtaaggcttgaatggagtatctggacctcgacaagaatgctgttggagtcgatttgtttatagacagtcgagaaagcgagtacatttagttgttgatgctagctaaagtgtttgggtggatagtcggtgcaccgagggttagcagcgtggaagatggagaatgtcgaagtggtcggaatgtagattcaattcatttcctagttctgttgtcgtcgtgaatctgtcgaaggaaacaatgcgatacgcctttgtctctttttcccccctgagttctccgcattttcctctctttttcttctctgaatttgctgccttatataccccttttgtttttatacttttcaaacattaaaaaactaaaacatgctgatggcatcagcactgaaccattggtagcacccatcaaaaagcttttggtcttcacagttgtggctcattttatactagaatttggatggcattccacatatgtagtaaggggaaaaggtagaaatgcctttttcagttcccatttcctttattttgcattatctcatgttgaaggatttataatgagtgctttaaactgagacagtctctcttttttgtgagtttcagtttcctcattgataaaattttcccaagttcacctgatcttatgtcggagtctacatccattttagcatgtttttattcttacttggccagagtatcggcacccttcg

SEQ ID NO: 92586 - DNA, 756 bp, Eucalyptus grandis
  Intron number 1 from transcript Egrandis_v1_0.041840m (loc us Egrandis_v1_0.041840m.g) derived from phytozome v7.0 (c hr-ID scaffold_3; pos 9472856 to 9473611 reverse strand)
agctgcaccattgtcgtcgacagacaagccaataagtcagaggtggaggatcttgacgccggatggatctcatgccatttatcccaaacccagagctttgaaccactttgagatacaggatatggtcgagcattatcgccaggttgccataaatgccattcgagccggttagttcatggattgccttaccttcattagttccagcataagagtttcccttaatgagttttctgccttcgaaagtttagtattcgcattgcttttcaataaataaatcgcagctcgaatcaaacttagtttatacttctggaaccccatgttcgggtaaacttaaactagcatagttgggaaagaaaatgttcaacctactggcagggtgggacctcatagagaaagctttgaagagacatgatggatattacgtaattgcttcgttgtcaaatgcttttgctttctacttggttggcccttttgagattgaccattttggcgatttctaatattttggggttttattgatatcaaatgaaagatggcagatacgattcttcctttgcaaaataaaattattgtcagatagtaatagtaaggctgtcaaaaggcctacgtcttgcctcagatgaagttatcagccttcttttttataccaagccttcgtttgatgtccgtttcttgattgatcgactgtgtattttaccatggacatttttttgtttatcagggactacactaatccataccttcttgttgctccat

SEQ ID NO: 92587 - DNA, 418 bp, Eucalyptus grandis
  Intron number 2 from transcript Egrandis_v1_0.007785m (loc us Egrandis_v1_0.007195m.g) derived from phytozome v7.0 (c hr-ID scaffold_5; pos 10842370 to 10842787)
gtgcgagggcctactacacgaaccggaggcaagtgcttctccccagacctgtaaatatgaatttatgctcttcatttgtgaaatgaggtctttgttttgtctggaagttgttttgatgtggttttttgtcgatatacgtgcctttgcatggaactcgtttagacttctgtggatttcttgttaaaaagatgccaccagttctactgaagttgtttaaggctggattctgtctaattaatgttctacacagattcataacccgagttgtctaatcttttttgtgtcttttttctttttgttgttttctatgatcagaatttgtgatcgactaatctcataaggtgtgtcatgctaatggtttgaaaattgacttacattccggccaacttttttcagccaacctccccttctgagtgca

SEQ ID NO: 92588 - DNA, 526 bp, Eucalyptus grandis
  Intron number 3 from transcript Egrandis_v1_0.024558m (loc us Egrandis_v1_0.024558m.g) derived from phytozome v7.0 (c hr-ID scaffold_3; pos 54791547 to 54792072)
cttcttttcttttgcagtatctcactgggggactggtaagacattcgctcttcagcctagtcttgtcaggcgcgaacgaaaagatcaatacccaatgatcgcatacggtagatcacaaagtacgcagtacactaagagctaaagtcttttagatagcaagattatatgtacaatagatcgatccttatcccgtgttcaagcaatctgagattctactactgcactagcttcgccaagcatagtgtattatcatctgttttttttccataacaatcgcaaagttaatgatctaatcaattttttaatgacacttttgccaaggagcttcacgttgtagcacgttttctctgaaatgggcgttatttcttttcttaaactaaaagatagagagagaaaagtaagaaaaagacaatcaaatgatgggtctccgagctgtatattcttgtcctcacttcacattttttgcaaaactttatgacttctttttcttgtgcaggctacaccagtacatacccttgggagtgga

SEQ ID NO: 92589 - DNA, 933 bp, Eucalyptus grandis
  Intron number 1 from transcript Egrandis_v1_0.021712m (loc us Egrandis_v1_0.021712m.g) derived from phytozome v7.0 (c hr-ID scaffold_3; pos 54443937 to 54444869)
ccttctccccccggatcaatccgacggcggcacaggttcggaatcctagatggctccgccctctgcatctccccttcgtcgatcgcctgagaaattggctgaatcgaatgcgcgcgcgccttgcttttttccgtccggcgttgctggttttgagggggggatttttctttttgcgcgaaatggtttcgagggctctgtggcgttgtttaaggatctgtttcggccgggaaggatggggtatgcgtgtggagaagatgtgggtgtcggcgaaacgaagtgctttgcattggtgcggatgaattagcctgaaaagacctgattttgagttctagggtgcgcgttcctggccaagttctggtcttgatgcgaggggattgtgtttaggcgttgccgtagttagaagtagaagccctaattcgaggaatggtactgttatatatcactgttcaaagcagaggcgaattcggtttgatgatttgaggacaccattttcattttggtgacaattcgattggcttgctaattgctaaatgtccttgtggagttaccgtgtagcgtagcggcattgtaaaatgcttaccttttgcccgtccttggtttgcttccaagcatttccctgtggatgggtttcagatttgtacgatgtaggcatgcgagtaatgctaggattggctcctaccgtggttaaagtaatgaaagcaatgtggcagtgctttgagatatgaaattggttttatcctggaaaagctttctcttttatgacttatcctttttggcatatcgagtttttgggatggcaggataagagcgtgaggaagaggaagtggaagtatcctgttaacagattttagcataaattatcccacatttcttactcgtgtgtcttatttgcatgcagctttgtatcgtggagaatatccagcctttgagact

SEQ ID NO: 92590 - DNA, 794 bp, Eucalyptus grandis
  Intron number 1 from transcript Egrandis_v1_0.031321m (loc us Egrandis_v1_0.028791m.g) derived from phytozome v7.0 (c hr-ID scaffold_368; pos 15223 to 16016)
acatccggctggttctagccgacgctcgggtggaggcaagtaatctcgggtcgtctttcttggtggaatttgatgatggaatctgtttcatggttagcgtgcacggttaggataagttgaattaaatccccttcactggccgatggggagatgatgatgtggtatgacactgtctctttagcttggaagtgtgccctgaacccttaggactcaaccgagtaatgcgatgatactgaactgaacatcgaaataagtgaagcccatgcttttcatggctagcttgttcagaccctcgatttgatcttgttggttgagtttttgtttagtatctccggcattgctcattgtctttgcatcagcaatgtgggttcgcaacatgcattttgttgaaagaaaaacgaagtccgtttgttcggactgcgaagtaggttgagctcggtattcctttgcattgtttgaattggtgattgtttgaagtcattgtgagatgcacttcattttgggtatttgccatttaacagttggtgagactgctttgctccttaaaaatatctccagttcctggttcagtaatcgtttagttttgttgaacagcctacgctgctcgtgtctagtcctttgaattgtactttctctagacagacttgataaagctgctgattaattcttcttcaaaccttaaatagattggttgtgtggaattgcttagaaaattaaatctgatgggtgcatggtctctctttctttgttcgtttgcagttggctcaaattttcgacacttcagtaggcataac

SEQ ID NO: 92591 - DNA, 686 bp, Eucalyptus grandis
  Intron number 2 from transcript Egrandis_v1_0.009060m (loc us Egrandis_v1_0.008558m.g) derived from phytozome v7.0 (c hr-ID scaffold_3; pos 39455199 to 39455884 reverse strand)
tcagtttgtatcggtgaagcaccaagtagccaatcgtaagttgcttcaattagtgtgtttgtccactttgctgtagtaaaagtctggaaatatgcacaactcttgcaagctgctctctaatgctttagcttaagtttgactctaaattcatgaggctgaagatggggaatttattcgtggtccatcctttgtgggataaattactcatgcgcttcaacggggtgacctctggatgcgtactatttctctgattaatctcaaagcgataataaaatagcaaactaaaagactgattgtttacttaaagcttgctcaatctaaaaagacaattgtcgtaacttttaagagctgtattgcagctccataagtagctaggcacctggcatcctaaaaacaatgtcatatttcaccttgcatgagctttttgatagtatgctcactatgcagctggttagctatatatttggaagctctgtatgacggaagttgttgaaacatctatggagtcacattatctagtatcatatctgctaatttcttaaagatttttttttttttttttgagtttcataaagttgtgtgaaaaagaagaagttgatcatagttctcaaacttttacatcaaccaaatgcctgcatgagaccaatggtgctgtgtcgctgcttacaggtacttagtgatcccga

SEQ ID NO: 92592 - DNA, 391 bp, Eucalyptus grandis
  Intron number 3 from transcript Egrandis_v1_0.006190m (loc us Egrandis_v1_0.004804m.g) derived from phytozome v7.0 (c hr-ID scaffold_5; pos 9304622 to 9305012)
aaattctttgccaggtcgtgaacgtccagctcctggtatgcttcctcaaatcttcatcgttttcgtgagaattgatgttcttgtttcttctttttattgggtaaattgcctggttttaaggatcagctcactgagctaagtcaaatttcgatgttcaccgtttatatatatggtcacgataaactgctagaggcgcttggtgaatttggtggctgtaagggtttcgatttttctaatcagtggagaggaactatatcagtggcttcgcagcaaggcttttgccttgaattagaattcttgacgactggaaggttgcattggttgggctcttggaagctttgatattaattggtttgttttcttgtttatttttaggcggagcaagaaacgg

SEQ ID NO: 92593 - DNA, 578 bp, Eucalyptus grandis
  Intron number 2 from transcript Egrandis_v1_0.028538m (loc us Egrandis_v1_0.028538m.g) derived from phytozome v7.0 (c hr-ID scaffold_596; pos 7408 to 7985)
ccagcatctccaagcaggtatgacattcactgtgtcaacttgtattaaggtttataaagttgatagactggtggcaattgttagattagttggtccaataaggtaaaattgtcaaggttggctgtacataatgctccggtaatgacttccctataggagatgagcagcaagctatttccattacttcctttagagctacagttctgaaaccaataacttcggcaaaaagaacaaaagtagataggtaaatctgaaaaaattgtttgattattggaggcttcacatcataagtatttttcttctttgagacttgcaaaaaagtcgatctcccttacttcaaaatgactaaaaagcacaaacaaccttgcggtatcatctagatcatctatgttgttaattacagtatagttaagtgactacaaccatgtggtaggctaagataaatgcttcctttgcctgaggtagaggaaaatgtaagtcaaactgttggcacatgacctcgccatttctttatctcagcttttgcatttttgttccatccaggcctggagatttacattctgcagactccaaagaaa

SEQ ID NO: 92594 - DNA, 977 bp, Eucalyptus grandis
  Intron number 1 from transcript Egrandis_v1_0.012815m (loc us Egrandis_v1_0.012815m.g) derived from phytozome v7.0 (c hr-ID scaffold_3; pos 76059413 to 76060389)
gaattcctctgcagctaaggctgcttcagtggaaggtactttctttttctttttccttgttctttctatgaataatttgaattcgttgatcatcgggtgcctgtaatatttggtaaatacccaaatgggattcttcttttttttttttttttttttaatgttcgagtatttatctatctgagagaacccagtagctattttcatgaaaatgttgagaatttgacagagtgatcttgtggagcgagtgcaagtgatacagttaagattgtttctagtacgcctatagcctgatttaattaatcgtatcatagtaagtaaatctaattaactttactgaggcgtccatgttcgattcttggtaactttctgcaatttactttttggtgctaataatctgctacttataaagttgtgagtttctagaaatgagtatgtttatggtgaaaccgttggctagtgccatcagatcaatctgcttccactaatacatatcatactctctgcgaagacatatttacatgttctgccttgaagaaaattttggaggattatttggtaggccaaataaaaggggctagctctgtcaaactattttcttggaattgcaaagaaactatacacgaacagaaaacaattaaagcagtcttgtgtttgtgcacatgagcatgcattgtactattgagaacccatccaaaccaattactcttggctaccccttgtcaaaaccaaatttgaatggccctgagtagatacagaagattattacagcttataatcttaagggattaagggccaaaaataattgcctatcctgtatgccctgagcaaaattgactggacttggttgcttagttttcaccgattgttcacctctgattttttcttgttcatctcataagcttgacatcattccgtgtacattttctgctcttgtaattgtagagagtacttctgtagtttcagctcagacagccgaa

SEQ ID NO: 92595 - DNA, 568 bp, Eucalyptus grandis
  Intron number 1 from transcript Egrandis_v1_0.033330m (loc us Egrandis_v1_0.033330m.g) derived from phytozome v7.0 (c hr-ID scaffold_5; pos 23921993 to 23922560)
gagagacgcaggcacccaacccaacaacgctctccgtgagttctccatctatctttgttctcattttcgctttctctttctgtacactttcatttccatgtatgtttttattcaattgatttcctaccttttctttgcacttcgttatcccatagattcatcactcaatccaagtccccattttatacttgggtatagaaccctagagcgatcccaatccctctccctttgctttattattactgtaaataaattcaaatacgtatttcataacaactttgacggcatagttatttccgctatgccattttttttttcttctggaaactgactttttgaggattataaatgttgaattttttgcgaaataaaaagagcgtactgaaatcgattttcatctttctcggcaatttaacgtccgtctaattatgcactcccatcgtcccctcttaaacctttttttatttcttctttttctttgatttttcccgttgttgtgaagcttcttccttttctcttctccgccgccatagcccaaacttccaactccaccgacgcctcatcttcc

SEQ ID NO: 92596 - DNA, 578 bp, Eucalyptus grandis
  Intron number 2 from transcript Egrandis_v1_0.038372m (loc us Egrandis_v1_0.038372m.g) derived from phytozome v7.0 (c hr-ID scaffold_696; pos 9505 to 10082 reverse strand)
aaggggacacgttagttgaggtatttgaggatcattttgatcggccactccgaatccaaagtaaagagctgccttcattaacattattatctccaccttcgaagaagaaaaaaacaaacgagtgcttgtataagcaggcagttggaggtagctcatgactttgcactttttatttgaacattatgaagcaattttaacatttttgtagtaacaaaagttttatcttaatgcacgggatttacttactaaatgatgtgctagatgattagtcagcgtttaagcaagtggaacatacacagcgtatgttgtcttatagaagtctgtcaaaggtcaaagggtgacacagatagttctagttataacaggatttcagggtgacaaagcaattcctgcaaccaaaaggtgctatatctaactcacctctaaccgatccttaatatgttgtattcatatgtttgaaattgcaggtggtgcaagcaatatcgtctgcgatgtcaatgcaggcctcaattctagctgctggaaaagggaacgtcccttcagaggcggtgaaaaatctgaggccttaaaaagagctg

SEQ ID NO: 92597 - DNA, 968 bp, Eucalyptus grandis
  Intron number 1 from transcript Egrandis_v1_0.009150m (loc us Egrandis_v1_0.009150m.g) derived from phytozome v7.0 (c hr-ID scaffold_3; pos 57636020 to 57636987)
aagaacattcaagaacggaaagaaaggtaatgctcgagaaaggggggaaacaagcgtgatagttcgtaggttcttcttttcttggttgatgctctgttcggttgcggggagaatgtataaaataaacgagggtagctggaaaagtcgaaaatcttggattatgattttgctcgggtgaagaattgagttgaggaaagttcgtgtacagcgagtctaccgtgtatctctaacttgcaaaacagttgacggaattagattcagttcgtttgattcattgttttggttatgatctgtttggttgttgagaaaatgtaggaaactggaggaaacccagtttgagtactcgattttttgggcttaaatgaattgtcttgatggttcgatctttaaagctcttaccgattttggtttagtttagggtatgccgagatgcgcaggatgaataattattatcttataggaacttaagaaagactgatttttttcctctactgatgatatcatgggttgtcaggttaatcatattattttgccaaatctttaggtctgctttttgtcactgctactggacctgtctagtgaaagtggagagcattcaatttgtgtttgtgcagcttattgaggcgtcttttgagaagatttttggtaaagagaaaatggtctatttgagtttctcgtagaatatctcccttttttcttttcttttgtcagtcatgttcataatcgtaatcaaagcatctctatccttatcctttttccgtactttgcatgagactcaaagtctgcatcgttaggcatgagttcgtggtgtgatgcgcgagtggatgtcatcagttttcggtcgtcgatctcaagtattcttttgggggattaacctgtgcaattatgagtgtgatcattacatgttgggggaatcctgattcaagatgcataaaaagtgcctaatttacatgtttatatggcaggag

SEQ ID NO: 92598 - DNA, 926 bp, Eucalyptus grandis
  Intron number 1 from transcript Egrandis_v1_0.005768m (loc us Egrandis_v1_0.005768m.g) derived from phytozome v7.0 (c hr-ID scaffold_3; pos 67715109 to 67716034)
atcgactacatctgcagcgtcgtccagaaccgcaagtgagtaacgccgccgtttcgctccgtgattttggacttgaatgggatggtcatttgttttgagtgaatttggagtagctgatcgatgtagagtcttggtgttcgatcgtatggagagagagaggtttgtcggtgagcgatgatttcgacattacgtaaagatgaaggtcgctactccttgaattgcagatatgagtgctctgttgatttgtgtggttttaagcatgatgttgatcagtatagctcttagatatctagtgtaatgcttttgatgatgcggagctgccttaccagaactggaaaaatgaaggacagaaatggtgtttaaatgctcgaaagttgctttgaatgagtcgttttagcaatctatcttggaatggctattgatcaaattaaatgtattctgaaacgatacatgttaggagtggacaagaacctgcgatgtcgttagatttgagtttgtgcatttaggtgtttagattgtgcagcaatgtaattggttaagtaagtgcttagtttgtaatgttcagggtatacggaatatatctttttcgaaacttgtctgagtactagcaagaacgggttcaagagttgtagaaaattttatcatggtttttctggtgttgtatagaagcagcaataaagtttgcggtcttggaagaaaggaaagtaaaaacttacacaacgacaatatattggtactcgatcaaagagtgatagatcaagagcttgactgttgagaattagttgtatttctacgattcatttgcttgttacgacgacaaatcaaactgaaatgcctcattgttttcatttaattagttggcatctatgttcttgtgaagtgaagagatcttaactttgatttccaggatcattgttgtgctaaac

SEQ ID NO: 92599 - DNA, 756 bp, Eucalyptus grandis
  Intron number 1 from transcript Egrandis_v1_0.036795m (loc us Egrandis_v1_0.036795m.g) derived from phytozome v7.0 (c hr-ID scaffold_3; pos 22710186 to 22710941)
gaggtaatatacattttgcaggcccaataatgaacatgtgacatttggccaacaaaatgaatatgtgaagcacaaaaccagaaacagaatctttcattatcatctgtcagtgcctataacagtaaaagcatcatgcactcaaaacttcaaacatctcacttaactgagtccaaactccaaatctttgcagggaaaagagaaccagaaaacaaagatactcacagcacacaaataagaggacacatgaacttactgcttcaattttgctgctgaagagcgccccactaatttcagaatcctcgctacagccacagctaccacaatctccttcaagtgattcacagtatgaattcatctccaaaagcttgccgtcagcttttgattgattaagccggtgaacgtaagtgtccccaacataatcccaaatttgctgtgttcttaaatctagagaatagcaatgttgcgtatttttccaatggctgattgcgtgcttatctttgtatctacaaagccagaaaagaaaagctataatgaagacagcctatccaatcactaaacatatagagtgagcgaaaattccagcacatcatgactggatctatcaccttccacatccaacaaaaccacatatcagacaaacccaaagattttccattgttccacaaataaagcaggatggcacctcatcttgctgttggcatagtcggcaaacctgataaaggacagaaacagatcttcttcacaatcagttaacag

SEQ ID NO: 92600 - DNA, 762 bp, Eucalyptus grandis
  Intron number 1 from transcript Egrandis_v1_0.017498m (loc us Egrandis_v1_0.017498m.g) derived from phytozome v7.0 (c hr-ID scaffold_3; pos 54065047 to 54065808 reverse strand)
ggtatcgcaagttttggtgagtggtaacttccatgcatggtcagttcatgcacgtggagaaggtgatgagtgggtagatggtttatttaggcatgactaggaagaaccagggtttggctggagaaatctttcattaaattttggtgataatttaaaaagtctttataaaccaataagtagataattactctttgagtgcgaggaatatggtgttctacttcactcctgaacctagtttaataccattctagcaccaaaggcaaattaaaaagattagctacctatttttccctatatacttacttgcatgattactaaattgaagtcttctttccttctttctagagattcagatactcctccagaaagtagtcgactttgtgattctagtgaacctgaaaatcaaagagctaaaagaggggagggagctgcatatgtatcaaagattagagaacttgttattcaagcttactacggagtgatgctaaaaaattcgtaggtttttatcgcttttgcagatctaataagccacttccagcgaaagcttgtaatatgctcaatactactttcttattttagtgaaggagtgatttccactatgaataatgctataaatacaaaaatgtatttacaaaacttggttttatgcagatttaatagacttgtcttggtatcgttagcattatcgatcttgcttgtactgggcatcattatgtttttgtcctctcttgttttcttggggtcacgtacaacagtgaagta

SEQ ID NO: 92601 - DNA, 778 bp, Eucalyptus grandis
  Intron number 1 from transcript Egrandis_v1_0.015790m (loc us Egrandis_v1_0.015790m.g) derived from phytozome v7.0 (c hr-ID scaffold_5; pos 21029503 to 21030280)
cttacaggtattgctgcgatcgagcttcgatcaaatcctccgcgcgttagaatctttcgcggtatctccatccatccgtctagaagcgtaggtcggccgacgctagggttggattcgctgcttttgctcgctttggagattcggcctttgagtcattaactgcatttcggcgctaatcgcacgttatctttcttgattatttatgcgatagtttaggccaaaaaggaaatcgtttggtgatgttggattcgctagctactatcctgattttgcagttcgaccctaaaaaaaaaattatgattttactgtagattttatgacattattgagcggatactttgatgcttatcagtcattgatgagtctggctttttcctgagtaatactgcaatgcgtggcttcaaaaagtgggtaggcattgatcatgttctgtggaaattaaccgagctttgttttcgtgaccatccgctgatcatctcaatggaaagtcttctctggaaagcattatgctgcgaaagccagtaataaccaaccaagtgtagcgaaattacaaactttgcctccgagaatgtcgggacactctttcactgtggtttagaatttgtgtcattttcttgaacgtgctgtaatctggactctagttctatgaggaaccctcctctggatgtgtcagcttgcgagtttcttcatcactgcatgcaccttttaaaaagggaagttgtccttttaaacttgtgttgcagaagaagaaaccgacccttacagaattccaacgaaa

SEQ ID NO: 92602 - DNA, 983 bp, Eucalyptus grandis
  Intron number 2 from transcript Egrandis_v1_0.039048m (loc us Egrandis_v1_0.039048m.g) derived from phytozome v7.0 (c hr-ID scaffold_3; pos 1847281 to 1848263 reverse strand)
tgcttagtgcttgatacttcaatattccaaaagaggtaaaattgcacttgcatttagtgttattcaaattttaggcgaaactgtttttttttttttaagtttgtgcagtagtaattggactccgtattacaattatattaaaattgttcatgtgcactgatatatgtttcagaggtatcaattttgtttgattttacggaaagtaaaactcatattaattcaggatattatcatcaaccttaaaatgaaactgatggttaacatggagcaattttgaggcatttttcttggaatttactctacactttgcatgataaaagaactttccttctgataattttaaatgcccaagttgactttcaagagtcactgtaagctgaactacatgatgcctcatacttcgtagcctgaatgattttattcatgcttgttaaggttgtcacccgaccttcaagtatcataccatctttccatagaaacatctagaaatcaatgtagttcagatgttgaaagtgatgggacaaaattgcaggagttacttttgcaaaattttgaacattgttgcatgattcagagaacatttttgttctctacaattagaggcctgccaagtttttgataacatttttgttttcgtttttgtggaaactggtttcaatgttttatcacagaaaacttgtttgggtgaaaatgatgtacgttctaaggatgacaattgtgagaatttgcttgtttttcatcacaataagaaaagaggcttagttattctccacgtttgcacatagaatgtgaacgctgaaaagttgtcttcagttcccaattttgattttaataatagttttcctttcaactgttttcgaagtgttaccaaacacattttctggaccgtttgcattctcaaataaaatgagaacagatatctgagaatctttatctgccgaatgcctccttagattctcaatctcttcctgtctgcagtaaaa

SEQ ID NO: 92603 - DNA, 676 bp, Eucalyptus grandis
  Intron number 1 from transcript Egrandis_v1_0.039048m (loc us Egrandis_v1_0.039048m.g) derived from phytozome v7.0 (c hr-ID scaffold_3; pos 1848351 to 1849026 reverse strand)
cggctgtgaggaaggtacactaacatagttgcctctcaagagccttcatgtttcttcaactaatgggttaatgataggaggtctttttgctctgctgggactaattttattttccttcctaattagtcttccaatatatttcaacttcaccagatgttagattgtcttttctctggtttttcccatgcattaggaaaagaaaatacaaaataaaccttgagagacactttttgaacaattggtgatcaagctaaacttaaagttaaacaaaggaacctagactaaatgaaacaaaaaattactgtgaattgtgcatagtttcttgctcaaaatgctttggtaaccagcaaagaatttcattcactttgtgatatttaagttatagtgatcagatacattgtcttctcatgaacaccttattggaatttgatagagaaactatcgagtaaaagctcagtggtaactaaacatgtttctataaaaatgtcaaacagcttggataatattttatagacgtaagatgctgactttttgctaaacttcaaatgtacctactgtaagtttattcctgtcattggattattccagatatcatgtcagatgtttcaccagagcaagctaactgccatgtaattgttatcattaggtggttttatccaaggatctttgtcatttg

SEQ ID NO: 92604 - DNA, 813 bp, Eucalyptus grandis
  Intron number 1 from transcript Egrandis_v1_0.032573m (loc us Egrandis_v1_0.032573m.g) derived from phytozome v7.0 (c hr-ID scaffold_3; pos 52386473 to 52387285 reverse strand)
ccttcctcactttttgcctcttcacgctttcgaatgtctattgctcagtcaaatcatatcttatatagcattgaaccgaacaaaagaataacatgatctcaaaatcctacagttactttcaaattgctaatttcaattgcttgctagtcaaaactcggacattccatggtaattgacatagcttgcaaacttcatagatcaaattataatatcaaatatccggatctttaccgaattgggggtctctccaggaccgcacaaccttagaaggggtcaagaagaatcattcctccgccacgcgagggacggtccaaagcctgaatttttcttccttttcctctctcgatataattaatacctacaacggaccctcaaaacgtgtggagcgttccaatattactcctccatttggaattaatcaaagcagtgtgacgccagctggcttcgttttttgggccttcgaatgtcaacggatcggattcgatttattccgtttccactattgccaagtgggtggaaaccctctccccaattttctccgtttcggctcctgatattttccttttttaatcgtaatcttattaattatattcgggccgaaaatctaggtggcgaagtcctacaaaatatcatcatacctgcaccagcaaaaaatacattataataataataataataataataataataataataataataataataataataatagttattattataataacaacaacattgagaagaaaaggcaacgaaattactcggcaagaatacaccgatgtaccttaattgaacaggacgacgacg

SEQ ID NO: 92605 - DNA, 688 bp, Eucalyptus grandis
  Intron number 1 from transcript Egrandis_v1_0.020037m (loc us Egrandis_v1_0.020084m.g) derived from phytozome v7.0 (c hr-ID scaffold_5; pos 42825494 to 42826181)
cgctggactggacctcattgttgctgcttctgtgggtacgtcatcattgttcatagaagtaatgcccttttgctttttgttctgttccattctgtttttccgcctgaatatctgatgtggggtaggcgtttcttggtgattgggggagactgggatctgggctcgggggaattggcggagcaaatgcttggtttcttgatctgggaatctgattagagtttctgcaatttcgctcgaattatggagggttctgcttcgttttgatgttttccatgtggtccgtatttgatgagatgtcaagtgctgttctcttggaattggatcaacatggtttgagattagcagtctaacagagtggttgattgaggaggtggttacgtgttcctaattgagatacaatgacattatattgtagctctcttaatgaaaagcactgattacgtacaattataagtgtagaaataggatcttgggttgttatatgatgctactgagatcgattgtgatgatatcatgatgtttatgactgttcattctcgagtccatgaaaaaaaatcagagatttgaatatatggcggtgtggttcataattgtgcgatcttccaaggtgtgttttgtgccagcactcatgtcattgatctttcgtgaaacagggtattgctcttcacgggtaaaggcatttaactta

SEQ ID NO: 92606 - DNA, 852 bp, Eucalyptus grandis
  Intron number 1 from transcript Egrandis_v1_0.010601m (loc us Egrandis_v1_0.010601m.g) derived from phytozome v7.0 (c hr-ID scaffold_3; pos 49392446 to 49393297)
tattgcgcctttaccaccagcgtttcaacccccaggtagtgccgtatttaaatattaaacaatgtccttaatttattagattttaacttttttgagtaaattaattgtggtctatgaccctatctacaacttcttgtcttgtccaccgatccaaaagaattttccattagaaggacgtgataaccattctagccaaaaattaatttatggaagagaaattaatttctggaagagaaatagatttttctatttttatttctagatgagtttctaagcaaaaatacatgattgataatggtacaaaatttctactctaaaaataggaattcgtttgataacgacataaaatttctccattttggacgacggcgaccgatagctggcgaccggtggtggtgatggtggccaacaaccagggtggcaacgatcgacggaaggtggtcggcaactaacagtggctagcagcgaacagcagacggtggtcaatggcaacgaatggatgaccggttcataacaggacgaatgatgagaataaactttatttcttatttttgtttcaaaaatagaaaagtaaattttttatttttgatttctattccaaacctatttctgaaacaaaaatatattttagaaatagaaaaagagaaataattttatcaaacggatttctattttagaaacaaatcggagtagaaaaattgtttctgaaacagaaattttgatttgtcatacaccccttaaaatgcaggccaagttaggcatcgatctaacttccgttacccttttagcttacatcattggtcgtttttgcttgcagtcacctggggtggcaactgagtacgatccgatttt

SEQ ID NO: 92607 - DNA, 902 bp, Eucalyptus grandis
  Intron number 3 from transcript Egrandis_v1_0.026530m (loc us Egrandis_v1_0.026480m.g) derived from phytozome v7.0 (c hr-ID scaffold_5; pos 3149271 to 3150172 reverse strand)
ggttgataaataaggtaagatgcacctctgattggtgaggaacacttaattttttatcgtgtcattgcacagcgtgctttaatttcattttctcaccttaatgtcttctccctagaaaatctagaatatatagaagaagatttttccgaggataaggaaatgtgtgctcttcagccagactcagcaaatttttcttgctttgttgacccagtgggtctttcttgcaataccattttgcctgcttttatagtcctttcttggagcagaagactgaataatgtgtaaactatgcattttggtatcatgtctcaggcttttgtgactaataagtctgtgagctaaaagcgctttccccctttccctttacaaactcttccataggccaatcttgtggaaaagtagatgacacttatttttttatcagttaataattgcatggtcatcttaccagtgaatagttaatctcagaaattcatagtgatctgtaagcagaccggtaatctcatgattagtttggtagcataaattttgtttttcttcatgttctgataaaatttcaagttaaagtaaaacggaggtacgatggtagggaggacatccatgccctcttctctcctgcatgtccccttctcatagttctctatatccaacaacatgtggatccaaagcattgttgaaagcaacttaaattgtactgtcgattggggttgagggagggggtgggggatgatgataggaaaagtctccattttgagatatatgttcagtccattcatttttcctttgtttcttgtgtgtgttttgatttgctcttgttcgcaaattctggttcatttgtgaaaagaatttgcttaccttgtattccaggaagagtttcagttggctttattcaagaacaggaa

SEQ ID NO: 92608 - DNA, 897 bp, Eucalyptus grandis
  Intron number 2 from transcript Egrandis_v1_0.026887m (loc us Egrandis_v1_0.026887m.g) derived from phytozome v7.0 (c hr-ID scaffold_3; pos 39621788 to 39622684 reverse strand)
tcttaaaacacagagagaaggattcgtctgatcaggtatatggtttttcctcttttattttctgatacaaaatttcggttatcgtcttaagctatttcttcttgttacatagttctttacatgaaaaagaagaagaaaaagtaagataattagttcagtaggtggatcttggttatgcatggtgttgactcttttggctattgaccttttctcccctgtgttagctatgcgaggcttttaaaatatgtaggaactgtcaaatgagtgcagagttgggttctgctatttgctataggccatactttctctttcttcacaaaagtacataaggttttccttctgctagatgatttagggaattggatatctctggtgaaatttccttctgtgccctgttatgtgccagaattttttactgacgctattcttgtggtcaaaaggcaattggtgggctgttgttaaaatggttacgttgtagagtctttcttaattccaggatacacttatgctttacaatgcttgtccactattatttggtctttcacagattaaatgatgcagtctcttacattaattcttcaagtagtaaataatggaagagaaaagatacttgtgttttgtcatttgagattgaagatagtgtaagcaatctcttatgtggctactgcaacatacatgttttcttaacaggtgaatcttgcctctgcatgtctagggaagtcagattcatgttctggagttgctacctaaatttgtgtttaagatggtcattctcttggaaaaagtgcactctatcatttcattgcagcaatatcaagatacttttgaatgtttctcttattgctgattattactggactagatttacatcttttttcctgagggaacaaagtctgg

SEQ ID NO: 92609 - DNA, 717 bp, Eucalyptus grandis
  Intron number 4 from transcript Egrandis_v1_0.010083m (loc us Egrandis_v1_0.007318m.g) derived from phytozome v7.0 (c hr-ID scaffold_3; pos 4412073 to 4412789 reverse strand)
caaccgcctaaggtacttttcctagcaagactatgatgttgtgacttttagagactactctcaaattttgttactctctgttcaaatttactgtcgatactctgcagtaatggcagccacaatgcttgcacccctgctccatatcaaaaatagttgtttaagactgctgttagagcttggaaaaatgtcactggcatttagcttttttttcctaccgggaaaaaaaaataagagactttgtttgtttgagccaaaagtttcaatgttgagtttttgtactttctttcagggactaattggaatatcttggattttttatggcttctttatgcttcttatattggaccatgataggtcgtggctgttattcctagtcgagcattgctgatcaaaaaagggtgaaaaagtcctgcagattttgctgcatgggaagaaaaaagaatcaaaatactaacttgttttcattaatatggagcactttccttctgtttcctatatattcatcaaggacataagctgataaataactatttcatgtaaggagctcttttgaatccatatatttttttttaatttcctataatatgatgttttggttagttgcatctctcatggattctcatctttgttaaattgtggtttgaatgcatccttctttaaccttgcaaacttttttccctagcttctgtgggtgaaagaaaatttgcgagagtcctg

SEQ ID NO: 92610 - DNA, 896 bp, Eucalyptus grandis
  Intron number 2 from transcript Egrandis_v1_0.052094m (loc us Egrandis_v1_0.052094m.g) derived from phytozome v7.0 (c hr-ID scaffold_1; pos 9261563 to 9262458)
ctgggccattcgctcgaggtatattgagctctctattttgttattgatgatgcaacatgaaagcaacttctttgaaaattttagtcaagtttcgattagattacgcctgtcatggaggtggtctacggtgaggtacagtttgtaaagtggagggttcagattacagtcgcaccggtcttgttgaacagacagttttgatgtacgatgctcggtctttgctcttaaaatcttcacatttgtaacttctaatgaggtgtcagaaacggcaattcagatattcccgttggtgatgtacatgatttttctgggctgtggaatagtgatgccgtgaatttgtgaagcctcatcacatgcaagcactcatgagaaagcattaatcttttcgtgtggtctggtttcaaagatggatttcttagataaaaaagttgtaattttggttgaaaatagaaactttttttttaaaaaaatttgtgtactgcgagtttgcctatactgaaatcaagatcttgcaggaaaaagtatgttggctcatatgattatgatatgataatggcgtgaagcattggatcccaccgaaaagaactccaaaatgcaagaggctgcaatcttgtatcttgattggactagtatcaggttgggggaccacctgagaagatccatcaagtcagcctcgatcacgcatgttctatcttgaggtttgaagcatcattcatttttttcccctattgatgtctagagatttggtatgctttgtatctctgtgtcaatatgctaaattcatgtgcagaggcctttcaagtgttctacagaggattgctctgccagctataggagaaaagaccatttggctcgtcactttcttcagcataaaggcaagattttcagctgtcctgttg

SEQ ID NO: 92611 - DNA, 940 bp, Eucalyptus grandis
  Intron number 2 from transcript Egrandis_v1_0.032411m (loc us Egrandis_v1_0.032411m.g) derived from phytozome v7.0 (c hr-ID scaffold_3; pos 19891216 to 19892155 reverse strand)
gtgccctttgtgtaattttaagcggagcactaaaggttgggatctccgttttcaattgctcagtatatttgattaataattatagagatcgttctgcttttggagtctttgaagttggcatgagattgaattttatgctaagtctcaagattgtccagtccagtgttgcttctcggggtagactgttgtgtccttctgtttctgtgttctgctcttatagtggcattgttcaccattgttcttttatactgtgaagatttgatttgagtttttctttttttgcgaagcattggaaagaaatagtttctttgcctaggatatcaggaaatttccatctttccatctgcaaattttccattttgagccttctgcataccttaggacaattccccttgtaagtttgtattggttagaattatcttagttcttgatttgggatgatgaggatgatgatccattgagaggcaccctgagaatttgataattgaggagaaaaaaaaaggaaaaggctggagaggaactctttctatggcagtgaaaggtgtgatcagccaccctgcctatgtactggctaatatgaacttggagatactattgtgctggccaaaatcgttcctcggcaggctttccacagaatttgttactggttacacccaagaccactagtttggggaaaaatagccatttcaagtcaaaccactaatgtgaaatgcgtatcttagcatggtcgtcccattatctgaaaatgtctgctgtctttttgtttcgagtggtgccgtggttcagtcattgtgtgtttttattgctatttttcggatattagctgccagttacctatcattttgctcttcaagtcaatttctacttttctcaataacgtgccttattgatggctttgctctcagatattgctggaagagaaattaagtacagagtaact

SEQ ID NO: 92612 - DNA, 892 bp, Eucalyptus grandis
  Intron number 1 from transcript Egrandis_v1_0.015580m (loc us Egrandis_v1_0.015580m.g) derived from phytozome v7.0 (c hr-ID scaffold_5; pos 12498554 to 12499445)
gcgtcttgccagatcgtggacacctccagaagagagtacgcgatcctcttcgtgagcggagacccttcttttactatcgattttcttgtggaattaggttgaggcatgttatgcgttttgctttggagggtgagatgagttattaacattatagagctcaaactatgacaccacggattaataataaataaataaataatcggcaaaccctctctctccctctctctctcgaatttctagcgtaacgaaattcgatcgctctgacaggaagaatttttgattttcggcctcgttaactaaagaatttgagatgttctgatgttgaggcagagggatgttggcttttagttttaccatcgccccacggatggccctgaaagaagttcaagccttagtctatggaatttgttcatgaactttgatttgagaagctttcttggaattaagcgtagcctgagtttatgcacttattcaggttgtatatgtatattatatcagaatgtttaagtgggtcctcttaactgagtattttaggcacttgcaaggcatgaaaggttttcttcattatcaaggaaaacgaatagttttattcttacattattgattctatataacaggagcattagtataattgaaactgcaatctgggtttgcttatttgtgtagcaaatatcctggatgcactcgtcaacaagctcctattattaagtatccgcgactctgttgcttttattttgttgatttttcaagctacccttgtttattttgctctctgaaagttgcaatttgaatttggttgctgccttgtggccattgattttgtcttagctaatttgcttccttcatgttctgttcagcgtgcaagtgctgattttgtcacctacgagggatt

SEQ ID NO: 92613 - DNA, 710 bp, Eucalyptus grandis
  Intron number 2 from transcript Egrandis_v1_0.046782m (loc us Egrandis_v1_0.046782m.g) derived from phytozome v7.0 (c hr-ID scaffold_5; pos 22626907 to 22627616 reverse strand)
catcgccaataagccttaaaatttcccttagatcggtgaggttgccaaatcttttgatgaaatatcaacagtgcaattttttatacaactaacaatttatagattatgtgaattgtgaatatgttcatacgatttccatctaagatgcgccgaccaacttcttgttctgatgtcagttgaaggaatgacatcaagattctactgaaaaaccgaaatttccttttcttctcttttactggaacagatatcatgacaactgtgtgcttgatttaaatatagaggtgcctttaacgacatctcgtgcatgaatctctaacctggataatgaccaccagtattgattaaaacgtagggaagtaagtcattcacaaattcacttaaagacctgtgataggatagatgaactaagtcattcacaaattcatagttgtgcagtatttgctcactgacaactcgaatcagtgtgcaatagtagaatgcgactcgctatccttttataaaggtcaaagcaccttgagtatgtataatcacgtcattattttgaaagagcattaattaagttgcccaactccctttgttgatagtagagataagtgggaattgagctaaggcagttgacctgtttgaagattgtgaaaatggtcatacttctaagtgttgatccgccaattgcagataagagaaggtcgactgcaaggagttggccagtg

SEQ ID NO: 92614 - DNA, 805 bp, Eucalyptus grandis
  Intron number 1 from transcript Egrandis_v1_0.048597m (loc us Egrandis_v1_0.048597m.g) derived from phytozome v7.0 (c hr-ID scaffold_5; pos 29721881 to 29722685 reverse strand)
tactgggacgagagcaagttccacttcacggtccatcgcaaggttgctcgtggcccgagcaacgcggcggcttgagttttcattggaaagttttagcgaaaggaggttattctctctctctctcttccttttctgtttttctaattttggtttcttatatgtactgtgcttttatgttttcaagttgtattgtcttttaagtcctcgtataggttgtttgcattatgttccatattcgagtatgtaatttctgaatcatgtcatcggttaaattccggctcagttcagaattgtacggtgctgtttgaatcgaagctattgatctcctttcgcatatgatattctcttttgtagttagcacagaaccttggttttcttaaataaaagccgacgagctatttttcatgaagaatatttttttgtgggaacagtttcagtggaatcctaatcatgaactatttcgtcattaaacggtggatcttttcgagttataattggctgcattgctagattcttgggcgccaattcctccgaactggaaactatcatggaagtcccttgaagcatcacaccttttcccttaaaagcaaaatccacgaaagcgatattgaaaggccccggctatcaacatcctactgacccaaagctcacggcgggcccgatccgttccccttatgttgtataaaataaagtacaggcgaatcggacggccccctaggccaggtttgacttttgagagacaagaagaagatgaagagaggagacgctacgaccctttaagatagtcttatcccccaccacagac

SEQ ID NO: 92615 - DNA, 426 bp, Eucalyptus grandis
  Intron number 1 from transcript Egrandis_v1_0.031200m (loc us Egrandis_v1_0.031200m.g) derived from phytozome v7.0 (c hr-ID scaffold_5; pos 6438423 to 6438848)
gacaaagttacattgctaatctttacaaactgaaagcaaagcagtagaatacactgactacactatcagaagctgcagcgaggagtgctcgaatacacatgagacaggtaattatgaataacgattgtaatatctgctttaagcagattatgggcaacttcgaagattttcatcatcaacccatgacgcttagagttgcaatgcgactaagtaaccaaaaactgccactgctgactagtgccattcctacagcaatacgaagcgccctgcagggcaagacaacagacttgtaagttcatcatctagcaagtacctgtgttcttaattcttattatccctacaatagaaattgatatttactcaaaatctaactgggttttgcttttctcaaacttttgcagaagttggtggtgaaagtggatctac

SEQ ID NO: 92616 - DNA, 831 bp, Eucalyptus grandis
  Intron number 3 from transcript Egrandis_v1_0.032077m (loc us Egrandis_v1_0.032077m.g) derived from phytozome v7.0 (c hr-ID scaffold_5; pos 69615537 to 69616367 reverse strand)
gatagaagcaacatctccgacattgataagaggaagttagttgcttctgtgcttgcaatacaattgctttcttcttgacaaacatgatgccttcctcactttctctccttgtgttgggatttatatgattgagctctcatttaatccttttcggcactcctttcaagcagtgaatttgtaaaagcttataactctgaaactctagctacggttctgtccatgtttttttcttgaatttatatatatcaaatgatgactagaaagaggtagcatccgtgtcattgcatcacaattcttcagtttttattctgcatatcagggcaaaaaacactgtacctttatccaaaatgataaacactattctttaagaaaaccgtcaattcttatcactttgcaattgcttttgtttgaattttgcgattcaagtgatgtgcatttatactgtttcatctggtttgaccatcagcagcctggtggatattgcgagcatgaacagaaaagttagctattcttatgttttaatattaaatatggtacaagataagcattgttccatcattatctttatcatctcccttttttttataagtttgaattcagttgcctctttacttagtaaaatcctcctgttatgttcattctcatcttgcatttgcataccatgtgcaggaacagacaggagagtcattttcttctcttttaacagcacctttggtagttttacctataaatgttgatatagaaggctctgcatcatgtgcataataagcgaatttgcctcgtgtgatgattgcagataccttgtccctgctgacataactgcagggcagc

SEQ ID NO: 92617 - DNA, 749 bp, Eucalyptus grandis
  Intron number 1 from transcript Egrandis_v1_0.032077m (loc us Egrandis_v1_0.032077m.g) derived from phytozome v7.0 (c hr-ID scaffold_5; pos 69616527 to 69617275 reverse strand)
ggacagtagtgctttcaagcttcagcgctcctttggtctgttctcaacccccccctgcttagttgttctctgtctctctctatctgtttttcctttggcttgaaactgaggttggtggatactcttggatttcttgaagtgctgcttactgctacttactgaagctgaattgtgggttttggggatcggtagttattaatttagctttctcatgcgtaatcggtggtgcacgttgtcctttttttccctccttttgtggccgatttcacgtgatcacaattagaatggataaactgtggttgaaacctcacttgctcagattatacctggtggggtttcccgtgctggcatgtgcttggtatttcatgcccagatgtagtaattaagggttggacgttactgatttcgaagtttttccttggaatgattttcttctgatgaatttgagtaggtgggtatggataggtggatggtttttatggagagatttcttagttaagtgaaggaacctgagttttgatgtgggcagtgcatttcttcatatgatgtgtcaaagtaaagcagtagatattcttttttgtgtccttttgatcatggattgtcggcttcattagccattccacctgtgtaaagctattgacccattagaagacacatcgatgagtccttgttcttgattgtgtagcattctatgcctggcatgggtttatcactttggttctaagtcattgacttgtccaatatcagaa

SEQ ID NO: 92618 - DNA, 811 bp, Eucalyptus grandis
  Intron number 1 from transcript Egrandis_v1_0.006612m (loc us Egrandis_v1_0.006612m.g) derived from phytozome v7.0 (c hr-ID scaffold_3; pos 74956794 to 74957604)
gtcttgtcgtccgacaaaagtaagtatgatccataacattataagtacgtattcaatctatttcttggactatataaaaatggcaaatattgtctctaactttaaattaataagaaaataacatttggtatttttatatattttaggggacatattgaataattaccaaaattttaagattgcatttaatagatttaaagtttatggacaacattacacattaaagtaaagttcaaggaccatatcaatcaaattaaaaagtttaaggactttttatgtaattatcccttaatggtttgtttggtgggcttgtaatcaagggttagcattagaataggaaatatagttggtagattggacaggtgaatgtgtcaaggctctttgtccatatcagttcctttgtgcctttacttgacttcaaaagattaacacgtaatcaccatgatcgggttgcaaaatcttctttttctacaattaattaaatgtcaaccaccctcgaaacggcagctagtgaccttcaacataatttttcataattgatgaaactctacgtgatattgcaatcaaagtaagtacaaagaacaatgacatttcatcttttattatagttttaattcttttcaataaatttgatcttcttttttttttttttaataattgtgtagggtaaccatttttggtataatgcccttctcgaataaaagagaaagggtgacacaggcaacagccaaaaatttgtgtggaggagaggagtgcaacgatcctccaagcaaaagaccaacgacctttcctttcctgtcctgtctactcg

SEQ ID NO: 92619 - DNA, 918 bp, Eucalyptus grandis
  Intron number 1 from transcript Egrandis_v1_0.030551m (loc us Egrandis_v1_0.030384m.g) derived from phytozome v7.0 (c hr-ID scaffold_5; pos 14886195 to 14887112 reverse strand)
cagctcactttggagttcgggtcggtcttctcttctgcgtcgctctcgctctcgcttttttttttttttttttttgcccctgaattttgcctcttttgaacgccatctttcatcggctccgtttcgagctggtgcaaaaattgtacccgtttctttaatagcggaatctgcaataatggatgccctttgtcgagttgtccgtcttttcctagtgaaagtttgagctctttacaccggagccttccttccgggtatatttgcagctgtttgatggggttgtgggggggtttttgcattttgactgacgatttcatttattgtattttgatggggtgcgagtcttttactttggaggagaagattgagtccgcgtttgctatggtaattcatagtttttcttgttttagttgaatttgagattcggaaatgggacttccgagcttttcctcaggagggttcctctcgaaaaatcacgccgaccccttacggctgtattaagatggaattaatgatgcatctggaatatgtacgattcgttgagtaagatgctgtaccgttcaagaggaaaggttgaatttttagcgagttctgttgtggttcctctcttgagtttcctgagcggaatatgcagcttctacattaccattgaaatcttgcaagtcttcctaaccttagtttgctagagggagggccattggtccttttgttgatgaacttctggagttgtttaaaatcttgggtcgtgtttcgattgacatggttccttgttgtgtttggcattgttctgttatcttccttgcccggcaatgcttttactgggtggttttgccacaaagagccctgtcgtcaatctgaataagttttttaatgcctgaatgcagagggggactggagcttctgtgtgattctgtgaagatt

SEQ ID NO: 92620 - DNA, 458 bp, Eucalyptus grandis
  Intron number 1 from transcript Egrandis_v1_0.027409m (loc us Egrandis_v1_0.027409m.g) derived from phytozome v7.0 (c hr-ID scaffold_3; pos 16475935 to 16476392)
ccttagatttggagactggaggtagaaacatctttatgctgtcttctgttttgttgaagagcgcattgagttttctgaatgcggtgatttaccagtactgtatggttgaagaaacaaatatcgttcaagacctatgtctaatactttgtgtgggccaaattattgtttattatgttttccttccaaatcttgacaattttgataaagagatctttggggttgataataatgtaaggtaatctggttcacttgtttgttccttttttaaatcaaagattggacgtggaaatatatgcatcatggtttttgtctttcagctcagctagtattatctctgtgaagttgggtttgtaccttcttagattcagattgctcaatgataacctataaatgaaccctcgtttacataatgaagtcgcttatgcttgctctcactctcaatgcagaggttttcagcc

SEQ ID NO: 92621 - DNA, 595 bp, Eucalyptus grandis
  Intron number 2 from transcript Egrandis_v1_0.003943m (loc us Egrandis_v1_0.003943m.g) derived from phytozome v7.0 (c hr-ID scaffold_3; pos 6952415 to 6953009 reverse strand)
ttacacgtccgacgagcttttcaacaacgtcacgtgtaagtttaagtcttcatttagtatcaatgcgatattcaagaacaccgagagttaccaatagaggagggtgaattgaagatggaaaagaagacaacacgaatatcactactataacaggatcaccagccaccctgtgttctaccttgcctttcccttgcgcctgcttagcacgatcagtaatggcagatataacatgacttcagaaatttaagttggcacttcgctcatgtagatttcttctctggtagttccattgtcttaatcaaccattcaggttctcgtgtaagttagcacatggttttttgggatatcattcagtcggtatattcataaattgtcaacatcatataaatgagttaaaaaatttgtgaactcaatccaacaaagatagaagctataccatatgcattgaaattagtgcattacgaagttcaaaggaagcaaaaagtatagcgaaaaggctgttcgagaaattatttgcgcttgaaaaaaacaaagaaactaatttctctattttgccattgtatcgttctcctttccttccctgcagtggttcaga

SEQ ID NO: 92622 - DNA, 409 bp, Eucalyptus grandis
  Intron number 1 from transcript Egrandis_v1_0.040762m (loc us Egrandis_v1_0.040762m.g) derived from phytozome v7.0 (c hr-ID scaffold_3; pos 54031173 to 54031581)
cagaaggacaaacctttgagcgacaacggagaaacgtaagtggtataacagaaaaaggaccaaaactcaataaactgagttacaacgaaggacaagactttcacgacaagcctttgactactgaacagacaagataattttgtcatttctctctgtcactcctatctattaagaaggaaatgaacccaatgtcaccagttaacaaatgatgataactagcctgcctttggaatcaggtgtaactttcctcgaggtaaattttatcaaccgtaaaagcctgatgaatatttttagttaattaatggaagaactttgcctttagatggtcttcttcgttattaatttagactaccattctcaggtccttctaattgaggtttgattcagaatcatttccctagtaggctga

SEQ ID NO: 92623 - DNA, 493 bp, Eucalyptus grandis
  Intron number 1 from transcript Egrandis_v1_0.039880m (loc us Egrandis_v1_0.039880m.g) derived from phytozome v7.0 (c hr-ID scaffold_5; pos 29335062 to 29335554 reverse strand)
ccttggtaataattatcatattcttttcaattcttttcgcattttataatttagataaaatttgtgttttcaccttattgacctgaatcatcgggttattaacgagcattgaatgcaaaagatctcgattaaagtcacatatttcaactcgacatgataatggcatgccatgtgagaatggatcatccttataaatgaacaatagtttgaatttaattgatttccttcacccaacagctagaggagtaagatttccctacaataacaaaaaacataattgtaatccatagcactatttacctgatcaaatacttcttttcaaggtgaataaattaatttcttttttctcgaacttatcccatgcttagagcttgtattaaacaaagtatacataatagagattttttttttttttttttgctcctttcctctttaccttaactcattttgtttcgtgaacgccattgctgattaataatgtgcaaaatgcagc

SEQ ID NO: 92624 - DNA, 772 bp, Eucalyptus grandis
  Intron number 2 from transcript Egrandis_v1_0.025429m (loc us Egrandis_v1_0.025429m.g) derived from phytozome v7.0 (c hr-ID scaffold_3; pos 6937750 to 6938521)
atcctataacgtgctagatttgcaggtcattctcttttcctcttcttctttttcttctcggtgttgacttcttgtactctgcgaaagctttcgtttttcttcgttgaattacaacttgtttcctcgggagcaaaatattagttaaagggtctctacgaggacaccttttctcagacctagtgctcccgggatgagttttgcgaattatgcgcaccagctgtttgtgagtttgtcagagccagagtaggacatgaaggtcccttttttgagcaattgggtatcatttgtatggctctttggtttttacttttttgtcttttacgtcttcatagttgcccgagacaaggttaacgtggtgttgtgtgtcggtggtacattttggaagctcaggagcatgtgttgcattgcatgtgatatgacagccaataaattttgtcgatttcaaattcatgcgcaaagggcatattgctgcttcttcaattccacatttgtaactcatgggtaaattttttttatttcactctgattgttcatcattcgagaatattgattgttatttaaagtcgacaaagataatttctcctttgatctgtatattggacgatgcttttttgtacctcatcggtagctgaaccccttttctttaaatgtgaaggtttggacccggaattctaaattgtagtatgtccttggagatcgttatgcatttgtttacttggttactaatttctttggcggatgtttccagatgcaggagttgcactgttgacat

SEQ ID NO: 92625 - DNA, 322 bp, Eucalyptus grandis
  Intron number 2 from transcript Egrandis_v1_0.029466m (loc us Egrandis_v1_0.029460m.g) derived from phytozome v7.0 (c hr-ID scaffold_5; pos 73322142 to 73322463 reverse strand)
gttcaaggtatcttcacactctctaatgttcttataatagaatgaatgtcctcaaaactgcttgtcaaagctgcatcttttgtatgttcctggaaaccaccataaagcattgaagcaatttcttactacaaaaaaaggagtatggcttcttttttctcttgcttgtgagcataggctcatgattatttgatagttgtttctattactttgatagacataccgcctgttattttttctaccaatttataaaaattgattactttaaccatcctttcttccccatgcaggagtccttctctctctgcaatccccagttcattga

SEQ ID NO: 92626 - DNA, 868 bp, Eucalyptus grandis
  Intron number 2 from transcript Egrandis_v1_0.020167m (loc us Egrandis_v1_0.020167m.g) derived from phytozome v7.0 (c hr-ID scaffold_1; pos 28037135 to 28038002 reverse strand)
ccggttgcaccaagtgcctcggcgcccttcaaaaggtactttcgacttcgctcttttgtctcttttagctgcccttttcttttcaagaaaaccaaataccgaggagaaaaggaagaaaaacgctttattctcggcacttgctgtataaaaagctttcttttccctgtaagggagccatttttcttggtgcggttccacatgtaaattcaacaactttatgacgtgagcctttccatcacttcataagatgtatagcttgcatcttacaagccatcccccacccatcttcctccaactttcatacatgtacacaccagcagaacttcgtcagccatcatcaagtatggagctgactgatgggtgcatggatgcatggagatgaacgagagagctgcgaccatgttcccttccgggtagatctcttttgcctctttctggaacagaccagattggttctggtatatgatcccggacagtgacaacctttaacctcattggcacgttctggacagcgaacagattcaacacaccgcacgagccctgtaccctctccttgtccgcatccgctgttggtgctcctccactgaaattcaaaacgtatatgtgaattttttaattcgacgcccttttaaaagtggggcattattatattctcctcttcacatgattgacaaagcgaaagaaaggtggggggttggtttcattcaaggccaatcatgcctaataaatttacatttggcgcctcgatctccagttctcctttaccttttacccccagctgctaaaaataatattaactgaaaaattaactcgtgttctcttctgggcaacagctgaagggaggatacaagaacgggacgggaggggg

SEQ ID NO: 92627 - DNA, 771 bp, Eucalyptus grandis
  Intron number 3 from transcript Egrandis_v1_0.051951m (loc us Egrandis_v1_0.051951m.g) derived from phytozome v7.0 (c hr-ID scaffold_1; pos 32059226 to 32059996 reverse strand)
aggtcaaggtggagaataagacttggaaaattaatgtgagtgcagacaccttttatgaacttcgcatgcttcctttgtctacttcagttgtaaaaatttggattattaattaaaaccttgctgttgcaattgttttggaggaattacttttaaatggcaggggttagaatagcctcgtacttcagctggattggattggattggaattgcctcatacttaggctaggattggaaaagtaggggctgacaactgtaacttagttgacaattgggttcatagttgtgggcattgttatatgttactgtttttctcttgtgagtggtctctaggaagtgtctggaggaggtctgtttgctcacggcttcattctgtggaaacactggcctatcaaatctttcattaagaagaaacacccctaacccccttagctgaaatagatttaacatgtacatattgtacccatcatcgactgcaagtgtttttgctctaggaattttatgggtttcgctaaagttctgaccttgcttgtaaatgcatatcccaatggtgaagtttgtaacattgtgttggtggagaagtcaaacgtatttaggttccccttccttctcctctaatagtgttcttgctcctatactattacaaggagaagcttaagtagtaatattgccttgtctcatttgttggtaattttgaacattgaggtatttgtcatcttctattgtcctcttaatgcaggctggaacgagaaatattgatatagagttgaccac

SEQ ID NO: 92628 - DNA, 761 bp, Eucalyptus grandis
  Intron number 1 from transcript Egrandis_v1_0.032461m (loc us Egrandis_v1_0.032461m.g) derived from phytozome v7.0 (c hr-ID scaffold_5; pos 8624507 to 8625267 reverse strand)
caggcgtcgaggtgacccttctcgaacgccgccctcctgttcgatgaattgtctatgagagcgcaacgtcgtctttagctcgacgttcccgtgtccttgttacgtctttaactgatatccgtggcgcttgtcttgtgtttcctctcgtaaagtttggattttttttccccacttttctccttggttgtttctgatgattctgctcgtgggctcggagcaatgggaggtgagttgaggaagtggaaatttcggatacgtctctcttgggtcatccaagttaggttaagctagtgccgatcgccccgtgtagaattcacgcagggtccagtcctagcatatggactcgacataatctgtgaattcacaatggattcatttaggggtcctagactcattagtttttcgcggtcggcggtttctatgcacggtagacttatggtggtgcgtttcctctctttgtgcttgatgtggcaatatgtaaggtatacttgggttgaactctgcatgagttcttcattgacctgtatataggtaacagtttcaaatattagttgagaggccatctgccttatgaaatcacaaaatgagacttgacggtctgacaagttcagctctggtatttggctggtctgaagggttgcatcttgatctgggttttgttcttagttttgatcttgtgttatacaaacaacaaaaaaatctgcattttctgacgcacccattagacaactgctaatgatgacgcgtaatttacagtgatc

SEQ ID NO: 92629 - DNA, 438 bp, Eucalyptus grandis
  Intron number 3 from transcript Egrandis_v1_0.003427m (loc us Egrandis_v1_0.001174m.g) derived from phytozome v7.0 (c hr-ID scaffold_1; pos 39409048 to 39409485 reverse strand)
gcattgaaggattgccaaggtttggaccatatgcccgtgttatttcgatctatacgtgagattttttccaaggaagttcttgtctttgacttttatggctgctgacttgtctgataacccgaaaaatttgatcatcattttaaaacttttttgtctaacattgttcgataggcgatactgaaattccttctaagatggaaataagctgttgatatagcagatcgataggagagccagatttcgcatgcaaagtaaacgcattaagagtcctagtgtacatatattgaccaatggaattgttcaaactttttgctcttggacctcagtttgttttgtcttggtagctgatgctaaaagctacatagttctgcttgattttcttccttactgagtcatcttgcaggaagaaaggttgctagtcggaaagaggagcttcgt

SEQ ID NO: 92630 - DNA, 585 bp, Eucalyptus grandis
  Intron number 1 from transcript Egrandis_v1_0.051775m (loc us Egrandis_v1_0.051775m.g) derived from phytozome v7.0 (c hr-ID scaffold_3; pos 12140911 to 12141495 reverse strand)
ggttgggttgatggctcttcttagcaagcgaactgaaaactttcattggtgcaattggacttgtggttctggaattcgtccgcaaagcctcgacagaacgcaggccagaggatcatacggtttagtggctgtatatagctgcaaatgtgtttgttacagaagaagcaccctgagacctaaggccataaaagaggagatgctatacagtgcatgcgttgttcagtgtgccgattagacaacctagctacgatgcattaaagtatggtatatgcttgtgaaaacaataaatattttaattgtgttgaatttatggaaaatattggagtttagatgtataatggatagctgttttatttgatttgatttgtggcagtttaaaaaaagaatgacattagatttaaagtccaaaaatttcagccatgggatcaattttatttagtgtaacctaaacaccttaaagtggtaataaggaagtttgttccagtggaattgcaaattttacgataaattacggaaaatcacgatgttcaaaaggattattacttatggacaggatccattgattacgaatttgaaggattatct

SEQ ID NO: 92631 - DNA, 922 bp, Eucalyptus grandis
  Intron number 2 from transcript Egrandis_v1_0.022078m (loc us Egrandis_v1_0.022078m.g) derived from phytozome v7.0 (c hr-ID scaffold_1682; pos 2287 to 3208)
gttcgaaccccaacgcggacttcaacccttacgaggttatggcgctatcttttgaagtttcgcttgtcgctagctttttactagtttgaggaaaaatggggctgtgaatggtattcgcaatagggcctttgaactgttgagggttttagtaggtgggattgcatatgcttctgatctcgatatcatttcaagtgtctagcttttgatctgattcgaccatgctcgcaagctccagcatcagtggtcactgtaaatgtggtgaattcagtacaattgaagtgctttctgttttttaacttaaaaacttaaacgctgtatagaaccaggtgcgcgatgctgtccgccacccgcgcatctctttctcatgttctttgtttctttctcttgtatcgtttgtttgttgttcctgaatctgtcggagccatactctattcctgaagttttgtccattggtgtaaattcgaagcagtaggctcagttttgccccctgaactgcattttgtatcacaagtctcagactctagcctttgctctgggttttgaaaccagtcttctactccccagccttccctggtcatcattttagtgttccatctctggttaacgacctatcgtcagagatggatatgatgctcgacctcaattagagggaagatgggcagaccttaataaaaagaaaaaaacaatgaaaaaagccacattgaatttttttttcacttgaaacaaatgaaactaacggaaggacttggttgtgccattcgaaagttttgagatttgactgcactttggttgtttaaaacttttaggactaggttcaggacttttgatacatttagcattgtgctcatctttatatggaaatgtctaattccttgttctcgattcaggttttgggcgttaatccaattgagggatttgacat

SEQ ID NO: 92632 - DNA, 918 bp, Eucalyptus grandis
  Intron number 2 from transcript Egrandis_v1_0.013405m (loc us Egrandis_v1_0.013405m.g) derived from phytozome v7.0 (c hr-ID scaffold_1; pos 38807130 to 38808047)
agacgctaagagtctgggattgtcagtctggccaggttgcctttttttctcttttcaatttttattgcaaaagttatgcttaggtgtttaactttgtggactgggttgtgtgcccttaaccgtttgaatgcataaatcgctgcaatgaggctttacattccaataaatgtgttaggtataatgggacatttcgctgtaactgtgatttgctgataattcacctctttggcagaccataactgcatggcatctatagcacgagagtttatgggagatatccaagttttaatgcgatcctcatatctataatgttatcttggacctttttgttttttgaataataaataagatattattaagacgatacctagggggtactgcccctatacaaaacagcttcagatagaatgttatcatggcattttcagtaattaaagagaattctgctgttattgaatttttaagatgaagattccaatgttcttgcatgttattgcttcttaggctatgaagaaggatactgacagttctttgaccgtgctgtcttctgtgacccttggaggacagatgcgcttaaaagtgctccgaagatgttcttaccttgattttttttttttttttttttaatgggcttgtgggaggaattcacttttaggatgctctgaaggtcattgcaaaattgtctgaaatgctatgtttgtcttcagtgttgcttatattggcgttccaactaagcacagtttttgcttgatctggagcacttgtcccagaaattgggtttatgctgaaggcatgaaattatgcctggagtcttgcctttgtttatttcgtctgcctagtggagttgactggactagttccattcttcttgtctgtcttgcagtgtgcaggtgtgatcaatcttggtggtgaaattgg

SEQ ID NO: 92633 - DNA, 955 bp, Eucalyptus grandis
  Intron number 1 from transcript Egrandis_v1_0.027167m (loc us Egrandis_v1_0.027167m.g) derived from phytozome v7.0 (c hr-ID scaffold_5; pos 18641011 to 18641965 reverse strand)
gtcgccgccaagttcttggacgacatgtgagttgcttttgccgctggaattggagtactggtgtgaattcttgatttccaaacgtttgaaaaccggtctgaattcagctcgcattgccattttctttaaattgaatagagttttttttcttttcctttgttggagggagtgtgattttgtggatgctttgctggttccggttagctgttcagctttctgtgcaacaccttttgagataattctgtccatttaggaaagaaaaaaaaagattccaaaagaaaagaaaaagagagaactggaaatagaagaaaacctgggagaatcgactgaattttggaaaactaatgaatgtttcattgattcttagtagacgatattaaaagggcgttgcttcaagttgcatttttctcgaagttgtcaaaaaataggatggaaggagcaatgtatttccttctattggtacaatgtatctcataattcttatgtttttgaatttactaaaaattacacttaattctttagattatgtaaaaaaaatttccattgacttttcaagcattgacttattgggatttgattagggtaatcggtttggattttttttttgaaacgataattaatttgaagcaaatgtatcgtggatatccaattcaaatttttttggaaaaaaactgtcatggagtactgattaaaaccctatttgaaatctaattataccatttcaagatttaatgacaaacatgtcaatttcatgacaccattgttgaaaactacttatatatttggtgacgcgtaccaaaaaagaaaagggaaaacctcatccctttcatgttacgcatacacaattatcattgcctaactaagaatgacccttgatgattcagttacccctgactgacttcttttccttcctttctattttttccatttttttttcttaacagttactacaata

SEQ ID NO: 92634 - DNA, 867 bp, Eucalyptus grandis
  Intron number 2 from transcript Egrandis_v1_0.035652m (loc us Egrandis_v1_0.035652m.g) derived from phytozome v7.0 (c hr-ID scaffold_5; pos 26765195 to 26766061 reverse strand)
ctgttcctgaagaaatccagactttgattccttgggtttgcctttcttatagatgtccctcctgtgatgctcctttttcttcacacgcatcttatgtgatggctcattatgctatttccagttctcctttctagtagtccttttcctctgtctgccggtgtcaggatagatttctacttgatgaaaaaaagatatgctcataacaagtttgctgcatgactttgtcccttgtttctgcccatctcttgaagcttgttgaatcaaattatattgatcgaacattccaaactgagaactgtttcgtacctaaaaagtatttgccattttttaagactatgggaatgctgttattgtaactagaagagcctttgatgccgtgcctgcttttggatcctgtcctgagggattggggattatataatctatttactgaactttgaatgagggcaacacttggagccgtacctatcaaaaagtgggtttgtgacgacttgcctttcttgtgcagattgttgcccctagtcttgcgttcataattctactgaaagatttctctagaaatgagattgatggtttgctacatttacaaatagttatctatgaacttatgtgagcaattggaaaatcaatgggtcaaacagtaaattggtattttgggcatagattgcagtaccagtaactcccgtgttgttttaggagatcaaacaagaagaatgtccttataagtagactaatgttgaacgggccattaatgaaacatggtttgatgccctagcatgcttttaagtaagagaggaacttggctggagtcattgacatggctttttaacaggtgaagtctataactgttgttttcatatctgcatt

SEQ ID NO: 92635 - DNA, 382 bp, Eucalyptus grandis
  Intron number 1 from transcript Egrandis_v1_0.001813m (loc us Egrandis_v1_0.001813m.g) derived from phytozome v7.0 (c hr-ID scaffold_3; pos 12941143 to 12941524)
cttccaaattatttcagctacttttaaaaaattaggtattctctctctctctctctctctctctctctctatagctgaaccgagaaattcatctgcccaggctctgttatcatttaatgtgctgtataaattgtaatgggttgacttctaagcgtcatttaaagttgatgcagttttctagacatcctaagaaatgatgattattctaagcagtacaggggtcaaccctcttatctcccatggttggtgtttctttgctatgtactggaataatctaaacgagtcccattcttgtatgctgtgctcgcataaaagatctgctttgactttttcttgtaaataagtttctcaaaattcaagaactcttctttttcagaaaata

SEQ ID NO: 92636 - DNA, 381 bp, Eucalyptus grandis
  Intron number 2 from transcript Egrandis_v1_0.020374m (loc us Egrandis_v1_0.020374m.g) derived from phytozome v7.0 (c hr-ID scaffold_5; pos 53795350 to 53795730)
catacgaggagttggttaacaaagttcgtgataaggtatggtaccgcatcatttctgttcttgcatgattgttgcatgatcttattgtagaatatcaactgttattttctctcatgaacaaaccgtcacagcctgaataaattaacccaaacaacaagttcatttcgcacagatatcaattttcactcacaagattggatcactttgcattaatagaccgtcaaagccatttgatagtgcaattttggtatcaattcctaaagtggatcgctttgattttgtttcatgacataaaattaatggaagacctacgacgctgcagtcggtgacataaccattctggccaatcgctcacagtttgttgagttcacacaaccgttt

SEQ ID NO: 92637 - DNA, 827 bp, Eucalyptus grandis
  Intron number 1 from transcript Egrandis_v1_0.010255m (loc us Egrandis_v1_0.010255m.g) derived from phytozome v7.0 (c hr-ID scaffold_3; pos 49407249 to 49408075)
tattgcgcctttaccaccagcgtttcaacccccaggtagtgccgtatttaaatattaaacaatgtccttcatttattagattttaacttttttgagtaaattaattgtggtttatgactctatctacaacttcttgtcttgtccaccgatccaaaagaatttttcattagaagggcgtgataaccattctagccagaaattaatttatggaagagaaattaatttttctatttctatttttagatgagtttttaagcaaaaatacatgattgataatgatacaaaatttctactctaaaaatagaaactctaaaaatagaaattcgtttgataacgacataaaatttctccattttggacggcggcgaccgatagctggcaactggtggtggtgaaggtggcaatgatcgacggaaggtggctggcaactagcagtggccagcagcgaacggcagacgatggtcgatggcaacaaatggatgaccaattcataacaggacgaacgatgagaataatttttatttctcatttctatttcaaaaatagaaaagtaaattttttacttctaatttctattcaaaacctatttataaaacaaaaatctattttagaaatagaaaaatgaaataattttatcaaacggatttctatttcaaaaacaagtctggaatagaaaaattatttatgaaacagaaattttggtttgtcatgcattctttaaaaggccaagttaggcatcaatttaacttccgttaccctttagcttacatcattggtcgtttttgcttgcagtcacctgaggtggcaactgagtacgatccgatttt

SEQ ID NO: 92638 - DNA, 812 bp, Eucalyptus grandis
  Intron number 1 from transcript Egrandis_v1_0.053934m (loc us Egrandis_v1_0.053934m.g) derived from phytozome v7.0 (c hr-ID scaffold_5; pos 63492922 to 63493733 reverse strand)
tgattcacagatacgatttaccttgtccggatttggtacgaagtcatctatgcctgtggcatttaaattgctgccttgaagccataaaataattcttagttatctaagaaaagaaagaaaacaaaaagtagcgagaagcttgaatggctgaacaattcactttggataagcttcgcatgaaaatgggaggccaatgttagctggtaaccaaaattggagccctgtgatccccaaactgaagtgcttaggaattacatttttgcatggatcccatataatatctagcttcattgaacatgaagcttgtgttagtgaattaacagaaacatatatcatctgtacactggaaggtgtagtcaactttgaacaatggcggggagaggaacgctgatatctagtggcttctcatacaaaatcagttctctttttaaaagccaccatttgactcacataatgatgctgctatggtgtaattgaaactgagctgtatcagcaccaatgtcatcatgatgtcttggcattctgggaatgcacttgaactgggtcaggcagcattagtatccaatataaaactaatttgtttaataacataacccttgaagctatctccaaaagtttgacttaaacaaagccatctcgaaaagcacttatgaactcacacatttggcaacacgctttggcttgcagaaatcttgtcttcctttcaaatttgcaggcaaaaataatagcaaagaattgggagcctaacattctgaattaaccgacgcctgagtgcactaggattttttattttctttttctgttggtcagaa

SEQ ID NO: 92639 - DNA, 941 bp, Eucalyptus grandis
  Intron number 3 from transcript Egrandis_v1_0.007560m (loc us Egrandis_v1_0.007560m.g) derived from phytozome v7.0 (c hr-ID scaffold_3; pos 4402621 to 4403561 reverse strand)
cttctttacaggtcattcttactgcctggttattcatgcatgtgcttaatggtggttactctgaatagatgccagaagaatttgttgataaatccagcagttatttctgcacatgatggaatttcgaagtaagatgcttattggtaaatgggtcttgttaacaagtgtccctaggtcaatggttaattcaattaaagtggaaatagcactttctaatacacttggaaaatggaaaattacacattataattagatcacttcaaatggtaacttctaaatatcaaaatcgcattagatggggcactctttaacattttcctttcaagtgaattgcttcctgaattatttttacatgtgatggcaggcttctgtgacttgttttgtgttgttatgttaaacatgatgaaaatttctttaactttgttgaaatcaagatacaacaagttggatatatgaactgttaattatcagcatattttctcttgtgatctcagtcatgtatttctgaggacacttgagcttcctctgttagtccagggatcttctcattaattcaactttttgcatttacaattggaattccaaaatcaacaatgttgtgttatttgtttgacctcctaaatgagcaatagttactgaatttgagtgctagcagttggaagtaaataaccccttgttacctcctgaatttgactgccccccaaggttaatatagtcccacaattgtgccatgcctcttggttcactagacaataatatgtaatggtagtaagatataccaatatcacagagcacagactctatcagcttgcttgattctcttgctttctttttgaggcgcttcttatttgtagtgtttcttgtgcattgtgatagatctcctgaattttctttttaatgtggacatgtttaggtgtttacagactgagcttgcaagggac

SEQ ID NO: 92640 - DNA, 773 bp, Eucalyptus grandis
  Intron number 2 from transcript Egrandis_v1_0.041305m (loc us Egrandis_v1_0.041305m.g) derived from phytozome v7.0 (c hr-ID scaffold_5; pos 35072463 to 35073235 reverse strand)
aggtgcgatcatatctcttcggaagtccaagctcctaactatttttgtcaatcttccttttaaaataggtgaaccataatgcaaaacaatttgggatcaatatctattggctatttcaactgttatgacaatcatgaaatacattattttgattgattattgcaacaattttgtaagggctcgatttataaatatcaagccggttggtttaatttgttctttaccaacccctctttcatttgcctaaatataaaacctcaaactacaatccaacatatataacaaaacaagaaattcgctcctctccttcctttctttgctgtgttttccatataattttgttgtatgtattttctctattatcgaatacaaagtaaaaatgaaggtttgttctattctgaaagcatagccgctaaatagtttccttaaataatgtttgcgccattcgaagtttactttattttcatcctgtccaataggatttccaataaaatcgtcctgataccttttgatcaatccgagtcacatgatgctaagcagccaccggttttagagcttgacggatccaacttttttcaatcaaagatttaaatagccctcttgggggttcattcgtttgcaatctcattttttcttgatcggcaaaagcattagtttaggcaattaacggaggattcttttttatgtttttgctaagctaaactttcctctctgctgcattttgttcttggcgtgtaggtgcttccctatataacggcgcaagttattggatc

SEQ ID NO: 92641 - DNA, 538 bp, Eucalyptus grandis
  Intron number 2 from transcript Egrandis_v1_0.020557m (loc us Egrandis_v1_0.020557m.g) derived from phytozome v7.0 (c hr-ID scaffold_5; pos 19321579 to 19322116 reverse strand)
aggtacactaaatttttcatgtttgaggtcccaaataattattttttttttaaattgtcgatttcattttacgatacttacctaggtaaatatacaggcttgggccaagggagccaagtcctggtcgagcctaaactcaccaccacgagttcaagaaagccagcctgcaaaggctgcggccaaaagccacaatggaacacactcgttaagctctttcacctaagaaaattctgccacgggattcgaaaagcaggatgagcaggaacaaattttcgatcgtttccgagacttttttgattttcgggtctcgcttcattcgttctcgggaatttcgtttcttgttttcttgagcagaaagtcgagaaggaaaaatagaaaattttcctaatgttttaactaaatcgagtggatcttcgatcttgtctagtaaataatgtcttttttttttcctggattggatacagataatgaactcagaactaatttgagtttgttctttgtagctgccgcactggggagagactgaggcaaaggcaag

SEQ ID NO: 92642 - DNA, 918 bp, Eucalyptus grandis
  Intron number 1 from transcript Egrandis_v1_0.024271m (loc us Egrandis_v1_0.024271m.g) derived from phytozome v7.0 (c hr-ID scaffold_1; pos 30489722 to 30490639 reverse strand)
ctcaggtgaaaacactcccgcgtttctctcttaatgcttgcttctctctggaatttttttttcttgggtcgaccctgcgagcgctcgaaccggttcgtaccgtatttccaccgtcccagctccatgtgttttcgctagctgtccttcctttggcagtaaatcgagcagtttgatttttagctttccgggaccaaatgaatcgcgagctgtcaaatgggtcccctctgcatagtgcccgttgcatgattagcggcggatcgcgaggcctgattgtttcgtcggttcggttcgggggggtggtctccgtggatttgtttcatgtgaagacactctggtgctcatagaattccggagtctctacagtgatggttccctgcacaccacacccttttgaatgctgaaaaataaagagaaatattttattcccttgcgccgtttgattgtttgaccttttggtccaatggtggcagtattcaaatcacgaagcccccctttattttcttcccttgtcccccactttaccctcttggttctaaatggctgttaatcgtattcctactactagatcagtaattccacattcgagtttcagtaccgttgtcttaatcgtgtcgtgtgtaaccaggccgttccctgtggaaaaatataggagatgtgtcagagagtcaattgaaattttatagacagaaaaaggggtgtgaagaaaaaggaaaaagaaaaagagggatttggctggaggcgtgtttctgaattcagtttcggtacctaatgttcagtagaggcagtacaagactggtagcgttctcttttactgttaaagaatggttatgtacaaagaagaaataaagcaaagccccgctttaacttttgttgacaccttcaggttcagggtcgcttgcgacaaggaaggaagcagtt

SEQ ID NO: 92643 - DNA, 1010 bp, Eucalyptus grandis
  Intron number 1 from transcript Egrandis_v1_0.020327m (loc us Egrandis_v1_0.018941m.g) derived from phytozome v7.0 (c hr-ID scaffold_1; pos 164011 to 165020 reverse strand)
gccgccgctcgcgacctccttcttcaacggcggaggtgcgtcttctcttctcctcgcgctatgatttcttaccgcgttttctccggagccggagtgcttgattgtagcgaacttcgatgttccctgggcgaatgcgaatgaatgggcggcgggcctggagtgattgcggcgttagttattggagattccgagtcggtagtgcggaatgcgattgaggggaaaagggagagggaatcgaagtgcggtgcctattaggactgtgttcgagcggaatgatgttgctggtgagtacagcgatgagaaaatcggaggcggagattggttcgctcggcgtgcttcgcaaggacagtatggattcctagtagattttttggagaagaaagtaaagggatggggaaaaagagaggttttgatagcaccgtgagaacactgtgaggggggataagtgaaccgtctactttgtcctcagggagagaatatgggtaggagttgagcattgccagagacattggaagatatctaagatggctctatgtgtgtggtgatagatgcgagacacagtttatttaccttatgcttccatgtctgcggtaaatcatagaattgctggactttcaatgaaaaagaatgtgcatttccttgcgaagatctatggaagaggttcttaccatgaggcaacgcgtttggccaagtttaagtggtctttagcatgctgttagatgttctcccttacagtttgtcaatgcacaaccctctgttcgacatcagccaaatcttagatgcttaaaactaaaaggtctagatgttgtacctttactatgcccataccagtgctgaaagcgtaattgttcatttgcaatacatattagaaaggggatacaggcatgaaagtcctaaaacttatgtatatagtgcaattccaccccatatctttttgattgaacagttacatacacagcataaatgttcatgcagttgggaatttaagagttacgaaactcagaattgct

SEQ ID NO: 92644 - DNA, 388 bp, Eucalyptus grandis
  Intron number 2 from transcript Egrandis_v1_0.010393m (loc us Egrandis_v1_0.010393m.g) derived from phytozome v7.0 (c hr-ID scaffold_5; pos 22528266 to 22528653)
ccaaacaatcttggcctgatcctcaacaatttgtggtaatgtctttgatttcctttctgtgttttcattttgattttcccttttctggttgggcctcttgaatagaaaacatggcgaatcctctgtttctgttggggtctggataaaatcttcataggctaaataatctatttggtttgctgaaattcatctcttgcgtgtttcttatgcacttggaatcctccaaaattagtcaatctaaaaacttgcctggatagcaaaaaggggatttgtctgaaaaattctggttgaatttgccttccactttatgccttggtggctctttaatgattctctttctatgtttaatgtagacagaagcatctggggttggcaaagtccggcataa

SEQ ID NO: 92645 - DNA, 863 bp, Eucalyptus grandis
  Intron number 2 from transcript Egrandis_v1_0.039999m (loc us Egrandis_v1_0.039999m.g) derived from phytozome v7.0 (c hr-ID scaffold_5; pos 35132552 to 35133414 reverse strand)
gaatcaggtgcgaccatatctcttcggaagtccaagctcctaactatttttgtctatcttccttttaaaataggtgaaccataatgcaaaacaatttgagatcaatagctattggatatttaactgttatgacaatcatgaaagacattattttgcattgatttttgctacaattttgtaagggcttaatttataaatatcaagccggttggtttaatttgttctttaccaacccctctttcatttgcctaaatataaaacctcaaactacaatccaacatatattccgaaacaagacattcgctcccctccttccttcctttgctgtgttttccatataattttgttctatgtatttcctctattatcaagtacaaagtaaaaggaaggtctttcttaaaggatagccgctaaatagttccttgaataatgtttgcacaattcggacagtttgatttattttaatcaatctgagtcacatgtgtagaatataaaacatctttttaactttaaaaaaaaaggaaaaaaaatataaaagtaaatatatccaaattccacttgtcggatataggcctatctggaaaacttgggtttgatcacatgatgctaagcagccaccgattttagacctttacggatccaactttttcaatcaaagatttatatagatctcttgtgggttcattcgtttgcaatctcatttttcctttctaaatcttgatcggcaaaagcattagtttaagcaattaacggagaatttttttttttaaaatgtttttttgctaagctaaactttcctcttggctgcattttgttcttggcgtgtaggtgcttccctatataacggcgcaagttattggatc

SEQ ID NO: 92646 - DNA, 479 bp, Eucalyptus grandis
  Intron number 2 from transcript Egrandis_v1_0.016272m (loc us Egrandis_v1_0.016272m.g) derived from phytozome v7.0 (c hr-ID scaffold_5; pos 11823705 to 11824183 reverse strand)
tgctctttcaaaagaaggtttcgttgttgtccttggtaatgtcgcagtctgtggtttatcctcctcattcctttgatatggatgtagcaacacttagttcaaccccatgcctggattttctgtgattgcttgtgctggatcatcctgatgatagctacattaggaggaaaaaaaaataggctgtctacataaatgccaccagtctgtgatgaacactctcataggaagagttatgggtagatatatgaatgttctctggtctttacttggtgattcaagcaaagagaaaagcttgtcaattgcttaatgtgacaaataatgtacgaatgactgtttgttgtccttagagttaatgcaaaatgcatcttttctttgttacaagaagaatgagttttgatccatgcaggtacaattatttaactgaaatttatgctttctctgcagttggacggtctgctcacaggttgtcagaggtactt

SEQ ID NO: 92647 - DNA, 986 bp, Eucalyptus grandis
  Intron number 4 from transcript Egrandis_v1_0.024227m (loc us Egrandis_v1_0.022394m.g) derived from phytozome v7.0 (c hr-ID scaffold_1; pos 31142099 to 31143084)
ttgctctgggaggaaacttgaagcaattcctcattgtgagttcagtgtttcctttctctatttggttgttgtcattgtatgtctacaatatcatgtccttgatagtagtccttttcttcttttattgttgcacgcagcagggcagttggttgtcaaacatctcatgtttgtatgtatcatttgtgtaacttgaagctgatggccaaaggaatatggcattaacatcattattattttcgtggctgtgatatttgattggctttgttgaagatattaaaagggactacactatatcaacattctaaatttggtgtactcgtatacaagtgttttatgtatcattcttggtagagaatctcttcatggtgggttatgtctctgctggatttcggtatatggacagtatcttgtctgttttggatcaagggtgtttcttgtcatatatatcatatcaccactaattgcacaatgactatttggaaattcttagttcactgactgtggatgattagactatcatatgccatcagtgcaaaaatcagattgtggtatgagagagctttctctatctgcatatgatacgatattgcaataatagaaccagcatggcttaacctcccaccacagcctttgccacatttaaaatctcctctttttagatgtgaatattttatttccttgtttgttgtgtgatgtcttacaagcctaatttggtcatcggcatgttgttgctgccatttcaaatgttttgtggcattttaattattttcgtggcacactgatagtttttaattcaacaatttgtccatcattaagcaacacaagatatttagtgctcaccttctaatgcttttctgatgtaagaaactcattatagttttggtagtcgcaacaagcttagaagtcagcttgtcttggtaatgtttgctctgacaatgagatgctttgcaggttgtggggagcctttgggcagcagctataatagg

SEQ ID NO: 92648 - DNA, 905 bp, Eucalyptus grandis
  Intron number 1 from transcript Egrandis_v1_0.038131m (loc us Egrandis_v1_0.038131m.g) derived from phytozome v7.0 (c hr-ID scaffold_122; pos 8605 to 9509 reverse strand)
gggtccaatcaaggtaagatttaaagaaggcatatcttttgtgaataatcacatgttatccaaggatcaattgcgcaaattctcctctcttttttttctttcggaaaaggttaatatccttttttaaattcaggattttcctttaaatagaagaggtttttataggcacctaaatataccaaacacttccgccccttaaaatcttaaactaatggtatcttgacaaccaatcatgcgtaacatttggcatactatttcaactaatctattaagaataaagttacagtatttgtgtgtgtcctgatttttttttaactaaatggtttattgcttctaagacaatttctccccttgtaaaagtatgtctgtatggtgattcttgttatatttctatgttaatcttcctacatgagaaatgaaaagttgcaaccgcttttgcacgaaatactatttgaattatcgtagacaggataattattttagaaacaaaaattgaccccactacttcaaaataagtgcattgctttatcatagttctgtgagggcgaactatgtgttatttttgtgagtgctaaccggttgatatttatttcagtcaaattggaagctaatcctaatacgataagaaaatatagttagcacttgtgtattactaacattctttatgcaatgggtatgttaaaaaaacactactacttaagaaacatttaaacaaaacaaatgtgaagcaaaggagaattatagcaatgacagcatgggaaccgagttatgaaacatatatatatatatatatatatatatatatatattaaaaaaaaggatagtgaaaaatcaacgtctaatcttagaggtaacctctgtttctttcagattgcagcaaagttcaaagttctcaacctttcgag

SEQ ID NO: 92649 - DNA, 714 bp, Eucalyptus grandis
  Intron number 1 from transcript Egrandis_v1_0.024394m (loc us Egrandis_v1_0.024394m.g) derived from phytozome v7.0 (c hr-ID scaffold_3; pos 79701347 to 79702060 reverse strand)
gcggctgattctggatctacaacgtaatgcttacctaactattgattatccatgaaacattatcaagtttgattttatttatttttaaatcctaggtcaccaattcgataattgttttgtgcttttctggccttatgtctgctaattggattgactgatgtttggtgtgtttgagtttgcagaatgcatatcatttattggatacatgtttatcaaacaaattactttgttgcagctaatatatatgcttatcttctaactccctaaatgatcttttcttttcgattgctcctttgtgttgaagtcttaaaggttttctttcccttgtggttgcatagcgcgcttgagatccacgtttgcttttgactattgatccgcaggccttgttttgtgtgttctatgatttcagatattggcttgatttaatctcaaagacctttccagtctgaatacttttatgttctaatgaagtcagtgagtgggtcaagtctctgttgatgcatgacatacccaatttctctcttcaccctgaggtgtagaggctgcattgtttctgcaaaggtttactatgatcaaatgggaccttcacatatacttgtagctcgctttcaattcttctagctttgcacatcgtgtgatagaccatgggtcatagttttgctttatatgagacagacgttactgataaaaatgttttgatttgcagcagaaagc

SEQ ID NO: 92650 - DNA, 710 bp, Eucalyptus grandis
  Intron number 1 from transcript Egrandis_v1_0.047748m (loc us Egrandis_v1_0.047748m.g) derived from phytozome v7.0 (c hr-ID scaffold_3; pos 64158089 to 64158798 reverse strand)
actcgtatctagagcttatagaagatctaaataaaagatcgagggtagcgacgtgataggatttctataaccgacgacaatagcaggacaaaaagcttcaagctttgaaaatgtccagtggagttgggtcaatcgagcaactcaggttagagaccaagtttttgtgagagctcccttatatctgcagtttttatttgatgctggcgttgaaggcagaccaccttgatgtaatacttctgaagtttccatatgaatgagaattgagaagtttttatggcaagacagaacagagcaataagttcatgctttcattaagtgtcattctgtttaacaatcattggagtccgctctctctttcgtttcatgctagttctatcactcaaaatattttttcgaatagcctaacggattgagtctttcagggatttcaatgaaaattattatgtctggcggtgagatgttacaaggtaaaaccttatacagagtcgtgcttttaatcatcaaatgtgcatgaatttgtacagttgaattgacagggaattctcaagtcatagatggtagatacattctaacctgcataaggttcagtctcgtgcaacagaggcttgagatggcagctaattgatccctctaaagcagaagcgtctggcaagatagatgtttaacagcatctaggaagggaaggaaatagaaaacctactaaatctact

SEQ ID NO: 92651 - DNA, 480 bp, Eucalyptus grandis
  Intron number 2 from transcript Egrandis_v1_0.047631m (loc us Egrandis_v1_0.047631m.g) derived from phytozome v7.0 (c hr-ID scaffold_586; pos 1267 to 1746 reverse strand)
gctctctgcaagaccgctttgtacttctcttcaaaactctttcgaaatggtgactcacatgcataactaactatcaatgatcttttagataggtgaggcctcaaagagaaaactcttggattgaccaacccgactttctattgctcttgaggctgcaaggggtaagaaattcgggaggactgacttcttattaagatttttcttcttttgtattggtcatgtgtttggttatcagaataaagaacataagcttatatgtctagaataactcgcttttgtacttaagattggtcctagataggagtttaacataaactcaaatcttcattaaccgattagacattgcaaggatacaccagttcaacttaaaaatgatttgccaaggataaaaattaaggtttacacacacacacacactacagcttggttgcccccatattttcagacaactgatcgttcatcttggtattgctggaaaca

SEQ ID NO: 92652 - DNA, 791 bp, Eucalyptus grandis
  Intron number 1 from transcript Egrandis_v1_0.053581m (loc us Egrandis_v1_0.053581m.g) derived from phytozome v7.0 (c hr-ID scaffold_3; pos 19080836 to 19081626)
ggcaagcgggtaaatatgatgccaccttaatcaatttactttgaatcgtcagatttctttgaattagttttactttttatttaatccaaaattttgcagctcacggatattgattcttgtttaatttcaaaactcgtaacactttcacaacattcaatcattaatatgcaaattcacatatgatttttttcatattttttgatttttttttaaatgttgacgggcaaacaaaaaggatacatttttataatgcttaagtataaacaaacatttgaaaaaaaaaacatctacctacgtattctctttggctggactttcaatgaactaaattaatttataattatatatatatatatatatatatatatatattaattgcattgtaaatcttcctttctagttcttgggtacgtttgacgcctaatggtcattatcaatatcaagtgaaacccaaagaacttattaaggaagtaatatgaaaaatgtaggataaacaatgtgcaccttcttaattgcagttgtgcggaattccaagagactgagaggattaatgaatgtaattgatgcatgacatttatgcagcttggtgcaggaggctctttgtaaaagtttccttgctgtacatttgcattgatgtctagtgggcacacctgaacgaagttgccatgagtttgatcagttgtatatccttcgtaaaacgcctgtgggtggcgtgggaaattcagcttttgttcaacgcaagtgttgcctgcaagattgttctcacaatattaggcgtccgtcggagacat

SEQ ID NO: 92653 - DNA, 696 bp, Eucalyptus grandis
  Intron number 1 from transcript Egrandis_v1_0.054875m (loc us Egrandis_v1_0.054875m.g) derived from phytozome v7.0 (c hr-ID scaffold_3; pos 4436748 to 4437443 reverse strand)
gacggactcgatccgacaaatcttcggaacctcaggtaatacatgaacggaatattctaatgcaagactagctacatttggttgttttttttttttttttttggtcagtagctacatttggttggttggggtgtttcttttttgggtaatggaagagtcgaatcaagagcgacttacagaatccttacttggtataagttaagcgtaaattacggtgagccctagcggaaactaatgtataccttatggtttacggcggactttcgaaagatgaaaaggacttttcgtcttctttttctttattagaaatatccatgagccaacataaattcaaaagatataagggaaagtagtaggtgagcgtcataaactctatgaactcttttcacagcaatccattttgtactttagcctttcataagcaatagatgccgtcttgatcgatgttggtaggccatggaaaataacttgtgagaaaatgacttacttgaagtgatgagatcgacatgatgaagttaatgtggcgatgaacacatcggttggtatttgcatctacttaacgtacgtttagacgttcgttttgagaattcaaattatgacattttgattgtattggatttgattgtccgtatcttgcccgaatgatgtgacgatttgtcatagaaaatgtttatgttgattgcacgattcgaaggc

SEQ ID NO: 92654 - DNA, 508 bp, Eucalyptus grandis
  Intron number 2 from transcript Egrandis_v1_0.010918m (loc us Egrandis_v1_0.010918m.g) derived from phytozome v7.0 (c hr-ID scaffold_5; pos 934379 to 934886 reverse strand)
ctgttcttcttgcttcccaggtttctctctttatttgctttctctttccgacttgtagagttgttttctttttccattttttgttaattttctctggagttcggaatgccagctacatcttcgttttctccgaacccaaggagataggtttctttgttggacggactgtctcttttttttttttctttttttttcttttttggtatctgttacatgctgtttggttacattgggaggaacaagacagtcatataaaagaacagcatccaaagaaaatggcttcttttctctcatttttggggggacagagaaaacaaaaaaagtgatctgtttggggttggtgcaatgcttttggacagcatgcgtaaggcggtaataattagctatgatacatgtaattatgtcttttgaaagcaaaaaagaggactgtgtccggaggttttctttgataagctttcatcaaatgcttgaaggacataaaaagttggccgttgtccgatcctttgcc

SEQ ID NO: 92655 - DNA, 808 bp, Eucalyptus grandis
  Intron number 1 from transcript Egrandis_v1_0.052857m (loc us Egrandis_v1_0.052857m.g) derived from phytozome v7.0 (c hr-ID scaffold_5; pos 19549002 to 19549809)
tcaaggacattcacaagattcagaagttcaagagtgttggaatactatacgcgaaaatgacaggatcttacaatttacgtcaacgcaaaatcaccagagaaataaacaagaaataataaggacactagaaatttacatggttcggtccaagtatcgatacctacgtccacggggagagccagcagcaaataatccattataatcggtgaataagagtttacaatcgctcacatgctcaagcgtttcccacacctagatttaatcctaaacccaaaatgtttttaaataaataactcacttgaacataaactcactgcacaaaaaatcattgcgcgttcaagctcaaagtataatgctctacgtacgcctggttcgcatacgtatgaatttgcgttcttcttttttgatcgcgtgggtgggtccactttagcttgactttgtgcggctccttcttctacgtaggacttcagcggctttagaaatctcacggatcgtggacgtgcaatggagaccactttctttctctcgtagcttttatatcgtgtgtgcccaaaagtaaaagtcttcacttttggcccccacgcagataacatcttcggcttctgtaggcttccaaagataaagaagaaactttgctctttttttttattctattttatttcatcttttgtgtagctataatgagtccaagaaaagaatggcttcttcgtccaatttgaaatatacttggaaatctttattgacaaattcggtttaacaaatcgttatccgaattcaaactcaagacattaatttaacaaagaggttc

SEQ ID NO: 92656 - DNA, 740 bp, Eucalyptus grandis
  Intron number 1 from transcript Egrandis_v1_0.008798m (loc us Egrandis_v1_0.008798m.g) derived from phytozome v7.0 (c hr-ID scaffold_3; pos 50880548 to 50881287 reverse strand)
acatgtgagttctcgggattttcggactgggtttagatcgttcttctctgcatttgatcggtttcggcacgttgtactgccattaacaggggaaaaaaaggtcgtctttttcgcttcttgcatgtgtcttgttgtgtccatcttgttcctttcttctgaaaaatttctcttcatttttcgtgcttccagttcagcctctgctttttggcaaagttctcgcctagaagatctagatgtgttttggtttcacatttcgatctttcttggcgctctgtttctagcgtcgccatcgaatatttcttcttacctcgactacccatgatgttgtctatcatgtgcttttgaatttgatctatttccgcatgcaggttctggctctctgtttagtttctgtcttctatggtgtcatcaattattcatctgcgaaatgtgcattctttttaatgattttgatatgccatgttttaaaaggtgtcttgacaagtcattttccctgttctcatgtgtcatcttcatgtagtttcattatgccgcatttgagaaaatgcgctatcttctttttttattttaattatctctcatgctatagttttgtcacttttcgagcaattatgtgtgtttttcagtgcattttggatttgtccagtagctactggtttgtgactgtgagcttacctatctcatgtcttttggactcacttgtaggaataaggcggccattgtcaaagcaggggctgttc

SEQ ID NO: 92657 - DNA, 953 bp, Eucalyptus grandis
  Intron number 2 from transcript Egrandis_v1_0.016551m (loc us Egrandis_v1_0.015018m.g) derived from phytozome v7.0 (c hr-ID scaffold_3; pos 77555211 to 77556163)
acccaattggtaactttccctttctttattggtttggagttcgaaacttgagtctttctcttttttcttggtgtcggtttctggattttttttcttttcgccaaatttgagttcccgttgtgatcgtcttgatggttcttgagttgggtccttttaggatgtgggtttttagtatcttttttcctctcctgtacgcttgtaagtttggatatgatactgcaagtataacaacaatttgaaatcgaatcgaccctgctctgtggttggtgatggtcagccgtcacctcacttgactggactgttcctacctgggaaaattcaagacgatttggatgagagtttgcttacttcaatagcaattggtgtctcagagctatatgtctcaaccattactctgtgtgcgtatggtgtgtgtgtgtgtgtgtttggggagggtcgtcaattgtgatttgttacttgtcagtacttgtgatggtgggagttcaagaaagatcatcttctggatgggtttcttgaaggctgatttcaaagaattcatatcaatcgaaattgttgcttatgtagtgttctgatgtgcatgatattaggttttctcagttctctaaatctttaggacaagagaaaggaagtccctcttatcagatttctatgtgcacaaaaaatgttttgctccatgttaaacaaaaattctgccgtgtttctgttgcgtgtatgttgctttgttggtcatgagagtttatgttaatgtatgacttttgggtcaagcctacttggcaatcctaatgttattgccacacatcaatcttagagcatcagtcgaatgagaatttcagtctcgtgtagttagttgcacatattatctcaaaatccagcggcggatacttggttgaattgataaaagtgactgtattttctcagttgcgtgggccgctgaagcattcattggtacctat

SEQ ID NO: 92658 - DNA, 586 bp, Eucalyptus grandis
  Intron number 1 from transcript Egrandis_v1_0.003146m (loc us Egrandis_v1_0.003146m.g) derived from phytozome v7.0 (c hr-ID scaffold_3; pos 13537125 to 13537710)
cctgaagcttgaacaagattgcaagctgaacggtgcgacaattaagtgttctggtcctgttattccttgatgtttgtttactatagagtacgacttttcatgaaatgaatgcaatatctagaaaatttcggagaggagaggcaacttctttctcagtgagtcttctcagtgtactgatctgggtgttgaaaattgtttgttctctttttcttttttgattagatttcactttcctttacttttttaaggagtaaacttgtctatagacgtgcttttcaaatttgatgcacattgaaaatcagttggtagtaaaaggatttcaagaagttttggtgttactttctagatatgatagagaccttttgtacgtcacacttgcccttaattccaccattatttggcagcatttctcaacaaccataacctgttgatctgcccaataatcattaaattacgtatatacactggttacctttcgagaattatttcctcttggtaaattcagatagttggagcctgtagtgcttattcattttgatgtctctatctgttaatatttaatgttctcttaggagaaattctgacg

SEQ ID NO: 92659 - DNA, 777 bp, Eucalyptus grandis
  Intron number 1 from transcript Egrandis_v1_0.027478m (loc us Egrandis_v1_0.026931m.g) derived from phytozome v7.0 (c hr-ID scaffold_3; pos 71579362 to 71580138 reverse strand)
cttctcaaggtcataatccttggtgacagcgggtatgttggtgatcaacctccttattctttgtttcttcttttgatgttggtgtttatgcgttttctgtttgaaacccgagaaaattggaggtttaatgatatgataatctgaaggttgagggtatgtgaaatcctgttcaatgagctctgattcttgagaaggaagatcgggaaaagggaaattagaaagttttgaacttgtcgggctcaacttgtttgtactaaatattttgctggaattttgaggttaatgagaattcgtgtctaattctgttctcttgccaaggttaaattcccgtctaaaagatttgttgcgaatggaacctcatttgaagctattgttattgttctagatgaatatgatgttgcagggcgtttgagtggcgagatgattagatgggcaaatgccaaatcagaatagaattggattttacgctgctaggttttgtgatacttcactcgcaaccttggcaactattgaatcttaaaattgttgcgctcattgcaagcgatgagagcttattctgtgtttcttgttgcattgttacatgcaaatccatcgttcttaatttgttttacttctttaaattttggtctgttttggttttgtagggttggaaagacatctttgatgaatcagtatcctcgaattttgattggttcagtttgttatttcaatctcagctcgtacttacatgtgtttttttgaaatcctttgtgttaccctttcactccacttctagat

SEQ ID NO: 92660 - DNA, 624 bp, Eucalyptus grandis
  Intron number 1 from transcript Egrandis_v1_0.013684m (loc us Egrandis_v1_0.013587m.g) derived from phytozome v7.0 (c hr-ID scaffold_3; pos 22115057 to 22115680 reverse strand)
caggtgacagcactagcacgatcatgtccttgcgttcctgtgaaaattcaatccttgtttcatgtagagaacaaaatgggtcgctttcttttccacatagcatctcgcatgttcttttctttctctcttcaagctttggacctggttcaagaacgcagcatcatgctcttattgggtactgaagtttggcaggagcgtactgtgtgctgattttgggatgtaattatcccttacagagatccattcgacaaatctaaatggaatccgagccatccgtttggtattggctaaaaccagtcttgtaaccaggaaaaggcttctctctttcacttgccttcttttgttttcttggctgagtttttgcgtaaatcattgtttttttttccggttgctgatttcttttgttttcagtagactgtatgtggttatttgcatagctcatcgggaaagtagtcatcttgggcttaagtcaaacttgaaagttggaacattcaataacctaaagccttatccaagctgatctcgtacagatttccacttttatgatttggataaaatcgacattgcaaattgatggggtgcaatttcttaattttgatgcagcagccgagacgcgatacctca

SEQ ID NO: 92661 - DNA, 454 bp, Eucalyptus grandis
  Intron number 1 from transcript Egrandis_v1_0.031248m (loc us Egrandis_v1_0.026519m.g) derived from phytozome v7.0 (c hr-ID scaffold_3; pos 11856921 to 11857374)
aactggtttgttttttaacttgggtttttctttatgtgttctttgctaggattcttgcatggtgaacagtcttcttttcacactcgaggttgaaaaagaaaaacaaaaatcgaaacttttctccttgtttgatggctacaagaggagattgtgtaccgaaactccgagagctcattaatttcattgcatatggttaagagggttttattctgtgacctcatcatgggtttacaatgcgtaggagtttgtgttttgactttaggtctcttcataatgttgactgtagcgaaggtgtttgatactcggagccggttcacggttacttcgatgcagatagatggtcaacggcttttgtgtttaatatggttgatcgtttttccccttttgcgtgtcagtgttgttcaccttttgtgggtataaattctgcaggtgaagaggaagacggatttggttt

SEQ ID NO: 92662 - DNA, 783 bp, Eucalyptus grandis
  Intron number 1 from transcript Egrandis_v1_0.024642m (loc us Egrandis_v1_0.024642m.g) derived from phytozome v7.0 (c hr-ID scaffold_5; pos 25927574 to 25928356 reverse strand)
ggacgacagcgatcgcgaccctcgcgacccatctcgtaagtttcggttcaggaccaccgccgacgaccttgttcgttccgtcgtaggtatacgtacagcgccgtacactttgtgtcggtcttgggtgtcgtggacatggcgcggcaggaccatgcaacgtgatagttcgctactttagcttagtaggatgctgacaaagggcatgagtgtctgctgtgtcagcggtggtgcttcttgtgagaaatgggtttgtgttttctctggcgtttttagctgataagccgaattcatccgctacagatggttagatattgtagagaactctttgtttaattccgcgaggaattgactccatgtgaggttgaactaagggtttttggtaatttgtggtcgaatgcgactgttggcagttccggtgaggtgatccggaattaacagtttgtgacaagtacttccctattgcaccgtctgaagaaacatttcttacttgtatgtataagtaatttgacttcattatactgtcagctgtcatgtagtttgcgaaaataagtttgcgaaaataactgccagtctgtgggtaggtgtgtgctcgcatttttggaaattgcggtatagtccaaatgtttgcatgctgcgacgcttttcttattctgaggacagattaattgtggcgagaacatgatatcattaggtgaaagttggcattagctttaattcttccgctgtgcaaatatgataacagcaatttttttggcttggcaaaatgtccagtgaatcagtcag

SEQ ID NO: 92663 - DNA, 609 bp, Eucalyptus grandis
  Intron number 2 from transcript Egrandis_v1_0.021798m (loc us Egrandis_v1_0.021798m.g) derived from phytozome v7.0 (c hr-ID scaffold_5; pos 49325257 to 49325865)
agaccaaagttccttggtaagaatctttgttgagacactttagagatgattgcaatttaaatgcatgccaagctgattagtcaccagcaatgcgggatgatttgctagaattagaatcaaatatgacagtggtgaatgataatgtcactgagaatgtttctgcatttttttactgatcttctgcaggcgcttaagtttattcgcaacactgtttgaattcatgaattccttccaagtatagttctatgtatcgataacggagatagggacataatcatttcttttgatcatgagtattggtatctgtgcttcttttccatactacagaagactaaatgagatgatttgttcaagctagtgattcctaaaaggccgtaggttatgatcgtcagttgattccaattgttatggtaatgtgaatgacctgatagaatgatatcatatgttggatttgccgagggaattctcttcctttttattttttggcttttggaaagaaggctgtcctcatattttgtgtactaggcactatcttctgcagtacagatttgttctgggggaattgtaaaattagtatttctatcgacaggtctgcatcggcgagaaagg

SEQ ID NO: 92664 - DNA, 516 bp, Eucalyptus grandis
  Intron number 4 from transcript Egrandis_v1_0.020361m (loc us Egrandis_v1_0.015335m.g) derived from phytozome v7.0 (c hr-ID scaffold_3; pos 79772302 to 79772817 reverse strand)
ttaacaggtgatcaaatccggatctgctcttttttaattgtgtttaatataaccatgacccttgaaatatgcaagagatatggtattcttttccaaaaacttacaatatttgttggacagccatatatacatgcaaaattataatgttttgtgtcaaaaaaatcagaatttttttccatgctgttaaatttccataagttttaatgaatgctacaaaaaaaccattaggtaaaaatgagtaaatggcgacatttttttctaattaagttattaagctagcaacacttgttaatttgacataatagttggtaaagttaaggctttgttagaatatgtaaacaatggttgggaaaagattttaaaaagagactgtcaaagatacgaaaaaataatcaaatgtgcgttcataactaactcatataagagttgataactttatcttataatctgagtaaattctggtatctctgaaatctttcaggacattggagctttggagcaagcttttacaagaaa

SEQ ID NO: 92665 - DNA, 678 bp, Eucalyptus grandis
  Intron number 1 from transcript Egrandis_v1_0.019867m (loc us Egrandis_v1_0.019867m.g) derived from phytozome v7.0 (c hr-ID scaffold_5; pos 1871111 to 1871788 reverse strand)
ccgtttcccaagcgttcggtcaggttttgttgctgtcgtcactttgaagttttgttcaatctgaagcattttagttcatggtcttcgacgtttagctgtagctgaataatgttcacggagcagttcacttgtcctgtttgcttgccaaatgctcgagtcgagctcgctgtgggaatggaaaaagccttgctgtagtgggtcttgaggattaagtataatgggcttcaaacttacgagaggggaacgtgctgaattaaactggagttgtatgctgtcaaacttttgctttggaaatgcgattctttgttgcaaagaagaagagcattgcttcgactctctgatgctgggccgtgatgtgttgaagcttagtcaggcagcatatttgtgggaaaattttggatccgagctgattcgcattgaagtttttttttgcacctctagctgtgattgttgcacgtttcttctttttatttggatatgtctttgctatttggtgactagctttataaacattgtgctgctagttttggagctttaattgattgttttgattgatgcctcataatcgcaatggtttggatcttcctagattgtgtctcgttatattagttcccccacaaaacatgatctgggtttattcttgctgaagagaagttatcgtgtctgaatcgcagcctg

SEQ ID NO: 92666 - DNA, 683 bp, Eucalyptus grandis
  Intron number 2 from transcript Egrandis_v1_0.009263m (loc us Egrandis_v1_0.009263m.g) derived from phytozome v7.0 (c hr-ID scaffold_3; pos 48246741 to 48247423)
tcactattaggtaattgtggatagcgcttgctcatgccctttgcatatgctgatttgtgggtgtaaagtagccattggagctttacctttggagtatttcgcaattggctaatcatggctaccttttagtttatatctggtagtttgtttcataactttttagctcctgctctttcgtcacactttctattaacatgtcaaataatttctttttctaagtttccgaagcacgtgtcaggtaatttgcttaacgtgttctcccgagtaaaatcccagaaatcgtctatcttggagaactgcacgaattctaagtgatgcaatttgatttatatttcactttgagaaagtaaaagtacctttattggagattcctagtcctccaaaagttccaagggagcctcaggtaggagattaatccaatggatgaagatagtgaacgactgaagtgccagaatcacttaccaaagcagtgagaaaaccattactttaaagatggttgaagcctgaaattatgtgtgtagaaagaaaagcaaaacgaccagactcattttcttgaggcttctgctttcatattcaccatatctattagagatgttctcatttacttcttgcaacattagcacacctctgaaaaatattgaacttcatcaggcttttacatcactcaggagcgcctcctgact

SEQ ID NO: 92667 - DNA, 692 bp, Eucalyptus grandis
  Intron number 1 from transcript Egrandis_v1_0.020040m (loc us Egrandis_v1_0.020084m.g) derived from phytozome v7.0 (c hr-ID scaffold_5; pos 42825490 to 42826181)
tcgtcgctggactggacctcattgttgctgcttctgtgggtacgtcatcattgttcatagaagtaatgcccttttgctttttgttctgttccattctgtttttccgcctgaatatctgatgtggggtaggcgtttcttggtgattgggggagactgggatctgggctcgggggaattggcggagcaaatgcttggtttcttgatctgggaatctgattagagtttctgcaatttcgctcgaattatggagggttctgcttcgttttgatgttttccatgtggtccgtatttgatgagatgtcaagtgctgttctcttggaattggatcaacatggtttgagattagcagtctaacagagtggttgattgaggaggtggttacgtgttcctaattgagatacaatgacattatattgtagctctcttaatgaaaagcactgattacgtacaattataagtgtagaaataggatcttgggttgttatatgatgctactgagatcgattgtgatgatatcatgatgtttatgactgttcattctcgagtccatgaaaaaaaatcagagatttgaatatatggcggtgtggttcataattgtgcgatcttccaaggtgtgttttgtgccagcactcatgtcattgatctttcgtgaaacagggtattgctcttcacgggtaaaggcatttaactta

SEQ ID NO: 92668 - DNA, 170 bp, Eucalyptus grandis
  Intron number 2 from transcript Egrandis_v1_0.042432m (loc us Egrandis_v1_0.042432m.g) derived from phytozome v7.0 (c hr-ID scaffold_3; pos 72754648 to 72754817)
aaccttctcccggacaagtaaatacaacttatgatcttctttggattataaaaccattttgattcactgattatatgtttcctcattttcttttaaaaattaatgaattttcttgttctctccttcatttctttccccaccctttgtgcagtattactttgaggacaggt

SEQ ID NO: 92669 - DNA, 661 bp, Eucalyptus grandis
  Intron number 1 from transcript Egrandis_v1_0.016484m (loc us Egrandis_v1_0.016484m.g) derived from phytozome v7.0 (c hr-ID scaffold_5; pos 25245773 to 25246433)
aagtcgtcgagactgccgccaagaccggtgctcaggtctctcgtgcccgttcagtttatgagcgcttgttcttttgttttcttgaagagagagaggagtgtcgtgtttgaggttgagtcaggagtggagatgttgcaagctatctcgtactccataaatggaaatgggaaagagaaaagggaggttttgtgatcgaagtttatcccaatcaacggactttattgagaatgaatcagttatgacaacatttgggtagcaatcaaatgggtatctccccttaggtagaaatgatcagttttatgcagcaatgcaagctaaagatggaattgggattttttctatgatacccttgattcttgcaggaatgaggagaaaaagagggaaaatgggaaaaagaaaaatcaatattggggtcttcctttcttgagaggagaaaacagcagggcattgtgctcgcacatgattgattctaatgcaaacaatgcctaactgctgtagaattgcagctaatatgaatgttcaatatagggaaaaagatgatgaggaatattaacttgtgtggagatgctttcccttttctatcctgtttgtcctggaaaatgctcttttttaactttctggcatatcttgattctgtcactactatttctttcaggttgtt

SEQ ID NO: 92670 - DNA, 896 bp, Eucalyptus grandis
  Intron number 2 from transcript Egrandis_v1_0.016484m (loc us Egrandis_v1_0.016484m.g) derived from phytozome v7.0 (c hr-ID scaffold_5; pos 25246461 to 25247356)
attttctacaaaggactaactgatttggtgaccgagtaagattctttttcctactgaatatgagttaagggcaatagcttgccatagctatgataggctttttactttgttgcgtagacctctggatgatgcttactatgtaactctgctcttgtcataatgtaaacatccactgtgctagacagccaaattctgcaaatggtggcttgaagtgctctttttcagcggaaaagctctgaatgctctcatttgacttgagatgttgttcttctgatgtccttctttgcctgtactaaagttagtcattatgcggggttaaagaatattatgtttgtccatgtctcaacttgttgcatagctgattccatattaccagtgaacataatgtagttgagcagctgattgatccttcctcttcgatctatactgtttgattatcatttgaaagtgagttcttgagctctcctttcagataacctctgcacttggtcaatttcatcctgcctaatatctttcttgaaagagtagaaaaaagaagactgaaatttcatggtattgtggttgcatatgccttaaagaacgataatttgatgctgagttaatgcaatttttatgcttttatacttgccttctgcattttgttgttaaaagtacattaatgcagcataggatggcacaagccttaaaatttggccagttaagatttaggttatgcctgtgagtatgcaaattgtggcaatctatctataggagattccacacaataattaaatgcttgcaaactgtaatgaccttacgactgaccctgtccatagggtcaagcacagcattctggtgagagaactcaacaaattctcgtttctgagctttggaaatgtacttgcagaacagacaaa

SEQ ID NO: 92671 - DNA, 802 bp, Eucalyptus grandis
  Intron number 3 from transcript Egrandis_v1_0.027869m (loc us Egrandis_v1_0.027869m.g) derived from phytozome v7.0 (c hr-ID scaffold_5; pos 14864077 to 14864878)
tctcctccgcaggtgtgggacttgcacactctggagtgtgttctggaacttgttggacacactgatgtgcgatgtcactgatttgctgggaccagtatttgatatcttgttcattggatcagacattcaatgtttgagttgccactgaaggaggcagcttggaagttgcctatgcagatcatgaggaccatgtatgttgctcgctaatttttttcttttttgcacttgtgtggattatggcatgttgtggttgatgatggtactataggaaaaagtgtaggcaaagggtgatttttttttttttttattgacttcatattggcgatgtgcatggacctgtttttctaaattagatcacaaatatgcgtcttattgctttttggttttacttcccagctaaaaatgactacatgatgtggaatgaatctttgtaatattgctagacgatcaagtaccttgcatgtgcttgcttgctccatgtggagaagacatgaattttcatcttttacctgtcaatgctttgtctgtttcttaccgtgctcctagtctcatggaagagatgtaatatcatatcttgatgttgcaaatatcattttgtccggcaccggatatttttgcacggtcagggatgaatgatgcgggtggtaagccagtcctctgtgcatgcatagacaacaccgttcacatgtacgagctcccatcgtaagtccaaaataatttctgtagttggtttgacatccttgtctctcggtgaagactgttctcttcttctgcttggctgacttcgtgcactccaggttca

SEQ ID NO: 92672 - DNA, 644 bp, Eucalyptus grandis
  Intron number 2 from transcript Egrandis_v1_0.023038m (loc us Egrandis_v1_0.023038m.g) derived from phytozome v7.0 (c hr-ID scaffold_3; pos 36427040 to 36427683)
tgcggaaccgggcaacagcggccgaggcggcagttgttagaaaatagtaaaattgattttgtgttttgattagcttatttgtcttctaattgttttggctaagtgtgttaaagcaagagttagtcggtttgtaaaaagccaaagaaaagtgggctgcagcgtcacttcgtaaaccgccaaaggagagaattcttgaagaagccacaagcggattagaaaaaaaagaatgggcacatattaaaataatattatacttgttgctggagtcttcaagagcaggaagaaagcttcaacttcgtaaacttgaacgtgaaggaaaagtttcagcccaaaattgttgactccttagccaagaagaaaagttcaacttcaactcttgcacgtcgaagataatagcggtgaagatgcttataaatatagggttatgttagtttatttagtgtgtgagagagtgagatagcttcacaagcatatagaaagctagagagagttttaaacttagcaaagtttgtgtgtgtactccattaagcctttgaaggcatattgtgtaatatattctctctttgtgtgtttataatctctccctccaaatccttttggttccaacagcggtgccagtcacgcaggcaggtgagaccccggaa

SEQ ID NO: 92673 - DNA, 905 bp, Eucalyptus grandis
  Intron number 1 from transcript Egrandis_v1_0.008296m (loc us Egrandis_v1_0.008296m.g) derived from phytozome v7.0 (c hr-ID scaffold_5; pos 67857035 to 67857939)
acgaggacccgactcagaggtttgagctcgttgtcctaaatttcgttgcttgagttcttttcttgcctgcggtggtttcttgaggattaatcttagctacattgaaggttttgggagtgttttgaggctgggattgctgttgctcatgctttcggagcgtttaacgttggcttaggctggtgaatggcctgaaaaattctcacgttaagaccagaaagttgtcgtacttagttattctcttctcaagacgctatgagttagtaagttagcgctgctaatccttttgtctagttgggaacttacgagaggatcaagttatggtcacgggaccatggagcattgtctcgttctttggggattggggtggggtggctctatcacttctccaagtaaaatgtgcacttgctcgctttgcaactttatgagcttttctttactttcatttgatagtaagagattagccagaattgtagggttgaaacgtggtggaactcatgggagtttttaatttcttctctctactttcggtgaattcgaatcgaaagtaaaaactagctagccctctgcattttcatgagtttgttgattgtagttacttcggtagtcttgcttctgtaactggttcaactgaaaattgatatttcatgttagatgcgattcgttaaggatacttgtcatcagcttgtaggttcaactttctttgagctattgagtcatctaacttcatactttctttgaactttctcaaatagttgattccgcacaattcagtgtcctcatttcttgtgacaatcaatacttttggaaaaacattactttttttttaatgatcttggtatgtctcaccaaaaaagggtcttcaataattgcctgtttttggccttgcagatcgaggagaaagaaga

SEQ ID NO: 92674 - DNA, 659 bp, Eucalyptus grandis
  Intron number 1 from transcript Egrandis_v1_0.024331m (loc us Egrandis_v1_0.024331m.g) derived from phytozome v7.0 (c hr-ID scaffold_3; pos 77809301 to 77809959)
gacaagcaggtctccactgttccatcgtccttatttcattgctgtgcttcttgggtagaggagaggaaatttgtttgaccttgatcggtccgtaattgactttgttcatggcttttcgtatgtgatcctgaaatctgggaatcgtcgattttatgggtcttctgcttctgggttgttgttggtagatgatattaaagccaggagcttttatcatagctttaggtgtattgggcagattgctagctattgatctctctttaatgaatattggtctgttagatgttgatctgtctcgcggcatgattttagtttggttgattgatggcatagcatcacggaaccttttgatcagtgttttttatgtttagtcaataagttgaaatctatatttcctgtttttgttacgtctcatcattcctgtgattatgctgttgcctagcaattgacaacctctgttaaattggagtgtttcatgttcattggaacgagacatggataaaatgagtcaatttgatgtctgaacaatcttttttttttcccagatgataatttgattgtcattagaaagaaaaaatatatctaccatgtttgctaatatgacatttgacattgtcgtgacatgttccagcttctcgagagagcacttgaagaaagtggta

SEQ ID NO: 92675 - DNA, 876 bp, Eucalyptus grandis
  Intron number 1 from transcript Egrandis_v1_0.000914m (loc us Egrandis_v1_0.000909m.g) derived from phytozome v7.0 (c hr-ID scaffold_3; pos 62461053 to 62461928)
gatttttagctggtggtggggaaggtgcgtataatcttcttttcctgtcctttgctcgtttgctttgagtgttactgacttgctcttaatgttgtcgtattggtgataatagccatgaaactaaaaatgttgtttgtatacgaagaattttgcttcctacaaatttttaagctgcatatggagaagcaacttttagttgcatagattgcaaattggaaaagataagcagttccatttcctttgaggctcatggttgttgagggaaagatcaacgttgttgttttcgggcaaaaatgcattgaatctaagtgaagtctttgcaatccagctctccacccctgcctaagggcacgaggtgaaagcagtttaaatgaggttggtggacgatgattgcttctcaaaagtttctaacgttgagcagcaggatctgatgataaaagaagattccttggtctcagatattaattgtcttctacttcctttgcttgctgcctagaaaatatgacagattattcttgctaaagattgtgtgcttccttatatatgcgtgcacaacgctcttctgatacaagatgcttaggattaatcaagtttcttgggctatagtttcagaagattctatcaaactaaacctaatgaaaaatagcacctgctgacttatgttccggtactatagagctaaatgatcatggtagagttgctgcatttacgtttttttactttctttcttgtcaatcactgcaatttccagactcctctttaaagtgtcgctcatagcatacacccctttcttttcttcaaatacctacctacctttttctaagaactttggctttctttcggaacaggtgaaaagaagagtataaattcagagtt

SEQ ID NO: 92676 - DNA, 814 bp, Eucalyptus grandis
  Intron number 1 from transcript Egrandis_v1_0.003698m (loc us Egrandis_v1_0.003698m.g) derived from phytozome v7.0 (c hr-ID scaffold_5; pos 11485952 to 11486765)
gggttagtttcacccacttttttataagctattcatcttcatattcttcaaggtgactactgtctgaggagaaactcttttacgcataaagggataatgaaagtctgtggtctggccttcactcctcattcttgaagccaagaaaacccccgttagcgtcaccttttaagataagtgacccttaaaactttaggggacctctaaacttggaggcccttgtatgaccaaactctgtttttactgcatattatttcctatattcgtgccctttattgttgtttaatcagtgggatcttgaacaagaaccaccccttcaaattatggccttgatcacaaagcaacatgttcaaatcaggagcgaggtcattatctggtttgaccttacttggtttccacatcttttgaattcttggtgtggattgcactgcttttgtgcctgaccttgcaagctccccttcaaggatacttaaaagtgggcattgtcgttctctatcgcatcgagtttctatattgggtagttgctaaagcagcaagcgatcgatctcatgatcctgatattcacttcatctctttgtcaaaatcacgaaacatcggcaacacaccacgatgagaaacttggcaacttcgctggtggtcgcatgttttcttcttgggcaatggggcattaccagaacggtgaaggcaaagagcaatgtgtgtgaatctcatgcttttaacgtgtttctctgtgattctgttttctcttagaaaggaagcaatcctggcaaatttatgggcaggtttatattgtgtactttggagtgaggaagcaagg

SEQ ID NO: 92677 - DNA, 657 bp, Eucalyptus grandis
  Intron number 4 from transcript Egrandis_v1_0.019934m (loc us Egrandis_v1_0.019934m.g) derived from phytozome v7.0 (c hr-ID scaffold_3; pos 20890445 to 20891101 reverse strand)
gaaaaatttcattgtcaagcattgtgagtttttactatagatgatatggagcagtaggcattaatttttcttgctagttccaggatgtaaatattgttccatccaagtaaaagataatacagagatcttctgtttctctgatggggtattttgggcattctcagtacctgatagtcaccatcttccccttctatatgcatcagatattgccaagttcttgtaatattgaaggtggcccaatgggagttaaattgcctctgacttctgaactgagtatgctctcttggtctctcatcctatgttagccaaagtaaaactcttctggttatttgtagtggctgattaaacaattttgtggggtattgttctaaagctactatgctacaatatgaaccagttatttttagccgtcaagatttaccattaatcacactgaccaagagcctcaacacaagtgtctaattgcttacagtgggatggctgatattacagtcaatagggtctccaactctaaatcatttgacttttagatcgaacagtaatgcctagatgatctttgtcgcaagattaagtgtaatttgttgctataaacaaagcgacagtagtcaatttcttaattttttttttttttttatttgtaaatgtgcacactcagaa

SEQ ID NO: 92678 - DNA, 937 bp, Eucalyptus grandis
  Intron number 1 from transcript Egrandis_v1_0.035727m (loc us Egrandis_v1_0.035727m.g) derived from phytozome v7.0 (c hr-ID scaffold_2677; pos 1980 to 2916 reverse strand)
ttgtaagtgactggcttcccatatgttaatatactcgtttggttcagcattcctcgtgtttaggttactcctgtcataatgaatgtgctgtcattaatggagagtataattcaagagtgctctgttcttttatggaccacgttgaaaccacaatggttgactgttacaattgagagtcggaattttttgttctgtatgtatggatcagaaaaaaccaagcttttggagatggaggaaacaataatattccctttctttgctaatttaaaacaaatggttttcgtttctcagcttaatcgtccttactttgtgggcctttgttttgtggcctgatggcttgactgatgttgaaggtgttaaaaaaaaaatatatatatatatatatatacagttgccctcagggaaatgctttgacattactgcgattattgaactgactcataaaaagtcaaaaactaagaggaaaagaataattgctcattcatagattaggtgttctgtgtcattttctctttaccctaatggtgcaatgaaactcttagcaaccgtcgtgaaagacttgaaactgaaacttgacattacacaattaagctgctggcgtatggcctggttgtgcagatcaggatcctaagttggttctgattctttcatcttcaaagataggattctagtacgaatcaaggatctaagatcctgaaaaattgtctaactgaagcttgtgatgccaattaactttgttatacataattacctgcatatgaacctttaaaagaaggaatgaagatcaaagagggagttctcatttgagaggtcaaggttttaattctagtattcacaaattccaacttaagacactcttgcatttcaagtgtcgacttcgcattgcagagttcattgctcctcatatttggtctctgtttttctttgctgcagcaat

SEQ ID NO: 92679 - DNA, 511 bp, Eucalyptus grandis
  Intron number 3 from transcript Egrandis_v1_0.007825m (loc us Egrandis_v1_0.007825m.g) derived from phytozome v7.0 (c hr-ID scaffold_1; pos 22841428 to 22841938)
gtcgagaccatactggagctggtaatcttttttttgttttttttgtttttttattaattgctcagttgcagggtattgcacccgcccctggggaggggtggttgatcaggcggagctttggaattaatttgagatagagtatttatagtttctttcgtgctataaggggaaaaggtggtgcctaagtgtaaaataatttgtcaggtgcctttcttaaaagaaataatcaacaattacttatgtatgtttctgttgtattttcttgtctgtgttgttctggaggttgactgtgctgttgtttgagggagattcaacgacttattgcctggctaattccccttgtgatcaatctcttcatctcaaatttgaaatgatgatgttgtgatggattcaactagatctgaagccgtatgttggatgctaaagcacatcaatcaggatgtttttcttctttaagtgttcgaggctctgattcttctcttatctgttgttgtattttgtgcatgaccag

SEQ ID NO: 92680 - DNA, 520 bp, Eucalyptus grandis
  Intron number 2 from transcript Egrandis_v1_0.049455m (loc us Egrandis_v1_0.049455m.g) derived from phytozome v7.0 (c hr-ID scaffold_5; pos 4703884 to 4704403)
cgcccgctaaaacctcagccgctagagggagcatcgtgcctcaatgctacgccttgatcatcgctgtcttcggcgtcgttgcaatggttatggtttgatgtatcttaagttaagtcattcgtcccgtttgtcttttcacttggcgtggattatttcgtttgtaatctttgcgttcgtcccgttcgtcctttcacttgacgtggtttacttcgtttgtaatctttgcattaatttaaaaagtttttgttgaggaaatctttcatttcgacttggaaagtacattcgatttagccatttatgctcttattattcaagggcgggcctattccaaccaggctggatggatgtcgccaaaaggagaatttctatggcctctcgagcgggcgattcacttttctaagtgcgccgtactcttaagcgttttgccctactttctacatcaaacatcgtatctcaaaaagaccttaaaaatttccaatgcacaatcgagagttgttctgccgtgatccaacggttgcca

SEQ ID NO: 92681 - DNA, 821 bp, Eucalyptus grandis
  Intron number 2 from transcript Egrandis_v1_0.004154m (loc us Egrandis_v1_0.004154m.g) derived from phytozome v7.0 (c hr-ID scaffold_3; pos 19944856 to 19945676)
tgaaggctattgtcttgaccggtaaggcactgtttgtttatcttcttttcttctaatcacgaacacaatttctattttttgtgaaaacaaaaaaaaaattatttgtatttttgtttcattttttttttcaagaacaaatttgaaacaaaaataagaatttttttttcttgaacacttctgaaaattaatttttctctcttaaatttttttcttttctttattttattcttcttttttctttggctggtcgttgatcagccctcgataaggtggagtgttgttggcccctggcaagcctcgacttggctaatcgagctcgagcttgcctagatctaacgaggccgactcgctggccaggctaagccatcagccatggccaaagccaaagccggcaatcggcttaaagaaagaaaaatgaaaaaaagaaaaaaattaaaaaaaattatataaatttatcaaatatgtttttgatcttttcctatttcaataataaatttaccaaacacattcttctttttaaaaatttgttctaaaaaaataaaaatagttattttggggaataattttttaaaagcaacgttaccaaatgcgcctttcaactttcggaacttcattatgctgtccaatctctgtttcgttgcggctttttcttgttgtctgcttcttcgttgttcctgatcggtcaaaaggcattaactatgccaattcgcgcgggttctactcgatgcgttttgtaatttttgcttacgcgcgagtatcatgcgtgtcgtttcgtttgttttgaaggcaacggcgggacggtttctggtggttttgatatc

SEQ ID NO: 92682 - DNA, 996 bp, Eucalyptus grandis
  Intron number 1 from transcript Egrandis_v1_0.004059m (loc us Egrandis_v1_0.004059m.g) derived from phytozome v7.0 (c hr-ID scaffold_5; pos 23086911 to 23087906 reverse strand)
aggcggagagggaggctccacggcacggcttgcaggtgaaaaatgttgggatttcttgcttctacatggtgcaataaagctcaaattatcttaacatttttgtcacatcgatttcccgtgagactatacatatataaaatcatttgatttaaggaccatcgacgttttctccttcttcaatgaatatcctttttactttcgtaagaatgagcacaaaacaggccattggccatttcaatttaacctcctcgtacaaacgaatactcaatttggaactatttggtctttgagtcatggccaccttcgtttagtcagcctaacttactttattttagctttatggttatgccctaactacgctgagctataatagattaattaattatgctatggggtgaagtcctgcaattttttttttttattgtactcattatattttgaagttgcaaagataatgaggtagttttcaaaaaaaaaaaagaaaaaaaaactattgtaaagtggtgaatatgtggagctgctgcacgttatagttgtgttttaggcaccttataaaagttacaacactcttttcttatttgggataaaattgtggtaagaaagtaatattaaataataaagaaatgattaaatgacagtatttagtttactataataataacagtgtgttcagaataataaaaaattattataaattattatgagattcactctttcaagaatttgtaactcataataaactgttattcttataataactcaaaaactattatactagcaaaactctaaataaaatacaaataaaagtactattaaatctacttccagcaatcaaagttgcgttgcaaccccgttgtgaatccttactcaatgcacatcgccaagattagttaaggtgaaaactgagatactcaatatcatctaagagtgctctggttagtgacctctttggtataactaggtgtcgaagtctctgccggcgaggttgaggaacaa

SEQ ID NO: 92683 - DNA, 1034 bp, Eucalyptus grandis
  Intron number 1 from transcript Egrandis_v1_0.026149m (loc us Egrandis_v1_0.026149m.g) derived from phytozome v7.0 (c hr-ID scaffold_5; pos 12621793 to 12622826)
agcgagcggtggttccgattgtctgaggccgagacgtgatcgctcaggcgcagtccggcacgggcaagacctccacgtttgccctcgcgtcttgccaaatcgtggacacctccagaagagagtacgcgatcctcttcttgagcgaagagccttctgtaactatcggttttctactggaatttgattgaggcatgttatgcgtttgctttggagggtcagatgagtcattaacattatagagctcaaactatgacaccacagattaataataatacaaaaaaaaaaaaaaatggcaaaccttctctctctctcgagaatttctagcgtaacgaaattcaatcgctctgacaggaagaatttttggttttcgacctcgtcaactaaagaatttgagatgttctgatgttgaggcagagggatgctggcttttagttttaccatcaccgctcgaatggccctgaaagaattcaagccttagtctaaggaatttgttcttgaactttgttttgagaagctttctatggaattaagcatagcctgagtttatgcacttcttcaggtgacattatatatatcttcaatttgtttatgaactcaggaatgcttaagtgagtcctcgtaactgagtattttaggcacttgcaaggcatgaaaggttttcttcattatcaaggaaaacgagtagttttattcttacatttttttttatctatataacaggagcattagtataattgaaaccgcaatgtgggtttgcttatttttattgcaaatatcctggatgcactcgtcaacaagctcctattattaagtatccgtgactttgttgcttgtattttgttgatttttcaagctaccctcgtttatttggctctctgaaagttgcaatttgaatttggttgctgccttgtggccatcgattttatcttagctaatttgcttccttcacgttctgttcgagagtgcaagggctgattttgtcacctacgagggatttggcaagtccgttattacaggaacgtgctagcccacgc

SEQ ID NO: 92684 - DNA, 845 bp, Eucalyptus grandis
  Intron number 2 from transcript Egrandis_v1_0.038971m (loc us Egrandis_v1_0.038971m.g) derived from phytozome v7.0 (c hr-ID scaffold_1; pos 9955781 to 9956625 reverse strand)
tagacaccgcctgggagtacaaagttcaagaagaggtctctcttttcgctccttcaccttgtgggattcattcgttctagtgctgaactagaataatgcccatttgatgcacggattttagatatgatttttcgatgacgaaacataggcgatataacttaacggttatttgtcttcgtatatttgcaaggattcgcacatattaaatgcaccgtctttctcgtgtcaagtgtaaccaatgtatttaaatgaaaataatactttataaattatagttaacatgtgtcccgaaacactcattaacaagactcttttcgaaatatcatatttttcctttgtgttatgcgtaggttttgtatgaccttttcaagctttcatttcccgaatatctcaaagtctttaataataattattatcttattcaacaaagcaatagttatagatttatctataaatggaaattaatgcagtgtgaataatggagattttgatttgaaagggttgatggtctgtgaaagccagtgttgattaatgatcttggaagctttcattttgcattagcctctgcaacaatgtaaagtgaggctttcagtttagatttcttttatcatagttatagagtctcaataagacggccgaaaaggaaaagatacggaaggattcgaggtccaagacatggattagagctcataaatagcaaaatgtaacatatttattattttattacttcgccaaacaatttcttaagaacacttgttaacaatatctgctctctagttcgtaacgaatgttcttgacgtcgaggaaattatgattgtctcgctgctcttgttcgtaggttgggc

SEQ ID NO: 92685 - DNA, 996 bp, Eucalyptus grandis
  Intron number 2 from transcript Egrandis_v1_0.031672m (loc us Egrandis_v1_0.031672m.g) derived from phytozome v7.0 (c hr-ID scaffold_616; pos 3769 to 4764 reverse strand)
cccttccgtgagttccttcgctaccggttttgattttctcttcatcatcttcttttgttctttcggatggtaacgatttcgccaattctcaccaacgtctgtttcggaaatttcaagtggttttagtgtctagattctgcacgtgtgtcttttctcatgatccttctgatccttcttgggatatttgccctcaatagttttgttttctcagtcaagagtagtttaactttcgagtgggttgctggaatttgctggatgcagtacacgttcagtgatctctcatactgtgtttacaagaagaaatggccaccaattttttttccttaaaagagaagtgaacattaacttaagatacactagttcttgtttgtttcttatgtgaacattagctacatgctagttaggttttttttttttttttttggcagcattcgcatgtgcaatagttgctaacattcaatcttcttagccttgtaatgttatggttttgtttgttatttgatgttttttggcttatggatgtcacatgtctagacttttgagttcgtcgatttgatttttccccactattactttcaagactggctgactcaactgttttatatttgttaacgagcaagagattagaaggatgaaagccactttcagattgccattagctgtataatggagtcattgaaggctcatttaattgatggatcatatgacgaagttgcattatgcctttttgctggcgaccctctccggatgcgggcgaggcggccctcgcccgcagctggcgagggtcgctggcttaggaaaaaaaagcaaagtaaaaaaggaaaagaaaaataaaacaattcatgtactgttgggaagcactttgattttgtcatgtaaaatgggccttcggattttactaaaatgcaaatttcatgtgaagcttttggatgtcattcagtacgtgagacatattttgcagccttgcagagatattttgcagtttcgcaggccctt

SEQ ID NO: 92686 - DNA, 901 bp, Eucalyptus grandis
  Intron number 1 from transcript Egrandis_v1_0.028440m (loc us Egrandis_v1_0.028091m.g) derived from phytozome v7.0 (c hr-ID scaffold_259; pos 3322 to 4222 reverse strand)
ctctctgacactccccaccttggacttcagcttcggtaagacgctgtttcttcctccaatcatcgcccactcttgtccttcccgctgtttcttggtttttttttcactggtttctttacccgatttcgtttcctcattacatatctctgcgcttcatttgccattcgttttctcctccgcctcgtttctttgcggttcggccgcatcatgaatgtacaatttcttgctgttctcttcattcttttgttttctgggtgatatcaagacgagggcgagttcttgattttgatcattttggggggcacaagtgtggccgtaacgagctgcgtgtttcttagcgggttcaggggattttcggggtctagcgaaattgggtattgccctctttgtgtttgatgatatgtgtcaaaggtcgatactttagttcggggtgtaccttgcatccccactttgacagaggctctcttttatggagaagaagagttttcccgtaatgcccaatccatacgtgggtaagaagaagagaattcattcgagtttctcttgtagtccttttttggcccttttccctaggatgatgatgggatatggatcccattaatttgctaggagtttaatttcaggattcgggtttttggtatacggtgctacggattgaatggaagctttgaggaatgtgttgtggttcatcatagaactatcttcaaagcatagccgaagctctttttaatttggtcgccgatgtctgtttttcggcagttcctgtgttctccgctgaaaaagagtcatttttccatccgtgtctcctgcatcttattcttatgtctagcaccgtgtctaactaattttatgcgtcatttgtgcaggtatctccaaagagtaatctgtcgattccgtggac

SEQ ID NO: 92687 - DNA, 719 bp, Eucalyptus grandis
  Intron number 3 from transcript Egrandis_v1_0.022368m (loc us Egrandis_v1_0.022368m.g) derived from phytozome v7.0 (c hr-ID scaffold_817; pos 6203 to 6921)
aggtactcgcccaattctatttgtgttctttagtcggttcatttccttgaaattaaaatatgctaacttcatgttcatatggaggtggtagggaaaaagtttaaagttgtgacataattcgttttgagaaagttttgtttgggtttcttcgaatctgctcgtggaaaaattttcttctaagaatcacacattaaaggatgtggctgacattatgaaagattaattttttgaattcttgctttttggagagagctgaacctgatttggtgttcagtttgtgctgaagatctttggaactgggtgatggttcttatttctcttatcttcctcatgttgttgtcctgctttatccccatgtacgatttctatacaataaagccatttatccagttatgagataattaagcataactaactagtcatttagaggtgtttctgcttgaacaagcatttgcatatttaccctctcatgttgtagatcacagtaacaggaccttggaatcgttgtttatcttttggagtctgtcaatattgagcttcgatgaaattggactcgtgtatttaaggccattctatcactggttagatcattttcattgtaggtcagctgggatagatcttctaacccattggcaaaaaagatgaatggaagaatatttcattgatgtttggtgacacaagttatttgtccagggtaggctgaaaattgcagacttcgg

SEQ ID NO: 92688 - DNA, 361 bp, Eucalyptus grandis
  Intron number 2 from transcript Egrandis_v1_0.010973m (loc us Egrandis_v1_0.010973m.g) derived from phytozome v7.0 (c hr-ID scaffold_1; pos 32796294 to 32796654)
gggtctggtgaaaagagattacagctggaacaaaggtatatgttactttttgaattcaaatcaattagctgatatgacaaacttttttcttgtctatgttcatatggggtagcaaccagatattcaataaacaagcaaaacgtgctatcattgattaaagagccacttcattattgtaaatagaacaaagatatcatgacttttttttttatatgacactgattaagtgcttgtcggtgaggagatagaagctaatgcttccttatcagcaacctttcgtttgcattccctggaaatttgacaactgaattggctaaatgttgcagtggccaatctcctatacctggagtctccggcagga

SEQ ID NO: 92689 - DNA, 548 bp, Eucalyptus grandis
  Intron number 3 from transcript Egrandis_v1_0.015065m (loc us Egrandis_v1_0.015065m.g) derived from phytozome v7.0 (c hr-ID scaffold_5; pos 35833712 to 35834259)
atcatcggtacgtaaaggtttccgattgacggtgatatcctgcttttgcggtcatttgggttatgctttgatcggctgacgaagtgggtcgtgatcaaaattctcacattttggagccgatcaaactgggtagtgccatttcaccctcccccctccccccacaagaaaaagaaaaagaaaaagaaaaaagaactgggaagtgccattatttgccagggattcatttttttgatcgtttcttgaaatagtgttggccgtgaataatcacttttgcatatggtactggagttcttgtcttcgagattgatcggtttgaagccagatcttgattcacgtggatctgagcttcgttgatttattgcgatcggaccattaggggacattgtttattaacttcttatatattttggtagctgatcgaggtctgattgtagacggccattcttgacttccctttataaaatctgcacctaataatctttcaactctggcttgcttttgggggtagtgcaggtgcttttcttcagttagcattcattcgacggctg

SEQ ID NO: 92690 - DNA, 432 bp, Eucalyptus grandis
  Intron number 1 from transcript Egrandis_v1_0.018577m (loc us Egrandis_v1_0.018547m.g) derived from phytozome v7.0 (c hr-ID scaffold_5; pos 27012964 to 27013395)
catctcccgatccatccgaagctgtcggcgcacaggtaaatccgcactaacccatgatgatgtttcgatgtatcatcgattgtttcgaatttcgatgtttctcgggggcgggtcggatgtaagaatcttgatgtgggtgtcagcgaaagccgatcgaattcttcgcatttcttcccccgccttcacgttcgatgttaacggaccttaatcgagaaagctctcgcccgggttgtctccaagttagggtttttgcatgttctgcagctggtttcttggttagggtataatttggttgtttttgaaatcccgttttcttgtttgttcgggtgtattggttggatgcgggagaaattggatgatgggtattgataaagttttgatttttttgtctgtttaggttctctctttttgtagggcttgacctactttaaa

SEQ ID NO: 92691 - DNA, 615 bp, Eucalyptus grandis
  Intron number 1 from transcript Egrandis_v1_0.010830m (loc us Egrandis_v1_0.010830m.g) derived from phytozome v7.0 (c hr-ID scaffold_5; pos 61984715 to 61985329)
acttctaaggcaagaaggttattgtgtgcctgcaggtttgttcctatgagtttcaagtcgattgcaatagcgaaatacagtgttgctatttatacataacaaaagaagacaacttttttgttgttgttttgtctagttacgtggaagccctaaaatttccaatagtttgttaaggatgaaaatggacaagaatataagctgattttaaaaaaaaatattttgctgatttaagaattggaaatgtttaattgtgatgaactctccaatggatatccatcaatgcatgttacatcgtggacttatgccagatattaagcaatgcattagtgttctgaagttttgttcaaaatggaaagtaagaactaattattcatattacaaaaatcgaattgaaaaaacctagatatatgcccatttccttcatttgttctcttttttagtttctttacattaaaaaattaaaaatttacatgagatgaaataattttaaccaatttagcatttttttcgaaaccaaagtatgcacatcataattttgaatgagtgaagcgacttataaattatatattagactatgctttttgatgtattagagtccttgtgttttttatgtag

SEQ ID NO: 92692 - DNA, 789 bp, Eucalyptus grandis
  Intron number 2 from transcript Egrandis_v1_0.017905m (loc us Egrandis_v1_0.015926m.g) derived from phytozome v7.0 (c hr-ID scaffold_20; pos 490449 to 491237)
cacgagtggccgaccaatcctccatcattcaggtaaaaaaaaaagcttattctcatcatgtgatttgtttattttgactcaaatgttcagaatttagtgatgtcttcttttaatatatcttctcgattgggatggctcagtggttagagaatgagcttatgcgcctttataagatgcccaatgagtttgattattcctattatcacacgtgagcaatttctattaggatcggatcttatttgatccaaaaggtttctatttcataggccgaagataattaccatatgagatggggcttccttctaaatagaagaaagggaaatatgtagacgcacatgatctttgtaatattcaaccgttggaagattcgtgttgatcatgaggatttcacaagctttctcctgtgaagtctggaaagttaaaagcttgcttgctgtagtttctaaagtctgatattagccaaacaaaaagagagcaacatcaagaatctctcaacagaaaaaaatgtaagaccgaagaaaataaggggtagagcacacccttcaccaacagacaatactgatttaaacgaggcgtgggccaatcagaattaagaaaaagagtggtactttcgactgattttttatgactaccatgtcttggaagtacgaaacagcccacctaaaagttccgatccgaacttcaagtgtcttgaccgatatcatcagtgggcacgccttaactgcattgctggttcaatctttttgatacgcaggaaggaggtgggtgagtattgcacaagagtgagag

SEQ ID NO: 92693 - DNA, 459 bp, Eucalyptus grandis
  Intron number 2 from transcript Egrandis_v1_0.026791m (loc us Egrandis_v1_0.026791m.g) derived from phytozome v7.0 (c hr-ID scaffold_5; pos 10616223 to 10616681 reverse strand)
ctaagcaagaggtgggtttgagttatcttcccaatattgatctgttggttactttgcaaagctagctaattttataaattcccaataaaggttccaaaaaggaaggaaatgacactgtttttcagagagaaatttgattagaagcagcaagaatattgaatctttatagcagatctgtcatcgggatgttgtccccttcttttcttttcctttgaattattattgtgattgatgggagctttagtaacagatctggcactaaatggttattatgtgccttctgttttccatgcaaaacatgcgttctcaaatcagaatcccatttgatcagtttctagcttggcttcctgcatggccatagatgtggctccttttcttgattatttcaattttcctgaaagaattctaataaagatagggttttgccaaaatcatatgaaatctctcagaatctgagca

SEQ ID NO: 92694 - DNA, 553 bp, Eucalyptus grandis
  Intron number 1 from transcript Egrandis_v1_0.055016m (loc us Egrandis_v1_0.055016m.g) derived from phytozome v7.0 (c hr-ID scaffold_3; pos 59887918 to 59888470)
gggcaaagttcgtaaggtaacaggtgagttaaggcctttaggatcttactatatttctccttgcaaactgccataggaaaagaaaaagaaacaaatgttctaaaaccgtactgtgaatattaggagtgcgtgtctgaacttacataataccagttattcaattagtgcaccaatatgctgcttagcgtcatcattgaaataaatagtcccgcattcgatatatgcatataaggtccaataaattgttttcctatagaacttgaatgcctgaaaaacttttttgggcaacacgcaaacatgtgacccagtgtgcataccaataaatatgtttcatcttcagtccatcattaaattcaaataataagacattatgctgcatagttttcaatgaatccgagttattcagacatagcaaatggtctgagaatttcctctttcattttatcctctgggaaagtgtactttatttatgaaagtaaatcctatcaatgaaaataatgcgaggaattgacgtgcaggcctcgagaggtgtggaaagagctgtaggcttcgg

SEQ ID NO: 92695 - DNA, 758 bp, Eucalyptus grandis
  Intron number 1 from transcript Egrandis_v1_0.043401m (loc us Egrandis_v1_0.043401m.g) derived from phytozome v7.0 (c hr-ID scaffold_3; pos 56327189 to 56327946)
aaagcgaaagcgactctcctccaattccagaggaggtacgtgatttttcttgaaaatatttttatataattaccgttttatagacaagatagccatggatgatttcattgctcaggtaagtcgcattggatatctgggactggtaagtcgaataggatatctgggactggaagatgagagtgaaagcgattctcctccaattccagaggaggtacgtgatttttcttgaaaatatttggatatcttgtttttcggtttgactgaatcttttctgtgtgttttccgcaatttcgatggacaaagaaaaggaaatggccgtgaaagtcgtcttcaatagtatgcacatttcagattgttcttgttttcttctttatgactgcatgagaagctcaattcaaaagggaaaagaaaagggaaaacgttcatctaatttggattgagagctaaaaccccaagttggcagaatgcagtatgttagtggctaatcttcaagggagtttctcgctatttttcaggaagttaatgctctgatgtaattatcacagattaacactttagatcatcaagtactttagcccgatttgagaatttatgcatcccctcaagactgtgttaccgatctacagttgtaatgattttaagttgggtcgatgatttcggcatatgcaagcttcaaatatgcctttaaatccgtactacatactggaagctttactgtctcaggtccagattgaagattctccgatttacagaataga

SEQ ID NO: 92696 - DNA, 874 bp, Eucalyptus grandis
  Intron number 1 from transcript Egrandis_v1_0.022221m (loc us Egrandis_v1_0.022221m.g) derived from phytozome v7.0 (c hr-ID scaffold_5; pos 50454227 to 50455100)
agcttggcgaaggtggattcggggaagttttccaggtacattagtgatcattaacgtcgtaaaatgctttcgaaaatcgcttaatgctcggtttggatttgagcctgaaaagattgatgatatatagtatctccttgaactttattccgattcgatggggtacctgaaatttttcaaaagtgctcttttcgcataatagagagctagatgcagtgtactttcacttatttatttttacagttaaataagtttttgcttaagcaatttatgaaggtgtaatttaatatttaaagattctatcactctctctcataagcataaaaaaatcttagggagacaaatagagtaatgaaaaatttgaacttagaatctcttattctcatatcatatgaaatttttgagatcttgccaactatttcaaaatctaaagttataaataaatgtgtgatttgatatttaaatgttctaacatcaacattgttgaattaatcccatgtcatgaactttcacttacatcgcattggacgttaaatgagctatatcatcccattttttcccaagaatttccataataaaagggtttctaaatttctctctctagtcataagaatgacttgtggtcaatgtctacttataatggtatatagtgtccatggcactattgtgtagatgttataatagcgtgaagacctgaccaaacaattttaaatctttgggaacccaattgaatcaaaacatagtttcaaaagtaacattgcataccagttaaaacttcagaaagtcattatcctaaaaaaagaaaaagaaaaaaagaaagtaaagagttctcaagatcttgtcacctttcacaaatttttacagggtagacttccca

SEQ ID NO: 92697 - DNA, 667 bp, Eucalyptus grandis
  Intron number 2 from transcript Egrandis_v1_0.027166m (loc us Egrandis_v1_0.018481m.g) derived from phytozome v7.0 (c hr-ID scaffold_5; pos 4050612 to 4051278)
ctgcaactcgttttgatttccttcacggggtaaacacgcaatctcgacatacttttcatcgatttcgttaagatatttaatgagtttcgcaatcgctctctaaccaattcaacttttgcgtcacatgttttaaccctcttcttcgtatttaattgatatacatatatagagccgattcacattgaacatgtggggtgcgctagccgctggttttggggttcttgaatgaagctatgttctgcaggttgcttagggaattaactaagatcaaaaagcaataattacttatctaagtcttttttttttcttttttgttccaaggataaattcgagatgaattggttaattcagaattataactgcataagggtctgataaaagtcagctatgcatctgttctttcatttctgaaatttatgaaaacccacgaatgtctcctgaagaatccaacaaaagggtttacaacgtgatagaaattttcatttgaaaccacttcagtgataagaaaagtgaattagagattgaacatcttcaaaaagggtatggatgttgtcatgtgcaataacaaaaaaggaaaacgaaccgtgagtgtggcaattcagagggtgaacctgagaatgacagtttctttttttccttttccttgattttgattttcagcgtgacc

SEQ ID NO: 92698 - DNA, 889 bp, Eucalyptus grandis
  Intron number 2 from transcript Egrandis_v1_0.030586m (loc us Egrandis_v1_0.026892m.g) derived from phytozome v7.0 (c hr-ID scaffold_3; pos 52499196 to 52500084 reverse strand)
gccgcgttaggatccccggtacgatgtcgaatcacccttggggctgtccttatgttgattttcgtttgctaattcgttgctttgtgtgcggaagttttcgtttttgtaggggtgtgattctgattgtagtttgagtattgcatcgggtagaatttgctgaatgcttgattcttgcgtctggaaccacttaaaagtttaaagtgcatattagaactttatttttcagccacatgtatctatcaatcgtccaagacagacgatgcggtagtgacgaccattgagagtatgagctaatgctcgaggtagcattgggagcttaccaatttggtgcttgagtttcttttttaggtcctttagggctcctggggttgggatgaggcgggtctttttgagttcaaaaaattgtttgggcatcgtcatgttttccgcatagtatcatgtttagagcaatgtgtttgatgacatcttctgtatacgtagattagtatgggcttgttagtatttgactgagatataataaatattgcttacaatcaattataagatcgtctctttatggaatcatgtgatggtgaatttactcaatttaccatcacaaaagagagggaaatgtccaaccttgctgcaaataagttttcatcatatatgatagaagtagaagagaaataaaagataggtaatggcactcaaaaatatagcctgcttggttactcaaatggaggcgaatagttttcactggaaaattttgatccttctgcttttagttctcagttgtggtaattatatatttaatcttcctttcaatgcaaccaccctttttctcttcttgacccaaattgcaaatgctttggcaggagctggtgcatttggtcttccgggaaagatatca

SEQ ID NO: 92699 - DNA, 521 bp, Eucalyptus grandis
  Intron number 2 from transcript Egrandis_v1_0.015530m (loc us Egrandis_v1_0.015530m.g) derived from phytozome v7.0 (c hr-ID scaffold_3; pos 48036216 to 48036736 reverse strand)
cgaggcttgctcggcgatttctccaggtgcgtcgttgatgatcgatcgattgctcccgtcgtctcttctcttctctcggttcgcgtgcgcttcccctgttttgagtttctccatgcattgcttagcggcgcttctggccggagattcggtttgcagaagacgtactatttacaatttctgccactgcttaaattaacgataaacttagatgctgcccttagagccggaggcatttgttaacgaggtccaattcccaattagcgcacgccattagcgactccacacctagccttcccactctagcaaccaaaattcgaatgacccctttttttggtttttttcgtgaattttgataatccgagggcgcgaattcaagttctgtcgaacgataatgtgcgcatgtgcagttgtcgttcgagattgagcttggagataatgctttgtttgctcattaaatccatcgtgttttctgggtgcggatcacagggccaccgtcccggcgcattcgacgacggccgcga

SEQ ID NO: 92700 - DNA, 934 bp, Eucalyptus grandis
  Intron number 2 from transcript Egrandis_v1_0.031571m (loc us Egrandis_v1_0.031519m.g) derived from phytozome v7.0 (c hr-ID scaffold_3; pos 79732009 to 79732942 reverse strand)
attgctgacgaggtatggatgcataaatatcattcgtcgtgcgggatcctaagtgagaggacttcttttgactagaaatgtgaccgagaagaaggttcatcatttgaagaaacttaggcagtgagatcgtgggtttcagatgcttttgggaatataatgcaatccaatttacagataacaattctgaaatgaattgatgatgatgtggaccatgagaagttcctctaagtattggatcattctcttatgagctctgaataatatttttttgaggcaaatttgaacttttttggtttatggttgtactgtttgaacaattgggttgaaaatgaaataagcacttttggccgaaaaacgacactgacttttggtggggtgggatttgataaaagatatagcatgagaagcacttaaatgggtggttcaacctttgggagatgtttggcttggcttttctagtatcttgagtgatcagttttttttcttggagggcgcatgtccttttgcaggaatctagaatttacctgatgagattcaaacgggttgcaaatgtttgtttgcaatgtcattttttggttgtgtgggacatgaaatagccatggataactttatgtaatgatggcattttcttaagtgcttgagaattactctcaaattatctacggtctgctatgcgaatcactgtattgaaactgctttgtgatgtattattcaaacaacagaacgagaagtttgcttggcaactttagctgtcagaaatgagactgtatttaccgctgtagatccttgccttggcactgtacatctgtgcactttagttacaacagatcaatgcaatgcagtactggctaattccccagagactattttgatctgaaagatgccaatttattgtgcaggacactgtcactgggtttttactggctggtgtcgg

SEQ ID NO: 92701 - DNA, 816 bp, Eucalyptus grandis
  Intron number 2 from transcript Egrandis_v1_0.022710m (loc us Egrandis_v1_0.019753m.g) derived from phytozome v7.0 (c hr-ID scaffold_41; pos 36371 to 37186)
ctatccaagtaagtagaatccctgcacagataatgtaatggctgaaatgtgatgcgttgagatgggctttccttgtttattgagctaagtttggttggtgttgcggtgagagtagttactgtttcgaggtggcacatgtcaggctttatctcttggctgtgatggacgacttttgtggatatatcctgatttgggagaacttgaatttgttcttcgaagttgtaatagtttgtcaacataagcatcctgttgatttgtgactcaaggatctttgattctccaatatatttcctttttataaacattatggaaattagtgacaatctcgattctgctggatagcattgatggttttgaagtaaacatgttttcggcaatcttggaccctcagtttttggaagacaatcacactgacttttgagcctcactgggtcttggaaatttagagggcatttcagagtcaaggcttggagtagttgctgtagtgttagaacgtggcattttttattttttttttgccatttttgcccatttactctaatttactggcctcttctggggagaggtctactttgcaattgaaagagtaacgtgtttggtcgatagtcatagaataaaccatactaatggtcaagagagaagtttctgtttcacaggtaaaattagatttactggggttggtacgacagcagatgttttgttagaattggcataggtggtacattacttgctgaactctgttattgtctcttcttggaaagggttaataagacatttgcaggtaaggcaaacggtgggcttgtctgacgaggcctt

SEQ ID NO: 92702 - DNA, 620 bp, Eucalyptus grandis
  Intron number 1 from transcript Egrandis_v1_0.003863m (loc us Egrandis_v1_0.003863m.g) derived from phytozome v7.0 (c hr-ID scaffold_5; pos 67416853 to 67417472 reverse strand)
tcctctgcgccttcctcattgttctcactacccaggtctggaaatcttcttttttccccttttctgggagcggttttttctttctgggtctgttgaaaatttgatcttttttagtgggcttggcttgttagcctggcttaattgtcagtgccatgccgttttgcgagactagaggaggccaggaagctgaaaatcttcctttccttcttcgaattttgggttcaagttcaattttttacggtgttcggtctgagaatttgagcagcggagagaaaggttgaggagttctgaagtttttgtggaatttaaagagtctttatcactgatgagtgatgattatgacccatccctaactcgtcgtcctttttctgaataatctccctctggtttcttcagattctagaacacttagaaatggttgaacatgactgaaaattgaacaactcaatgaacagccaaaaaaaaagggggaaaaaactttatttagctgtaaaaattttgcaagcacaatacaagtaggaattttgatttttcttttctttttttcctcacttaagtataagctcctagctattaataaagttaatttattcttcttcttgtgattcagatattgggtt

SEQ ID NO: 92703 - DNA, 998 bp, Eucalyptus grandis
  Intron number 5 from transcript Egrandis_v1_0.029652m (loc us Egrandis_v1_0.029226m.g) derived from phytozome v7.0 (c hr-ID scaffold_490; pos 289 to 1286 reverse strand)
tggaggggtaagcctgcattaccccgtttcctcttttgctgtgttacatgaagcttgttcctcaaattagaggattttattttgcttatccagtgatcttgtagaaacgcatcttgctgttaataaggtcatcataactaagtgattcattcatctgcatcaatgaccatagtttgccaggaattgttttggttttgataagcaagaatacttgaattatttgcttattttgttactgttgaccacccagttggtgtggattattatgctgtttcttcacattcgatattaaatcctacatttttcatatgattcagttgctattttgcaccatcctttacgggtgtttttcgttgggtctatgattgatgtcgaatgtgatgaagcataaaagcagaactgattgattgcctaattgcagcgtggaatgaacttgtggatggtttacaatattgttatgacttagcttgggactgaaaaggattcttgcaggacggcatatagaggaaattaaatctatctttgtgagacaaattattgctatagatgcattctgaacaaggtcacttggtgtcgtctgatacatatgcttagactttcttctggggctgaatcatgtagtggatgcatttccagagttcaaggaagtcacatatgtgatccttagtgagaaaataccaatccttttttgcataattaacaagcaatggaatttttatacaaagatgtagcaggatcgccctatttcttgttttagtttctgtaaaaaacgtaagaattagaaaaatttgaataatttttagttgcaactcaagtacgtctgtcatgtagaatttgaaatagactctatactctgtcccaacgatcttacgatcatattcatatgtcatgctttcattagtattggccatcttactttctcagtgctttatattgctttgagtaatgctatataatatcttcacaagcatttctgtgctataggttcaagaagagat

SEQ ID NO: 92704 - DNA, 1044 bp, Eucalyptus grandis
  Intron number 1 from transcript Egrandis_v1_0.029652m (loc us Egrandis_v1_0.029226m.g) derived from phytozome v7.0 (c hr-ID scaffold_490; pos 2304 to 3347 reverse strand)
cttcatcgtcgtcgcgccgaagctcgaagttccaggttggtgttctgcttcgcttttcctcgtactcgtcgacgatatgctgctagtacgaggtcgtaagctgatgaattgtcaatggattcatgtgaggaggagtgggatatctctcagttagtgcgggcgggggggctttctagtcgctcttcgtactgccctctcgtctcggggatgttggaattaagcggcattgggttcgcgtcgacgttggtttcctgaattgttgctcatcgagaagatgtagcgaccgatcatcgagacgaaacgaggcgttttcagctgtgtgcgtagctggttttcaggggctttgtggaatttgtcattcagggggaaaaaaaaaaaaaaaaacctgtcgattgtgctggggtcaataaaaagaaaaatcgaaacacgaaacaatgtgttaaagcgcaaagattatgcttttcactgaaaaaagagactttttttaatgcaccatgaaagtttgtcgacctgtgtgaagggggcttgtgcctttgtttgagttcatcgttcatttcccaatgaaaagtcatgggtcagtgatatgtttcgtcgttacctaatactgtggtcatatttgccgcatcttttgatcgactacaggaaaccatcaagtgggacatcgtatgataatgaggctagtagttatggaaagacacctgcatattgaaactacaaggatttactgattacgttggtcttatttttagggtcagaagaaattaccttgccttaaggctttgagcctgtatgtagatatttgtccaaaatttaagtgcagccttctgatctttttagaaatcatgttgttttgctattgtgattccgatcttattgtaattgttggatggcgatagggtaaaatgtcagataagtgagctactggctaatcaacttcagattattaaaacttcatttgtcatgacataatcttcaatgggttaatacggttactctatgtctgttgtagaagccttacattagtgcctgtggctcgaattattg

SEQ ID NO: 92705 - DNA, 816 bp, Eucalyptus grandis
  Intron number 1 from transcript Egrandis_v1_0.007056m (loc us Egrandis_v1_0.007056m.g) derived from phytozome v7.0 (c hr-ID scaffold_2; pos 43121043 to 43121858 reverse strand)
cggcggcggcggcggcggcggcggttctagtggaggtgatgcttcgctgcgaattgagtctttggtcatgtggatgattgggtagttttttgttttgagagcgtggcagataaagggaatttgtgtcttactgtcgctatcttttttgggacgatggtttgatgttactagcgtactcttatttgggttgctgagctgaaagttaggttagattatatctcagtaattgagctataccttgcgtcgtttgcattcaactgtagacgtgtttgatgtgaatgcgcaaattgaataactaatgcggtccgttctgatgacgaattcccttttatttgttgttgttgttgttttttttttttttttttgggtgtatgcattgttgataattggtacctgagccgttgggacaactcaagcaatttgttatatgaattttctgctgtgcaaatgccaaagctgaaccattgtgttcagatgcataacaagtccaacactagatcttcttttggagcttatttgaatcgtgcaaccttgggcaaaagattttggttttcttagtttggctcgaaaatgaatatatgcaaacaagttagaaatttctctcccatttcaatctgtgttagactttctcacagcgtacttaatccctctgtgtaacgcataaagttggagcttggagatgaatttgttttcacattgatgaaatgaaatccaacagtcatttcttcttttgcaggcaatcatcatgggtcaacgctgccaaaagatgattctcctgcagcaagtgtgaggggcagaagttttggacgattgaca

SEQ ID NO: 92706 - DNA, 890 bp, Eucalyptus grandis
  Intron number 1 from transcript Egrandis_v1_0.043360m (loc us Egrandis_v1_0.043360m.g) derived from phytozome v7.0 (c hr-ID scaffold_3; pos 74566368 to 74567257 reverse strand)
ttaacaggtgattaaatttgaatctgctctctttaatcgtgtttcatataactctaacatgtgaaaaatgcaagagaaataagactaccctagttaatggcatgcagtaaacttggccagaaactaatcataaactgatgggagaaaattttgggaaatcaatgaatcatataagagttaaagaaaattctaatgttcataagaaagacaaataaaatttgataaatgataacaaaattgataaattaaggaaaaaaaaccaaatgaatattggtaagtaacgcaaatgagagtttgtaatccaaatagttcgtaggcactcatataaaaattggtaatttcatagagagttagtaaatttaaggcattgataaggaaacaaataggtgtggtaaaagataagaaaacaattagtgaaatggagaagagatggtgatttcataaaagcattgttgagttttttttttgtgacccaggaatcccgtatagtcggcagccagcgagtaaatcatcaaattgttggaatatcggtttaccgatgatatgtttctaccgacagtttttgacactaacaactcactaaaaaatcaactggcatgaaaaaattaaatttgtcttatggaacaattagattatcctatgaatatgcatacatataatatctacacacacatatatatggatatataagagtcatgggtagacattctaattaatgaatgttttgggctaagtttgacagttcccacctattttatcaagattagaaatgccttccacaagcaaagaaaactcattaatatacattttaatcttattatacaaatgatctctgacattactcgaaccttctaggacattggagcttcggagcaagctactacaagaaa

SEQ ID NO: 92707 - DNA, 552 bp, Eucalyptus grandis
  Intron number 3 from transcript Egrandis_v1_0.009825m (loc us Egrandis_v1_0.009825m.g) derived from phytozome v7.0 (c hr-ID scaffold_5; pos 14793301 to 14793852 reverse strand)
ggtgtgttatttcggaactcttatctgttaatgtttgattgctgctgtttctgttgcttgaatattcttttggaaaatatttttttttgaataaatagaattagtcatttgagctttctaatgtgaacctgttgcaagttattctatttccatcaacaaatatttccttaatcttctgaggcactttaaatttttgttagcaattccttaaaattaaggtttgtccatttcgatacactagtggtgggaatcatctactggagactcaagttttgaacggaactgctttgttgattctgaaatgctggagtgagatgcacctaggccatattggcaaggtgtcctgatcagctgatgttattgatagagtctttctcactagaatctgccacaagaccttccagcaataattgtaatgcaaagggtctttagattttatctaagaatgtttcagggattttgtagaatccagcagagtccttagattagatcattcattcccctgtaaaatttttcttgcatgaagttgaacaattgcatcttcttccaggt

SEQ ID NO: 92708 - DNA, 682 bp, Eucalyptus grandis
  Intron number 2 from transcript Egrandis_v1_0.007718m (loc us Egrandis_v1_0.007718m.g) derived from phytozome v7.0 (c hr-ID scaffold_5; pos 73781976 to 73782657)
cggcggtgctcccgcgaaggaggagccgcgaagtacgtagtgctcttcgctgctctttcgggcatatcagggggctgcgaggggacgcgaaagatgagtttttgagggtttatttttgttcaagatcggaacttgttatgaactgcggaattgggtttctttaatgtttgtttttttatgctctcgattgttatgtttgttcaagaacggcttgacctgttggtttctgctcgctttcttctgttggaatctgtctggccctcttccagtttatcattatcagcagcagatgtgtgttgaatgctgataaagtgtgaatcttgccttggacgttcttgttttaacacgatttccaaatttgaaaaagaagagatttggtagctgggaaatgaactgcgaggtgtaatcgtaaaatgaccttggataagtcagcaaggagacgtccaccgcgtgacctgctccgtaactttttgaggggaagtatgtattgacatgccagatgaaacgtccaagtggttgttctgcagaacgtagcacccatagaatagaaattggctatgtgaactggcctttcttgctttcgtagttattttgctgaagctgcattcgagcttccatgtttaaagttctgtcttcattattcacaggaacgtgtcctaaagattgggtagttggcccgagc

SEQ ID NO: 92709 - DNA, 997 bp, Eucalyptus grandis
  Intron number 1 from transcript Egrandis_v1_0.004917m (loc us Egrandis_v1_0.004917m.g) derived from phytozome v7.0 (c hr-ID scaffold_3; pos 74791945 to 74792941 reverse strand)
aagaagtgctcccgctgcaaggccgtccggtactggtgagtcctcctccgcggccgattttggtttcgattgcgcccttcttgttgtgaatttcgcgttttgctaagggcgtcttgctcgtttccaattactgtccacctctttcagcggtcgctattcgattcggaggctgctaagtagggatttttgtccgtgaagattcaatttgttctttttacgtcagttgtgagattgcaatgagcatatgtagaaaggtcgtacctttctttaggtattgatggatttgtggagtagattggcaatactcatagcaaagtctttgtttgtttgtttcttcttcttttttctttctttgctgcagtcttatacttaaatgtctaaatgcaacgaattaacagtagaatgacagtacgatcgccagtcgttgttttaatcgtaggttatttgttcccacaaattctgagacggagtaacttttagtcttgtgagggatacatgctgttggtttaggaagcatatttggcaagtcagagtagtcagaatctagtcatgtcgtgaggatagtttcctcatttcttcgttaagattccattggagttgttattcaggatacccaccttgtttactccaaattgtcatcctacttttagatacttgtcgactatgttgagcttaatctattttgccatcataaagagattaatgggtgggtgggccaaatacattaagtcagtacatggtgaagccaatgactacatgcccatatctggtgtgctctaagcttttgttccatatttgtatattattatgggtgggcctttgtgtatataggtttaaaatggatgttagttctgatgcctattctttatatatgattattgccaaacttcttagtgctgggtttgttggatggtctttgatactaatggcatcgagaagattcaaacagtagaagattcaaacagtttagatttcattcttcatgcagctcccaaac

SEQ ID NO: 92710 - DNA, 901 bp, Eucalyptus grandis
  Intron number 1 from transcript Egrandis_v1_0.026836m (loc us Egrandis_v1_0.026833m.g) derived from phytozome v7.0 (c hr-ID scaffold_5; pos 13122606 to 13123506 reverse strand)
tcgggttcgaatatgtttgctttcgctctgtttctatccgcttagtcggttgaaagtttccgcatcattcgcaactagtccgttccggatttgccgacctcgagcttaatctgtagatggtcttcgcccaatctaatcgggccattagatgttgttgattcgcgggtgtttgttttcctgccgaatgtattgtgttgaaaatgctgtgctttgttttctctcgattggattattttttaatgtgggttggtgaaaggtgtctggtgatgcattgtgcgaagtagctgtttcctatttctgggctgaggaggtaggaatcgagtctcgatggttctgcttgtcgagattttttgcaacgtagcattttgttgtctagtgtgcagtgggagtgtggaggttcaagaatgtcaatgccctgaatggggattttaattctaaattcagacatggttcttgtactgtgaatgagatttacttggatttctgcagtctaggaatatatcctgatttgagctcagtatgtttcagcttgtttaagccgttggtcgacaaaacttaaaagtgatgtcatctaacacgatattgtttggtttactcccttattatgtcattctttctcttttgcgaaaatggttattccggattgaaattatcacgtcggcaatgtggcagattgtgtgcccctgatatttagttttctgaatttctatctaggcactgaaaaccacttttaaaatttcagagtgaaataacaaattttctgtacttttcattaatgagtttggatcataatctgccaagtattgactgtccgatagcttttgctgataatatatatccacatctcagagccatcttaaccttaacaagctttgtctttttttccctttttaggtaagtc

SEQ ID NO: 92711 - DNA, 888 bp, Eucalyptus grandis
  Intron number 1 from transcript Egrandis_v1_0.023706m (loc us Egrandis_v1_0.023706m.g) derived from phytozome v7.0 (c hr-ID scaffold_5; pos 12673047 to 12673934)
gcgtcttgccaaatcgtggacacctccacaagagagtacgcaatcctcttcttgagcgaagacccttctgtcactgtcggttttctagtggaattaggttgaggcatgttatgcgttttgctttggagggtaagatgagtcattaacattatagagctcaaactatgacaccaaagattattttaaaaagataaaaataaaaattggcgaaccctctctctctcgaatttctggcgtaacaaaattcagtcgctctgagaggaagaatttttggttttcgacctcgttaactcaacaatttgagatgttctgatgttgaggcagagggatgctggcttttagttttaccttcacccctcggatggccctgaaagaagttcaagccttagtctaaggaatttgttcgtgaactttgttttgagaagctttctttggaattaagcgtagcctgagtttatgcgcttattcgggttatatatgtatattatatcggaatgtttaagtgggtcctcttaactaaatattttaggcacttgcaaggcacgaaaggttttcttcattatcaaggaaaacgaatagttttgttcttacattgttgattctatgtaacacgagcattagtataattgaaactgcaatgtgggtgtgcttacttgtgcagcaaatatcctggatgcccttgtcaacaagctcctactattaagtatccgtgactctgttgcttgtattttgttgatttttcaagctactcttgtttatttggctctctgaaagttttcaatttgaatttggttgctgccttgtggccatcgattttgtcttagctaatttgcttccttcatgttctgttcagtgtgcaagtgctgattttgtcacctacgagcgatt

SEQ ID NO: 92712 - DNA, 315 bp, Eucalyptus grandis
  Intron number 2 from transcript Egrandis_v1_0.020503m (loc us Egrandis_v1_0.020503m.g) derived from phytozome v7.0 (c hr-ID scaffold_5; pos 25615972 to 25616286 reverse strand)
gcgaatcggagatccactgtttgatttcgcaacatgtaagaccctttttctcctttcctctttcaataattttattttttgatggtttgattagggttcttacacttgttctgagatttcaagaaaataaaaacccagaaacattaacaatgtcggctctgttcccggcgaagaaatattaaattttcgcgaattgcgtcaagaaattacttattgttgaaagggaaataggaaaattagaaatttcctgacaactttcctgttctggacgtgtctgcagacacaggcgttcgcgagaaaactgaagaagaaaga

SEQ ID NO: 92713 - DNA, 665 bp, Eucalyptus grandis
  Intron number 1 from transcript Egrandis_v1_0.003851m (loc us Egrandis_v1_0.003851m.g) derived from phytozome v7.0 (c hr-ID scaffold_14; pos 820879 to 821543 reverse strand)
ttctctgtggcctcgtcattgtcttgaccacacaggtcaggaaaagagttgattcctttggtctccttttgactggttcatgtggtttgtggtctgcggtctttttgtgcgttcgcctttctcgttcaattattggttagatgttttcgagttgaagtgagaaggccagggtaaccatagggtttctattttaagttgtaagcttattttacaacttcaaggaagttattgttaatagtttaccaaagactgctgtcagaagttttaggattagtattacagtttagtcctagtattatttcgatgttctctcccattatgcagtaggaaagctgataattaagactgatacggctcttgagagggccagttgttctgcgtctggtgtttgttatgaacttcttacgaaaggacttaattcgtatggagcatgatataagcatctgcatgaaactaggaatatgccactaaaacatgacgtagagggtcagaacggttcgtttcctagtctaagagtggactgagattgagttttgatagggagctctacattagtttcaatttctctccttatcctcttctatgatccttgaatagcggtatgtgtatttctctagttcagctaaccatttgatcttttattgtgggtgtacagatactgggat

SEQ ID NO: 92714 - DNA, 993 bp, Eucalyptus grandis
  Intron number 1 from transcript Egrandis_v1_0.050080m (loc us Egrandis_v1_0.050080m.g) derived from phytozome v7.0 (c hr-ID scaffold_5; pos 49089765 to 49090757 reverse strand)
ttgtcaagtaatttatggattcattgttgagtagaatcttgaaaaatttgaacatgaacaacgtttcaacatagtgcaacttgtttataccttttattattgttgtgcatatcgttacgtacctttcttatcaaatgtctttcatacaaacataataggatgaccaaatgaaacaaaacaaaaagcccttcagagatttttttaaaataaaatcacaattaaatacctaagacaaagtttacaacatttaattatacaaaaaattcacataaaataagaaaaaaatttagttttagttgaatttcattcattttggatacaaatgtctttcttagtgtattttagatactcttttaactacatattttcatgctatgtgtgaaggtgtctcaatgatgggggtaaaagaatcactaattctttgatgtaatgaataaagagattcaatattttttggagactaataaaataacaaattcacaacaaaaaatgagcctttggagtagcagtgacgaatgatgtatgagttgtggtaagagtaatgacgaagtcaagaataaattttatgttgtaaatagaaatatgtttgaattcaaagaaaacccaaaataggaaaataacttaattgaaggaaattgttcaaatagggtgatttggtgaatatgcaatggcctaactcacatacgatatgcaaatatcctcatcctttaaatatattgtgtacaatataacaataagataaacctttaggatggtgtatatcaaggaatagtccgattagttgatcgtaccatgttagattcttatgagatgcataagttaatttttccttttttgggggatttgaacggaaaaggaaatttatgagataagcatagtagggaaactcgaacctctgtcggtgtcctgccacgagcctaagccattacgtaagaaagcaatctcaacacaagcccaggcttcaccgaatagagaaagaaaagaaataataga

SEQ ID NO: 92715 - DNA, 413 bp, Eucalyptus grandis
  Intron number 1 from transcript Egrandis_v1_0.048209m (loc us Egrandis_v1_0.048209m.g) derived from phytozome v7.0 (c hr-ID scaffold_5; pos 18247999 to 18248411 reverse strand)
aaggtgagatttcttgttgtccttcaacaagtgatcttttttgcatataaatggatttatgcacttctgtgagatggggttcttgatcgaatttctcctgggttttcttgaacacttttcttgatatctctctgcttcaagcttcatgagttgtcgtttgtttctttgctgttgtaattgttaattgtatcgcatgattgtatctgttcatatgaataataatgctaggaatatcaaatgaaacttcaaattctttttcattgttgattatatatggccaacttgtttaaacgctagtctatcacacgacttgtgagtttcgagtttagtcgtcgtaagagattgatattcaatcaaaatccaactgagttttgcttttctcaaacttttgcagaagttggtggtgaaattgg

SEQ ID NO: 92716 - DNA, 850 bp, Eucalyptus grandis
  Intron number 1 from transcript Egrandis_v1_0.044776m (loc us Egrandis_v1_0.044776m.g) derived from phytozome v7.0 (c hr-ID scaffold_2686; pos 927 to 1776 reverse strand)
ctcaagaccaactttaagaattacgggaaggtacgttggggttcagggttgatcatggattttatgaagtggtgactattgtcaaagtgcgtgcctcaatgaacatgtatgtcttgaattcagggctttcccctctgatatcatacgatgttttcgaccatcaaatgttctaaaaacttgaatcaaatgttctaaaaacttaaatggttagattcaaggcatgattttatatttaaatattttatcacatctctttgaaaatacggagaggcatgcatttcaaatatttgataatggctcgaacgtgtttacaactaaaaacgacatcaattcatcaattcttcccattcagtgttgatgggcgagtgaccggttgtccattcgcgatgctggtggtcctattttttgcatggcagcgtgggcgatcaggtagctagttgtggttgttgtttgttagctaataccagtgacgttagccaagcagaaactagaagtcaattagtgttcaatttactagtttgaaagaatatgagattacactggttaatggggttccaagattttgttgatttcattcacgcaagaaatctacttaatagttatgcttttaaatctggaattgtatgaccaaaaaaataaaataaaatctggaattgtcataacaaggtgaagtattcctggatatcatttctggatattaaaatgagctgtgagagagacggatgataaatagctggttattcatggagatttctgtgcagaagcccaagtttgaggattgcatgatgtgacttaaaagttaaaactgtgcgcagggacggtacaactacagccttctaaaggatctatt

SEQ ID NO: 92717 - DNA, 1030 bp, Eucalyptus grandis
  Intron number 2 from transcript Egrandis_v1_0.019576m (loc us Egrandis_v1_0.019576m.g) derived from phytozome v7.0 (c hr-ID scaffold_5; pos 3215686 to 3216715)
ttgttgcagccatcaaagcagctgggaatatcaaggtgtgcagtttataataatttcatccaagttaccattgctcgtttaacagttgactgatgatataggatggtgcaagcttaactcttttcttttgagattagtgcatcacgttctccttgtgagctccactctgatgaaatgggatggattcatttacttatccgtagacttcacttctttcctttttaaacggtcatgactttctatagaagtcgttaatgaaatttgaggcttactatttcaaatccaagtaccggacaatgccggattcactgtggttgggtttcctctaggtcaatgaaaaaaaagtaaaaggtttcaagcgctcgatatggattatggtcatgtaccctatcctttgatcaataatgggaaacatgaactacctatttcttcaaaaggttattttaggtaaaattaatattatagcaaataagttttcaaaacccaactggtggataatttagtagttgttgcctagggggttgacggtcggtaaagagtggagcttagcatgctcacaaaaggcaatgtactcacctgatattttatttcttgtgaaaagtgtacaagtaaggagcatcgttgcgcattttatacttgccagatttatttggctatggcctatggccctaacaattaaatcttcagttttcttttcttctacttttctaatagcacttaatttctagtcttgattcacttataatcatttttactatattatagtccgtttggaaaaaaaaaagaaagtgaaattcagtctcatgtaagttgttttctttgttttttctgtcatagtcacatgttgaagaaaaaagtcaaacattgtcacatatgagtttggtttcctttttttttttgccaaaactcatgtaagtttgttggatgaggtgaatttgctctagtttttttgttgctttctaataaaaatgtatgtcctgattcaattaattttctttttagagattcttgccttcagagtttggaaacg

SEQ ID NO: 92718 - DNA, 917 bp, Eucalyptus grandis
  Intron number 1 from transcript Egrandis_v1_0.028348m (loc us Egrandis_v1_0.028398m.g) derived from phytozome v7.0 (c hr-ID scaffold_3; pos 58785861 to 58786777)
ttggttctccatcaaaaaacgcaggatttgtgtagatagtggtattttttctttccctgaattattttgtttgggttccaataattcgggataagttttgttgtgattggatgaacctggacatgttcttttttttggtcggaagaaaagtatcattcacttgaaggagttttggtgaatacaagtctcttgcatcagagcaaagtaaatcaaccaagaggagggggatacaagacccatttgctagataaccttctagagggttaggccttagcaatccaatcggtaactatttgttttcctaccgcaatgggccaaggaaaggccggcaaaacctctcaataagtcacgagcccggatgataagtgcactcgcttgccaacctagttgatctgcacttaaagtctgctgcgtgatctcaacactgggattctatgctcagagcctgttcagaacgatgagagagaaagatcggctgagattgccttcactgatttagcgaatccatccaccagtcgtccacttgagtcgcggcagacgcaagctatagctcccatcgacgaattcgcaacaaaagacccatcaatatttactttcaaggttcccggatctggaggcttccacttccgaggtaatctttctctttcaactgtcgttttcctatcttgtctgatccatctcgttgtattttcattcaaggctatggctaaattgacaaaaaggtctggaactagtttttgtttttggaagatgaagtaatttcgggctttccaaaccagccacatagttgtcgctacaaagtttaatttttgagcaggtaactcgatcttctttcaatttgattggccactcatccatccgagttaatccaaccctgttaatttggatgttcagctcagttgtgctccagatctacg

SEQ ID NO: 92719 - DNA, 832 bp, Eucalyptus grandis
  Intron number 1 from transcript Egrandis_v1_0.040324m (loc us Egrandis_v1_0.040324m.g) derived from phytozome v7.0 (c hr-ID scaffold_5; pos 65281810 to 65282641)
tgtctcttaccttctcaattgcaaagagagtgaaagtgcatcagaaaatcaagtttgaaaggaatgactgagtatgggaagctacacgttgagatttcgaactaattaaatttacaaaaaacaacaccaaataaatttaaactagaaagcattattcgaagctacctgacgttctcattatttaccgacacttaatgaaacaaatcaatacgaaaaaaaaattctaattttttggcactttataatagaattctgctctgtcctggaaaaatagttagtgccatacggggttcgtaggagagaagacgaggtagagaataccaagtgatgtgaggcagctaaatagaacttcttttattagcaactaggggcaggaaattaataagttgaccgtttcttaattgcatcacacatgaggattaaattgcagtgtagctcgaatgaaatattttatttcgatttttgaaatttaaaaaaatttcacatggttcttctcccaaatttagtaatccgcaagtcagtctcctcgaacacgttaccaaacctgaaattctaaaaaaattgactcaaaacaagcgaaagcaatctcctggaaattacccttagctgcaaagtcagaggctaacacgggaccatgaattctccagcttataaatctcagctcaaacttcgactcgaactagaatacaaacccggatagaataagaaatggctcactaccgaagtgtttcattgatcatccccttccttcttgcttatttgattctccccagtttagtctacctttcgcacgccgatcctccttaccagctctgttcggaacctgggtatt

SEQ ID NO: 92720 - DNA, 279 bp, Eucalyptus grandis
  Intron number 2 from transcript Egrandis_v1_0.023463m (loc us Egrandis_v1_0.023433m.g) derived from phytozome v7.0 (c hr-ID scaffold_5; pos 4431829 to 4432107)
caacggtacgatctcgtcttcggacgggggaaggagggaaggagaaaaatcgagaggggaggaacgaattagggttttgcaaaaaaaggaagctcgatccgcgagaattttgcttcgtttctgacattcggaactgaatcgagctcgctcgtgcggcgattctttctctttttgagtttcggtgtgaataattattgtcggagcagaggttttctgacatgaaatctcttcttttgatcggcagggaccgccacgcctccatcgtcgtcgacgacggcg

SEQ ID NO: 92721 - DNA, 682 bp, Eucalyptus grandis
  Intron number 1 from transcript Egrandis_v1_0.019283m (loc us Egrandis_v1_0.019283m.g) derived from phytozome v7.0 (c hr-ID scaffold_5; pos 16351005 to 16351686 reverse strand)
ttactcggtccggaccactgtcagacccgacccgggtaagtctttcttcttttttcctgcctgaacatggaaattggcatgagttccggtccagtgtaaagttcttttgaccgatgttctgtgcagtccatacatgttctgatctgtttgtgcacgcacaatacgtatgcgtttcaaatggtctgtgtttgtggagaaataaaggaggaaagggtttgggcgttagttattgcagaaattttttatactctgtccggttcgggcatcgaggaaaaattttgatcggaattacagtcggacatagatcatatgccgattttcatgcatgagaaagcataagattgactaaatactggttaaattaatggcgatagacttggtttataatgattagatttctcttatatgatcagatatgaacatgttccatatgcctaggtggctaagacaaaatcgcttgctcttgttctacgtatgaactctctcacgctctcttgaatcagctttccttgcagtccatattgacaagttttatggtgtattcagattatttcctgaatgagccatgttgtatcagctgattttctctagatcggcttctcttattaacaggacatatccatatcctattaaatatttgagcttttaattgggacacgattgacgaatttgtactgatcag

SEQ ID NO: 92722 - DNA, 956 bp, Eucalyptus grandis
  Intron number 1 from transcript Egrandis_v1_0.028233m (loc us Egrandis_v1_0.028233m.g) derived from phytozome v7.0 (c hr-ID scaffold_1; pos 28380383 to 28381338)
ctctgggcattgcaaaggtaccaccacattaatctgtcacactcaaatacatttttccccctttcagaatactgaccttgatacgcgcgaccattatagggatgatcagacaattatgcacttgagacattaactttggcaaaatttttgcttttgagagttgagtcttgagaatctttcatttattaattcatcatccttttcctctcctcgattagttccagaaaaatgccgcttttcatgcatgttctcagtttgtctttggccaattgctaattttgcctgtcacaaaacggatgataccatcaattatacaatgcaatagtcactgaaccattaatctagagaggttgtgcttcttgatgtggatgtttcttggtcaaacaaaaaaagaaaaaaaaaaaccattcttttgtttctagatgcatattcacttgaccattaattaaatgaaagtgcatacgcttagtattctccttttggacattttcttcatctctctgttctctacctgtctcctgaggtaggtacgttttagtttaagaactgatgaatctcatgaaggatccagctcataaaaaccgagaacattttagacttcacacatgcgatgcctgtactccttcaccgagcttgagacctaagaaatagataaagatcttcgctgcgaataacaaacagtttgtttctgtcaaactaatggcaacttgcttacttttttccttagtgaggacatctcttagccaagcatagcactgtaaaaagagcacgaataggatgatgatctagcaataaagaagaggacgctactgcaaaatcaactgtcatgagaacagaaacagataaaaaataaagaaatcacaggatgattatgtgagtcacaaagagaagttcgttgatgatatggggtgttgaatccaggccttcctggtggggaaggacttcggagctctgcc

SEQ ID NO: 92723 - DNA, 899 bp, Eucalyptus grandis
  Intron number 2 from transcript Egrandis_v1_0.000047m (loc us Egrandis_v1_0.000048m.g) derived from phytozome v7.0 (c hr-ID scaffold_5; pos 15125937 to 15126835)
cttctcccagtggcgctgctggtatgtcatgcatttctttgttaactatcaagagtaggtactctacttggtattgtgcttcaatggtattgcagtgatactttataagagtgttcgtgccttgccatctgaatatgtgaaatcctaatgacggaggtataggttgttgtacctgtgctagtataataatctgatggtttccttgtacttgttggagatacctgtctcaatacgttaatacaaatggaagaattgcttctattagaaaatacggcctctcaccattaccttgttttgaatatgctcctaggaattcagtattgtgtttggtcttagcattgccactaatcaagcgagcctggtctcttttggtttctctccatggttatgcccttgcaagctggtatacatgtaatgagaacagctagaagttcatgaagtgtttcttatgaagatataagcaatatacaggctatgcctcttatgaagcagatgaattagcaaacttgtgttagtttgaaagtcggatgaagggtgatgatattttggagtggatggagaaaatttcatgtatggttcttaagaggcaagggacatagaaaaggtaggaggagagggaatttgtcgcatattcaatttgaataacaaagtctgctaaggcatgtccgtctggatctcatgtttatcactgggttgtgtgtttaatgtaggtaccttttgggatctatcaaaactcaccaataataatttcttaagcttgcttagtttgttgcaactattcatcgattatggaatgctttgtgttacatcctgtcatgcatcttgatggagcatgatttatgaaatttctttgtgattgttcaggtacactcagacgaccagcggaggttcttgggcaa

SEQ ID NO: 92724 - DNA, 299 bp, Eucalyptus grandis
  Intron number 1 from transcript Egrandis_v1_0.018806m (loc us Egrandis_v1_0.018798m.g) derived from phytozome v7.0 (c hr-ID scaffold_3; pos 47939967 to 47940265)
gcggtggattgttgtattagtcttccacccggtccttaagagctgttcgggcatggggggcatgtaacggagtccttgattatcaaaaaaaaaaaaattgtaaaatacattgcacgttaatcaaaattcaaaatcatttgtatcattttctcattttattaaatctttcggctttcggcccgtattccagctgggcgggcctgtccaagcccatgaagaaacgggctcggtggccctttccggcccattcggagccccgattcttcagcgaaaaggagtcgttgtggataaggaagacg

SEQ ID NO: 92725 - DNA, 938 bp, Eucalyptus grandis
  Intron number 2 from transcript Egrandis_v1_0.035725m (loc us Egrandis_v1_0.035792m.g) derived from phytozome v7.0 (c hr-ID scaffold_5; pos 17790585 to 17791522)
gaaaggtccagcctagtactatttttgtttcatctccagtcctgcatgctaatccttttgtcaactgcattgctgtggactgaactgttacaaattctgaaaaaggtctcagcatcgttaatttaattgactgcagtgttatgaaatctcattaaacatccatgaggacagagtatctgttgttgaatagatacataattaagttatgggtcttgttagtgagtatcctggcaacacttgttaaccgtacttaatagagaaattttttttatttcatttattatgcataatacgagaaagatagtgcattggaaatgacaaactttctttattgaggttttcaggaagtgctctggtggcacttattaacgaaattcttaaattattaattcagatcaaaatctagtcaattttagaaattatcttgcattaatgtccatgtttcaagaattgaacaatattaaatttgacttcactatgactgtctgggaaagtatcatcaacttgatttaatcataacaatggggtagtgaaagtaaatgaggtaatatgctggcaagactagtcatgtgctggaagtgtggaaaaaaggcttctgttaggatatgaatttttacatagttattttaaggtcaatctctagttatatcttttagttagctcactcttggcataggagaatgtaattttctccatcttcatctatctcttttatttttagatctcctttgctagattgaataaatttctggtaatgttatgcaaaggaaaacaattgccaacaatagtattaaggatttcttttcttaggaatcagcataaatttaatgatgtaaagtaaaatggggattgaatgttaattctggttttgggtctttaggaatcaaattatctgtttgtggtgtgacttatctgtctaatgttacagctaagtcttg

SEQ ID NO: 92726 - DNA, 697 bp, Eucalyptus grandis
  Intron number 1 from transcript Egrandis_v1_0.018108m (loc us Egrandis_v1_0.018108m.g) derived from phytozome v7.0 (c hr-ID scaffold_5; pos 73271899 to 73272595 reverse strand)
gccaattccttcgtttccctgcttcggtaactgttagtcataatttctctgatactcctcttgtttgaactgatggaagtggagggagaagacaggatctaagatttgaaaaaatctctcttatttagaccatagctaacaaatccgagtagaagttgaagttattagaggcgggaaatggttcaatatttctggactttgggctatttaggaagtgcactttgttaacatgatgtctaaaatgttaaagtcttatcagtttttcattctagcactagattaatgttgcaatcgaaggagagggttcaaacattttttgagtcttgtccatcctggccttactctgctcttagtcctcctacctgagttagctttcttgacacattttaagaggtctagttgtcttgtagagctatgctgctgattattcaatgttgtcatgccttctattattaattggaagactgatgtgagactagtgtgaatggtatctcgaagcgtggaatacttcaggaatcagagaagcccactcgaaccttgtttggattgatcatttggcacattcattttcagccatttctctgggctcgggaaaaatgcagtcttttgctctttagaactctcagaacttttctcttaacatctgaagtgcttaatggcagggaaaaataccacaacgagcacgagattatacacg

SEQ ID NO: 92727 - DNA, 969 bp, Eucalyptus grandis
  Intron number 1 from transcript Egrandis_v1_0.017087m (loc us Egrandis_v1_0.017087m.g) derived from phytozome v7.0 (c hr-ID scaffold_3; pos 64726877 to 64727845 reverse strand)
atttctccagcttcatcaggcagctcaacacttatgtgggtattcccttcgaacgggattgtgttttttgtccgtgtttttgcttgaaacttaccccattggcagctcaacagttattgagacaaatgcgtataatgtctatgtttattttggtttgactctgtttcagctctgtttttttggtttgactctgtttcggctctgtttcttttttggccgttcagagtgtgatcctcctgggggcatccagctactcctcattgtcccaacggatagtccccggggcaaagaagctaggatctaagggaacccactcgccacgttttgctcgtgtgttgagattcaatttcacccacttcctgggttattagtcatgctttacctagattaggggacaagtaacgaagaaatttggaatggcaggtgagatacatcgattctatgcgaaatattacgaatcatgaggcacatgttcactaaaatttgcatccagcggccaggggacaatggcccctcatcatattcaagtgatgatgcatttgatggtagtttgcagaaactaccatgtcaaccaagacgtcaggatacccattaaagatttatcttctcaccggatttgtgtttgaatgcatttctcaaatggtaaattttcatttggattagaaatacactaatgttttgatgctccattatgcactttctagctgaagatgagactctttgagccatcgttttgtttctatccgatgttttggtaaagccttcttacacttctcttcttttcgggcaagaccaaaagcatagttctgcacttttgtcttcgtatttatgaagttgacggattgatattgagtcattaaatagtccataccctctttgggacttctgtttcaatttaaactcctcaacccagcttcctcctattcttcatgcatcatgatccaagatatgtcgcagggttttaggaag

SEQ ID NO: 92728 - DNA, 801 bp, Eucalyptus grandis
  Intron number 2 from transcript Egrandis_v1_0.026867m (loc us Egrandis_v1_0.026867m.g) derived from phytozome v7.0 (c hr-ID scaffold_5; pos 6100773 to 6101573)
tgaccgcagtctgctgctttgccacgtggtggtaagttgttctcaatttgctgatctgagatgattcttgattgctggaattggatttgtttcggtgtttacgagcagagtagatttatgattagaatgttgttaggactacgagattgtgttccatcagaaagccgatgttatgatgaaaatttcatagaaacatggattttcggaagaaaaataggaaaacagacagtttacatgtccccttttggactatggattgagctaagatcatctgatggcgtttttctgcaatttttcttcaacaatcaaataaagaaagagagtgtgtgtgtgtgaagaaaatcaatctgattcatgtccacttaaacggttccaccaaaaagcacacttggcggtgatcccgctacctaagcattttcgaacgagtttggtcttcctggaacatgcttccacaaaagcatataacttcacatagattaggttccttgcaagcttacatggtgtcggccgatgaagaaatatggtagatttttgttggttaagttccttaaccttgctgacaaaagatgctatattatactccggttctcaagatccacagggtactaacttgaagaaaaaaaacatgtatatcatcggcatcaatgcatattgagatgacattgaactgatggaactttcagagtcttcacctagtactaatccgtagctttattatgcttaatttgaggactgcattatgcgatgaacagttctgctgtcgacatccatctaaattatttttctccgtcacagcggacc

SEQ ID NO: 92729 - DNA, 866 bp, Eucalyptus grandis
  Intron number 2 from transcript Egrandis_v1_0.022831m (loc us Egrandis_v1_0.015470m.g) derived from phytozome v7.0 (c hr-ID scaffold_5; pos 3116429 to 3117294 reverse strand)
gagtgtttataagggcaccgttcgccctcccagtaaaggtcgtcctctcgtcgttgccatcaaaaagcttaatcaggctggattgcaggtgatgatggcttttgtagttcaatcatttttatcactgttgagtgcttgtagacttttttcacatctttgtagcattggccttctttcggaagttgggtcgttctgtgttgttgcttgtgattgcattggttctgtaatctacagtttgatttaatgaatcatttgcagtagatgaggaattaggattgacagatacatacgaaattgtagcagatggaggatattgaacaggtgtttcatgtggtgaagatgcatttgattatttatttatttattttggctaattgtatttggattatgcataatctcatctacttgtcttagttattgacgcggagttcatgatctgatatggctaacagcaattaattcacatttaatcaagtcggtgtcctattcggtgtctatagtgtaaaaattttcgaaatattgctgcaaatgaacacagatgaggaagctggtgcgagtgcttatgcctaggaataattaggaaaaaatccgataactgagagaagatgcgaaaagcggtacaacgttttgcacttgagaggatcatcagccccggcattgtttctggcattaaattctggagataatggtggctacctctttctagggcactgtttttggtttcctaatgttgaattcgatggcaaaatagtatcctcacaatttcattttatcaatttagctgtatctgttgtccaccctccagacctgaggattgatttcattttccaatgggtgttttctttcaatgtgcagggtcgtaaaga

SEQ ID NO: 92730 - DNA, 983 bp, Eucalyptus grandis
  Intron number 1 from transcript Egrandis_v1_0.013932m (loc us Egrandis_v1_0.013932m.g) derived from phytozome v7.0 (c hr-ID scaffold_3; pos 30906038 to 30907020)
ttgggtccggcgcgtcttgggggcgaggtgggtgtccttctcgggtcgagctgcttgctgggtttcggttttcttggagaatttatggtgggttgtgggcgcggattgtgctttcttggaagtgttcttgggaattttcttgtttctctgtcttgggtgacgggggtgtagtcaacggggtcaaattccgggattctttatttgggtttttatttatttaccgtctcgtgcgaaatcaggggtgaatttttgcgatcggggtaatgcggatcgcggcttccgcttctggcttagggtcagctgctgacgtgattttgcctggaaagttgaaagattttgtcggttgtcaaaggaattagagaattgaaattgtttttccccagtagcaggactgatcttgaattattttgctggcaaaaaggactgggaattattttgctggcaaaaaggactgtttcccttttcttttttcataatttagatgtctttgggtgtatgccctttgccctgcttaagtcgtactgtttatttgttgaatggttttaaatttttggcaatgagagcatttgggaaggttcaagctttttgccatgaaccataatttttcttgccagagctgaaattttcttctagtgtgagagctattgaagaatatttgtcaacacttagttttctttggttgagtgatgtagcttcttacatcgcatctcgttctttctcatgttaaattgcttttggatggtcaaaataaaaaaaagaaagtgagtgattggttgttacttgagtatgttgtattgagatcttctctactggataaaaaattgtccacccatgttctttaatttgaagttgagataatctagtagctgttgaagttcaagcttgtgatcttatgcactgcttcaattacagtcttatgaatctgacacagtctttgaatctttgcaggctgagattgataatagtttgtcctctagctgatt

SEQ ID NO: 92731 - DNA, 869 bp, Eucalyptus grandis
  Intron number 2 from transcript Egrandis_v1_0.050188m (loc us Egrandis_v1_0.050188m.g) derived from phytozome v7.0 (c hr-ID scaffold_3; pos 28311291 to 28312159)
tcgtcagagaggcaccttctattcctggtactctctctctctctctctctctctctctctctcatattattaaatagattgccatcaaagctcccgacatgattcgcacattaagattccatttgtttcttaaatataatagatttgaaaaacattttcttagagacaatcatttatattggttataaaaataaataaacaaaaaatattttccttgtctacgaaataatttagacataaattgttgttgatgatgcttttctattaattaattatttctagtaatattatcgattattttgaagaaaatatttcctaaattatccattttcttcgaaataaacaaaaccaaagattcttataaaaatcatctagaaggagatggatgatatagatagaagaggcatgtcctccaaacatcctgtaaataattttgtaatggtttacaaataggaacattgtccacatttgtaatttggtaacatagctcgtagcatactaatcaaaggcagattgaaaaaagggtttatactacgaaaaacctcaaattagtatatttgcaataaatttaccctccattaattatgttatatttgtgatgataggtattgaacatgcttggggtgcatttgtgactaatttttgtggtacccatttggggttcttagtttgagtattaaagtaacaatgggatggcccggtttctctatgatgacaagtattgaacatgttgaaggggacatgttgaaggttaacacaacttcagttgcctctttgggtgaccatagagaatcgtacggtagacactgtggttaccttgtacgcacagtgtagactgaattttggttgttctctgcagtggataattc

SEQ ID NO: 92732 - DNA, 801 bp, Eucalyptus grandis
  Intron number 1 from transcript Egrandis_v1_0.048203m (loc us Egrandis_v1_0.048203m.g) derived from phytozome v7.0 (c hr-ID scaffold_985; pos 1683 to 2483)
gagaggaaggcactgtgttggttccgaagaaggtggtgagtggctttgttttggtttgatcagcttttttcatgtgatttatgggttcttttttctcttcgtggcgatgtaattcagctatagaaatttgttggttttggtcctgttggtgtgaagaaggtcttcatttgtgtcgtgtactctttgtgaagatctattatttttagtgattcaaatcttgtctagataaattcctttgtttaatttaaatcttgcgtttgatatatttcttgtaattgaagcttgtatggtatacaagtttaagggttttagttacacaaataaagtgtggatactaatgtcatagtttaaggttattagtggcatttcttttactttttttttatttcttttttgcaatttgattttataaggtgtaaaatatcttttaaaaaaattaacccatatatcgacataattttctttttctaattttaaaattttggaatactttttaaaattttgtagagaaggtggacaggtaacttcgttcaaaagaaaacatatttaccccaaatactgatgtgatcataaaaatctcattgcttccaatgcgtttgtttgttctagatttcttttaccgttcgatcacttttgggggaaaaaaattaatatggtgtaaattccacacgggcaacgtgtagtttgccatttcttaatttttctgtctttttttttttttttttttggtggggggttcttataaagaaggaaaaagagatgaatatgtgcattggataccaattttatcacaacagtaaa

SEQ ID NO: 92733 - DNA, 627 bp, Eucalyptus grandis
  Intron number 1 from transcript Egrandis_v1_0.014300m (loc us Egrandis_v1_0.014300m.g) derived from phytozome v7.0 (c hr-ID scaffold_41; pos 160650 to 161276)
taaagttgtccaacaaagtaattggacaatagaagtggggatcttgattaggtctatgggatgagttacttcattttgtccattgttaacaaggcccccactagggattcgattcattattgtgtggaagtatgcagagttgttttttctgggcctttatttcattgttttccctttctgtcctcccctgttttctttgttcttttatggctcccaaatgaatggcaaattttttttgaagaaaggatgaagttaacctgttttctttgttctttttatggctccaactaatataatctatttgctcctaagataacgtctgaatattttagtgagaagaaaacgcacattgactttactgttgtttttctgctctgttcttgttttatggtttatctttttggagttttgatgttggagtagcaaggaggcaaatagttaatcatatatccggttatattcagtggggactgcactgttgcagtagaaatatgttaggcagtggtctcagctcaatctgttgagtctattaatttttgtaaagtgtggtttgtttgttattgatgacctctgagttcctatcttgttacaggggaacacaactgcccctgattttcttagtgaaag

SEQ ID NO: 92734 - DNA, 497 bp, Eucalyptus grandis
  Intron number 1 from transcript Egrandis_v1_0.002550m (loc us Egrandis_v1_0.002550m.g) derived from phytozome v7.0 (c hr-ID scaffold_5; pos 14781028 to 14781524 reverse strand)
cgattcgctctcccgctttgtccctttccactcgggtactctctctctctctctagagtcgaaagctttcgcctttcctcgaaaggtcattttttcccatgtacccttttctttcttgatttattctttcgagggaggaaagacgcttaatagtaagcgaagcatcttttgttcgaaattctcttgttccgcctttttcgagtggtgggtcttcggtcccatctcgcttccgccgtttacgattctgctcttgcgttttttcttaaactcttttcaacgcccggactgttcaagaagttgaaaaaaatgtgatcttcactcggacgcgtcaaacttgtcgttctaatcactgaatactttgcatctatgggttttttatgtgtgggataggatttcgtgcttgaagtctctcgctgtcgtttccggtatgaatttgacttttcttcggcgttgttaatctcgggaaatgtcattttcaggtttgaggccggtgtttt

SEQ ID NO: 92735 - DNA, 815 bp, Eucalyptus grandis
  Intron number 1 from transcript Egrandis_v1_0.013267m (loc us Egrandis_v1_0.013267m.g) derived from phytozome v7.0 (c hr-ID scaffold_3; pos 29931092 to 29931906)
agaagggagaacgaattcttgatctcgaatctcaggtaagccttctttgtttttctctcaatatctttcaacacggtgcttcttttgcagacatagagcattatgattagtgaccgcatgctgcacttcgtttcgaatcaaatagacaaaaactatgtatgcattcgacattactaattgcccatagaatagccaagaaatagaaggttggattatgcgtgttccagtagaatttataggagttatgatcttgtatgatttgcgaccacctgattttaacggcaaattgtcttcgttgcacgttgttgggagatcaaggtagctgacggtctttaattattcatttctcaagcttcgcagattctttagatatttcctcaactagtttaggcgtaaggcctcctcaaagtgaacgacttttccgatttgcccaatggcaaaaacacggcaaagtgcccgaggtaaaatctttcgagagcaggggtttcttcatgacaatcaaaatccaatcacgttattctgtcaatgtagacctctgctatttctagaacagattgaatgcatcgcgaaacgggcatgttttctgttctactagaaaaaagaagaagaaaaaaacatcattttcatgttgttttttggctttgtttttctttttgacaggtctcgagtcctgtttaatgggaaaaaagaagatgtgcttaattcattctcgtcattaggcactaaattactgtgacacgaacgagaatatcagatgtaccctttcactctctagtttcatgggcttgtaatttttttctttcacttgtttagaa

SEQ ID NO: 92736 - DNA, 997 bp, Eucalyptus grandis
  Intron number 1 from transcript Egrandis_v1_0.023175m (loc us Egrandis_v1_0.023175m.g) derived from phytozome v7.0 (c hr-ID scaffold_5; pos 9309585 to 9310581)
tctccacctgcaccaccctcctctcgcagctcaaggttagatacccaatgggggaaaaaccctaatttggcccccccttctttgagctgcttcgcgatggcgagtgctggttcggtgcttgtccgtccgggcttgcgcagcgagctccgcgaccggatgtgttttcggttttctccgcttgtttttttgggcgtttttgtcttttccgtttcgtgatttcccgttcggcgatcgatcctggtaatcgccgttctctgggacgcctctcggtctccttcctgcggatatttttcgtcgtttcggggtcgatgccggtgtccgacttcgaggattcggttcgcacttgcggtggtccccgattccgagagaaatgggattcttgtgacctgatcgttgcaggaatcgttttcgttttgttctttggcgcttctgagtttcggctgtagagatagatagctttatcctgaatgtgggtgggtcgggagtggatgtggaagtgaatgagcgtagatgttatgaggctcgattgatgatcgggtatgccgagattgaatcaaaagttttgatttttgttatgaccgattgaacccagaagtgttgccggtgttctgtggaggattgaatccgattcacagtatgcgatgtgcgtattttgaactggttgagtttaggaaggcctcctctggcatgagttgcgttctgttgatgcttgaagcccgcagattctgtgcatttagggcgaggtttgagtggagaacatattggaggtcttcatttgtgtgatttctaatcatagtggatttcgctctgtacaataattaccgtatggagagtatgcttgctgaatttattgtgtagagaagagtattgactgaggccccttctttaaattgtgctgtctttcttatacatgtatctatcattgtatgtacacaataagaagagaaatgttcaccgtacaggttttgctgacagagttcaatagtcttcctccgct

SEQ ID NO: 92737 - DNA, 823 bp, Eucalyptus grandis
  Intron number 2 from transcript Egrandis_v1_0.016702m (loc us Egrandis_v1_0.014021m.g) derived from phytozome v7.0 (c hr-ID scaffold_3; pos 69935613 to 69936435 reverse strand)
aagtaagtgtgctgcgtgtgaatttggagcagtttggtatcggttttgatatgttatgctgctaatactttttgttaatgacgtcttaacttacttgaatttcgtctacgcagtggtttggtttttactttgcacgatacgattacattaattctgttgctttagtgtttggccataattatgagtgttttggaagaaagatttcagaaatagggcatggaaaagattctagtaacagttgcattgtgatctcaatgtaggttgcagtgattgtgtgttatggttttgttggattttacctcttctgatttgaacaggggcaacttggttttgataatttcggtagattcttgattgcttgctcagtcagaaagagaggtcatgagttttgatggcatgtcataaagttctccaaaaaaatgagatgtggtctagggctgtgggttgtttgttctagttaatgaagaacaacccattttttgaacttctttttaccaaaaaaaaaaaaaaaaaccttttttttgaactcctctctatgtttctgctctgcttttgggttttcaccatcttggattatcatcctactttgagaacaagggattttccttgcggtggtcaatcttgccaagacccaagaagtcctgttttgattcctaaacgttgcctccccttcgcacatctatagaagggatctcaaacttacatattcgttttttgtcgacttagtagatcgacatctctctctgtagcaatgaggagctgaacatgtcctttttgactatattcctcacgctatactgtgcctatacttccattgcaggaa

SEQ ID NO: 92738 - DNA, 426 bp, Eucalyptus grandis
  Intron number 1 from transcript Egrandis_v1_0.016702m (loc us Egrandis_v1_0.014021m.g) derived from phytozome v7.0 (c hr-ID scaffold_3; pos 69936439 to 69936864 reverse strand)
cgccgattactacttcgattcctactcccatttcggtgcggttccggttccgttggtgtcgttttccagctttgttggagctttgattttgttccgcgattaaagtttttcgtttttcttgtgtaaagttcgttcctttcgttcttcgtctttggcttttgagctttcttggagtattgattttgtcccgtgtttaaagattcgtttttcttgtgtaaagttcgttcctttcgttcttcgtctttggcttttgagctttctcggagtactgattttgttccgtgataaaagtttcgttttttctcgtgtgaattttgttcctttcgttcttcttcttagatttattgctacattagattagcatttgttgcagaagcttacatttttttttcctttttctgtgtttttcttttttggcaggaattc

SEQ ID NO: 92739 - DNA, 486 bp, Eucalyptus grandis
  Intron number 1 from transcript Egrandis_v1_0.013600m (loc us Egrandis_v1_0.013600m.g) derived from phytozome v7.0 (c hr-ID scaffold_3; pos 51810114 to 51810599)
gattgtcgaattaagttgaaggtagaataccaaaattaatttttaaatccatcacttttatgtcctgactattataggttatacattcacttggcatagagagtaagagagagttgagttggggacacggagcagaggggttgaatgcggtgatgttgaagaatgtggtcgcaagtggtgtgctggtagcaagcggggttgtgtgttggtatgtgggaccttgtgggtgatttgggaggaaattagagttttctgtgtgttcatggcgaggttatagagatttgtctttgacttctagcaggggcctaactccaattaaaaaaactcaggttggagattatctgcaacatccccaaaaaacttgcgatgttcaaattaccccagcttatcttaaattattgacttatggataattggcttataaataacactacaatgtatgctgatgtttctcgtttatttttttactttaacttttttctgcag

SEQ ID NO: 92740 - DNA, 866 bp, Eucalyptus grandis
  Intron number 1 from transcript Egrandis_v1_0.011969m (loc us Egrandis_v1_0.011969m.g) derived from phytozome v7.0 (c hr-ID scaffold_3; pos 49419722 to 49420587)
ccgactcctctccgtcgcaccaccgacacctgaaggtgccctcctctctccctggactccgtttaagcgtgaacagtgtcgagtggacagtggggcatggtcgttgcctcgtcggtccgcctcggagattcttgtcgaatttttgggtggggaactgcgatcgatagggattgaatatccggaggagttatcgctagattttcctcacatgaggcaagaggtgtaggaagatcttgtcttgtaggatttgatagaggggcgtgcgctattccacttcaagaaaattctatgatggcttctcatatgtggtgcttatttgttttcttgtttttgtttctggtttttgttgctggatattcaatattagtggaaaatacaagtggatttagacaagatttggggaattgtctgtaattctttgtgagggggcatttccttgccctgtgagggcggtgtggggatggggacacggcagattgccctgcaatgcacaggtcgctggagcggcagtggcggggcaaacctttgccccaacacatttattggcatttatcttcgtgtgggtggaaagtgctgactgtgttcaccatttcgactgattggtgtatatggatcaaggctttgacctagtggcagtgtatcctaattgaggtctgaagggtcttctatcccgttcttagcttcccccttcccaacctgagcttgcaaaaagggtgtctaatggtcctgacctggtgacttctgtttttgattcgatgactgttatttccaccttgctttgttgcttccatattcatcttctccaaaatgggcattcagtattcgaaatttgatatggtttgtatatcgaatgtatcctgcttcag

SEQ ID NO: 92741 - DNA, 838 bp, Eucalyptus grandis
  Intron number 1 from transcript Egrandis_v1_0.049841m (loc us Egrandis_v1_0.049841m.g) derived from phytozome v7.0 (c hr-ID scaffold_3; pos 42214389 to 42215226)
ccggtcttcctaatcgatcttcttggatcgctctagtaattaggttgagggatcagcaagacccttataattaggggtgtcaaaaaacccgacccgacccgacccgaatacgaaacaagtataatatgtgtttcgggtcttgatagtgttcgagtaacacaaataaaacaagtgaagaaatatgtttcgggtcgggtcagggttggaacattgttcgacccaaaacacattaagtcctacttccaaacaagcaacaaacacaaacaggaaacacgttctcatctttcttcaccgtcaaacacaaacatttccttctcggctctgccttcttctccgatgactgtgccttcgctcacgactgccagttcagcctctcctccgattgacgcgcctccgcctcgccatcgccatcgccgtcgccaccccttgtctcaacaccagaaccctagtcgctgccgaatcagtcgatcgttgctgtccgtcgccgaaaatccctcaggtccgtgctgccatcaatttctcgatccgaggagcttcggcgtccttcttattcggcaccttccgggtggagaacttggagggcgctttgcccgccaagcactctccgaactcagcgggtatggtttaatccttttttttttttgggttctttcgcgaggggaaacggatggcaaaagaggatccttttgatttcgttcgggattgcgatgggcgtcagtgatggaatttgggaattttggagtctggagtggtgaaaaatctttctgggtcagctcggccgctgtcctctgctcgttcctcagttgtagacacggtttgaaattcaacaagcatcacc

SEQ ID NO: 92742 - DNA, 690 bp, Eucalyptus grandis
  Intron number 1 from transcript Egrandis_v1_0.051381m (loc us Egrandis_v1_0.051381m.g) derived from phytozome v7.0 (c hr-ID scaffold_3; pos 20905626 to 20906315 reverse strand)
tagcagcaatacctttgaagtcggagacattttaggtaggccgagaaatgacattttagtataaaattgaataacatttactacaccgagtagcatcctatacgcaagggactcataaaatgttcggctttattgttgtagttgcaaacggcacgtcagaaggccaatcccacttgctaagaacttgaagatagaagaagcaaattccgatgctcattagaaaaaaaaaaaaaattgaatttcgaaactttcaactcttttcaatgtcataaataaaattcataactttcgaaaaatagtcaatattacttatatggatattcttttgatgtttttcttttaaaatgatcccttttttttttatctgtcatactcaaattctcaatgtattgatttttgtttttttttgctgaagtaaataattacaaataaagcttatttgtcactgtaactaaatattttacgtaaataatgttgtctatacttgattttagtattatatctattcactctctaaaattaatagcggaaaaggtcattttgtgtgagattttctttgtatttatggcatatgcccttatatataaaacaaaagtgctctttctttttgtttagtttaaccgccaaaaacttgttccatcttaatcaacagcttgttctctgatcttcatgcagtcttcaacttcaaca

SEQ ID NO: 92743 - DNA, 768 bp, Eucalyptus grandis
  Intron number 1 from transcript Egrandis_v1_0.003002m (loc us Egrandis_v1_0.003002m.g) derived from phytozome v7.0 (c hr-ID scaffold_5; pos 34533934 to 34534701)
aattcaagtttggaaagattcagagaaagtgaagagatggaagaaagctctttttgatgccggtggcttgtccgggtggcatttgaatgaggggtaagttgagttgagttcatattttgtgtaagaaactgaacttttacatgcaagtataaagactgcttgtaaaaaagaaaaaaaaaagaacaaagaaatcaacacacacatgattgtaagtacaaaatgttaaaacttgatctactaatgaacaaatgaacaacatgttttaagtggcgttattgcatttaccccatttctttggaataagtaggaaagtctgcaacgccacatattttgtaattagcgtatacaggccaagtgaggcaacaacatcgtgcttcatgtatttaaaatttttcgaatcgaaaccactattcaaagtcatcaatagctcttttgattaaagcatgtagataaatcacatagaacaatcaaaaggaaaaataaccaaatcgtcatgtataaatcaaaagaacatgaaacgctcgggtgactaaaagttgaaccttgaacttgttttaattgatgtaaaaagcacttggagtcctaattcgactcagtgaaaatataatttcttttggctatcattatctgaaaatgagacgcaatgctttgtcgttgttggttggtgattgctcattaattgctaattcaaatcgctaaaacaattctgcaactctttttccgtgtttgtcagagacgagtcaaagcttatacaagaaattgtgaagg

SEQ ID NO: 92744 - DNA, 789 bp, Eucalyptus grandis
  Intron number 1 from transcript Egrandis_v1_0.041582m (loc us Egrandis_v1_0.041582m.g) derived from phytozome v7.0 (c hr-ID scaffold_3; pos 37400391 to 37401179 reverse strand)
ctgctagtagtgcttgaactgtcctcactgaaacgggctttagtgtcattataagcactgtgctgacctgctggggtatatttgaaagaaagaaggatcaaactgttagtgatttggattgtgtttccaatggattatgcaccaaggcttttgcatattgctaattgcattcctagcttactataagttgactaaaattttgcagatttatgccgtatccattacgatttgtattgtggtaagagtcctacctttaatgtagacttaagataatgaaattttttttttcatgaaagttcttgcatccagtcttttgcagtttggctttatgttcatcgctttaatctgcaagtctgactttgcgtcctttatggtcttgattgttgccatattaaacagtgataagatgataggttttttgtattcttgtactcccggttttcaacatagcaaattaggaaagaccagtttgactagttttttgtaccaatctcaggaacgatcgtgataatcttcaaagattgagtgaagccatctccctagaaagatagctgaaagtagaaagaaaattttgctactggaaacgttcttggatatcagcactcataactgtaacattcttctgggcagatgcgaactcctcagtaagaatctgtttcttgtgtggttttctacttcttttctcgtgtatatcttccgttgaattattggaatgagaagaaataaattatcgctgccctgttctatggtgcaggacaagtttggtgtaaaattaatcagatataaacc

SEQ ID NO: 92745 - DNA, 781 bp, Eucalyptus grandis
  Intron number 1 from transcript Egrandis_v1_0.033025m (loc us Egrandis_v1_0.033025m.g) derived from phytozome v7.0 (c hr-ID scaffold_26; pos 228662 to 229442)
cggcaaattccgattgcacactgtcgattctcaaggtatcacaatgtcttttcgttaaatttttgttggtgatattatttgtttgtcgattggctgctgtttttgtgtcgatgaatgagttgaagaagaactagttcgagagataagtccccgttttagctattagcatcatttttcggataaagttggttaggatcaccgagtttatttgatgagtggacataaagctgatttatgcctgcttaacatcgtctgcttagctggccaagcccctttcgttgtgctttttgagtcgttgaatcgaatttcaaaaggttcgctggattttttttatttatttcgatactcgtttcttttctggctggatactgctcaactaaatctgtcctaaggagcaaaattagcatttgcagagtgaattgggaattggttttagcctatatctctctcattttcatcgatttgaagttcccctcttttcgaacttgcctgttctatctagcttgactctgatgggattttgttatctttaacaccaaagctgctagtggttcatcatacgctaaatcatttgtaaacataggaagcatgatgaagataattcaacgatacaatacgatatccttgaagtttttctagtttctttagctatacggctctatgttttgtttgtttaccgactaagacggttcttaaattggtggttgacacctctcactgagaatccaaatcatatgctaattaagggcatttccatcattttgtttgcttgatctaggcg

SEQ ID NO: 92746 - DNA, 1028 bp, Eucalyptus grandis
  Intron number 1 from transcript Egrandis_v1_0.049410m (loc us Egrandis_v1_0.049410m.g) derived from phytozome v7.0 (c hr-ID scaffold_5; pos 34235525 to 34236552)
actttcaaatttgctttatttaggtcttgggggatgtaatttttctgaaatagaatttcttgagaatccttcctgttgtcccttgttgtgacaattaattctggtggagaacaatgttacaagccttcccacatccatccataagcgtgatcatttgttcatattagtagtttcatattgccatcaattacaagagtcactcgagcttccaccattttttaagcatctttccgctgataattgcaaatctctacaaaaaaaaaaaaaaatggagattcaacatcattttctgcttttgtccgtggagtgttgaccatggctgacattccctcgctggagctggttagactctccttttctctctctctcacggagtattgcttgtttatttgtgttcttctacattgcaatggtagtaaatgcaaaggctaaagaaaagcaaacaaatataaagtgattatgcacgtatatgcatgtaataaagttcgctaccatactttcatgggaatgatttctatcacatgatagttgtatgttcatgcaagcgatgaccaatgatctctactcatttagagagctctagtttgaagtggaattcactaagattaatcactaaactcaagtcttctatttgagtactaccaataacaaactttggtcttttctaatagtctatgttcataacagatgcctcctaggagatgccagagtgggtcttccctattgacgagagctccatatcattcatagcttcaaaacacttgtatgacaagattctcgagttgattctttgtgccgctctcaatgatgatgaacaagcaaatgagattttaccacatgtgaatggcgaaatgagggattgcaaaggacgaatgaacttcttggcaatggatttggatcaaatcttgcttttgtgtttcacacagtacgatctatggggagaagtcgattttggtcaaattgatgggagttatgtacactttggccttacagtattagctacgaaggtgaaaaagtggggattccga

SEQ ID NO: 92747 - DNA, 748 bp, Eucalyptus grandis
  Intron number 1 from transcript Egrandis_v1_0.019372m (loc us Egrandis_v1_0.019372m.g) derived from phytozome v7.0 (c hr-ID scaffold_3; pos 76407162 to 76407909)
ttgccgcatttgtctggagagcgagtgtgaaccaggtggagtttttaggacttgcggttttttcatgtgcacaatgatgattcatcggctgcttggacccctagcttaaacgtgttagtagaagatagatgattgtgttggaatatctgattgcgttgcacgagctaggaagatgttcttttttttcgagttgatctttaaagagaataatttgcccatagagcatacaaattttgattgtttcatagggtttcattgtttggttaatgattttgtatgtattggtggtggtgggtcatttttagttgatgtgcccattttgatgcccaggtttgggggaattatatctgtttgcttgatcatacttgtagagaagtttgatgttaggttggtagctaaaggatgattttacattgtcgattatctcatgggggatgcattccttcaggatgaattatgccccattaaatttgtataagcagctgggctaaacctactgcaagtcctagttactagatggtaaggcttttacctgcatatggataattctgcttggcgaaatctaaacgtgaaaggcgttctttgaatttgcttgtcctctcaccttggtcttttatagtattctgttcatctctctccatgagttgtgatcacttagcatccttttcttgttaccagatgacgcttctgttgctctatattgtttttaagcctatagtcttacattagatttttaattttgcagggg

SEQ ID NO: 92748 - DNA, 545 bp, Eucalyptus grandis
  Intron number 1 from transcript Egrandis_v1_0.008749m (loc us Egrandis_v1_0.008749m.g) derived from phytozome v7.0 (c hr-ID scaffold_3; pos 60286723 to 60287267)
acttcgcttgctataagcctcacgacgatctccaggtgataaaagctcctttccctacgtccttgcatgcatgggaacgtaaaaggcagggaagttggtaatgacatattaagcggtttctttcgttttcatatattgatgggtcctgtgcgacatgacggatgcgattaaataaccgatcttgactagcgagaagagtcatattctaatttttttgattcttgcacttgtatttgctgcgtattttgggagtggatgatgtggtaagcagataagtgaaaccgtacttgggatgtgcttccatgacgctgattttatttagttttgtggtgcgctttctagctaagtatccttttttggtatgtcctttattattctttaagaaaattctaatttttcaagcttttgtagcattcgtattatccgataagacaaagtctacgtaaattccagtttcgaattttaaatcaattaaaatgaaaagatcgctcgctcgctcgctcatttcaggtgaccaaggctcagttgatcgaccacgccatccg

SEQ ID NO: 92749 - DNA, 589 bp, Eucalyptus grandis
  Intron number 1 from transcript Egrandis_v1_0.010778m (loc us Egrandis_v1_0.010778m.g) derived from phytozome v7.0 (c hr-ID scaffold_5; pos 62782878 to 62783466)
tgcctgcaggtttgttcctatgagtttcatgtcgattgcaatagcaaaatatagtgttgctatttatacataacaaaagaagacaacttttttgttgttgttttgtccagttacgtggaagccctaaaatttccaatattttgttaaggatgaaaatggacaagaatataagctgattttttaaaaaatatttcgctgatttaagaattggaaatgtttaattgtgatgaactctctaatggatatccatcaatgcatgttacatcgtgcacttatgccagatattaagcaatgcattagtgttctggagttttgttcaaatgggaaagtaagaactaattattcatatcacaaaaaccgaattgaaaaaacctagatatatgcccatttccttcacttattctcttttttagtttctctacattaaaaaattaaaaatttacatgagatgaaatagttttaaccaatttaggattttttttcgaaaccaaagtatgcacatcataattttgaatgagtgaagcgacttataaattagatatcagactatgctttttgatgtattagagtccttgtgctttttatgcag

SEQ ID NO: 92750 - DNA, 591 bp, Eucalyptus grandis
  Intron number 1 from transcript Egrandis_v1_0.043324m (loc us Egrandis_v1_0.043324m.g) derived from phytozome v7.0 (c hr-ID scaffold_5; pos 62195145 to 62195735)
tgccggcaggtttgttcctatgagttttatgtcgattgcaatagcgaaatatattgttgctatttatacataacaaaagaagacaacttttttgttgttgttttgtccagttacgtggaagccctaaaatttccaatattttgttaaggatgaaaatggacaagaatataagctgatttttaaaaaaaatatttcgctgatttaagaattggaaatgtttaattgtgatgaactctctaatggatatccatcaatgcatgttacatcgtggacttatgccagatattaagcaatgcattagtgttctggagttttgttcaaatgggaaagtaagaactaattattcatatcacaaaaaaccgaattgaaaaaacctagatatatgcccatttccttcacttattctcttttttagtttctctacattaaaaaattaaaaatttacatgagatgaaatagttttaaccaatttagtattttttttcgaaaccaaagtatgcacatcataattttgaatgagtgaagcgacttataaattagatatcagattatgctttttgatgtattagagtccttgtgctttttatgcag

SEQ ID NO: 92751 - DNA, 984 bp, Eucalyptus grandis
  Intron number 2 from transcript Egrandis_v1_0.031047m (loc us Egrandis_v1_0.031005m.g) derived from phytozome v7.0 (c hr-ID scaffold_3; pos 78469107 to 78470090)
gggctcaaggtgggtctttctcttcttcttctttttttatttatttcgctttacattttggaagctggttgtgtgatttcgcccggtttttgggtttttgtagttgtgtgaaagtttgctaatttgtatacgtgcattcgctatttttcgttgggaggattaatttgaaccaagagggattgtttacgggcaaatgggatggtacgggggaattacgaggtgtgacatttggagtgtgtttagtttttgttgaggttgtgttgcagagttgattttttagatgaagttcttgaatcccaatggtctactctagtttaggtggagtaatggaagtgctatgtccgcgaaaatcatttttggtgtaggataatcctggtcattctttcatctccaaaagggtgtcactactgcgtattttgattcaaattttgcattttcaacagatagcaataactgtgatgctatgtttatctgtttaactgaatatgcggatatttgctactttaagttgtgggaaagactgggtgtggtgatggtctgtttcatttgatattttgtagttttagtgtgtaatccgttgatagagaggtttctgttttagttagaactcaacttagtaaaccacagatggatttcatgatctgaaacttttgcttttggattggtttggttagttcactgtatgcaaacatacaatcacaagtctcgaattccttttgggttggcagaaggctggttccttttggtttagtatgtgaatgaggaagttgtttgtgtggagtatcattggattttatgttttggctcaagtttgttggtgtagtttttgatctctgcaatgcatatacttgcagtctgcttgagctgtgcaggattttttactgaagcttctcgaaaattccaacaaaagtatatttctatttgattttgtcagctgctacttttggatttaagaactcaaacaacatgaatgggcaggtgcaa

SEQ ID NO: 92752 - DNA, 431 bp, Eucalyptus grandis
  Intron number 1 from transcript Egrandis_v1_0.047375m (loc us Egrandis_v1_0.047375m.g) derived from phytozome v7.0 (c hr-ID scaffold_5; pos 58318025 to 58318455 reverse strand)
gctgcccaggctttgtgtaagtctatagagccatttaaacaaagaataacatacagaagaatagcaatcaatttgtaattggcaacctggccttattagtttgctaagtttttttttttttggtaatctagggaacctccgcacgccgcttcgcggtggagagtaaaccctggagggctgctagctggaggacccaccaccccagcaacccacttaagacgcggcttgcacttaagactcgacgacgccgtggatcgaactcgggtctttttgcgagaagtcccttgctcaaccacctacgccaccaccgccggtggttgtttgctaagttttatccttaatcaaaacctagcaagggttgcagattaatattgatttgatcttcgaattcccataatgttcattaggtcttccttggctggtttctcacc

SEQ ID NO: 92753 - DNA, 736 bp, Eucalyptus grandis
  Intron number 1 from transcript Egrandis_v1_0.029694m (loc us Egrandis_v1_0.029694m.g) derived from phytozome v7.0 (c hr-ID scaffold_3; pos 6798765 to 6799500 reverse strand)
gctacatcgtcatcaagaatcgcccctgcaaggtctctctctctctctctctcttccgcatattctggttctgggtttatttgggtaactgagaatttatgtgggtattcgattaaactggctagatctttccatgcaatgttgggaaggcccggaatttgtcgaggagtgtcttttcttggtgggggcgtaattcagttatttttactttgaatctttttggttgattgtgagagatgagcaggggaatggtttccggcggatactgtccttctgggtactgtcggaaatgctaaagatggttacttttttgtgcgtccctttcatgcatctgattgaaactcgcttgttttgtaaagttccgaatttgtcgtggattttcaccggagcaacaattctcatgatctgttgtgttcttctgctagatgggatgtcatgtgacagggttaagtcttgctaataggttgataattaagccctggagttatagtttgagggttgcgatccctacaattgcatatcttttgaaacaatgattcatttcgatgtgctgtctggtctgcctttcctcatgatgggagaagctattcctgttcattcatgtgcaattcactcgtatatttggagcatactgcatcacatttgacgttatctggattatggtctggctcatagataatttcttgtcacggtgggggcaggttgtagaagtttccacctcaaaaactggcaaaca

SEQ ID NO: 92754 - DNA, 952 bp, Eucalyptus grandis
  Intron number 1 from transcript Egrandis_v1_0.012709m (loc us Egrandis_v1_0.012709m.g) derived from phytozome v7.0 (c hr-ID scaffold_3; pos 30852011 to 30852962 reverse strand)
ggggcctgtctccaccacctctgatctgggttccggtgagtttcttagtgttttgctcaaaattgattttttttttttatggttttcttttcttgggggattgtgttgggttttgtttgatttggcatttggtgatgaagattagaacttcggttttgctgtcttgttcaacggatactttatttgctttcggttttttttttccttcctttccttttcaaggcatattgttttctctggtgtgatgagtgttggtgtgaatttcttcttcttctcttcttcttcttttccctcattccctttccgttttcttttttcctttctcttaggctttgctgggtgattttcgtttgtagatatagacatgatgctccttttttcaacttccctttatctaatgctaccaagcgtggatgcgccatcatatagcttttagtttcttggtgcatgtctacttggtctttagctacatgctaattgggggagttcacatttggatggtgactcattctctctctccctcgctctctgagtggagtggttgcactatctgggttgtggagtagtttggagggagttcattaatggttttggtagccttttctgggttattttttcttcaaaaaaggaaaatttctaagactttgattgaccaccttttcttttcacaggagtatgcttgatttgcatatacttttactcactagtaggctcactcaatctgtaggactttttccctcttgaaactcttatgcttgctcacaatcacctatagatataaatggatgtactcttcttttttttcctgcttttggctgttgaatcgagagacctttgtaaagtgaaatagctgcaatatcatttaccttctgcggcctaaaggcgagttttgatcagtttctcatcaattatgatagaaagacaggttagtaatcattttgagggcgttcct

SEQ ID NO: 92755 - DNA, 765 bp, Eucalyptus grandis
  Intron number 2 from transcript Egrandis_v1_0.017214m (loc us Egrandis_v1_0.017032m.g) derived from phytozome v7.0 (c hr-ID scaffold_3; pos 4269958 to 4270722)
ttccttttgagccgctctgggataagtttttccaggtaagatgtcatcttcaactcggaccattcttactggtttttcgtttattttggctgctgcttgcttgctttcacactttgcttctcatgttgtcatgacttgcttcatcagctggtgtaaacttgctgctctcattcagctacttcttgatgaagaaagtgtgttttttgttgaaaatggatcaccaatttccaacactatagttgtatctcaagcctttgtaccttcaaagattgatggagtcttccttttgtggctctgacaatcactgcttgcacacgactgaatgaataagagatgatgcttcctgcagcgattatcactattgtttcagtggatgcatctagttcgtgcattctgaagtcttttgaagtcccatcggtggaaaaaatatttctaagtttcttgaccatctaatgcttgtcacatttaatcaaagtgtaacttcctcttgttctctttattctactctcctagaaaagtctgataaaacagaggataacttttgctgcaggacattgcttgagattactgaccaatgttattcttaatgcactcacttttcgtaaaccatagtatacttatgtatgagcggacatcaatgtagttgaagaaagaatagtagctcagcagatgcaagcacaattctactgttgcttaattttgtcttcctcaactaaccatatctttgtctttgctattagggtcacgaaggaaggttcacagtct

SEQ ID NO: 92756 - DNA, 474 bp, Eucalyptus grandis
  Intron number 3 from transcript Egrandis_v1_0.022938m (loc us Egrandis_v1_0.022938m.g) derived from phytozome v7.0 (c hr-ID scaffold_5; pos 68148127 to 68148600 reverse strand)
tcgagcacaaaggccaggttctctctctctctctctctctctctctctctctctgtttcttgccctgtgattgcctcaattccagttgttgagtgaactgcagaaatgggtgatcgtttgtagctaagcatgacggcgacgttgttgaatttcgtgttgacgtgacggtacgccgcgaaagcgtgcagttgcagagactgctgtggcccaataatgtttttttataatcgtaggctgatgattagaaggaagaggaagtcgtggactttagtttttctacactagtgaaaagtttcttcttttgcaatgtacatttaatcttgctgtggtcagatgggagcctgccaactaaagcgggaaggatatgaacgttagtcgtgaacgaagagaagtcatgtagcttctttatcttgtggctaatttactcatctggtttgattcacaggtggatttagtcactgaaactgacaaggc

SEQ ID NO: 92757 - DNA, 762 bp, Eucalyptus grandis
  Intron number 1 from transcript Egrandis_v1_0.043491m (loc us Egrandis_v1_0.043491m.g) derived from phytozome v7.0 (c hr-ID scaffold_2; pos 7776009 to 7776770 reverse strand)
ctgccagacgaacgaggttcacgtctttgacactggtgggtcttcgagtttatcttctggagattctggttttccttcgaagtttgcgttttttctgagaatgtcttcgatatagattggtatactctgcttggtgctgagagaaagattggttcttttcttttcttttttcttttttcttttttctgtctgactgggatctcccggtgtttttgatgcaattctgcttgttaggatttttttttttttggttgtgttataacttgctgatgccttttgtttgttgtaggctttactttaatcaatggcttgggtcttgaatcggtgatttgtggctagttttatgcgttgaatgtgtggatgggaagagaatatttcatggtattatatgtccaatgattggtgtaaatggcactatcgcaccaatattttcctctacttctttcatctcgaacaattactgaagatgttttttgactttctccacatttgcatttttctgctgtttacatttactgctggaatttcatgagggtcggcttttggtgtacttccaacttccttgccttctactttttgtgtcctgatctcgtgttacgttggagcttagcctgtgtggcatgtggaagttgttgaactatgagaggtgatctcgtttaccatagtcttaattggtaatctgccattttttgtccctgtatgtcatgatttcctttttttcaattgataatttggttttttctgacttgcagtggagcaaac

SEQ ID NO: 92758 - DNA, 457 bp, Eucalyptus grandis
  Intron number 2 from transcript Egrandis_v1_0.015666m (loc us Egrandis_v1_0.015666m.g) derived from phytozome v7.0 (c hr-ID scaffold_1; pos 3444341 to 3444797)
tcggctctccgcggcttgcgttctcgggcggtgagattccccgccttcctcgtcgttttccgtctaatttttttttttttttggacccctttcgtctgctgtcgtcgatgatgactttgatgttcggcttctggcttctggggtgcgatgagctttgttagatgaattcttcgttgggacaatcccgcgagcacgtggtctgatggaagatgtttgatgatgttctgttcagactgccctgttttttcctttttggttctgttttagctaagtaatgatgaaccgaggaggataccatcctcttgtttttcatgaatttgagttgacatggatatttgctgcagagcattttcttgacatttgggcagtaacctgcgatcacgaatggctttcattgactcttaacattacataagaagagttttttattttattttatttgtggagcaggttatct

SEQ ID NO: 92759 - DNA, 942 bp, Eucalyptus grandis
  Intron number 1 from transcript Egrandis_v1_0.042601m (loc us Egrandis_v1_0.042601m.g) derived from phytozome v7.0 (c hr-ID scaffold_5; pos 38661856 to 38662797 reverse strand)
gaagtcatctacaaaatcgaagttccggcgaacaggtgactgcgaagctaattcggcattcggttagatgttgtgtgtttcggatgggtttggagctgtttggcgggtcgtgggtgaattttggttcgggggtttaaggtgctagtgtccgacttcggatgggttaaagtctttcgcggaccatgttgctcgtaatggctatcgagatgctgtgtggttcgatcttttctttgatgttatgatgttgcccaaggttttttttttttttttgttatcttttctgtcgatcaatgtgaaggaccaattgcatgtaattagagacttcataaacacattaccacctgaaaaaggctcagttttttagtagtccatgtgatgtagcatttatagtgtgcatcgaggcttttcttacttatgtgtaaatagtttcctttaatagtctcgaaagattgtacaagttaggacattttttcaccactttgtgaagaattctagctgtatggggaagcgggttgatattctgacccttgggattcccggttcatgataatggtcccgaaaggagtcgatcttgaatttagtttatgttcaacattttgtcatgctagatgggtcaatccccaaattttataggcattattgtcggcaagaaacgtaccaagcctttttagatttggtcaacaggttgcaatattgactccttaatgctgttggctttattttgaatcatgtcatctagaaacttcattatttagttataagtcaagcttttcaaagagatgacgggtttatcatcattttagtctgtattggtaattaatgattattcttcttgataaattcgtgcatgtactgtagaaatgactatactattataataataaggtatcctctgggaaatgcacagatacgacttgctttgcctcgaagggcttgctcagg

SEQ ID NO: 92760 - DNA, 497 bp, Eucalyptus grandis
  Intron number 1 from transcript Egrandis_v1_0.032310m (loc us Egrandis_v1_0.032310m.g) derived from phytozome v7.0 (c hr-ID scaffold_5; pos 29354931 to 29355427 reverse strand)
ccttggtaataattttcatcttcttttcaatttttgaaattcttttcccattttataatttagataaaattcacgtcttcaccttattgacctgaatcatcatgttattaacgagcattgaatgcaaaagatctcgattaaactcacatatttcaactcgacataataatggcatgccatgcgagattggatcatccttataaatgaacaatagtttgaatttaattgatttccttcacccatcagctagaggaataagatttccctacaattggcttaaacaaaaacttgtaatccatagcactatttacaggatcaaatgcttcttttcaaagtgaataattttttttttctcgaacttatcccatgctcagagctggtataaaaaaagtatacataatagagaactttttttttttttttgctcctttcctctttaccttaactcattttgtttcgtgcacgcaatttctgattaatgatgtgcaaaatgcagc

SEQ ID NO: 92761 - DNA, 551 bp, Eucalyptus grandis
  Intron number 1 from transcript Egrandis_v1_0.047405m (loc us Egrandis_v1_0.047405m.g) derived from phytozome v7.0 (c hr-ID scaffold_836; pos 14090 to 14640)
tgaaccggtaattagtttatctctgaagtacagaaactgaagtccaaaaaaaaaaaaaaaaaagagagagagagagaaagaagagaggaaccaaaaaaagtgctgtcaaaccaaccggccaatttccatttggtttgttttctcccgaattttgggtgcattctaggtaccacgtttgtgggataatcatatgacaagcgttgatgggcagaacacttggcgactcgtgaccttgcatatttggcaatcattgaatagctgtgatttttgtgtgctaacatgtcatgctgacgagatattactctatatttaggtttcaatattcaaaactcagcattatgagagaatgtcattgacgcggtgataggaacgtgctcgtggtatcactgtcacataaaatactaccgttggtagaaataatattgctgtcttctttgcatttcaatttagacttggcggaagatattaaatttcaaattagcccttggaatctgaaggcaagacaatttcgtgcaggagggtgaacgaatccgtcatcagaaggcagctcc

SEQ ID NO: 92762 - DNA, 664 bp, Eucalyptus grandis
  Intron number 1 from transcript Egrandis_v1_0.031496m (loc us Egrandis_v1_0.031496m.g) derived from phytozome v7.0 (c hr-ID scaffold_3; pos 17874564 to 17875227)
ggacataccatagtacatccacattgcgcagttgagtactgtcgcaacatatggatccggcttgaatcccgctgcctttttcttctttgatatcgtgataaatgtcggactgatgagatccgccatgatgcaaaatttatcaaatttgaatgtcaatccattgatcaaaataaacaagacaacaaaaatttcattggtcaacttatgagaggggtagaagtcggcgagctaagcttacatgggagataggaataaagcgatggtcatcacatctcaatggtcgaatcaaaaaattgagtttcatggtcataacgttgacatgtcgctttttattatacaattgattagtcattaactcttctccactctactctacttcatttcattatgtaattctttgatcacttatggattttttaaatttttttcaatgatcttttgtatttcgcatttgtatatatttatgtctccactgcggatacacatatgaatatatagacacaccgtaacaacagagacgggctcccggaaaatggttcccatgcactgttagcagaatgattatgtcacaatcaagaactcaccaacaatgcctacgatggttctggctgtccaaatgtccaccattgttgcgggttctcaaggacgaaggagaaagatccaa

SEQ ID NO: 92763 - DNA, 595 bp, Eucalyptus grandis
  Intron number 4 from transcript Egrandis_v1_0.016835m (loc us Egrandis_v1_0.010207m.g) derived from phytozome v7.0 (c hr-ID scaffold_5; pos 18686249 to 18686843 reverse strand)
ggagttccctggagttgttccccgcactttcctcggtaagccacttacaagtgcacatggcatatttttttcccctagtctgttgatgtcttctttactttggataagttctttagttgtcgagtcttccaaccatgaaagtgggaaaacattggaaaaatgtctctttcttttttatgctcattcttcagactattgtcatgtacttgcctgtcatttaatgtgctttgtagtttctcatttgacataaaagtgaaaacatttcagtgtagatattttcttctagcattgctaaaaattgcttctttgatgtggtacatgatgttactctaaactaaaagcttgtagtctttcttttgcacttttgatctcttgaagctcatcattttctggtcattttcttagtaatacagtcagcttttctatacattgtgcttttacttttagtatgaaccattccaattgcatagtactatccaaaatggtaaaatgctacagactggttaagtcagatccctatataaatatatcttttaattatttatcctttccccttttaggtgcattcttggtatcaactttggcgacgccagtt

SEQ ID NO: 92764 - DNA, 950 bp, Eucalyptus grandis
  Intron number 2 from transcript Egrandis_v1_0.014268m (loc us Egrandis_v1_0.014268m.g) derived from phytozome v7.0 (c hr-ID scaffold_1; pos 39768240 to 39769189 reverse strand)
aagggcgggatcagatatcatcctgaggtaccgctccaatagagagtctctctgcttttccgttgaccctttgactttctcgttccctctcgctcaggttgagctcgacgattgcttgtctcgttgctggcgtttcttgttcgccttttctttggaaagctagtttctagtattaaaacagggagtgcaacagaaggtgctgcttgcagctatttttccaaatggaaagcccaatcgaatatgttctcctcgttgaagttttcgggtcgtttgatttgtggcgattaggcatcgtcatgatgagttctccgggtaatcattgaaatctgacctaacccgaacctaagtattcaagtctctactcaataaagagagggttaattgcgaatggtactcaataagctgtgaagaggaagaacggctgcatacaagaatgatcaagcatcatcgagaattttagtactctgtctctgttttaaagagaacggccttactttgaattcaaagaatatgttcctccattcgtctcttttggccgtggcttcctatggattttgatcttattttgaagaaaacatcgtagcttctgattacttgtttcttcttgctataccggcttacttgatttgcatacagtctgaattgtacaatgtagtttgcattctgtttctaaatgccccacgtatctgggtaactttttggatgcccatcgcccatcttaattaaatttattacttaattgggaaaacctcagaagctaatataatgttaagcatagagatttctacaactaccctcatggtttacttcacgaatgcgctccgcggttgctagttttcttgtgctggatgcgagcatctccagcatgttgagttgtgctatgccaattcttatcaggtttgaaacctgttgttgacgtttgcttgatgttctttgaaaggttgacccgg

SEQ ID NO: 92765 - DNA, 773 bp, Eucalyptus grandis
  Intron number 1 from transcript Egrandis_v1_0.009174m (loc us Egrandis_v1_0.009174m.g) derived from phytozome v7.0 (c hr-ID scaffold_3; pos 70753951 to 70754723)
tctgtagccctctcgccgtcttcgttcagatccaggtgcgctctcgtttcccggtcgttcccccggggttttggatctggttcgcgtagtctacgtcggttttgattggaggagggagcgatgcgggaatttaggtagccaaatgaacgagattacggattttttattttttgtgttttgtttcctttttatgtcgtgaggtttttaattttggttttttgagctctagatgcgtggagtcgaatcgtcagctcgcgttttgtttgggaatcgcgatggtttgaattcgagttcaatctggcgtgtcgatggaatgagattattgattttaattggttttctgagttctaggagcgtggtgtcaaatcgtccagctctggctttgtttgggaattgcgatggtttgaatttagtttaggaaattcaggcgtgtgttgattgggtactgctttccgataattcttgaatatgtgcgatggtcggttaggctcgtaactgatcgagaacttgatctgaagctctttgcaagtgcagattcgaggacattaccgttagttttggattgcatgcaattcttttgtggagaagactcattccgtaaatattgtcgctgtccttaatatgtctaggccctttacctcgatatatctaaccccattctctatcctgctcatcaatgaaggaaaaaagcgtgtttgcttttttggactgagctattatctattaccttggataacattaagccatttttttctattttttttattgtaggg

SEQ ID NO: 92766 - DNA, 895 bp, Eucalyptus grandis
  Intron number 1 from transcript Egrandis_v1_0.002691m (loc us Egrandis_v1_0.002691m.g) derived from phytozome v7.0 (c hr-ID scaffold_3; pos 26272805 to 26273699)
gcccagcggtctccgtcgccgtcgcagccttccgggtgagtccttcccccggtccgatcctcgcccccggtcccgcgctcgattcggcttctcggaaaaggaaatcgcttcggcttcgtagtgcctccgctgcgatctcgagtgattgtcgcggtttcggtcgtccttagtgcaattcgatgtcgcgttcttcatcgctattagcggatgatgcctaggagcgatactggcccggcgtaatgtgttttcctggagttgatcgagaaaatctagtttggcaattttagtttagtgttccacttgttgtcgattgcggttgccttcatcatcgagccctcttctctgattgttctgatgcatatgcatttactcggcattgcgtttcttgcatggagatggaagaacatgcttaaaatcctgattttgatatgcatgaccataatctggatgattgtggtgcgtttcatgtttctgttaatttctggagctccagaagagaattgccgatttagcgagtaaaatttttcctagctcggtaattccatcttctccgatgtttcactttctatgaatgggaggagttagtagtcccaaatggtctgttcggtgagtaaaggtgaaaaagaaaatctaatggcttgtttggtgtgattggtttttttgctttagctatcggttttgacttaatcatttagccctctcaaacacagaccctaaataagtattttagtcacttgacgagaaggaagttttattgggtttttgcattatttaatggtcatgttgaggatggttttgtttcaacaagtatttaggatttgaggacttctttttctaactgtaaatccaaatgctggcagaaaaggtgaagtttcggatctaaaagcacaactcc

SEQ ID NO: 92767 - DNA, 682 bp, Eucalyptus grandis
  Intron number 1 from transcript Egrandis_v1_0.003448m (loc us Egrandis_v1_0.003448m.g) derived from phytozome v7.0 (c hr-ID scaffold_3; pos 29192258 to 29192939)
cctccacctcatcccctctccactgcgactgccaggtctctctctctctctctatctctctctctctaggatgcttgggcggtttgtgtgaatctctgcgggcgtggcttggtcacgcgtgcatgcgggtctacgtgggaggaaacggcgtgcattttggtgggctttggatgttatgcgcgatggattcctctttgcgtgttttgatgcttaggtagcgtctctattcgtgtgattccgacatgggttggtgttcttctcggagctaatagaggaaagagaaagctttcgtgttgtaggattgcggtctgtttgtgggctcgtctctttacatttgatacccggagagagattgaggttcttggcaagtttgttttcggtcgatagtatagtcataggtgacgggcttgtcgaaggcgaaagttatcttgttcatgtcggttgttgaggagacctattgcgcgagaaatgacgagggaaacttcatttggcgtgttaggttaggaaagttttgaaatttctgtatgagacggcgctttgccccttacacgggagtaaatgaccgtttaaactatggtaatggacatattcggttgttccagtccctgctgtaatgactatgttggaggattgagcttctagatctattttctgatcgtctgctttgctgtgttccagtgct

SEQ ID NO: 92768 - DNA, 1055 bp, Eucalyptus grandis
  Intron number 1 from transcript Egrandis_v1_0.019277m (loc us Egrandis_v1_0.019277m.g) derived from phytozome v7.0 (c hr-ID scaffold_17; pos 493834 to 494888)
ccctcccctcgtcctcggcgattccggcgactcgggtgggttaccgatggggcgatttgcatcccgtctcgtgtctgtgcagatcgataatttactttcgcgttcatcgaccggcttgtcgcggcgaactgcttgctctttagcttcatgctgtgattgaaattctttacttagctctgccgattcttggatgtcaatcgcgagttacgcgaaatccatttgcgggaatgtgtagttgggaaatccgtagtgcgaaatcgaagttcgattctatgctctcgtttaggaaaaggaaatgcgaaaatggaaaatttgtaatgtttttacttcagttcagtttgatggcattgaagcagttcatatgatttcctgtgctttatttgggaaaatagtagcaatgtgtttgcatagtagcaatgtgtttccttaggctttattctgctacaatttggtgtagatgttttgaaatggaattagagaatcctactccaaaggtttagagttgttgctgttttgggtgtggtgatgcttgagtgaattttcagctctagatcatagtcatgtcgcttgtcctatgtttattagctttagaagaaggctagatttgaatccagtatgtgggtttagcttatttttattcagttctggccactcttgaagagataattggagcagattttaaggctgattcgatccatgtatttctcatttcggggatgttcttgtcatagaaaatgatcactccttgatacctgtctgactgtgcagcttagctttgtcaatttacgttctgtgaaatggttattgttgtatgatatgtgctcaacctacttaattgataaatgtggttaagatggagtcaaatttatctttatttctcatggtttgaatacttaggatgcacctacattgtcaatactagaacaagttttgtcagaattcctggccaattgcatcgtgaattcaatcaaatgagtgcacagaatccaatattgacagcttacagttttctgctgttagggtgcactgaagctgtgcctgagctccaccttgct

SEQ ID NO: 92769 - DNA, 897 bp, Eucalyptus grandis
  Intron number 1 from transcript Egrandis_v1_0.044483m (loc us Egrandis_v1_0.044483m.g) derived from phytozome v7.0 (c hr-ID scaffold_3; pos 8990107 to 8991003 reverse strand)
ccttatagtcccgcgaagttcctgtacaggtctgtggatgtggaggaaattactcttctatgaaattttttggataaatgtggatgcttgatggtttcttattggtttttggaagcacatggaggttggaaattgtccaagaggctctgtaaattttgctgttgtgacctagtggctgtgaagatatgaaagttgtttgatcagtgcatgttctgctttattgtttgtatgatggacattacctaatttacaattgcgctttgacctccttcgtatcatagcttagctgcttcatcttttttaattttattttatttcattatcattttttatttttggcaaatggaaattggaaaatgtcagagagtgcccctttgcacttgtgatggtttgaagagtaaaaaaatcacaaccatcttggttgagatgcgttgaatagctgagatcaattgcatttcaatccaatgataaacgattgctaaggcaccatgcgtttgccccttatcagatgtgctctcaaaatttcaaatttaccattggacgtattgccttggttaaaatgtgaatttctttcattatttaagtgtcttggaaagcattatttctgattttgctaaattaacgagtgcccttggggcatttgttaacaaggcctttggaaattatcttctttgattgagtacttttgtctactggcttttctgaaaatggctgtggacataataaatagacatcttttccttattctaatgatgcatgcttttgtcaagctccttttgaacatcaatgttggactgagactttcttaactgttctatctaattgacttagaaggaaatgtgctttatactttctttctttttttattgatttggttatcccacagttggtggcaac

SEQ ID NO: 92770 - DNA, 685 bp, Eucalyptus grandis
  Intron number 4 from transcript Egrandis_v1_0.005058m (loc us Egrandis_v1_0.005058m.g) derived from phytozome v7.0 (c hr-ID scaffold_3; pos 12362213 to 12362897)
gatacgttgttgccagaatagttattgtgagcgatgtaagttttttattcatgttttttctgtgaagtttatttagtagtaacccattatttaaaattctccgaagatcggcaaacatctactcagatgagctattgggataggggagtctttctaatcaccagaagggatctcattatgttgggttgaagcatttgtcgtatggtcttcactactgaggagttgggatttggtataagaagattaagttctccagcaagccaaattatgtaaaatgtattgatctcctagctgtcctagggaattgagtttgaacttcccatacttttgcacatgcctaaatgtccatggtattcatactcagcggccatcacatggaatttctcatcaaactgcacaccactacaaagatgtgaagtgcatccttatgaacctgaagtgaagctagcatgttctgttctttgattttcatttgtgtatcaagtacatctcagttcttctccttgaatgtttatatcactggctttctgtggggccaaatgaacaaaattaaaaaaaggcacatatgtgtttttgtcttgcttttcacgaccaatgatttggcaggaccttttaatttttttgtactgttactctgacaacatcggtttgtttatttggtgcataggtatttgtccagtgctaa

SEQ ID NO: 92771 - DNA, 934 bp, Eucalyptus grandis
  Intron number 1 from transcript Egrandis_v1_0.046755m (loc us Egrandis_v1_0.046755m.g) derived from phytozome v7.0 (c hr-ID scaffold_5; pos 43441580 to 43442513 reverse strand)
tgcccacaaagaagcgaggcgtgcttgctgttcaggtattgatattagatacaacctcactatatatcatttatccatctaagatcatattactgtataagcaatcgcacccattttcatctttgtttcacctaaatctatagtgtttttcttaaatcttttatttatgcataactagcgtcgaacaaaatagtgcatcttctgcatgtagtctattagtcgaattttccaactttacttagaacggttcactaaattgatttttcatcgatattgaagtgttttcaataggcattgaatataaactaattgtttacatcactcagtgtgcaaatttgactgatcgatttggataccctctaccattgttcaaaaagaagaataatgcttggactttgatcacgcctaatagcataatctatgattaaggctttgtttgtttcatgaaaaatattttccagcgtttagttcttttaagaaaatgagttaatggaaaactatgcttaaatctgactcaaaaaaaaaaaaatcagacaagaaattcaggaaaatgattttgtctttgaaagatcataaaacatttttcaaaatatgatttggtattggtgtgggtcttcggtacacgggcttgagttcttgtttatgaaacgttcattcttataaaaatatttaaaaatttgaattttcaattaattttttttattttgcttctttttggccaattgtgggccacaccaacaatcatcgaatggccataagctagcttgagtctcaccaaaggtcggtgagacttgagcttgagctcaccaaattctggggagctccagtcttgtggaaatttggcaagtcttgagcttgctagacacctcaatgaccactaaaaagtctctagctcatcgaaatctagcaagcttgagcctcaccaatcgtcacc

SEQ ID NO: 92772 - DNA, 511 bp, Eucalyptus grandis
  Intron number 1 from transcript Egrandis_v1_0.019729m (loc us Egrandis_v1_0.019733m.g) derived from phytozome v7.0 (c hr-ID scaffold_5; pos 2766685 to 2767195 reverse strand)
tcgcacgccggagctctcgaaggaggtaatttgaggtgggcacggcatttcggtcatcgggcccgaacgggtagagattggcagccttctttttagtgtcatcttgagccttttcgatttggtgggcggatgcaatgtcttgcggatgcgtcttattctctgctgcttctcgaaaagtttcgaactttggcacttcaatcgatcagttctttgatgggtttttttttctttttattttgcttattaatgatggagagctctgtgttgaggtaggtgaagatgatacttttttcttcttctttttcagatttttctggggttgttttcttgagtattttgcctatgatcggacaaagtttcatcctcaataggtcagcaaaaaatcggctgttcaggattgcctatgaactatgaagttgccatgtttatgtcagacatgtctttatgggttggtgtttggtattttgaattgacagggtctcttcggctcccacaatttcgagtttgtcga

SEQ ID NO: 92773 - DNA, 583 bp, Eucalyptus grandis
  Intron number 1 from transcript Egrandis_v1_0.042084m (loc us Egrandis_v1_0.042084m.g) derived from phytozome v7.0 (c hr-ID scaffold_5; pos 62941083 to 62941665)
acttttaaggcaagaaggttatcgtgtgcttgcaggtttgttcctatgagtttcaagtcgattgcaatagcgaaatacagtgttgctatttatacataacaaaagaagacaactttttttgtttttgttttgtctagttacgtggaagccctaaaatttccaatatcttgttaaggatgaaaatggacaagaatataagctgaattttttttttttataaatattttgctgatttaagaattggaaatgtttaattgtgatgaactctccaacggatatccatcaatgcattagtgttctggagttttgttcaaaatggtaagtaagaactaattattcatactacaaaaactggattgaaaaaacctagatatatgcccatttccttcacttgttctcttttttagtttctctacattaaaaaattaaaaatttacatgagatgaaatagttttaaccaatttaggattttttttcaaaaccaaagtatgcatatcataattttgaatgagtgaaacgacttatagattagatatcagactatgctttttgatgtattagagtccttgtgctttttatgcag

SEQ ID NO: 92774 - DNA, 985 bp, Eucalyptus grandis
  Intron number 1 from transcript Egrandis_v1_0.026375m (loc us Egrandis_v1_0.026375m.g) derived from phytozome v7.0 (c hr-ID scaffold_3; pos 13516007 to 13516991 reverse strand)
agtctcttcggccttggaagcaggttcccttttttccacctccatctttctcccttcgggaattctcgttgatgggcttctggccgacgtgatttcttgggtcgggtcggccgcggctgctgttcttggcgttgcatgtgctttttttcgcgtttgcgatcgtgggttttggatgtcgtgcctcggagagcctgaattggtgggcaacgggattcgttgtcgacctgtctgcgtgcttggatggtgatgggatggaatgatcgcggaaagacgtcggctttttcttgtttttttatgtcgtttcgtttctagagattcgtcgtgaggctgcggatgacgatgctgcgtagtttgtgtcggtaattcggactttcgcgatggtttttaattctctcttccggtttcggaacattcgacggcatttaatgccagggccggtccgcttcagaaaccggaaactctgcgaccaaacattgatctgatcttgaaccatacagagcagccaattagttaggaaatgaacgcggtttggtgatctttgaattgtttattgtttgccgatatggtggattctttttccctggtttgcgactgaacgttggtctgatgttaaaccatacgacgagcgcaagtagatcagaaaaatggacccatctggatgaactttgaactcgctattatttgccgtgacgctcgatttttctccctcgttttaagttctatagccttaaagaagctgttacagaacccgtttaagtcggttgcatcatcctgtggtcacagaatgtccttgcagatgatgatttttgtcattgaaagaagaagagaaacaggacatgggaactaattaaattcgattctcgttgctctttgaagtactcatctctggcatgccaccctttttcgctagtaataatcacatgtgtcatacccaatcacaacttgtgcagaaatcagaagacttttcggcctaaaaagagcgctc

SEQ ID NO: 92775 - DNA, 601 bp, Eucalyptus grandis
  Intron number 1 from transcript Egrandis_v1_0.029217m (loc us Egrandis_v1_0.029217m.g) derived from phytozome v7.0 (c hr-ID scaffold_5; pos 67358911 to 67359511 reverse strand)
ttgagctaagcgtcaggcagagcacaacagtagaggcaaatctcttgccctattttcttaatttatctgatacttcattacaaaacaagaaagggttttgtctgatgggatgcttgctccttagtgcttaaccccacgttctgtttctttttgtttctgaattattcacgtctcgttgtttgcgtgtggctctcttcattagaaaaaagacatcatcttttctgatgtcggtagatttaaagtagcaataggcttttcggtagttgcagtgctgtcttgttgacccaaaacagtcccgttgaagctctgcttgtcttccttcttcgtccacaccacaagaaggtaagtactctgtctaatgtgaaccaaattctgttttgtcaacttcattctgcacgaacttcttctgtgacgaggtcgaagaagaaataggttgtttgataatccccctttgttgttcttttttttttttaaaaaaatcaaatgaagttcatttaagaacatcttatggtccgttcttttcctggttcttgtttgtttcctcctagcttgtgtaggtggttctgtgttctgattggttttcttgtttcttgaagtggaa

SEQ ID NO: 92776 - DNA, 825 bp, Eucalyptus grandis
  Intron number 3 from transcript Egrandis_v1_0.026302m (loc us Egrandis_v1_0.026302m.g) derived from phytozome v7.0 (c hr-ID scaffold_3; pos 22003195 to 22004019 reverse strand)
ggagattgggtgctggccgaaaacgtgacctggaggtgcgtcctgtctcgtgttaccttgcacttagtaattacttaactatgcatatactagacctgatcaccgacccgacgactcatctgctgccctagtctccgacccgcaaacgacgggttcgggaaattgaaaatgggctcggctcgaacgagaaggtcggctcgacgttggggtctagctcttccttttgatcagatctagtctcgtgtatgcccgagcggctgattcaacacgttgcgaccaaaatctaggtcacggtttcttcgccgcatgtaaaagcgaccaacctaacaaattagggaaaactcatcaatatgcccatgtagacaagcaatttctctacacaggttggcgcaagctgaccaaaagcatttcacttttgtttttgtgggcttctagcatctgcttatttaggcccgattcaactgtcggggccacaaagttcacattgaatttgaccacattaaaggtggatataacagccaattgggaaatttcgtagaatcctaagttaaagaaccctactgtgtacatggcccacgaagaaaaagtcggtaacgaaattgatgtagtgaactagatgcatcatcatcattatcggggacctgctaaaaaaagcaccacggtcttcgaacttggacccacgttgtttgggcactgatcagtataggaatcggaagctaatgcacgatttgggcagacatctcacgatgaatgtgctgatttggggatggtttctttcatgattttgcaggtctttcgtgcggtctgcacagcgattgaaactgc

SEQ ID NO: 92777 - DNA, 901 bp, Eucalyptus grandis
  Intron number 1 from transcript Egrandis_v1_0.052311m (loc us Egrandis_v1_0.052311m.g) derived from phytozome v7.0 (c hr-ID scaffold_2467; pos 144 to 1044)
agcaaacaaggatcctgatcactttcgccttcgatgtgattccaagcgattctcttctgtccaagacaaatctcgaaaaatgtgaacagatttttcaaaatccgattgtataatgactagtagtgtacttattaagcttgtgaatagtaccaaataactaatttcataaattgagggattagattgaataaattaaaagtttatgaactgaattgaacatttaagaattattcaaggggcacatggaatgactaaaaatcaagggattgacattgtatagttagaataaatttttaaaaagtcctaacctattgtacggtagctaatttaattctaaaagttttaatttaaccaattcagccctaaatgatttgatgattttccattctcacatgtacacacactcaacactcgtctctcacctcactctcggtgccccttcctctcttaaatgtacatgctgatttaggaactaatcacccctactagagcgttcaaaattcaagaaagttcatctagcaaaaagccatttcgtgcctaatcaaccctcaaaagtcctctccatcaaaagatcggcccatgttctgttctttccttcggagcctggacggggcttgatgatctcatgaagctctcgtactgaacagaccactgcaattgcccgaattcaaagattatttcggaccaacgacctgaaatttaaggcgatcgatgcttagttaagtggaaaaaaaaccacgcatcagccgaaagagagaaaaaaaaaaagttccgacctttgaacggtctcggaacttcgtcttgcggatttcatatgcggacgaagctcgtagcggtcccgcgtcgtgctttctgcacccacgcagcgatctccggcacttcccacatcgcccgcctcgcg

SEQ ID NO: 92778 - DNA, 1029 bp, Eucalyptus grandis
  Intron number 1 from transcript Egrandis_v1_0.016309m (loc us Egrandis_v1_0.013089m.g) derived from phytozome v7.0 (c hr-ID scaffold_1; pos 16744366 to 16745394)
gaaccgcgggagtactatactggcggcgaaaaaaggtctctcttttatctgtctctgacattcgctttacttagacacactatcagctatgctggcggcggcggcggcggcggcggcggcttgcatctgtttcaataatttatgcgtggaatataggtacacgaaataagtgacccgcgagtagttgccccgtctctctggaattgagaagttgaggttgtttgtttctttgataattgcgatttaggcataattgaagatcgatctaaagctgtcgttgtttgatctgttagtgagtggtgagttgctagagtggaacttccgttcaatttttcctaatttggaactagcagcaaaagctaaattcatgctcagcgaatggcttccagcatctctccatggaatcctttggaagataaacacttgatctttctcataagattcttgtgatgagggtctgcattcgcttattcaacttacctcgtattttagcctttcaaattataccggtgtagttggtagagtagaagtaagctggacgttttgtcagcaccaggtgattttaatcattcttgtaactgttccttgagcagcggtagggaggatattagccggagagaagaatcctgcctgttcttctggtattgtgtgccagagcgagtgttatgtggttttgatgaattaagtctaagaccaaacttaagtaggtgattttgcaataagcagacaacctcttggtgtggtgtagcattggaaggcttttgaaaatgaaaccatgaactttttttttcaccgaactaatgtgtgggtgattttacgatgactggaaaacctccaccatttccatcttcctccttgaaaactcaaagggaagaagaaataatagaacatctgtcctgtattcagtgctgaaattttcactgggcaatgacagtattcatgcgatgttcctactagtattgtcatattagattttgtttgattagtgatttagtgctttcaaattttatgttcttctggagcagcgga

SEQ ID NO: 92779 - DNA, 717 bp, Eucalyptus grandis
  Intron number 1 from transcript Egrandis_v1_0.049505m (loc us Egrandis_v1_0.049505m.g) derived from phytozome v7.0 (c hr-ID scaffold_1110; pos 408 to 1124)
ccgatacacaggtgacaaacgccttcgacggtggcttccgctctgctaataaaagatgtttcaatttgacgccactatttttttgtgtttggactccaccagattctttaaaccgtcaataagatgctaatttgtcttaaaaagaccatgttaatcacaacaaataaaatttccgaattatgaacaagcgcaaattcttgagatgcaaaaatctagagatgcctatagtccatgacttcttatttttgtgtgattatcgtctctaattccgtttattcttgcatttgacttatcaaaagtatattttagggttatttttctagttcttttgtgcgcaatttaccttatgttttgattgcaaaaatttttacctgaatttgcacatgattttgatttccttgaacttattagtattataattgggaagtaatcactatactatatccgtgtcgttgggcttgggcaggtaccgtatgccttttcttgcaaaatcattgcttgagaattcaactaatcgcgtttccatgtctactcttttgtcgaacttgtggcaggcgaaagaggagttgagttcaatgccgaggaacaaaccgaccataagagccatgaaccgatcatccctaactataatcgcctgagttttttccaaattgtgtgatcatgcggaagattgatatggatctcctcttctttttcatggctttggttgatcaggca

SEQ ID NO: 92780 - DNA, 618 bp, Eucalyptus grandis
  Intron number 1 from transcript Egrandis_v1_0.026160m (loc us Egrandis_v1_0.026160m.g) derived from phytozome v7.0 (c hr-ID scaffold_1; pos 17755246 to 17755863)
ccgctattgagctgggcagagaactggtgcgattcttgattccttcttcttttttgggtttctttggattgtgtttcctagttgttctgcgatatgcatggacagggactttggcgattttggggagggggcttaatgctccgttccacgtagagttcgtatctagtgcggggtgcgtgcgtgccaattaaatgcttcccctttaccctccccttcctaggttgtctttgtcacggaagcgagctacattgaagcgagcaaaaacccacgttagaaaaaaagattgcgaccattccatctgttgcttctctttgaagttgccccactggaatcttcctgattctggggtatctctgtttgattcttcttcttaaacttggaacctcagtgttttactccatgcggccttggtacgcagtgaaatgagcgttttcttgaaaaaagatgagagaaaggggggagaaattttgtgcatgctcggaagatcatggaaggggatggtggtggtgattgccttttgaccctttgacgaatgatgatgatgttttttgtgtgtgcgcttttttttattttctctttttttgcccctgaaggtgtcgaggaacattgatctggtct

SEQ ID NO: 92781 - DNA, 787 bp, Eucalyptus grandis
  Intron number 3 from transcript Egrandis_v1_0.026160m (loc us Egrandis_v1_0.026160m.g) derived from phytozome v7.0 (c hr-ID scaffold_1; pos 17756131 to 17756917)
ccccgagaggtatgtctgctgtacccagtaaaaaaagtccttaacctttttcctaagtaaagaaataggtgaaaatggcaatggggtagcacctttttcctttgtttaatttcctgcttctgctcaacaaaagttgatttaacttaagtgagctcttagttctgtcttctcactttaccttttggtgattctggttggtacaaaatgttccattaggtgggtgatgctcgcaggccttatccacaaactttcctctttttctcctttttctaaattttttttcattttgggttctggcacaacaccactttatacaacagagtgtttgactattgaggtttgtcctggtctttacggtgctttctcctttgatcagcgtctctgctttttacttttattgtatttttgaagaccaaccaaatttccatttccttctctctttttttcgcttttcggtttttctctcttgactttatcgaacaattggaatttttttcttgtgtttgtcattattttcgtactaaaatttctggaaaggagactgctgagctgaagcatttggcttgtgcactctctgctctgcgcacctcatcattgctgcactccacaacactccaaaacccctctctctctctctctctctctctctctctctctctctcacacacacaaacacgttttcattttattttatattttttaggatcaattgtcaattgtattcattgacaccggtgccctttctcttgcagttaactggtgagacagtaggagaggttaaggcagt

SEQ ID NO: 92782 - DNA, 885 bp, Eucalyptus grandis
  Intron number 1 from transcript Egrandis_v1_0.010342m (loc us Egrandis_v1_0.010342m.g) derived from phytozome v7.0 (c hr-ID scaffold_3; pos 64758482 to 64759366 reverse strand)
acttctccagcttcatcaggcagctcaacacttacgtgagtacttcttcgaacggggttgtgttttttgtccttgtttttccttgaagctttccccataggtaagagcaaacgattcgtatcaatgtgtataatgtccgtgtatgtttattttggtttgactctgtttcagctctgttattttgatctggctctgttctggctctgtttctttttatgtcgtccagagtgtgatcctcttggggcatccagctactcttcattgtcccaatggatagtccccggggcaaagaggctagtatccaagggactccactcacgacgttttgctcatggcacatgtccaccagaatttgcatccagcggtcaggggacaatggcccattatcatattcaagtgatgatgcttttgatggtagtttgcagaaactaccacgtcaaccatgacgttagaatacccattaaagatttaccttttcacccgatttgtatttaagtgcttttctcaaatgataaattttaatttggattagaaatgcactactgtatttcctttatagctgttaatattttgccttttactgtttcgatgctcaattttgcactttctagctgaagatgagattccttgagccatcgttttgtttctatccgatgttttggtaaagccttctgacacttctttttgggaaagatcaaaagcttaattctgcacttttgtcttctcatatatgaagttcacggattgatattgagtcattaaattgtccataccctctgtgggacttctgtttcaatataaactcctcaacccagcttcctcctattcttcatgcatcatgatccaagatatgtcacagggttttaggaagattgatactgatcg

SEQ ID NO: 92783 - DNA, 969 bp, Eucalyptus grandis
  Intron number 2 from transcript Egrandis_v1_0.030455m (loc us Egrandis_v1_0.030455m.g) derived from phytozome v7.0 (c hr-ID scaffold_5; pos 51559637 to 51560605)
caggtcccgctggagctcgagaccgttacaggttcgtccccgttctctctggctttctcctcatattgtcgctcatgtccttgtctcctttgtgatctttttggctggctatgttttttttttcctttgactcgctcgtcttgtgccgtcgtggccggagtatatcgtgtagtttcagtggcggataaatgcatactttgggcttcttcctggcaccctccttttagagatatggtttaaagtggctctgggatttcaatggatgctgactgtttttcatatgatagttacacataagcttctgattagaaagtgactgacttgtgttgaattagttactggaagtttttttcttcatgttttttctaatcataattttctttagttgatgagcaccttttcttcaattagaacaacatagtgctgttgaatcctcaagtgaattccagttacctggaaaattgaatctcatttaaatgtctgtataatgtagttctgtcaaattggaaactttcttttgatggtattgattctgaagtcaaaccattgtgctaataacttacggtctatgaaaaaatgactgaataacttgagtgccacgggtattaactggataagaaaaatatcatgcgcactaaaacatgtaattttcagcgatattcatcaagaacaacaacttctgtgtctgccttaatcctctcaatgtgagctgcagtcaggttaatcctcaaacttcatcaccactccagttgttcccactctggaactccaactcggaagcattgacccaagttccactactgtgttgtgagaaatagacctcccacagctcaccagtgaaattgctgattgggatccggaagtaattattgcttttaaatcttgcatggaagcttttgtttaaaccatttatgcactggtcgcaattttccaatgaaagtggggcttcctgtttctttgattcaggat

SEQ ID NO: 92784 - DNA, 620 bp, Eucalyptus grandis
  Intron number 3 from transcript Egrandis_v1_0.037981m (loc us Egrandis_v1_0.037981m.g) derived from phytozome v7.0 (c hr-ID scaffold_118; pos 528 to 1147)
ttgttctagtgcctactgctgagttagctttacaggttagtagttggtgtcctttcctgtgcctattcctttacccttacatgctttggcaagcaactcatcaacttttactagtttatggccaatttaagctctcatcctatgctgtaataggctattgcttaagaagcaaatctgtggtaaaaaagcactccaactcattttcggtggcagtcaacctgtttttaactactttccgcctataatactcaaattgtcatttcttctttcaaaaaaggaataaaaagaaaaagaaaaagagattcctaagtgttgcaatctgaaagatcgtattgggttcctggaaaggtatatatacaattgaagtggcaaagttgcttaatgatgtgcataatttactcacgaggcaaaactggtaatctccttggagctgttgaaaatggaggtattctgaatttggagatactctatagtggcttttatgtacagcaatgcttgttttcgctagtagtggatgacaaacataacataaattttttgcgcccacatgagtgatacttaatatctggggtgagttttatgcaggttttgagtaactgccgatctatatcaaaggttgg

SEQ ID NO: 92785 - DNA, 476 bp, Eucalyptus grandis
  Intron number 1 from transcript Egrandis_v1_0.051583m (loc us Egrandis_v1_0.051583m.g) derived from phytozome v7.0 (c hr-ID scaffold_5; pos 29386198 to 29386673 reverse strand)
ccttggtaataattatcatcttcttttcaattcttttcccattttataatttagataaaatttgcattttcaccttattgacctgaatcatcaggttattcacgagtattggatgcaaaatatctcgattaaactcacatatttcaactcgacatgataatggcatgccatgcgagaatggatgatccttataaatgaataatagtttgaatttaattgatttccttcacccattagctagaggaataagatttccggcttaaacaaaaaaacatagttgtaatccatagcactatttacatgattaaatacttcttttcaaagtgaataaattaaatttttttctcgaacttatcccatgctcagagcttgtataaaaaaaagtagacataatagagaactctttttttcctctttaccttaactcattttgtttcgtgcacgcaattcctgattaatgatgtgcaaaatgcagc

SEQ ID NO: 92786 - DNA, 623 bp, Eucalyptus grandis
  Intron number 1 from transcript Egrandis_v1_0.009433m (loc us Egrandis_v1_0.009433m.g) derived from phytozome v7.0 (c hr-ID scaffold_1; pos 9670992 to 9671614)
attgtaagtttcgttggagattgatgtcgtgttgagatagaatgattgtttgatcatcgtcaagattggaatttttggttgcttgtgttgttgcacaggatgtgtttgtagaatttccggtgtaagaaatatctgtccttgtgatatagaggaagatttattttcggttaatttgattttcagtcagcttgatgaatgtgtaatctctgtattctgtgtttcttcattcctgctaatgctgtttggtacattcgaatgagaatatgtaggcttgtttgctcaaaatgtgcattttgtgtggggtttaaccaatgtatccatgtttcgattgccgtagtatttgtggtttaatcaacagattgcgttttgtgtggggtaattgcaagtgtgcctgccgatttttattaaaagcatgaacagattgttatggggaagatggtggatctttatttgtttatctgaatgtgttctcatagattggttgttggcatgataaggtaattgcaagtatgcatgccaattttaatgaaaagcattaacagattgttatggggtagatggtggatctttatttgtttatccgattgtgttctcatagattggttgttggtatgacagttatc

SEQ ID NO: 92787 - DNA, 686 bp, Eucalyptus grandis
  Intron number 1 from transcript Egrandis_v1_0.039988m (loc us Egrandis_v1_0.039988m.g) derived from phytozome v7.0 (c hr-ID scaffold_3; pos 7015823 to 7016508 reverse strand)
tcaattgttctcgtaaagaagaaatggaatgccttgttttttctttgatagaaaggagacaagaaaatgagagcaatttctttctgccaaccatcccaatggttatcttcaaaagatttttatacgactctctcataccttgtcaaagggtgtctttccatcatgacttaccaagatgaaacggtgcgttttgattgcaatccaccatggacgtattagtaaaatactacacaacaaattaaaatgaaattggcacattatatagaaattggcaaattttatggtatatgacctaaatttccttttaagttactcttatcgtccgaaaaaactcccgaacaggaacactatagaacattagttccccacatacgtaaggtccacaatcgtgcatgtcataaggaaagaggaaaattgggaaataatcttatatagaaattgcaacaaataaggaaaaccaaaaggagggaaaaaaaatcctccttctccataaaaccccgagacaagtccctctccctctcgctacttggaaacacaacaactcagaaagagaggaatggtgaagaaagtgatggagggtgtgaagggactctttcttctagtcttgctgatttctccttctatgttcacgtgtgtgctatgcacatggggattgaactttggactcaattccttttaccagctcg

SEQ ID NO: 92788 - DNA, 888 bp, Eucalyptus grandis
  Intron number 3 from transcript Egrandis_v1_0.002570m (loc us Egrandis_v1_0.002570m.g) derived from phytozome v7.0 (c hr-ID scaffold_3; pos 22178188 to 22179075)
ttgggtcactttcaacgacttttgaggctattcaggtaaagtttcttggggcaattcatcttcacaggggaagttctattgtggattgtatgaaatccaccatcatgtttgttctactcaactggtatgctttaatgataaactgaaactcaattacttctgtagttccttctcctaagaaaaatggtttcgccaaccatcaccagcaaaaagaaaaagggcctcaacagacagagccatctcaaattgtctcttagtcaactactttttttttcccagccaaatggtcaactactctttttgccacctatattgggctctgaagttattcttatttctaagcacagtatgagtgacttaggcattttcaattatttcctagttgctccttctatctctcttgcattttaaagggaatgaaaagaacgttgagctgaaacacacttcagcttaaattgttgccacgtggtgagaagtggtcaaaactctttttcactgatattggttctaaacaagtagagcatttgaattttttatgcaccttttgtgactccattgatgtgtgcacactgatagcgctgcatttctcacacttctcagcatgataaacactaatgattgaagtaaatgttgctgtacctaataaacaactagatatataaccgacatagcatagctcattgcagtttggttttgagatcgtaatgcatatatttcattgaaaataaataaattgtacaaccagttttcctaattaactaaatcaaacaatgtatttatgagaacatcatttctttcatgctaataagtttgaagttcctttataagacgccagatttatgctatactgatgttacaaataatttgcattctctctttcaggctgta

SEQ ID NO: 92789 - DNA, 810 bp, Eucalyptus grandis
  Intron number 1 from transcript Egrandis_v1_0.026640m (loc us Egrandis_v1_0.026640m.g) derived from phytozome v7.0 (c hr-ID scaffold_1659; pos 2436 to 3245)
tgttgcctacctcaagtccaccaagaaaccaaaaggtttgatctttttcccgtttctccgggccggaatttatcttcaagagattgagcgttcgttgaaccgtgagtatgatcgttattgcaatttgtggataagattagaatgccagttagtaaggatcagaagagtgagaggtggtggtgttgttgtggcatttgtcaatttcgtatggcatgatggcctgatagctcctcaagtttgactacgaatgtcgatctgatgctttctttcatttgggtttgtgcctccggtcagagctggtcatgtcgatccaggaagcaatatcttgttgttggtttttctgtatttaacttggtcatttagtggcactccttgcatttagcttttcgggtgcttcactcgttttattctcgcgaattctactgggaagaaggaatgagagactacacatggaaagaaaattgtatcctgctcggtgaaaacatgagactcctacgtgatttcaatttggaggggctaaccccaactactaaatccagcaaatattctatcgaatgtggtgtgtgtaatttgtaatgtgaaagtattgcagttgtcaagttcctttacttatcgaaactgtactctagatttgtctacgaagctgaatctgagtagcctgtgcttaggttcctgctctccttattaatttactgtgccgagatctagcattataatgtaatgtttcatctcctgggctgttgtgtttcaattttgttcgtacatgcttgctctggatgaacttgaattacttgcgtgtgtgttcgtagg

SEQ ID NO: 92790 - DNA, 743 bp, Eucalyptus grandis
  Intron number 2 from transcript Egrandis_v1_0.031853m (loc us Egrandis_v1_0.031820m.g) derived from phytozome v7.0 (c hr-ID scaffold_1; pos 11448956 to 11449698)
gaaaggtgagtccttgaatgtcatatttttacatcaaggtcaatcttttgaggaagctgaaattgcagcggatctagtaattatctagctttgaaaacttcatgagatagaggaggcagtttctaaaattgaatcttgttattgaatctaaataatagacactattttcatctaatagctaaagatttttgataaattgacaaaggccttaagaaatcaatatgggattagaacaggaggtactcatttccaatctctcaggcagtttatttgcttgttcaacataatgatcttccacccttcaatttgtggtaaaatgctagcctatgtgtgatggaaaatttagagcatttatataccaaattactccatctgactgggtagcttcaacttctggttttgttggcaggttgccataattctacaaatcattcttaaggagcatctagtttcttttcttttccaggtcaacaatctgtatgtgttagtgtgcagaatgttagttacaaggaaacactaataatgttttgcgaaggagattagcgatacaggggactaattggcttcctttatagtatcataaccatgtctttgagatgagattagatgctctttagaagtctctgagcaattgcaagaatagttttttttccatgaaattcttttacttcatcaacagatcatggtaacaatagcagatctctctctcatttgttgtgaattatgttttgatgctgccagaa

SEQ ID NO: 92791 - DNA, 907 bp, Eucalyptus grandis
  Intron number 1 from transcript Egrandis_v1_0.050739m (loc us Egrandis_v1_0.050739m.g) derived from phytozome v7.0 (c hr-ID scaffold_5; pos 1693656 to 1694562)
gatcaagggggagtgttggaaatgatgatccattttctagaattttctagagttgctaaacttctagaattccctagatgtttttggaagaaagagaaaaatgtagaagcacatgtatagatctctctagaagaagagaggataaactaaaatctagaactctccagattaagctaaagtggacaacattatacagctaaagtggacaacattctacataaatctagaatgttggtagagcaccctataaataggaaagagggtgagaggagcatgagaatatattccatatcatgaagctcctccaccaatacttcctccaactattgtaaaactattttatcaaactaatgaaactatttcccatatcccatgttctttatccttcaattatcctaatttatcccttatccatcctctacaaaatataccatacacttgcacacgtcactaaccaaaaactatcatccataactaaaatcatgcttccgcgcacattcattatttttaacaataacctacccacataatagtaacatcaatttgttggtagttggcattgcatacctgaatacagaagcaactctactatctatgtatattaaagtttgattcagcttaggctttgagctcaggagaccattctgtaagaaaagcacatgtttgcaagactagcttttcaatcagcttgattgatgtgggtagatttattctagacagaagctcagcccctctcgccgtaaataaaatctggtgagtttctgctaggatgattagccttttgcttctaagtttctagaggaggcattgtcaatggtgctgataaaagcttggcatctagtggtgcagtttttgcttttaaatcagaaaaactaatgattttctcacttttggagttcttgcagga

SEQ ID NO: 92792 - DNA, 310 bp, Eucalyptus grandis
  Intron number 1 from transcript Egrandis_v1_0.042543m (loc us Egrandis_v1_0.042543m.g) derived from phytozome v7.0 (c hr-ID scaffold_3; pos 4813936 to 4814245)
tatagacaagccacagccacactttcatttcacccgttgccttcttgtggaggtactgaactgttctgttggactctctccccccactttccccttttcaattttgacttttgaaggaagtcttacaaaacttcgttgggattgaagagtttctctttgatattcttggcatctctcattgggtaagtttccctcggaagttagattattgaattcatatcaaataatatgtttgtgcttttcacctcgaagtccgcatgattcatgagaatgaatttttgcagggtagcaatcagtcaaaacatttact

SEQ ID NO: 92793 - DNA, 378 bp, Eucalyptus grandis
  Intron number 2 from transcript Egrandis_v1_0.042543m (loc us Egrandis_v1_0.042543m.g) derived from phytozome v7.0 (c hr-ID scaffold_3; pos 4814323 to 4814700)
gcgtctgctattgggtaagtacacacaattgtgttccgattattcttgaggaatccaaataagctgactatcgaaaataattgccctcctcagtctccgtaagtcaaaactaattgtacgccaatgacctgaattaagctaatgaagaaaaacaaatgttttcttgggcttgaagacttcgaatcagtggccaatatctaaaaaatgatcacacgtgtcatagaagtacttcgaaactcaaatgtggttaatgggagcataggttctgttgtaggaaatctaataactgacattcccattctatgttgctttaaaacttgacaatggagaaggttaatggaagaagtctaagaaaaattgccaagatattgggcacga

SEQ ID NO: 92794 - DNA, 427 bp, Eucalyptus grandis
  Intron number 1 from transcript Egrandis_v1_0.031520m (loc us Egrandis_v1_0.031520m.g) derived from phytozome v7.0 (c hr-ID scaffold_5; pos 52596499 to 52596925 reverse strand)
agaggcctgcgaaaattgctggacttaagttaaaggtgattgctttcagcatcatcagtttcccttctaatttaagattatgaaattatcatgttacattttaggagaactttgagtagacttgtttcaaagatcttacaatatgactaccttttcttggtaaaaactgatcaaagtagttattctcagaagagcaacccttatttaatgtctcctaaaatgaatattttttttatttaaacaaatggaactttggtttattttaacatggtgccaatcagatctggtttccccatctccgtatgctcttaaggaacagtcaatgaatagaataggctcctgctttcagcttacagtcttcatgatgaaaagagtgacaattctatttgcagggagccattgcaagtggaaaccttgcagacattgt

SEQ ID NO: 92795 - DNA, 718 bp, Eucalyptus grandis
  Intron number 2 from transcript Egrandis_v1_0.010536m (loc us Egrandis_v1_0.010536m.g) derived from phytozome v7.0 (c hr-ID scaffold_5; pos 56236803 to 56237520 reverse strand)
tcattcgagaagttcttggtaagcattgtcttgggtaatgccatacaagtaatcttcagttgccttcaaactttaataatttatcatttcctttcttgatatacctaatagctcatatgtaacttacattgagttgaggaaaatgggaagagaactaggaaacaagcacataggtttatttgattagatgtcgatggagagattggtaaaatttcacttgtgctgctattgtcatggaatgaattccagcttgagctttcagtggtctgttggaagaagcctttgcgtgactaatactggagcaaaacctctgtaactaggtgacatgatgcagctgcagcttagtctcttaagtgtcagaagtttcctaatgaaatagcaaaaatagagatgcgtgaggaatatagtttgacctttgccatataagttcaaaatggaattatgcttcatcaatggtagcatcaacatgctacctcctggctctctctcttttttttttctcctttccttccctcaattgagctcccagttgtgcaaactttaaaataattattagcttgagtaaggaagttttagtttacaaaggaatagtgagacactcctctatttagaaattagcgtttatggtgacttagtttgattatgagtttgcctttgtgaactcttagattgtgtactgacaaaccttgccttggatgcaggtaattgtggatataat

SEQ ID NO: 92796 - DNA, 544 bp, Eucalyptus grandis
  Intron number 2 from transcript Egrandis_v1_0.007749m (loc us Egrandis_v1_0.007749m.g) derived from phytozome v7.0 (c hr-ID scaffold_5; pos 44393905 to 44394448)
ttggtttgtcacggaagccatttgtgcttatacaggtttttctcattacaaactacctttatatctctttttccgatacacatgtcatttgatatgatctcatcgagaaatagatatttacatctttggcttatacgtagtttaacccatagctttacatgctgcttccatacttgacctcgacaagctcttcctattgccctttgtaaatatacaatattcagatgaagatcttctatgtgataaagaactgatccactctgcatctaaatgtccctgaaaattattatgtccagagtcctaatatgacaatcttttccttgaagggatatttcaaaaactatgaactatggaatcctaatgattttctcatggagaatctataaactgactgactctagtctagctaccttgcatttttgtttattgttaactgtcctttactgctagtgggaaaaacagtgtctctataacacttctcatgggaggacttgtacatttttctctagggtccccctggaacagggaaaactcagactatcct

SEQ ID NO: 92797 - DNA, 936 bp, Eucalyptus grandis
  Intron number 2 from transcript Egrandis_v1_0.044733m (loc us Egrandis_v1_0.044733m.g) derived from phytozome v7.0 (c hr-ID scaffold_2599; pos 1246 to 2181)
ggctccgtgtttgggtgtacaggtaaatagaaatgaaaaaaaaaaattgattttgttgcgcaccgtccatgttagaagtgaaggatctgtgatgagaataaaatcaggtagaaactagttacggttgggtcattgacgacttttggcaatcctttcgagctaattcactaaaaattcccaaattttaaatttagtcacaattctgatctaagcttttttttttttttttttttagtaaaaacctcaaactttacatctagttccaaatctgcctcaaacttcttcttttttaccttagaaaaaccctaaatttaagtttagtcctaaatttgctccatacttttcttttttcttagaaaaaaacctcaaactttaggtcgaatcccaaatatattccatttttttgttagaaagaaaatcatcaatttttactctaatcctaaatttgtccccattaacctctatccaatagatcaaaaagtccaaaagtcattgttaattatctataatttttatatcctagaatgtttatttgaagataagtttccatgttgccttgccaatgtatatatattgctgatgtggaaatgccatgttaccacaaggaagatttgaaaatagattaaaagttggtaattttttttttttttgataaaacaaaatttggggcatagttgagactagatctaaagtttatgttttttttataataagaaaaacaaaagaaagattagggaaaatttaagactgaacctaagtttgagggtttttcgaaacgaaaacttaagttcagagtaaatttgggactagagttaaaagtttggggttttaagagaattggcttcgatccattggggttgattgaagtgggggtatgactgacgaatgactgaaaatgcagtggggacaccgacggaagagtgccggtgacttcga

SEQ ID NO: 92798 - DNA, 869 bp, Eucalyptus grandis
  Intron number 2 from transcript Egrandis_v1_0.030221m (loc us Egrandis_v1_0.030221m.g) derived from phytozome v7.0 (c hr-ID scaffold_2647; pos 3811 to 4679)
ccatcgctcgctttcaggtttgtcttcaaacagttgaggttaattgttttgatgttatcgtattgggcaacatgtaaatggagcgagactcggactgggaagttgcagggctgctaattgtatattgcgtgtggtttactggataattaatgattttttgctgaagaaccctttttgcattgtcggtgttatgtaacacagactgctaatagatccaacataaatattgcaccaagtttcaaagtgatcaaatgcttgcagtggttgacttcaaggttgatttcatgtttataaggtgcaaagtaacgcagattcttgctattttgtatggtgttagtgttctggctttgggttacagattcttaatttgacctcctcttttttgccgtgtttggcttaaattatctctctattcctaatatagttatgtttgcctttctgaaaagggtgtcctgactttttttttgtgtggattcctgattcttttcatctgtttttctttttccctttgtctctttatctgtgtttggcttaaacaattattctttttcacaaaagtatcaagttcgacaattggaaaagggttccaacttctcattgtagattcttgactcttttcgtctgttttcctatttcttttctatgcgaacttgaattctaccatcttccatagatagcatccaatgtagctaaaagttttgggccctggatctgtctctgttatgtgtccttgccttcttcagagggaatttatctataattatgcatcttatgtaaaaatggttgctcctttgaggtttataaatatattaatgttcctttatattgatgcagtgtcattgaagctctcaaggtggatagtttgcaga

SEQ ID NO: 92799 - DNA, 954 bp, Eucalyptus grandis
  Intron number 2 from transcript Egrandis_v1_0.018878m (loc us Egrandis_v1_0.018878m.g) derived from phytozome v7.0 (c hr-ID scaffold_5; pos 12690452 to 12691405)
gcgtcttgccaaatcgtggacacctccagaagagagtacgcgatcctcttcttgagcgaagacccttctgtaactatcggttttctactggaatttgattgaggcatgttatgcgtttgctttggagggtcggatgagtcattaacattatagagctcaaactatgacaccacagattaataataatacaaaaaaaaaaaaaaatggcaaaccttctctctctctctctctctctctctctctctctctctctctctctctctctctctcgagaatttctagcgtaatgaaattcaatcgctctgacaggaagaatttttggttttcgacctcgtcaactaaagaatttgagatgttctgatgttgaggcagagggatgctggcttttagttttaccatcaccgctcgaatggccctgaaagaattcaagccttagtctaaggaatttgttcttgaactttgttttgagaagctttctatggaattaagcatagcctgagtttatgcacttcttcaggtgacattatatatatcttcaatttgtttatgaactcaggaatgcttaagtgagtcctcgtaactgagtattttaggcacttgcaaggcatgaaaggttttcttcattatcaaggaaaacgagtagttttattcgtacatttctttttatctatataacaggagcattagtataattgaaaccgcaatgtgggtttgcttatttttattgcaaatatcctggatgcactcgtcaacaagctcctattattaagtatccgtgactttgttgcttgtattttgttgatttttcaagctaccctcgtttatttggctctctgaaagttgcaatttgaatttggttgctgccttgtggccatcgattttatcttagctaatttgcttccttcacgttctgttcgagagtgcaagggctgattttgtcacctacgagggatt

SEQ ID NO: 92800 - DNA, 617 bp, Eucalyptus grandis
  Intron number 2 from transcript Egrandis_v1_0.024375m (loc us Egrandis_v1_0.024375m.g) derived from phytozome v7.0 (c hr-ID scaffold_3; pos 22252703 to 22253319)
gaagtggctgagatcaaggaattgaatatccaactgtaagtaaatgcttattaatggaccttttctcaagcgtcaatcgaaatgctattctcttaaaattcttgtaaatggctacgaaaacttgctggagtggttcaaaaaattcgacaggaaatattttggtcgatgtgtcatatgcaaaccggttttcgatatctgagcagtaaatttcatttctcaccaaaaaaataaaaataaataatataacaaaaataaaacaaagacaattcaccaattctcatacataagcagggccattttggctagtgatagttatatgagtgaatttgatcttattctagaatgatgcctgtaatttggacggcaaagaaacattttttttctcagtaataggggtaaattgtaggtttatctgtaaaacgccaatcatattctgtggagtttattaaactaaaatccttttggctttatagaatttacctgggacttgaaatagtgatccaggtcgaatgctaactgctaggaagtagtagtgagattataatttgttttctttcactaaaagtgtttggtctgtggcagaaacaccgaaaccactgagctcgcttgggaagtgg

SEQ ID NO: 92801 - DNA, 571 bp, Eucalyptus grandis
  Intron number 1 from transcript Egrandis_v1_0.036615m (loc us Egrandis_v1_0.036615m.g) derived from phytozome v7.0 (c hr-ID scaffold_3; pos 12452982 to 12453552 reverse strand)
gcccggcaggacctctttgcgttaacataagagtggtaagttgaggatcctctgtggtcttggctgatctcatctgcgaatgcactaatttcttgctttctttctcacttttaacctttacttctaagtaccaccaacaaatcaatcttttgacctttggcaagtttggcagaaggaattgtttttttcatttatttaatttgactaaagcataaaaccagcttattgaacaactcttttgaaagatctgctgaagtggagtgtattgttggatagactaggtctagcaactaccgagttgtgtttaattaatacttggttgattggtgtccattgtccaattgcttatccaaattgtttcttcacactttctatcagtttgtgttgtggtattatcacttttgactctatttttgtatctaatttgacaaaacacttatgtgagtgttaatctcagactaaaaactgttattttagcattgtttttcatgctcagtttccatttgcttcatggcagttttgcatgcattgactttctatatctttggaaattttcagaactataggtggc

SEQ ID NO: 92802 - DNA, 702 bp, Eucalyptus grandis
  Intron number 1 from transcript Egrandis_v1_0.007517m (loc us Egrandis_v1_0.007517m.g) derived from phytozome v7.0 (c hr-ID scaffold_1; pos 39659518 to 39660219)
atcgcctcgtcatacgcgacacattgtcgctcaaggtatcgtcttccatcttcgccgccgatggttggcgcggcgtcctatagttttagctgcatttccgtggccgcgaggctggatcttgtctcggacaggagtacttcggttagagcgcatcagaggaaaggggattttttgtttttttttccccttttctgaacgcgaattgttgtttgacgagcatatggaaatttattacgcgagggccttgcttgtttttgggagatttttgatagacagatcaccttcgattctggagtggatctcgtgctcagtcgcagtttcctagttagcctctattaactgtgttaccggagctggcatgagctgaaattaggaactagcgtggtttaaagtgtaatgatctgataaaagggccagaattcatacaaaatgcggactatctattgtccaaaacctgtgttatcaagagtgccgatgcatttgtcaatgacattgagatgctgaagacattgggttgcgatgactgaattcatgtgcgtcttctttgagagttaggaacatggctgctgttatacacattaaagtaatgtcgcgtgtctgggtgctttttgatgtcaatttttttagctgctttgcatgaattcttatggggatgctgaatatagtctacccatttaatttgcaggttgtgcagttgttttc

SEQ ID NO: 92803 - DNA, 495 bp, Eucalyptus grandis
  Intron number 2 from transcript Egrandis_v1_0.033397m (loc us Egrandis_v1_0.033397m.g) derived from phytozome v7.0 (c hr-ID scaffold_1519; pos 8963 to 9457 reverse strand)
acagcttaaaaaactgagtctggattgcagtcctggtaataatttatgaccctttgcccatttttatcttagtgacaggttcgtttgttgtgcccctggaagtttgacacggaagtgctttttattttgtgctaatattaacttttattttcttcttttttgtccttttttaaaccctaaactcttgaaacttttgcacaaatgcacaatgttgacatatgaattcaaatattttttttccataatttttttttaaatttggataagtttgttaattttgacatgataagaaaagtttcttttacttgaacttaattctacacaaccgagtcctttgatttgccggagcaacctaggggataattcttttatcatgtgctacatattatgttcttttgttcttttacaacatcccacctctgtatgtctttgcattatcccagcatctttttccttgtgcccttgctcattcgctgcagttattttgcagatatt

SEQ ID NO: 92804 - DNA, 1034 bp, Eucalyptus grandis
  Intron number 2 from transcript Egrandis_v1_0.050612m (loc us Egrandis_v1_0.050612m.g) derived from phytozome v7.0 (c hr-ID scaffold_5; pos 65242261 to 65243294)
caacatctgtcttcaaaaagctatagaagatatgttggccaattggggtatgtttgttaaccatccaaatagtgacagattcttattttttattcccaggaatagttttggaataaaatcgtatttggtaaaaattttattcccggaaataaatttctatttttttgttctcaaaaatagatttggaacataatcaagaataaaaaaaaaaagattattcttgttcccaagacaaatccaagaatcaaccccattttttcttttcttcttcccttttctcttcttattcttccattttcttcttcttcatctactgccaccgccgcggttgccgtttgctaccatccattgtccgccgctcgccgccgccgattgccggcaacgggtccgacaagtttgccagaggctcgccaagctagggcgaggtctggtgagctcgctggaggcaagcctagccaccggcgaggctcggcaagcctcacccaactactagcaaggctcagccaaagaggaccagcctcgccaacggtcggtgatgctccagtgaggtcatcggtccttgtctggctggtcaccggtcgtcccaagggtagcgactagccagcttgaagaagaaggagaggaggaagaaaggaaaaaaagaaaaataataataaattatttaaaaaataaaaaatgattttaagtatgaatagaaatttttctttttgtagaatacatatttaattttgtattttaatttattatttagtatttatatttatagttatactatagtttatttactatttaataaaaatttgattatttaatatgtttattactttgtataaatataattaatcaatagaatttctataatttgataaaattttagaattgatatagaaattttatgtagttgccaaacgcatttatgttctttttctattccaaaataagaaattttgtacagttacgaaacgcgttcttttgctcaaaaattgttctcgggaatagaatcgttaccaaacgcgtcattattctttctcagt

SEQ ID NO: 92805 - DNA, 547 bp, Eucalyptus grandis
  Intron number 1 from transcript Egrandis_v1_0.037741m (loc us Egrandis_v1_0.037741m.g) derived from phytozome v7.0 (c hr-ID scaffold_5; pos 44434703 to 44435249)
agataagatcagaaaatcccttcaaaagctagaaggtaattcacaaacttcattaaactttgatttatcaatgtaaaatcttatgtcttcggcctactcttttgttaataaaatcatgatacatattcttctacataaaataaaataaaaagtcatatacacagctttaatgttaaattttggacttttcaatttcaagttaagaaagaactaatcaagtaattttgatttactcagtttatttatgtagcaaggtgatctaattgaaaagaaagaatataagctatacccggaaagaaaaaagcaatctcatgtacaaaaaaagattataatatcctttcaattagcgcattagcattccaaacgtcggtcacaaaaagagtcaattcaaaattttgcatggttaaacctcattaggaatagccatcgtcaatttctttaaattaatttttgattagattagatggacaattcatttcctttatcattagggtctccaatatgacaagtgacaaattatcttttcctatgttcacttcaggagtgg

SEQ ID NO: 92806 - DNA, 907 bp, Eucalyptus grandis
  Intron number 1 from transcript Egrandis_v1_0.040221m (loc us Egrandis_v1_0.040221m.g) derived from phytozome v7.0 (c hr-ID scaffold_3; pos 70973029 to 70973935)
caaagagcttatcatatttggtcacgacaattatcataaaaccttttcacatttgtgccttgcagcattggtccaaaggtctacttgtaccctcacagagttgaaagtaagtgtgaacgtgctatgccttgtagcattggtccaaagatctatttgtactctcactgagttgaaagtaagtgtgaatgcgtaaatgtaaagaataggccatagacgtgattgaggggcatcatttgatagttagtctttctttacatgttttttttctttttgctttttttttttattgagccaaccatttggcaggttttggtattgaacactaagaacatgtcaaaattagcaaaccatctattgatgcaatcaaaagagactatgttcgttattgagaagttcatctttttagcatttgttgatattctattggcttccctattgatgtttcaccagaattgggtgagggcgaaggaacatgtattatgattttacaatttaaagtcaccatgacacgcacaaagtccacatatttttctccatcaaacatcagcttcataaaattgtaatccatgacatatttcatttaagttaataaatgaaaggatgaaaaaaatattaaatatattatggatctaattggaccaactgaaagttgtagaaagatatttcacattaatcaaaagtgatttaattgaattgattgaaaattcaaatatgacatgaatcatggataaaatttgacagactactagtaacattatctcttctagcaataggaactttcaattagtcacttcctacgagacccttgatattgcccttgcgggaaggtcacaacaattatcataaaaccttttcacatttgttccttgcagcattggtccaaaggtctatttgtaccctcacggag

SEQ ID NO: 92807 - DNA, 582 bp, Eucalyptus grandis
  Intron number 2 from transcript Egrandis_v1_0.021354m (loc us Egrandis_v1_0.021354m.g) derived from phytozome v7.0 (c hr-ID scaffold_3; pos 60833656 to 60834237)
tcccgatttccgcaaaggtaagaaaaacagtaacatggatgcagagagaaaatttaaaaaaaaaaaaaaactgcattttctcgcgcggttttgtttggatctgtaaatatatccggattcaggaggtgcccaggtgccccagttttggtattcggcgatttgtttaaagaagattgaatttttttttacccattttggattattttaaggattctcggttggattaaggaagatgggcggttttgcctttttcttttattttgttttatactatcgatgcaagatattcagttaatatttgcaccattccgagatttaccaaacgaagaaaaatgaaatcatttcgttaatttccgatcgggttttgagacgggtcaaatgagacatttttggccaaaatgtcgactctgattccaggccttgcatgttggatgcatcattttaaaaaaattcatcgcgaattatgcgggatttttgggttttctgtgtcaggaaatttgattaaattcagtttttattcaagtgagattttctcgattttgcgcaggtacgtgcaagaagggcgactcgtgcgagttcgct

SEQ ID NO: 92808 - DNA, 912 bp, Eucalyptus grandis
  Intron number 1 from transcript Egrandis_v1_0.012870m (loc us Egrandis_v1_0.012869m.g) derived from phytozome v7.0 (c hr-ID scaffold_1; pos 11299119 to 11300030)
ttctcctttgtgctgcttctgtcctggaaaatttcgtgagtgttggcaatttcggtttctttataggttttggtttctgggtattgcgtctttgttcgattttcctcgtgtttgatgtgggtttggtcttcttgttgtgcaatttagctggcacgttgctgtttttttattgtgtgttctcttctgcattgtcataaaggtaagctttctctctttttcgctgcttctgtcctggaaaatttcttgagtctttagagttttttattttaatattggttttggtttcggggtattgcgtttttgttcgtggaaattttcttgggtgttcagaaatttcgtattttttttacaggttttggtttctggttattgcgtttttgttccattttgcgcgtgtttgatgtgggtttgatcttcttgttgcgcagtttagctggcacattactggtttttgttgtgtattctcttctactttgttataaaggtatgctttccctctttttgtgctggttctgtcctggaaaatttcttgggtgttggaaatttcgatttttttttttatgggttttggtttctgggtattgcatttttgtccgattttcctcatgcttgatgtgggtttgatcttcttgttgcgcaatttagctggcacattactggtttatgttgcgtgtgttagaagatagtagaaattctaatagttagaacagtcatttttaatttaactcataattcaaattaaaatagaatatgtatttctagctaatattaatagttattagttatatataataaataatatttatctaaattaattaatatttttatatagtttatagaattctaatttccttttaatttctgtacatatcggcagttggttatattgtacaaagcgttcataaaagtaag

SEQ ID NO: 92809 - DNA, 905 bp, Eucalyptus grandis
  Intron number 2 from transcript Egrandis_v1_0.051981m (loc us Egrandis_v1_0.051981m.g) derived from phytozome v7.0 (c hr-ID scaffold_5; pos 40888508 to 40889412 reverse strand)
gaatcaggtgcgatcatatctcttcggaagtccaagctcctaactatttttgtctatcttccttttaaaataggtgaaccataatgcaaaacaatttgggatcaatatctatcggctatttcaactgttatgacaatcatgaaagacattattttgcattgatttttgcaacaattttgtaagggcttgatgtataaatatcaagccggttggtttagtttgttttatacgaacccctctttcatttgcctaaatataaaacctcaaactataatccaacacatataccgaaacatgacattctctcccctccttcctttctttgctgtgttttccatataattttgttgtatgtatttcctctattatcaagtacaaagtaaaaggaaggtttttcttaaaggatagccgctaaatagttccttaaataatgtttgcacaattcggactgtttaatttattttcatcatgtccaacaaattttccaataataccgtcccgtgaccttttaatcaatctgaatcacatgtgtagaatataaatcgctctttttaacttaaaaagggaaaaaatatataaaagtaaatatatccaaattccacttgtcgaatataggcctttctggaaaacttggctttgatcacacgatgctaagcagccaccgattttagacctttatggatccaactttttcaatcaaagatttatatagatctcttgtgggttcattcgtttgcaatctcatttttcctatctaaatcttgatcggcaaaagcattagtttaagcaattaacggaggatttttttttttttaatgtttttgctaagttaaactttcctcttggctgcattttgttcttggcgtgtaggtgcttccctatataacggcgcaagttattggatc

SEQ ID NO: 92810 - DNA, 908 bp, Eucalyptus grandis
  Intron number 2 from transcript Egrandis_v1_0.047154m (loc us Egrandis_v1_0.047154m.g) derived from phytozome v7.0 (c hr-ID scaffold_5; pos 2439437 to 2440344)
aagccattgggacagatcatcaagctggtgttagcgtatgttagctctctcattaaacacccaactgctgatttgggaaaaaaaaaggtttcattttggtttattatattagtggatacgtcaatgtgagaataaagaggtatagacttgtttgtttaaaatcttacaacttctcgtgatagtctgtcttgtaccttaatgattatctaacaagatttgaatgacaatttttttcttatttctatgtcatttataggaagttaaaatggttgggcttgaacatataccacagattagaccgcttgttaagggagagaagaactagctaactagaagatcttttactttgtcacggatagaaccagttaagctgtgagtttgcataaaaaaaaaaaaaaaaaagatgcatacttgcggcatgagtagagctaccctttcgtctttgaaatttgttaaacttactattgtctttaacatttcaagtatgagtaatggcattggtatgtcagaatgactaccaaaattagcttctgataatggttcattacttaatgttattaaatctcttgttaacatatctataggccatatcacattttgagttcagtgtgataatgaaaaaaaaaaattggacaacagctatacatttcttgtagaaaccccttcatgtatccgtattccctctaatagagtatttggggtacgtaaccccatctaaagggaggcttaagtctgatctccaacaatctgtgtcctcctttttaacctttggcttcttaacttttagatgtttggagttccctgattccattccatgtacatttccttcactttttggagtttgctctcgggtcggtttcttgaatcttgactttttatttggttgcagcctgccaagaagattgccg

SEQ ID NO: 92811 - DNA, 649 bp, Eucalyptus grandis
  Intron number 1 from transcript Egrandis_v1_0.006397m (loc us Egrandis_v1_0.006397m.g) derived from phytozome v7.0 (c hr-ID scaffold_5; pos 65126566 to 65127214)
gataacctctgtgttatcttaccctgcttccacaggtaagaacatgcaatctatttgaagttacggttagtaggagaagaaagctatagttcctgccattaacttaacttctatgcttatacaatttgagctatggtctgaacaaaatagaaaattgtggagaaagttaatctacataatgggttttcttagacttttatagttaaagttctctttcaaaatgacagaggagatatctacaaggatcaagatcttagaaatttgtgtacaccattatttcattcacctccaatgaagaattcaacttttagcaaattcatttttctagtctggcctcattttctcagaaatactgttagttgcctacatcgcttttattcagtcagggatagcctatagcgaaacttgtaacatagagaatctaaagagacttagcttacatgtccttgattatggaaatagccaaatatgcagaaaaattactgaggtaatcagctcaagctgaacatttctaataagcctctttattattatgggatgcagttcaccattagtgtagacattacatctctcttcatagcctattgatattccagaatattccattaatcaagatgtttatttgactcataaaaggaacgggggataa

SEQ ID NO: 92812 - DNA, 988 bp, Eucalyptus grandis
  Intron number 2 from transcript Egrandis_v1_0.031957m (loc us Egrandis_v1_0.031957m.g) derived from phytozome v7.0 (c hr-ID scaffold_5; pos 23098806 to 23099793 reverse strand)
tagagaggtaatacattgcccccatcttcttttacgcaagaaagatgcgccccttttgatatctgtacgattctccgtcatcgccgatttggccactcggtttgagcttttcgtgtagtcttgtgtgatgggcagttaaaaagctgcaattttttggggttccatggcagtcggagagggttgaattgagcttgaggaagctgttgttcctctgggcgtgtggaatatgctacatgaatcattttgggccgattcaatatgatctggttgtgctgtgtcgcgtttattgtcttagcacgaattcaagttagcgaactccgtgttcatccttactgtttggagggaaagactgaataaattccatgtaggaactcattctttacccccttatgttgaactaatagcatgcaaccctgtgaacttactaccacctaaccatctaacatctttaatgggtgttgtgacattgaagatatagtaattaaatcagcctacctgacttaaagttctatcatatttttctattgatatctttataacctttgaacattagatcagaaagcagagcccccagacctctgagtagctcatggtaataatactgaatttcctgccttttactagtcttacagaactcaatgcatttgcactacgtttcttgcttcctttttaatttccgcgctttagtcttcggccaaatcttagcttacacttttggggaccatgtgatagcatttaaatgttaaaatttcttccatccgttgacataagatttcagatggattgttggtaggcccgccaatttccacacgtctcacattccatcatgtgtctctagtgagttcctccattttgcgaaaagataaagactcacagcataacttgtgatgcaagtctattgtgaaggggtatttacaaatttcttcattttgagaaatctccattacttttgtatgagtctccacattttctattcttgcagtggctt

SEQ ID NO: 92813 - DNA, 936 bp, Eucalyptus grandis
  Intron number 2 from transcript Egrandis_v1_0.015723m (loc us Egrandis_v1_0.014105m.g) derived from phytozome v7.0 (c hr-ID scaffold_5; pos 22645136 to 22646071 reverse strand)
ctctttcttacgatgtatgtctcttatctggctgctggatactttttgcagttgggtcttccttcattctaactgtttggttggcagtgttggatggggttcttttgttacattggtcgccaatttgctgtttctctgttgaggcttttcaaactaatcacgggtgttgctttttgcgaaatggttggtggaatttatttattgagttttcctacatagagcacccgtaatcctgcactttcgagaaagctctttccacaatccaaaaactactcattagtttcatcatacaggataaactaacatctgatagcattatctagttgatcattttaaaattttacgttcctgctcttgtcttgcgtttgattaataccttggagactgcatgtggttttgctaagagcagtagtagtgctctgcttaactttttgagtttttattcttttcttaagaaaagatgaatgttccctttttatgcaaatttggaagcacgcattactaaaggtcatagttaaagaaggttattatatgagatcaagaaccaaatctggcgatgcgcacatactcttcaaagatgttgttagttcctgcataaaatacgtgagtctgtttttagcacacttcagcctgaatagcatcttttcttgcatccagcaaaatatatctgtggaattgtcatgcagtaataccattgtttgttgctttttgaatgcctttttctgccttttgtggtagtcgccttgttggcagttggggtctgttgtcattttatattatttaaatatgtgtaggtgacatattcaacttttacttgttgtctcaaacctcaatagctcacatcgttaattaagctttgtttgctacatggttattgtattactaattgttactcttgttcgcagatagctcggttattggaacttttccttgttt

SEQ ID NO: 92814 - DNA, 910 bp, Eucalyptus grandis
  Intron number 2 from transcript Egrandis_v1_0.025824m (loc us Egrandis_v1_0.025824m.g) derived from phytozome v7.0 (c hr-ID scaffold_3; pos 20564255 to 20565164)
gactacgtcggaggtacttcggttccgcgattgcttcgtgcgcttgatgaatttttttgctgccgtcgttttgtagtggcgttcgcgtcgcgattcgtgaagacttcggacgttttggattcttttttatgtggactgagtttgttcggcattgggcgggctcgaaatagttgtggtaggatgatttgtgtcggatcgtgatacgacttcattggagatgggggggtgattgtgaagctgaacaggggaattcggcgacttgttttggaggatgattctgaactgtgtagtatcttagtcatcatggacatgaaaatgttagctttttatcgttgttgaattggtaatcctggtcgagagaaagttatgcaatgtcgtcttgtggactaactgaaactgtatggttagtctcgtctcaaattcccattaatgctgttccccattgttattggtgctcacgaacgcatccctagcataaataattgacttgctcatggagctggtctatgcttttctttttacctcatcaggttctagtcgtttggattgtgttttgggcaagcagcacaaaccttttcacggttatagaagcatagatgtgcattatgatcctgggacggtgcatgaaactcgttacatagtggctggttgtgtggatctgtaatggagctagttatcacccaacctctataaattgtggaggtttgggatactgaatgtggttggcttctgatatcgtgatgctaagtgcagggactgcagagtaattagaatgtgcaactaatcagtcattggctttctattccattttttcgtgattttgtttctctgatctgtgcgcttttagtttgattgaagatttttcaatatttggaggtattcaagctggtatgctcatgaattgtaggat

SEQ ID NO: 92815 - DNA, 918 bp, Eucalyptus grandis
  Intron number 1 from transcript Egrandis_v1_0.014631m (loc us Egrandis_v1_0.014631m.g) derived from phytozome v7.0 (c hr-ID scaffold_3; pos 11097816 to 11098733 reverse strand)
tgggtcacttctgcagaagtcactcaggttagtctctctctgtgtttgtgcgaaattcattattgcatgccttttatattttcttctaaatgaaaaagaagaagaagaagaagaagaagaggaggaagtagaagatatggcttcaatctttcttgagttatggcgagctttctttttctgggtgcggctgaactttttgattatgtttttgtctcacacataatcctccaatcaaaggatgtgaatctgtgggttgagtgggattacacagaagcagcactaagaataaaaaaatcagcaaaccatgctcaatcattatgatgaagtggtgagacatgataatctggtcgagaatcaaaatgcatcttgatcttgcaaatgtgtaaatcctggagcttacccaatggtttagaagttctgggaaagacgaaagttgatcagataatcttccgtgtccttatctttccacatgggagtagatacacctcatgatgcttaatcaatttataataagctaattaacgttgctaagcatcccttaacatgagaatatacatctaaatagagccaactcagcatgcgaggttcgttatactcgcgcaggtttcgtcatgtgctttccatttaataagtgagttattgatcagagcctaaataagtgacacaccttgacgttgttttcagagttttatttggcgaccctaattatttacattgtttaatcggtgaaccatgcgtccctattttatcttgcttcaattgctgatcctattaggcagtaatttaattttctttccccgtggagaaaattttttgaatccgaagaacatcagttcctccatcgcagtaactcttaccagcataacatataaatttgcaacagggtgttttcgaggactataatcagccattcgcagt

SEQ ID NO: 92816 - DNA, 719 bp, Eucalyptus grandis
  Intron number 1 from transcript Egrandis_v1_0.011351m (loc us Egrandis_v1_0.011351m.g) derived from phytozome v7.0 (c hr-ID scaffold_5; pos 70201618 to 70202336)
ggtactcgtgaatatctctcgtttcttggtagctttcaacttggtgcccggttcgccactttcagtgggcgaagaatgaccctttgttgccgtttgaaattctgtcttaaagaagcttggtttggaatatgaatgctgtggagttacctgcttgagtttgttatatgcttggattgaatttgcttccttgacaatttgacctgtacctagtgatgtaactgtgtagagggaaagtgtagttccaatctctggcaatcgctttcagctgctggatcagctgaaatacatggtcttataagctgcatagtttgggtcccagatgatcattatatgggctatcagcctatcactctgtcatcttgtaaatcacgtggttgttgatgctgtggattctttgattgctggggagttgttttgggtaacatgaccagtctcgatgcattgagcattgttgggcgtttacacagtgtagagtaattaaggggggaaaaagaagatgaaactcaaaaagtcggttgttattaacttatgtctgtttcaaacttcaaatagcttggcatactgtgtgttgaaaaaaactaaaaacccaattcatttaatacttggactagtgggagaatctttccaatctattttttttctggtgacttctctcaactgttgttgatgattaatctttttcagcttgccggagtacaatcggttattaccttgccctt

SEQ ID NO: 92817 - DNA, 667 bp, Eucalyptus grandis
  Intron number 1 from transcript Egrandis_v1_0.052576m (loc us Egrandis_v1_0.052576m.g) derived from phytozome v7.0 (c hr-ID scaffold_3; pos 27985159 to 27985825)
gaagcttcttaagagacaatttgcttggaacactggtaattttgtttcagcaacgctttgtgtattaaatctcgattaagactcgttcgttgaatgtctcaaatggttattaccttatgtgacttgctatttggttttattgatcagggaaagtcaaactcaagaaactttaggcccgcctctctctaagaagaaacacaattgagaaggcgccaagttctattttttttggtccaaaaaatgtgccaagtttaaatagtgacataattagtgtatagattgtagtatggagactcaacattttcattatatttgtcggttagctttacccttttaactcgttatagattgtagtaacggctctttcatgacggcagactacatgatccatttttgtctttatatttggattacatttttcaaactcataaacaatgcgtcatcactaagaaatccatacttaagatgaagactgaataataacatcttgtggttgctggagctggattttgtatcctcagcgtagctgagtcaatcggagataacagcaccggtagggacttaatgacttgctctacctgtttgccctggtttgattattgagtcttccactctatactttctttcaaaaagtctcaagttatttcattttctttccatctcagcc

SEQ ID NO: 92818 - DNA, 658 bp, Eucalyptus grandis
  Intron number 1 from transcript Egrandis_v1_0.029888m (loc us Egrandis_v1_0.029888m.g) derived from phytozome v7.0 (c hr-ID scaffold_3; pos 22133075 to 22133732)
tggaggggagggagacgggtagagcctaatttacagtataattttcttttattatatgagagtttgtttaaagagattacatgaacaggcattgcttttagtgagcaacgctcaactcaaagcctttcgtttgagtttaaaatggtggcagaaagatgcggttgaaagttgaaacgagatgacaaacgagtgaaagaaatgtttgttgggccttaggagcgtgcgttaagttcctcataacgagtgaaagaagcaacattcagcctccgagatgatgcaaagcatagggtagtctcgactactcacggcaccactcgactaagtcaatttccttctagcaaagcccaggcccccagatatcgctaactcgacatcttctactagcttttccggttagagatggtgaaagtacttgaactgtcatacagggatggtacgcaaattgttatggaggaatcattcgtagtgtcgtcaagaaaatatcgcaaggaccacacccatagtgcgcttcataggagcaacgtcctctttttcttccctgatcaccttagaagctgtcacagatcacatcacatctctgagaagcttaagataactcatcatcacgtgatcacattagtcagaccacgcttcttgccgagaaaaaccctagtgacct

SEQ ID NO: 92819 - DNA, 753 bp, Eucalyptus grandis
  Intron number 1 from transcript Egrandis_v1_0.017494m (loc us Egrandis_v1_0.017541m.g) derived from phytozome v7.0 (c hr-ID scaffold_5; pos 37042811 to 37043563 reverse strand)
cagcattaggtgggtcgtggtgtttcgtcatgactttgattggatccatgtgatttgatgttatgggaatactagtattataggatttggctgcattaactgcggttttcaattaagcagccaaatgccctgctggcaaaggctgagaagatactatacaacccactattgctccaaatcgccattgctgcagaacccaacagctagaatgttctcttaaccataagcctagctggacattccgaaccaacctcaaccaaataaggttgcacaattcgcaattataagcctttcttcacctgttttgggttttcatttgtggtgatgtagtgtagctatggctcttacttcaacttaagtagatgtcagtgtggaatcagggaacgctttatttctgtcttagaagggtgaggcaccctttaagatttttagctgcttctaggtagatgaattgatttttgaccatataagtcggttcttgcagatcctgcattcatgctgcaaaaatacgaatgcaaatgtcaagcatgcttggataggctttctagactttcgtgcttatttgttaatctaatgactctgtggtaagcttatgtacttatccctgtatgcacccaattaattataattctactttgctagtgcctgccagtctgcttacagtagttctctacatatgtcagaccgctatagatgcatgtgagtataatttacttgaagtttcaaaccttctgtcattgtttctttttcagg

SEQ ID NO: 92820 - DNA, 884 bp, Eucalyptus grandis
  Intron number 1 from transcript Egrandis_v1_0.009722m (loc us Egrandis_v1_0.005236m.g) derived from phytozome v7.0 (c hr-ID scaffold_5; pos 66020265 to 66021148)
gcctcctgctcccactccagttaccagtcctaaaggtacatatgtgtttgtattgcttgtcttcttttgttatcgaagactggatttagtccagcgggccaaaaatatttactcagatttagctaatctcccctactaggctcttggattcaattttgattaatcatagtattcaccatctgtttaaaaaaaaaaatcattatacaagcggttgtatgcatattgatctgagagattgagtagctataatgtccaaagaaaaagacgcgaggtgatcgaggatcacatataaaactttctggtgtttagtgcgtttgagtggtgactctggtgattatgctgcagctttttctttaagaaaactgttggctggattagaggtattataagtattgacagaaaagacaatttgaaaggtattatcagctctttcaagtctctaatgctacaaagtcgtgatgaagtatcttttaggtgaatactttttcctaggtggttcgattatctcaatcactcataccagttgaacatggtgggctctacatccacttacgagattagattatttacataacaattggttaaaggttgcttttaatcaaattaatggttaatcccctataacaattggtgcactcgcatgtgatttaggagaaagaatagagttgtgagtacagatcatggattacagcttcatttcttctggacatttgctctttaagcgtaccctttttgttttagcctgtattttacatttgctctggcctatggtggcaattccagtttctagaatcccaaacagtcatgaacacatatactgatgactaagatgtggttgcacataagtagggaaaagcaataaaactacagtgattgtcatcgct

SEQ ID NO: 92821 - DNA, 827 bp, Eucalyptus grandis
  Intron number 2 from transcript Egrandis_v1_0.025525m (loc us Egrandis_v1_0.025525m.g) derived from phytozome v7.0 (c hr-ID scaffold_3; pos 14650397 to 14651223)
gacaagctggggaaggtacagttcgtctgctttttctttgccccagccgttcttagtctttgattttcaattcatcgtggtcggttgatcgtctgggcatttagtaacggggattcgatccgtggttcctgcgcttgatcttgagttttcggcctttttgttttttcttcaaaggttgaagaaatggttctgaattttcatttctggaaaaactgacgagcagatacttccttaagctcccaatggggactgtgcttggggctcttagccttctggcagtagtttcactttcgataattgagtctccatgtgattgtgtatggaattgccgcatacttcaataattggctgcttatttatagtgatccataagctttggggctgattttgcccctgaaagtaaaagctgcttgttagctcctgcttttttcacatggggaagttagactgcggctatatgtgctagttcaaccaaggcacaccatcacacatttattcagtgcgtcgaaatttttgatctgattacataaatggtaaaggacttatatgtatttattaatttccagaggagtccattctttgctgtggagtcttttccaatgatgttgtcagtgatggagaaatacatacttcaagtactaatagtagtaaaacacgcgcttctgcgtttctttatattgagatgttgatttctttaattagaatgtgggctttcatgaggaaagattgaactttggtccgtacaaataactacggtaggttttctttttctatttttaactggttctgttggaccctctgccctcctttccatacagacatcttta

SEQ ID NO: 92822 - DNA, 658 bp, Eucalyptus grandis
  Intron number 1 from transcript Egrandis_v1_0.003993m (loc us Egrandis_v1_0.003994m.g) derived from phytozome v7.0 (c hr-ID scaffold_3; pos 48520829 to 48521486)
ggtggccaacaagagaagtttgtaaggtagtacacaaaatagccatattttccatctgaatgcaatgtacagtgaaggtcctatgttggatgatggctaatagttttttcgtaagaaaatatttagaaaagtggtcaattttgaatatatattggtgaaggctgagggtaaatacctgcataccaatcaggcattttgtggaatttggtaaattatgggcaaacatttgagtgcttatcattaatttcttattcctgtaagtactaatcgccgaggctcttcagaacatcgctttattcttgtcttggatgaaagttaatattatcaacttttctttttgtatgtacgagtgagcatattgtcatttggaaaaaaattgaatgttgggcatatgtgatttcagcattctgagacagttaaccaagaaaaaaactgtggcttattcatctaggttcatatttttgctttctgaattttgaggcaatttcaaagatgcttactgagattttttctttttttttttcttttcttttaccattccatgaaaagagttggaatggatactttaaaatgataatgaatagttggtctcttccatgctaacgctgtttttaaacttctaggctggacgatttggactctagagtatcatcatctt

SEQ ID NO: 92823 - DNA, 768 bp, Eucalyptus grandis
  Intron number 1 from transcript Egrandis_v1_0.052796m (loc us Egrandis_v1_0.052796m.g) derived from phytozome v7.0 (c hr-ID scaffold_3; pos 76522638 to 76523405 reverse strand)
gttttccctcctctttctcagctctccctcgccaggttcatcagctatgtagcacggacattctccggaagccttcgtgtcgtgtccgacactccgacacgtgtccgacacgctccgacacgtcccgacacacggtcaacgagtgtcgaaatatccgacacgtggtcaactctctccgacacgctccgacacgcgagtctagaattccgacacgtgattccgacacgcacggggtcaattttaaaaatttataatatttgaggggtcaaaatataaatataaacaaaagaaataataaaagaagtaaaattgctataaatatacacgcacggggtcaattttttttttcagttttgtttttttagaattgttttattttttaaaagtcttttactatgaaagaagtaataaaaaatgctatatatgataaataaataaatttaaaaatatcatttcagcagttttctttaaacaatgtttttttcttctaagttttgtgtattattgtaacaaattaaaataatgaatgatattatttaatatttttcgtgtaaattaattctagggtatttttattattatttatttatgtatttatatataaaaatatatttaatatataacgtgtcggaacgtgtcgaaattctctatttttaagaaatgacgtgtcggcgtgtcgtgtcgtgtcgtgtcgcgtgtcacgtgtccgtgtcggtgctacatagttcatcagcaccacctcttcagttcctccctcggcgtcctcca

SEQ ID NO: 92824 - DNA, 725 bp, Eucalyptus grandis
  Intron number 1 from transcript Egrandis_v1_0.022546m (loc us Egrandis_v1_0.022546m.g) derived from phytozome v7.0 (c hr-ID scaffold_3; pos 13055297 to 13056021 reverse strand)
caacctcggcatcccccccgccgccgacgccaccggtagggttccccttcttgctcgccgccgccgctgcgtccgccgcgtccgggcggcgtccgcttttcctcttccggcactggttttcatttttttttcttgatttttttgttctttctcgacctgttgcgggatgctatcgattaggaaagtttttgggtcatcgccacgcgcgtttccttctttcaccttttgccctcctccttcggcggttctcgaggcgtcgctggggaatttgtccggtttccatggcgtttctcttgcgtagttgagataggatactggaaaaaagatacgattttgattagcgtagataggctgtcaatgcaaatgctcgcgagggtcgaggctagatccgcaataatctcgtgcgattttgggacatcttcgtgtggtcaattcgattgctctgcggtcagagaaacgtgcgcattaaatttctcctcgggccattctagatttgaactgttccttattcctgcttcgtggagagttttcttttcaagattctgtcgcgagaatttctcatctttaggagactagatccgattgtagatctcatcgcgtggccacgatagtaacgcaggctgcttgaggtcttggaaatcgttcgtctttttttgttgagtgaggaggagaaaagatttcttggtcgccggctgatgtatcggaacgatgcaggtgcgcccggg

SEQ ID NO: 92825 - DNA, 867 bp, Eucalyptus grandis
  Intron number 4 from transcript Egrandis_v1_0.013882m (loc us Egrandis_v1_0.013882m.g) derived from phytozome v7.0 (c hr-ID scaffold_5; pos 19389410 to 19390276 reverse strand)
cgatattgttagcctctaccacttgataaatagaggtaatgcccgttttgatgttttactactatgcccgcttcgagttacgtctgcttcgaagttctttttgtatgatcctttcttccttagagaaaacaaacgaaatatgcttacatttgcctaaaatgaagctgagggaaaggttaatattgacatcagtaattgagggactcttgagcaacgagtgaatgctttacgaactaaaatgttgaatctcgaactatccgagctgcagtgcacaactatctaaacaacagaagactatttagggttttcccaagaaaaggctaaacattttatttaggtactctattctatagatgagaaagtgaaagatttgggtgtcatctggattatgtatctggaaaacttaaaaatggtgccaacttattgcttggttcttagccaaaaacatgggagcttaaaaaaaaattgtcttgctgagatttcagggacagtaggtaggcatggcactaattagttcaagtgtcaggtgcacctggcaatgcctttgacaacattggctgcagatttgtgattcaccctttggcatattttagaatcccacctgagggggacagtacatgtacaatgggaactttttgtgatatctacattttgcagttaattctcttgttatctgcatatttatggtactttgaagtgatttctttaatgaattttcctattacatatggtttttttcttgtttatttctataaccattctttaaaaaagtagtctttcatgatgatgctacttcctggtaatttcatcgactacttttaacttgatgcaggaaaaatagaggactgcaaggacttctttaggaca

SEQ ID NO: 92826 - DNA, 946 bp, Eucalyptus grandis
  Intron number 2 from transcript Egrandis_v1_0.049921m (loc us Egrandis_v1_0.049921m.g) derived from phytozome v7.0 (c hr-ID scaffold_5; pos 63765787 to 63766732 reverse strand)
tttcagcctcagaccttggtagtacatatacctttgttttattttttattcatggactcatgataatcctattcatcattgcctttgatcacctttaacctctctcaatgttccatatttgatgtgacatcccaaattttcacttctgttttccattgaataaatcggacatttcatcaatgcgcttatagggctgttcttagagctgattactctcgagataattagactattcaaagaagccattaaggaattttaatgcgatagacttgagaatttgaccaggaatcggcttattgaccgtgctcatctttagaggtcattacgacatagtataaaataaatttgaaattagagataggtcgattcgactgagatgtgtgactaatcgtgggtgacaccactaaattggaaaatttctcatcggctgacactagactgattttctatcattttagtatcctctgtccgtatttgaatcatcgagattttcatgacaactgagagtcaccaatgtgtcaagtgggttcattgtggctcgaagaaaatcgactatgggttatttgcactaaaaacttttgaaaactactcgatagcgtaggtcacgcaacatgctagataatcacgaatttgaatccgattccaaaaattgaaggttctgtcatgtcacaataaattctaggaacatcgactcattcttagaagatttctctgcaaattgagactttttgggaaaaagtcgtcctagggccgtttttgttcagaaaatgcagggatcgtttctggtcgtaaaattgggaagcaagtgagatccatgggtgaggcaaaaaatatcgatttgatcgaggacgcgacaatgggatttgttgaggccgaattggattgaattaagcacgaatggatgtccaattgagagagatcttagattcaactccaactggaaaga

SEQ ID NO: 92827 - DNA, 953 bp, Eucalyptus grandis
  Intron number 1 from transcript Egrandis_v1_0.013485m (loc us Egrandis_v1_0.013485m.g) derived from phytozome v7.0 (c hr-ID scaffold_1; pos 39318516 to 39319468 reverse strand)
gagctgttgttttgagacaggttagtcgtgtcgatttttcaagctttcattatggctgctcacattacacagattcatttcttcgtggcttatcttgttttgtttccttattatttatggaggcttgatgttgaagatgcagatagtgacacttcttcaccaattttgaaacgctttttgagcacatgcgcatgatttaagtagagcgtcattttcagccgtcataagcatcgagcttcacattttatctgctgtgctccgatttgccagcatatctcccctgctagtttctggggttttagaatttggaagagtaggtttgactttgtgatcattcttcagaatgtggtaatggatccatcgagttcaaacgacttatgtgtgtacgatcaacttcaatgatttcttgcagtcccctctaattaatgatcagatcacagaaaaagtagatcggtgtaaatgactgcccatccgttgacacgaatttcctatggtcaggctctgtagactgattggtctgtacctctcttcctggtcattccattgtaaatacttttctctttggaagaaacgcatcattgagtgagtatagtgcatatggagatggacaatgcagttgaagaacagaacaccgactgtgatatccgggagttaggtagaatttttcgttgattagaaactatttttccttatgatacttacatgagcaggggagaatttttattcctcatggagcatacgaacctacaaatatctgtcatactttgtcggttaatacttttgttctatattcttgagttgctcccacaggtttaattttgttctgtggaaaaaaaaaattgtggttgtcaaggcttatggttgcactttcactgtgattgatgggttttctgtgtttttgcatgtatcttggttaaggcttttgccaagagaactgagtctatccgaagggt

SEQ ID NO: 92828 - DNA, 815 bp, Eucalyptus grandis
  Intron number 1 from transcript Egrandis_v1_0.009909m (loc us Egrandis_v1_0.009909m.g) derived from phytozome v7.0 (c hr-ID scaffold_26; pos 10631 to 11445 reverse strand)
ggtaaatttcattgttgcgtcgattttttcttacccaatgattgttttcgccaatttaccccaatcgtggacgcatttgttttatccttgaggaatttatggtgtttgattgagcgtaggtggaaagatgatgcttgaatttcggatgtttgtttggtaattaattatgggttctacttacttgggtttatgttggtctgaaggacttgtgagtctgcttgacgtgacggtggcgatgaagttgttgtgggtttaacctggttaagcggtgaatgggtataattcaattcatgctgcggtagattggtcctcttggctgatcatctttgctcgtgctcatctctgatttaagttgagctgatctgtcacctctccggtctagttgaagttgcacaagtagagatgaaagtgttcttcgagcattgtaaaataccgttcgagtgaagtgaaacctgctgaaatatcaattttatgggcaaatatgtgctgcttcttggttgtgtggagaatgcaagcgcatcatctcaactgctcaatcttttcgaacatgaaaaatgtgtcggcctgtgaagtgatggagcttcacaacttacgttggaagtggactcctctgtgaagggtcactgacctgaagtggcttttttccttgttattcattttggcagctgttgaattctagtcaggaacataattagcttgttgcaatcatttctcaaacattatccataaaagtgtgttgctgcttccctaatgccactactgctctgatgctgttttttccttatctgtttccgtcggtaattcaggggcaggaa

SEQ ID NO: 92829 - DNA, 1025 bp, Eucalyptus grandis
  Intron number 1 from transcript Egrandis_v1_0.002760m (loc us Egrandis_v1_0.001915m.g) derived from phytozome v7.0 (c hr-ID scaffold_3; pos 11673903 to 11674927 reverse strand)
acgcccaagtggagttcctctcgcttcggtattgggtaattcttctgatccctagtcttgtcggtttttttttttccgaatcttctgtggcttttgaatcgcgttgaattgagattggatcggtttgcgattgcgttatgcactttgtaatatgcataggctggttactgatccgtcaaaatggtcatttggaattatgcttctgaggttcgaacgttggtcatcatcctttaggtcactaagcgtgattgacaggcaacgccgcttgccatcggtcggcttccatggggattgccttttagaaccctccggtcgaacaatttttgtcttcattgactgccaatcaccattaaatagaaagtaggccatccatgtgtggaatggaaagttcgtgtgattagatggagcaaaagggtcctcgtgtgcttggtcttgtaattcctctatgatgtttcttaatggatcttgtgtcgtgaagctttacctatgagccccgtccctgctgtaccttggctaagtgttgcttatgccattcagcctaaaaatgcatcacaaaaataagagcatttgactttctgtcttatttgtctttcactagcctcatgtctcggtataggaacatgattgtagatatcaatgattatattttttgatctcgcagttagtttttgactgtttgttatttgcatttacagaatcaaattttccctttagtattgcaatctaatttgagtgctggttacgttttgtctcacatgcttcattcattttccacattgtaaacttcgtaaaatggcaaatcctgattttgtgaactttaataataacctagttgctgtccctcattcttcggcatcgtttagtaaattcggcaaacctcctagaaaattttactacgtaagtgtcagctgaaaagggtgaaatctgtctgcgacttttgccgcattgttgtgaaactttgaacacctaggttttttggtaatcaattttaactctcgtgaattttcatcgaatgcagactcata

SEQ ID NO: 92830 - DNA, 798 bp, Eucalyptus grandis
  Intron number 1 from transcript Egrandis_v1_0.006418m (loc us Egrandis_v1_0.006418m.g) derived from phytozome v7.0 (c hr-ID scaffold_1; pos 16821386 to 16822183)
ccaagggagtggtctggtgtatattccagggaaaggtgagtttgtttgaagtttcccttgaggacatgcttatttggtttcgctgattttccatccgagcaatgaaattctcagtgaccagatgattacgaaggattcttaacgtttaaagtgactgtctagactgggtttggatgtatctccccaagggtttgaatgaatttgtggatctcagtatcgttccaattacgtctgatgtttctgaagagaccaatgatgtgtggattgttctttgtgaaatgtgagagttacttaaggaagctagcttggttattctgcatgaagtgctgactcatctgtctaatcccaatggtgattattcaacataatatcgatctaattgtgtctattatgaccagattaatatggcatatggagcaaagtagcagcagatgcaattgcactatttagatgatgccaatcatttagaagctattaagctatctttaactgattaggcattttgttttagttcttgttgtagcacggatgaggagcttctttatgattaggtttctccaggtgttctagccaaacatgtttttttggagtgcataaactctacatagaatctgctaatggccaatataaaaatagtcatgtttgggacatcgcctatcattcctttgtcccgatatcatagcagtggtgaagtatcgggttctagaaatcttgtacctggcctaagtattgagctttaattacatgatgacagaagttgcaacagtggtattgatttaaatctcccctttcttacag

SEQ ID NO: 92831 - DNA, 801 bp, Eucalyptus grandis
  Intron number 2 from transcript Egrandis_v1_0.023603m (loc us Egrandis_v1_0.023603m.g) derived from phytozome v7.0 (c hr-ID scaffold_1; pos 34874143 to 34874943)
ggacgccgctgcgcgacattacaaccgttgtgagggtaaggttgctcttcagagcagtaattgctcatttaatgcgtttggtttgatttaagtttcttgaattaagcatggctcatgcatgttttccggtgttgagtggcatttcacatttaactttttacgtctagtttctttctattgatagactaaccagtaattcaatcagcaagctagtcgagtggataattgcttagattggtattggatgagcatataaatttggcttggtctgatctaaactctggatgatttatctccatgtctgcagagcattatgcaaatctaggctaattggcaatggaatgccttcatatacgtctgtgagcgcctttgccattagcaattcagtgttacagtatttgtgtcggcttgctagattggtgagaactgagaaggtagttgtgaagcgtttggaaatggttattttgatttccattaccaatcagtgagggtaaactttttggctctgctcaccaccaatgcttaggctttgttcccttctttttatccagttgcttgaagtaattacaatctgcatatcatggtcacaactctacatctgtttgggctaatttatcgtccttgtatttctctatagtctcctttcttgttgttctgtatcttgatttcacagtttattcctcatcatgcaattactatcacttcaggaattttgcttgactgctctgcagaagcacgtcactatatttgctgcacacttgtgtgggggctgatctaatatcttctcctaaattcaggcat

SEQ ID NO: 92832 - DNA, 908 bp, Eucalyptus grandis
  Intron number 1 from transcript Egrandis_v1_0.001601m (loc us Egrandis_v1_0.001601m.g) derived from phytozome v7.0 (c hr-ID scaffold_3; pos 32441879 to 32442786 reverse strand)
cgagaccggtctctgttaattttttctaatctattgatgtataacccatcgctcactttactatttaaagtagttaaaagaatgaccaccaacaatatgtcatggcttagctaccgattgaaactagcatagggcaagtcttcaggtacatgatgattgaatttacgcaagtttgcacaggttgttagagtgaaataccaatacgtttatggtaatagtaacaatgaatagatcttacatcaatttatgctttttctagttggcacgtgcttcttatattagttgagaatcatcgagtatctcttcttatttgtgcatgattatgttgtattatccacgagcttttgtatactagattaactccatcccaagcagactcttgatcaaggcagaccctccatattagaattggaaaatgcttaagaaagtactgaatgatgcatcgcatatacatcatatcggagaccatacatttcttagtcttaaattcgagtagtttctagctctcggacaaagttccatcattaattgttaaaacgagatggaaatagcagcagaaaaaatgatggtataaacaatcctgagttcaaagaattgttaggattcttcatacaaaattaaaaattcaaaaaacaaaaacatgaagtgtgaatgctaccggaggtcatcttatctctttgcatggtacgtatgctcagacggaccgcccacgtcgagcaatccttgaatggaagctctccatgctttgtcttacttttcaaagcccttctcccttataaatacgtcgtcctcatcatcacatcctccatgtctctctttcacacaaacacacacttgcgttttccggagacccttttcaatgatgcctccaaggatctctttcgacgctgaaacgctcctctttttgg

SEQ ID NO: 92833 - DNA, 620 bp, Eucalyptus grandis
  Intron number 1 from transcript Egrandis_v1_0.029120m (loc us Egrandis_v1_0.029120m.g) derived from phytozome v7.0 (c hr-ID scaffold_3; pos 74736910 to 74737529 reverse strand)
cacaaggtcttcaatctctcctcttccttcgtctttcgtgttttccgtaatgattcgctccgtcttcgcacaaaaaatgccacttattgattgatgggtgatcatgagtttcgagaatgaatgcaaagctgacgacttttcaggaatcaaaggcaataatcgatcccaagtttgtattttgtttagtccccatgcctgaatttaaccaacgagaattctttttgttcttatcatcgtgactacacagaccaatgtaatgctgatcttcccagctgtgatgatgccgattgaatttacttgtcctactagatgggagctgtcctgttcgaggaattgcgtgttctgcttttctcgtcgtttgtttttgaagctccatctgttgttgcctgtcaagttaggtgttactgatgacaggaagaagcaccaactgctcgatgaaatgcttctccgctatgcccgttctcacttttagctgccacctagttgtcttataggattctgcagtacgaggaatggcattcaagcaaaattcctttgcgctccaaattattttcccctaagttgtgtaattgcttttacttgtaggtaactcttgaggtgaagggagaaccccagatctt

SEQ ID NO: 92834 - DNA, 558 bp, Eucalyptus grandis
  Intron number 2 from transcript Egrandis_v1_0.052730m (loc us Egrandis_v1_0.052730m.g) derived from phytozome v7.0 (c hr-ID scaffold_5; pos 73944743 to 73945300 reverse strand)
tgagaaggtaacttgtggccatatcttgcaatctctggtatcttgaaggttctttgatgcatatacccccattcccctttttggcccaatccacccaccacaagcacaaacaagtaatttacctgggtaggcgatatactgtatctctgcaacatctttatctcctttctttgagttctctgctttggttttgttttcttgaaatctgtatatcaggttgagctcctgctgtccaatttttgcatgtttctttgtcttcaaagatcatttatgttgtgtctgcatcttaggaatgagtaaagatgttttaattgtttattagagctttgaagaagatgaagaatggaaaagcagtgtgcctttattgcataccacacctttattgcataccaatagaagtgtggaaggttatgggagagattgggcttctgggcttgccacccttctcaataaaattttaaggccaaacaaaaagccagataaattaaaaaattaaaaaaagtaacctgtgcctatgtacaagaacaaaggtgacactcagaattgtgccagccacag

SEQ ID NO: 92835 - DNA, 683 bp, Eucalyptus grandis
  Intron number 1 from transcript Egrandis_v1_0.018152m (loc us Egrandis_v1_0.018152m.g) derived from phytozome v7.0 (c hr-ID scaffold_5; pos 3754738 to 3755420 reverse strand)
aggttgagttcaggtggtgggatcgcatcggtgaggtataaagttcaattgttaacttttggatgagcaatttttgcttgatcggcgatttcattttggcttctgcgctatgcatgttgctaccatgcttaaataattttttctgcagtattgctcttctgggcagtttattttcttgttatccgcaagttgacagcagtgactgtttaagctgtgaacaatttaaaaaaaaaaaaaaaaattgatgtagcggcttaaattgtgctagctatcttgtgcatagtgtgttttataacaaaaatttgattgcagaatagggattctgctgaactataatggataaagtcgactgtacaatgatttacttcatcatttgctgtttagagcatatcctaaggtcgatgaaggttgatcagcgcgatcgtttaatgctattgagattgttatttggctgcgatagttttctggatctgttagagaaaagttttatcaaggagtagatcagtttccttttgttttgtgcctatattatcaagaaagaattgatctggaaggctcctgttctggatggattcattagccataagagttttctttatcaggctcaagtaattcttttctcggtcattcacatcttcttgttttcagtttatactgttgggtgccgttccgtttccttctga

SEQ ID NO: 92836 - DNA, 641 bp, Eucalyptus grandis
  Intron number 1 from transcript Egrandis_v1_0.042137m (loc us Egrandis_v1_0.042137m.g) derived from phytozome v7.0 (c hr-ID scaffold_5; pos 25297146 to 25297786 reverse strand)
tctctactggtgtattcttgaacaataggaccgtaagtccactccacttcatattcttcctaccccttattcctattattgatatataaatctccgtgtgtatgtatgcacacatgtataattatatcttacatcatttacacatacactgagaattcacttcttacaataagatagtgatagtgaatagtaaatgaacgtggaggatctcttgattaactccctaccaatctatagccttcgcctacatatatattgcaaaaaataaggtattttctttgctcaaatccatgttgaaagacaggtgatcgtcagaagtgagaatactaagccactttctcaaataagagatttcttatatgaaatagaaatacctagattttggaaaaaactgttgctgccgaaaaaacttcatgtttaccattgtcacggatctcgatacaacggttttgcaactaatttgcttgcgttttgtgtatgaagtttcaaaaattaaagtccactacatggatggtgaattgattctttgaattaacttttgatttgcacttagataggagaagtaggcgatcagattcgatgtgtaatgtcatcctgataattcaatattgtggcagaaacactgggtggaaaaggaatcg

SEQ ID NO: 92837 - DNA, 707 bp, Eucalyptus grandis
  Intron number 3 from transcript Egrandis_v1_0.003837m (loc us Egrandis_v1_0.003837m.g) derived from phytozome v7.0 (c hr-ID scaffold_3; pos 21438854 to 21439560 reverse strand)
attccatttgtccacacaaaaaagaaaatattcaggtacctagttagtttgtgtattgacgaggacacactacaagcatggccaatcggtggtacccttaactcagttaggtaaaaaaaatggtccaatttgtatgagaagtgtgaatatgtgttttaatggaccttgttcattttcaagggattttgcaagtctttcaacttttttacctgtcttgattagaatgtgcttgttaaaaatggtgacatggtccgaagatcaacctgcaaatttgattcttttaggcaatgctactaaatatcggcaactgagtaaacgtcttcgcaataatgacttcctgcttaattatatgttcaaaaggattattcctctgcttccattatttgttctcccttagttttatccttcagtaatgatcggttaaatttataacagaaggctgcttattgtgtctgagtggaataaaaattggcgatgtttttgcttcttttttattttattttttaaacatttatggttgtgtacgctttattacaaagatattttatgatatctcatcattctaggatactatgttttactaattagatttttaagtggatgtgctctatctgtgcatggtattgagtgtgctctatctgtgcatggtattgaaattgattatacaatattttttttggtgtagttcatcttctcaacagcaacag

SEQ ID NO: 92838 - DNA, 1002 bp, Eucalyptus grandis
  Intron number 2 from transcript Egrandis_v1_0.035808m (loc us Egrandis_v1_0.035718m.g) derived from phytozome v7.0 (c hr-ID scaffold_2621; pos 3873 to 4874 reverse strand)
ggggtttctaatttgtgccttaatactgggctttggtaagcttggaaactcttgattaacaatgaagcaacaccaaaaaatatcatcttaaaaggaaccaatgtttagtttgtactgccaaaccaatacgaaatacatgtgaaaaaggtaagttttttgtgtaacttaaatggtcactgctcattcatatgctagatgagaaactaatgggcatcaaggccagtatatgagcaataaagttgcaatttaccatggctcaattttcttaagaaaaataatatgttaaatctggtgtattaagcagaaagtttcagtcaaaagattgtgcgagctataagctttttaaaattctggttattttttacccaaaaaaataaaataaaaatctagttaattttcttcttatgcattttccatctttgattcatcttaactatgagggaaagtttaatcaagtaatggaattggagaagcattttttgctccttggtttttagttgtcaaatacatttgagagatataatagcttgctgtgatctctaggttggtttcaaacattcgtatttttactagattatttgatgtggtgaactaacatcttgtcaatctaaagaaagtttaacattccgggtttccatttatgggatacctggagatttcaactagtcaaagctgctcttctaagaagaaatgtccagttattttcttctctgtttctaaacttctttctgcattcgtagaaatgaggaggtattttatgcttgtaatatagctttaagcccattagaagatggtgggaaatgggagtgcccaattgattatatatacacagatgtaaacaagcttctttttgttaacaaactagcgtttggcatcattgttactttgcaaactacttcccacactctgcctggcgtattccatctaaatgggtttaacatcatcattatgcaccttttatggccacagctgatatgtgaataatgaattttgtagggatac

SEQ ID NO: 92839 - DNA, 1015 bp, Eucalyptus grandis
  Intron number 2 from transcript Egrandis_v1_0.020545m (loc us Egrandis_v1_0.019576m.g) derived from phytozome v7.0 (c hr-ID scaffold_5; pos 3223965 to 3224979)
ttgttgcagccatcaaagcagccgggaatatcaaggtgtgcagtttataataatttcatgcaagttaccattgctcatttaatatttgactgatgatataggatggtgcaagcttaactcttttcttctgggattagtgcatcacgttctccttgtgagctccactccgatgaaatgggatggattcacttacttatctgtagacttcacttctttcctttttaaacggtcatgactttctatagaagtcgtcaatgaaatttgaggcctactatttcaaatccaagtaccggacaatgccggattcactgtggttgggtttcctctaggtcaatgaaaaaagtaaaaggtttcaagcactcgatatggattatggtcatgtaccctatcctttgatcaataatgggaaacatgaactacctattccttcaaaaggtttttttcgttaaaattaatattagagcgagtaagttttcaaaacccaactggtggataatttagtagttgttgcctagggggttgacggtcggtaaatagtggagcttagcaggctcacaaaaggcaatgtactcacctgacattttatttcttgtgaaaagtgtacaagcaagcagcatcgttgcatattttatacttgccagatttatctggctattgccgtaacaattaaattttcagttttcttttcttctacttttctaatagcacttaatttctagtcttgattcacttataatcatttttactatattatagtccgtttggaaaaaaaagaaagtgaaattcagtcttatgtaagttgtttcctttgtttgctccgttatagtcacatgttgaagaaaaaagtcaaacattgtcacatatgagtttggtttccttttttttgctagaactcatgtaagtttgttggatgaggtgaatttgctctagctttttgttgctttctaataaaaatgtatgtcctgattcaattaattttcattttagagattcttgccttcagagtttggaaacg

SEQ ID NO: 92840 - DNA, 784 bp, Eucalyptus grandis
  Intron number 1 from transcript Egrandis_v1_0.046418m (loc us Egrandis_v1_0.046418m.g) derived from phytozome v7.0 (c hr-ID scaffold_5; pos 55911006 to 55911789)
caataactttcttacctctggtattaccttcttcattcttggaatagaaaaagaatataaatacttttggtaaaaatgtataaatttttatatttatttgttttttcttcttactcacggaccaccgaccaccacttgccactgcacgactgcggccggttggctgtggttggcagtcagcagcaacaggccgcagttgtgcaacggttgtgcggcggtcgtgcagcggtcgtgcgacggtcgtgcagcggtcgtgcttcagttggcggtggacggtcgtgcggcgattggcggttgacggtcatgcagcgattggcaaagcacatcatataactagagcagagaaataacatgagctataattgtatcagagtccacgcaaggaactttaaacatggagatcaaacaaaaaacactaccccaaagacattgaatgtaaagcccataattagaagtaacgagaagtcaattttcttttttagaattccacaataaataacgtgtgatgctttttattttgtttccactttgggaaaaaccccaaaccccaccaaatctttgtccaccataaatggaaatatcttttggtggatggcactaatgagttgaagttgacttgcaatgtgaattgatgaaatctctataaattagttccggtttcgaagtatgtagcttcgactcccattccaaacttgaccgccatttttcggattatggcggcctcctcctcctccactcctcgcaccgaggcgaccccactaatcccctccctcctcgatccctc

SEQ ID NO: 92841 - DNA, 504 bp, Eucalyptus grandis
  Intron number 1 from transcript Egrandis_v1_0.032757m (loc us Egrandis_v1_0.032716m.g) derived from phytozome v7.0 (c hr-ID scaffold_5; pos 29243953 to 29244456 reverse strand)
ccttggtaattgttatcatcttcttctcaattcttgcaatttttccccattttatatttagataaaattctcgtcttcaccttctttactgaaccatcttgttgatcacaaattatggatgcgaagaatctcgattaaacttacatatttcaactagccatgatgatggcatgtcatacaagaatggatcatctttataaacgaacaatagtttgaattcaatcagtttccttcatcgatcaagtagaggaatgatatttccccacaattggcttaaacaaaaaaacatagctgttatctatatcattatttacataatcaaatacttctgttcaaagtgaataaattcattttttgaataaattcatttttttttaacttataccatgcttaaagcctctataaaaagaggtatacagagtagagaactttttttcccctctttacctttactcattttgtttcatccactcagttcctaattaatgatgtgcaaattgcagc

SEQ ID NO: 92842 - DNA, 447 bp, Eucalyptus grandis
  Intron number 2 from transcript Egrandis_v1_0.032905m (loc us Egrandis_v1_0.032905m.g) derived from phytozome v7.0 (c hr-ID scaffold_3; pos 35902427 to 35902873 reverse strand)
ggtgaggtctcatgctctttacctttatttccctttcttgtgcacgtgtgcagtgagcatgttttattgaatgtgcatatatatattaatatgaatgatgtttttttcagtgatgtgttgttgacgtcttcttttgtagccttccacggtattttgttatcagtcagagtcctcaaatttttgtgtaattgttctgttttagtgctgtgactttcacgtctgctctcaccccatgtctctagtttgagcttagccacatacacagtgccacatatgctacctgtttgttcctgttgatttgatcggtaggtaagatgcagtattcatctcagattttttttgtatggacaactaaagttctagtcttgacaaagtttggatgtgaattattaatgactagactttttgatggattctaattttatctatgttgaaacatcaacagca

SEQ ID NO: 92843 - DNA, 705 bp, Eucalyptus grandis
  Intron number 1 from transcript Egrandis_v1_0.044609m (loc us Egrandis_v1_0.044609m.g) derived from phytozome v7.0 (c hr-ID scaffold_5; pos 43957766 to 43958470 reverse strand)
cggtaagagagtaacaaaatcatattatattattgtccaaaggcagttattttctggtattgtgatttttttttctttttatttcaaagcaagcgaaacaatataatccttccaaggtccttaacccaatattttcttgtcttgtggttttgtttgtgtacaatgtttttatatgaaccaatgaatattctctatagccctcgaaaacaatcaacagatgtgctacctaagctcaataaaacacttttaacaataataatgtgtaatgtattatatatggtggataagagacaatggttttttcactacgtcaacacatttctctttgggtggctcaggactgtgggattcaatggatgtattggtagaaaaattataccatttcataattggtttaattcaaaccacataattggatccataaaactaaatcatgttccaattcaaaataggtcatctaaagtagttcgaaccacatagttgcatgctgccatttgaattacattattgcggcactaaccgcaagtagcatgtgagaaatatttcggcataactttaatcctattgactccgaatcatacactatcaagctaattccagtgtttattccatctgcatacatacactagccataaccaccgttgcgcttctcattttaattcttgaataggatcttgctgggcattcgcagcgactgcaactgtg

SEQ ID NO: 92844 - DNA, 1021 bp, Eucalyptus grandis
  Intron number 2 from transcript Egrandis_v1_0.021574m (loc us Egrandis_v1_0.016611m.g) derived from phytozome v7.0 (c hr-ID scaffold_2; pos 62335219 to 62336239 reverse strand)
aatcgccgcaacacaggttggtggactttattattgctcatttgctggtttatctcagaaaatcctgtttcatatctttgtatgtaagctcgtttcagccgatgatagttttaatggaatattctctgcggtttatgtattcatggcttttcctgtacaaactgtgggaaatgagagtttcatgtctagggatattcgtgcagagggctattaggataatttaatgtttcactgttgaagtgtagagacaagctttcgaagtaatccctttttctttttccagactgcttatgatccttacttttgctgctattttgggcattaatttgtaaagatttggtttatttttactttaagaatcaagtgtttacatctagttttccatatttatcatcctcctttttagcctatgcaacctggggaagttttacccgatgtgactttggagactttttttgtctgtccaaataaatcaagaattcagatataacacaatacccaattgagataagcatcaatacccatgcatagtctaatatattttgatcttcccaagcttactcaggtctgaaccgcgagagatacttcccaaataagattgccaatggtacaagtgctcgacttagtgaagatggaaaagcgcagtaacttcacctgtgcctttttaatagttgagtcgagaaggggtcctttttttattgttttgcatacttcaggagctgaaatttagtatgactttacccaattttgtcggttcactaactttaactacaaactctggtgtaccctttgcttctctatatcttatttactaagtgagaagtgctgtatagtaagttattgtaatttttaaagtcaatcagatgatcgttgatcaaattatttgcagcattactctcagaatcttaccgcttcaatttctagatgagcggagtgctcaatatttattacagtctgcacttttaagagagcaatgttttatgcagataatctggtagagaatcttttggaagatttcgag

SEQ ID NO: 92845 - DNA, 781 bp, Eucalyptus grandis
  Intron number 1 from transcript Egrandis_v1_0.036896m (loc us Egrandis_v1_0.036896m.g) derived from phytozome v7.0 (c hr-ID scaffold_3; pos 479422 to 480202 reverse strand)
attaaggtaaatggacagatcctggcttatctacaatgatataagtattatcagattcatcatgattggaaatgccattgcttgtccaggtgaaaggttacataaatgacttggttgttatgggttttgaatgaaatcttgtaaatgctggattgattgcgcttatccctgcaaccctacttgtcacaacatggtttttgatcccaatgaacaccctgaagttagcttccctctgttaaagtcttctatctattcttgaagtttcttttgttattggcaagatgaacttgaacaatgaaggggatacatgattcttttttagttttgcatcagcacaggttgcagcaccaaaaccgcatactggtcactctgtgtaattctttaatgtatgcagagtattgatagtaatgaataagggcacccttttcttctgatccgatctttctctatgcactacctaatttgtctggcaggtgattaaccttcttagacctgaatacttagaagatgaaacggacaccttccagggtgtggatgattgtgatggtataacttcttattaaagaggaatatcttcagaattctgattatggcatgatgtttctaccattgctgtttatatatgcttgtaggatgtggagcaagggactttatgaaaacttactcataaaatggaaattgtccgaaaactgtgctagaatttattcatcctgtaatttgatgtgctattcaattggcccttgcagttccctgtggagaattacgtggagaatctcctaat

SEQ ID NO: 92846 - DNA, 829 bp, Eucalyptus grandis
  Intron number 2 from transcript Egrandis_v1_0.054709m (loc us Egrandis_v1_0.054709m.g) derived from phytozome v7.0 (c hr-ID scaffold_5; pos 29480732 to 29481560 reverse strand)
tacggtccttcgcaaggttgctcgtggcaccagcagcgtggtggcttgagttttcactggaaagcttttggtaaagaatctcgttctctttattttacttttttgttttttaatgttggtctgtcaccagggaaatcaaaacaatatatatcgaaaaagcagagagcatcaactatcataaataccgcctgcagaaaggccctgcacacatcaataaatatattatctttcagttttcttttttgtatgttactttagggataagtacatgataagtgttaaaagttatgtatggtacttattttagtacctaaagtttttaccggcttacttaagtgttaaatcagaagaaaaattatacctacaacgagaaattccgatcaaattgattacgtgtcatttataataaaaattataaaattttctaaaaattccaattgacgtgacattttcacatggcatgcttggtattaaagtgattactttaaacaaaatttgacactcaaataattactttaaataaaatttagcacttaaatgatcgttatttatgacttttggacgatgttgtttagggattatatgcgaattaggcacatcacgagccgtgtaggactgagaaattaataagatatagctacgtcagatttctggagacctagattagagttgacacttgaataatcgtttgaaaaaaagtggaatttaagtaatcagaaaaaaaaacttttagtattaaaatgaacgtcatacacaacttttattctagtgtacttatcccatacttttattaagtttcaacatagtttgtttgcatcctattacgtaa

SEQ ID NO: 92847 - DNA, 370 bp, Eucalyptus grandis
  Intron number 1 from transcript Egrandis_v1_0.024528m (loc us Egrandis_v1_0.024528m.g) derived from phytozome v7.0 (c hr-ID scaffold_5; pos 68961263 to 68961632 reverse strand)
actacgtccaggagatcgtcgacaaggctcctcaggtgccgcgaactcttagctgctcgaagttcaattttttttttttttttggctgaaatggcggttgattttgtcgaaattccgagtgcgagggagggatttggatgatcgcggtgattgaggggaaactgaagaatctgagttcggtttcttgttctgtgtctgttctgaacggagtttgtagtgaaaagttcaaagattaaagttgctgtttttcgaggatttgcttcgattggctttggcgatatgcaaaatagtatcgagttctgcgaaaagttatgttcttttccaattgtttgattccaattattgattttgcaagtgcagcttccagacg

SEQ ID NO: 92848 - DNA, 572 bp, Eucalyptus grandis
  Intron number 1 from transcript Egrandis_v1_0.034643m (loc us Egrandis_v1_0.034643m.g) derived from phytozome v7.0 (c hr-ID scaffold_2; pos 9233108 to 9233679)
cctcgatcgatcttcatacccattactcatatcaggtgtgtatttcttctggtctttgtcacccttttaattggctaggtggtggcacacggggaaaaaataatagttgtgcctctcttgctattggaatatggttgtcaacacaccagacagtgtgtatttttagttcatttactttacctaatcttcaaattctcgacttttgagttgaccttttctcgcattaccttacctatgaagaaaatttctcgcctcctatggaaagtttctgttgacatgaactagttggttcaattgtattaaaatagctagtgaagctccgcctgagaggattttattcacacaccagacatgcacgcgtactatcatacagtctttccttttcttccatcgattccaagatgtgacttctagaaattacactcgtcttaaacacaatctattttttttttccctttcctttcatccactgaagtaggctattgagcttgcgtagcacattaaatgtggagtgtcattaggctttgtatctacttactggttcactcatttgtttccccctggtccagatc

SEQ ID NO: 92849 - DNA, 855 bp, Eucalyptus grandis
  Intron number 1 from transcript Egrandis_v1_0.018552m (loc us Egrandis_v1_0.018552m.g) derived from phytozome v7.0 (c hr-ID scaffold_3; pos 71219156 to 71220010)
cgatttcgggctgggaggcgttgtccggcctcgaggtactcgattctcttcttatgcgatcgattgcttgcgtatgtgatgttgttgctcggtgaggattggaatttttcttttttctttttttttttgcgaagaaggaagtgcttgtttcgcttttggggcggcaactttactgagaaaatgtgtgttgaagcattagcggagggtaggcaaaggattttgtaacgggcgcgctggttgaccaccttgataaaagattggaaggaaaatgaataggtagagcatccatcgaggttgatcccgttttggggctttggtgcgactgattccataatggtgctgcattttgcgatgagtttgtagtgcttaagttggggctaagtgcatgaagcgaaactcggagaagaacttatagcaaaactgttgacaggatggctcggaaagggtagaaagtggagggggaaagtgattcttgttggggatagggagtccctctagccgaccctcaaaaagaaacttgccaaggtctgtatcttgtttgcaattatgcggttgtagctgttgttatagaatgctggctgccttttctttcagggcaacactggtgattgaacctcatccactacccaaaaaaaaaaagatcccttttctagtgtatatttcttattatacagagtttgtggcatttgctatgttgctgtaaaatccacattcgttttcttgcttggactgattaaggaaaaagccggaatttttgtattacatgtaggtttttctcctttttggttctttggagtaacaggaagttttgattctgcaggaactggtgcttagggataacaaactaacaaagct

SEQ ID NO: 92850 - DNA, 813 bp, Eucalyptus grandis
  Intron number 1 from transcript Egrandis_v1_0.024480m (loc us Egrandis_v1_0.024480m.g) derived from phytozome v7.0 (c hr-ID scaffold_3; pos 37586132 to 37586944)
gcggttcaataactgaggcggaaagctcatccgaggtaaccaacgctattgattttcccactggacatgtctggaatttttacaaacatgaatgaattgcttaataataacaaaaatgcatgtcacgatgaattacgatttacaggatattttctcccattaacacatgcagaataattttgtcaaatgaaatttgagtcttcaagactttatatttcttttaacttctttaatgggaagaaacatgtaaggactccacttctttttcttctttaaaagggcatttatttttctttttttagtatgtttttgcgatacacaaccaaagagttctatttgtgccagttagcataatcgtgctttctggaagtgttgttacatactcaatccagaacattgaacggtgtattggcatcttaaaccttgttgaggtgcgaaaagcgctgaccgctgtactggtatcttaaagtttttatgtgttgcttctgttatgttcaagttaattctaaatccaaagtgctgtgaataaattgggaggagtggcttatagaaggtattccattctccaaaccgttctcttgtaatttagacttgtttgacgagctactcttccaagtacatagtctgatcaataatgtcaatgagatctcaaaactcgtttggtcttttttcatgttcaatctgttcgaatctaagcatctatctttataaacatttgacacatggtagaaatcttatttgatgcattaaattcatgcttacacaagttttgtcacagggggagtctagcaaaccaactaaaaccaaactttc

SEQ ID NO: 92851 - DNA, 686 bp, Eucalyptus grandis
  Intron number 1 from transcript Egrandis_v1_0.038847m (loc us Egrandis_v1_0.038847m.g) derived from phytozome v7.0 (c hr-ID scaffold_5; pos 39470488 to 39471173)
tgtggttccggtactacaaagagcgtcaaggtactgttattgatgcatattattttgaataaattgttatagcaatgaatacgcaactgccaagatagttaagatcttaaatcaaaaaattaactcctacagttaaactggatgtgctttattgtttgcctctcccatttaaataatttcagaggatgcatattgtttctctctctctctctctctctctctctcagaggatgcatattgtttctctctctctctctctctctctctctctctctctctctctctctctctctctctctctctctctctctctctctctctctctctcgttattttatagatcacgtttttctctttttggaggcttgcagagcagacccaaggagaagaacagacaaaacgtttacaatggtaagaagctcaaaacgttgaaatgacaagtatgacgtgcttttctggttcagtttgcttactaagtgcgtcgtggccacctcttcttttgccttctcaagccctatatatacctcgcttctcacccccctccccccttctctcatcacctttctcttcatatctcaaaacacacaaattacaaaatcactcccaatttaatttgaagcagtgttcgtcaagcttggtgaaatggcaatgtcgtcagagaacgaatagccagtgaaggcttttgg

SEQ ID NO: 92852 - DNA, 1013 bp, Eucalyptus grandis
  Intron number 1 from transcript Egrandis_v1_0.021002m (loc us Egrandis_v1_0.021002m.g) derived from phytozome v7.0 (c hr-ID scaffold_1; pos 9140067 to 9141079 reverse strand)
ggttcgtctctcagctctgggtggataccctctcggtaagtgacggaattcttcatcttggttcgtgtagcaaaacctcgcgtgcctgcagaagattgtccattgaaaaatttaggtgggttgtgctgtagcaggtgactttgaacggtaacgaaggcttaaaagtgttgtccttataacaactcctggagtttactagtattcgtcttggttcttgtagttttctgttgtctgttgtgggaagcaaaatctctgtgcctgcagaagattatccaatgaaaaatctagacgggttgtgctacagtcggtgactatgaatgttaatgaaggcttaaaagtgttgtctttatataccaactcctggagtttactagtattcatcttggttcttgtagtttttctgttatctgttgtgggaagcaaaatctctcgtgcctgcagaagattatccattggaaaatctaggtggtttgtgctttagcatgtgaccgtgaattgtaaggaggcttaaaagtgtggtctttataaaccaactactggagtttactggtattcaatttgagtcaatcagagcgaaccacttcaacaaaaagctaacaagacagataatagtaaatgtcatgtttttttttggtaaagatagtaaatgtcatgttggtctgtgcattttttttttttttttgcatttggtatcttatttgtagttatctaaatttattcgatagttggaggaagatagagatgtacataagtgaacgcatttgcttttgcacttgattgtactacttaatcagccttcaagtcaagtttgccttgtgaaccacttaataatgcagtatccattggaaaaccagtgattaagggaagaatcaggtccatttgcagtcttgattattctcatatgctataaggacacattgcattgcttatgggaattggagattgtcatctttaatatgagatttttctttggactagtggaacgttgtgattgtggaagtgaggccgaattt

SEQ ID NO: 92853 - DNA, 936 bp, Eucalyptus grandis
  Intron number 2 from transcript Egrandis_v1_0.052552m (loc us Egrandis_v1_0.052552m.g) derived from phytozome v7.0 (c hr-ID scaffold_5; pos 66294676 to 66295611)
accaagtagacgagagtagaggtactgctatccatgtaagctgcagaaatcgactctataactcaaatgaaatttgttgaactgagcaaattcgacatatttagaaatatttttcaataaactatttccaggcctagaaaaattggagagacaatacgctgttggtgtggattaatgcaaattcgacatatttagaaatatttttcaataaactatttccaagcctagaaaaattggagagacggtacgctgttggtgttggaaattaatccagagaaaacaaactgtttgttgtagttagaacataaaattggaggtgaggtacgaatattccaatctccttaaggcgattagttcctgccaatggcgcttcaaaaattcaagaactatgcttcccaagatacaacacctcgaacttatttggattagcactatgcaaacatgactcagccgaatcgttcaattgaactagcacactctgaaaaatcaaaagagtagaaaagtatatcatagcctttttggaatcgagttagaaaaaccaaaaccaaaaacataatgaagctctatgttcctatctatttatagagctttttagttcatgtacagaagagatacatgaattaaatagatgcatgtatccacaaaactcataaatcaagagatatgtgaatccaagagattcataaatccagatatacgtgaattcaagagattcataaactcaataaatacataaactaaaagatacatgaatctaggaaattcatgaattcaatagatacattaacataaaagtttaagaaatttatgaattcaatagatacgtgaacagaaaagacatatcttaatttattgactttcattgatccattaaccataattataaccataattattgcagttggcagtgttggatcccaccattgaaaagacgca

SEQ ID NO: 92854 - DNA, 642 bp, Eucalyptus grandis
  Intron number 3 from transcript Egrandis_v1_0.027708m (loc us Egrandis_v1_0.027708m.g) derived from phytozome v7.0 (c hr-ID scaffold_3; pos 70792390 to 70793031)
gagatatttcatagtcaggcattgtgagtttttgctatagatgataaagagctatggacattaaattttattgtgagttgcaagatgcaaaagattattccatgagtaaaagataatacggagatgttctgtttctcttacgggaaatttggggcttttccagtaccccaatagtcaccattttccccttccacttgcatcaaattgtgccgagttcttttaatgcccgaggggggttaaattccccgactgccaaactgcttatgctatcttgggctcttatcctatgttggccaaagtgtaaatctcttcaagttatttgtaactgctgatttaacaatttctaggaaactctgctgcaatttgaataaaataattttggctgttgagatttactattaatcacactaaccaagaacctcaactcaagtgtctacgtcttatattggtagtagggctgaaattgtagtcacaattttcattgcataggatctctcaaacagttgacttttggatccggttatatctcaagagtaatgcctagatgatctatgtggcaagatcaagcgcaatctgttgatataaaaaagtgatggtagttaatcttggtaattttttgatttgtaaatatgctcatcagaa

SEQ ID NO: 92855 - DNA, 852 bp, Eucalyptus grandis
  Intron number 2 from transcript Egrandis_v1_0.040595m (loc us Egrandis_v1_0.040595m.g) derived from phytozome v7.0 (c hr-ID scaffold_5; pos 58662326 to 58663177)
tgtgctaaatctaacttggccgaatactgtcgaaggtggataaattttatttggtttgttagctgtagttcatctgcatcaactgattcttctaggagaatttccatgtgtattgtcttgacaagtagaaatatcatggagtatcataagccatcggtccatgattctgttcagcaaagtgtaatgcctgcacatacattattttttcaatcactgaaaggacgttgcatttggagatggctgctaattaaactttacttgcttctgttatcaatgtactggataaaaatgtattccagatttgcgttgacttttctatgttgcgttacattaaaggaatgcatttgatgagtctggtagactggtatccatctttttatactgtaatcaagtctgatattcgtatgaagtagtaactaaaatgttacgtatggatatttgtctatttgttacaaataagtccacaagacagccgttgttcaaggtcggtttttcatggtgtagttgcattggggatgctctcaaagatgtggtacaacaggtatgctcaacagagaatgctgttcaaaaaccggtaaagataaacaaagtttatcgaatttacactttgtctgagacatatcccttctgctcaacttttttgaggtctccaactttggcaattcttctgttggcgttatttgccagacggaagcagtggagtttgcaaacattcactcttcccaccttgcaaggtacgaatgcacattcatagttcgtagtttgtctctctttatagttacttttccaatttcccgcttccgtatccgttccgatttctaatggttgttcgctcgagagaatgcagggcta

SEQ ID NO: 92856 - DNA, 678 bp, Eucalyptus grandis; identical to SEQ ID NO: 92665
  Intron number 1 from transcript Egrandis_v1_0.022953m (loc us Egrandis_v1_0.019867m.g) derived from phytozome v7.0 (c hr-ID scaffold_5; pos 1871111 to 1871788 reverse strand)

SEQ ID NO: 92857 - DNA, 629 bp, Eucalyptus grandis
  Intron number 2 from transcript Egrandis_v1_0.006795m (loc us Egrandis_v1_0.006795m.g) derived from phytozome v7.0 (c hr-ID scaffold_3; pos 5060270 to 5060898 reverse strand)
cccagtttgctggagcacagatcccttctaatcaggtgtcattcatttctggctagactgacatatctttttcacacataaatgttaactcgccttcttgaagagtattttagttgttcttatcttatagccagagaagttgtggttcacaaaagttattgtttcttggccacagtgatatgttgcatacattttctagtcaccttttagtaattatgatggagtttctaatgattccttgttgattgtcagggtttgtcagaagaaatattgttttaatattcagttgataatattggtcaaatcttatgaagatagtgggatcaagcttgcatcttttctccatgcgtacatgcatatgtgcaagttctgtgtttccctttttccccacttttcatccttgggtttggggagcgtttttgaagcctggagtgttgtgtagtatactgcatattgcagaacaaatgttgcactttctaagatcagaatatgcctttgttaaatgcaccgatgaatacttcacctgtctattaaaatgtgtttctggctatgtaatgtctcatttggcttcatttattttgattggttgatcagggaggaccagttgctgctcttgttaaggccgaagt

SEQ ID NO: 92858 - DNA, 465 bp, Eucalyptus grandis
  Intron number 1 from transcript Egrandis_v1_0.022847m (loc us Egrandis_v1_0.022847m.g) derived from phytozome v7.0 (c hr-ID scaffold_3; pos 59673926 to 59674390)
caaaggtaacccattccatgctatcacgttccgtattttttattttgatatatactagggaaggtgctttcacattccgtatttaggggcatcatatagtgaagtggtttgttcatttccagatttttctgagaagaacgcattcacgctgtataatgattacatacatgcttttctaccttctttttgttagtttttctgcccaagattacacaaagtgaatccacttttgaacaaaattgatcaaattacattgataataatttactggaattacaggggaacaggacagtcctttagttacaagtacaatattttagccatggaattaacaatttatgaggaaatgcaacctaccagtttccgtaattttactcaaggagatcgttttcgctgttaatatatttgcttctggtttcacaaccatcaggagctgcacctgaaccatcgggagctgcaccacct

SEQ ID NO: 92859 - DNA, 734 bp, Eucalyptus grandis
  Intron number 1 from transcript Egrandis_v1_0.013517m (loc us Egrandis_v1_0.009406m.g) derived from phytozome v7.0 (c hr-ID scaffold_1; pos 16853470 to 16854203)
gcttccttcggccggtgactcgaatcaattctcaggtacggcgcaacctctctctctctctctctctctctctctctaggtgactgcgtatttgcgtgaatttggtttggaggatcgggtgatggtggaggagtagttttgcgaagcgaattccttgctccgttgtggtacgtctcttcagcgttggagggattttcggctctgaatttcgtcctttctctctgccttttccttctttgaggttgaaattaagccgagcctgtacttggatacttgcttttgtcgaaccgatcggcgcgaaaacggcgaattagacgcgcgagttttccgaagttgcggaaaccacctggtccggagcggaaattcttgatttattccatttgatttttgcatgtagcgatgagttttggattgcgagggttctggtgctgggcctgatatgcggtaacccgtcggtctcgaaagcttatcggttgtagcgtgactgagagactggagtcgattctgaaacttaggttttgtgtttttggttgcccagtgaaagtatatactacttcggaagtcaagcgactaataaagtcttaggctttctgcctcgcgactttagcagaccgaaacgaacgcgttttctttttcatgttgtgtttcaaacggacacgatcgttttgagcttgcatgcttccattggtaattaattttcgcgttgtggggtcgtggaatttcgcagtttcact

SEQ ID NO: 92860 - DNA, 904 bp, Eucalyptus grandis
  Intron number 2 from transcript Egrandis_v1_0.018284m (loc us Egrandis_v1_0.015416m.g) derived from phytozome v7.0 (c hr-ID scaffold_3; pos 52763681 to 52764584)
ttacattgcccctatctggtttgtaacagaggtattcaacttgattttgagtttccctcccttttttcttctgcaaacttgcttttgttattctacttgttacttctacttatcaatggaacaatgataataactctacacaactctttgggtttcatggagtcaaatgttggtttggacatttattagtgttattgtttctttgactaaacctaataaaaaaaaattccctggagcatatgaactttttcatacctttggttttgatatagagtttccaggcttagatttgaaacaaatgaatcagttacatatgtatatacatatggggcaagtgttcacattttcacaagtgctttttggttattccagtggctcttaatatccttagcatggattggtacctttgctttcttaggtttctttccttgatattgttgactgtccttgtttttgttactactgtttacaactggctataaaatgtgctttcctgagattttcttatgtggcccgcatatattttgtgtcctcatagtgaaacaataagtaaatcctactagctattgcaaatatgatgtttgaccttatatcctgtccatgttgtcatcgaacattctggcacatttccatcaggtacccaatgtgttgcttgcggcatcatttgagtgactttatcttgtgttttgaatgatcggagttttgggaaggagctctgtttgaagcatgatcctgccacaacgctataatcatttgagtggaaactttttttttttaaattgtcattaggtcactatattgcatttattctattaatcataggagtagaaccaagtttcattcaatagaacaggaactgcatagtgctgattgacagtatcgtatcgattgcagtatttatcaa

SEQ ID NO: 92861 - DNA, 871 bp, Eucalyptus grandis
  Intron number 1 from transcript Egrandis_v1_0.015548m (loc us Egrandis_v1_0.015548m.g) derived from phytozome v7.0 (c hr-ID scaffold_5; pos 25192770 to 25193640)
ctctgcattctcgccatctcctagtaaggtccaatcatctctctctctctctctctctctctctctgctatctctcttcagtttctttgtattgctagaaccgtttctcacttgaactctatgacaatcgttacatctctcggctaatcatgggtatttgtctgtctttgaactgatatacaagttcacgtgcctcttccatgcgttgttgactctaaaagattgattaatcttgcttacagtgttttgcgattgatgggcaatggtcatttttctttggatagtaaattattattttcttccgatcttccggttatgaattttcgaagtgaaggtttggttactgagattttctgcgtctttcccctttgactctttaaccactcgtgtgtctttgagaaacacaaaagatcactgcaaagccggctgatggtcttgggttcagatttctaactgggcaccctccagacatgattctttgacaatttgacatgttagatgtgtgctagttacatgtatgagagaagttcgaagggtttgaggatgaatataacgagtgaatcccgtgttaggaagtgagattgtgtctatgggaaggatccttcttgctaaaacggctttcattagtaattcttgcaccatgttccaatttaaattaccgttttgcagtgcggcaatgttcagtcagtacttcgatcagagaaattaccattttcccctatctttctttctttccttcctttggtacgcacttgatctcctgtttgaatctgaggatgaaaatagcacatgataatgccttgacttaattgtagaatgataggagcaactaatgttgtccttctgatttcttcttcagctttcgataaga

SEQ ID NO: 92862 - DNA, 695 bp, Eucalyptus grandis
  Intron number 2 from transcript Egrandis_v1_0.019911m (loc us Egrandis_v1_0.012244m.g) derived from phytozome v7.0 (c hr-ID scaffold_5; pos 44698592 to 44699286)
ggaagtatgtatgtgtttctggagcagtgccgtgcatttgggtatttttcctttcttgttcttttggtgggtattgctggttttgggtttcacttggcttgaatgagtttttatttgcacctacctgtgtcgtgcgcctgagtcagatctgtttttccttgagcaggttcagcttttatcctcacatctgtggcagaacctagttgcatgttagtgggattttgaattggatacccttgattctttcacaatcttatatgatgattttgatagtttgtttccttcataatgtttcctgggtgatggctttaacatgtggtcgcgtgacctaatctattgtttttagctttagtgaaccctgagatgtgggaccattttgatttgttctgttttgttttacatatttattatgtccttaaatcagttgagttgattggttgagttaagttaaatggaggataacataaaatcttttagtgttattttgccatgtgtcgtcttcaaattctaaagaagatttaatgcttgttaagtcaaaatggtttcttctcattgatgtgctcgtatctgataaaaataaccttgttttgttacagtgacatacatatggggcactctctgctcgttcgtgtcagttaatttcttttattgttgcagcaggtgattaccaagaagagcctactcaacaaactgta

SEQ ID NO: 92863 - DNA, 530 bp, Eucalyptus grandis
  Intron number 2 from transcript Egrandis_v1_0.025471m (loc us Egrandis_v1_0.025471m.g) derived from phytozome v7.0 (c hr-ID scaffold_138; pos 62963 to 63492 reverse strand)
tggagtatctacaaacagattgtgcaatcaatccagtaagatggaacaatgcctgtgtttttctgcctgtctgagattggtttttgtttccttttgctgttgcattcacatatgcagcgttaataatactagaccagactctgtgcattaactgctatactgagatagagctgtgttacatcaatgtgggaagagcaggaactataaaggtaattagttatatgggtaaagtctagctaaccgagaggtgtgatgctacaggagactttctagaagcttgagaaatgaaaaagggggattggatatctcgtcattagtgggccacctatatttataatacagaattgtagaccgtacatagcacagtctaatcaaatagaggtctgtgacggcattgatggtaaactaacgtgcatgcatttctctgtccaactgactcttttggcataactatggtatgctccttaacttgacactagttgccactgtttcttcattcgtgaagggaaactctgggggtcctctttgca

SEQ ID NO: 92864 - DNA, 714 bp, Eucalyptus grandis
  Intron number 1 from transcript Egrandis_v1_0.001750m (loc us Egrandis_v1_0.001750m.g) derived from phytozome v7.0 (c hr-ID scaffold_5; pos 3802836 to 3803549)
ctctgcaacctagctacggaagcagagctgtccgggtacgcgctccgctcttatcacgtcccgcgaggacgtcgtgtgtttgttgttctggacggcggtcgccggtggaaggcgacggcgtgcgcgtcggcatttggccgagcgtgcgtcgtcgacggcggttgcttttgatgtcgttaggaagggactgcgttggcagttcgagcttggctggtaatcggtgccgcagtaggctccatggcggtggcggcggcggccgtgacgtttttgtgttgtgaggattggattagcgtttttttgcgtctataatcgtgctcgtgtcgaatgagatgcaagtcttcgtccctccaagctgcttttcctccgaattattttgatgcttaggtgttgggggagtctgaatcttcttatcatgtggcttaaggttgatttgattctgttgtgaacggtttgtttaagttgagctcatgcatttgacacaaatgtttggctggtgagactttagaactacttcgaatcattgtttttacacatcgagggagtactcaaacaactctgaaaaatttggaatgacacaatagactttatctggaattattatctgtttttacttttgtttcgagaagattaaaggttaacgtgctgtgctatttggtttcccctgggatttgcttctcaggaagcactggaacacctagcttctgttgatttggt

SEQ ID NO: 92865 - DNA, 664 bp, Eucalyptus grandis
  Intron number 1 from transcript Egrandis_v1_0.009220m (loc us Egrandis_v1_0.007970m.g) derived from phytozome v7.0 (c hr-ID scaffold_3; pos 16063164 to 16063827 reverse strand)
gccgccgcctccttgcattttggaacttcgtttgggtaagtttccacccttttcttggctgtgtttcttttccttctcatctgcaatgtctgagagtgagtttgccccttctttttttctgtatctgattcacatctgctctgtatttgcctcatcttttctgtccggtgccttttgagctgtgccatctcatgtggaatcgtggtttttctggtgtatttgggacaggctgtgtagcaatttaagtttgctttttgcttcttgttgttgaccgtggaatgtgctgtggagtgaactgcggatgacggcaatgtttatgtcgtaaggtcgtgattatgaacagctgtagaatatggaacttcaatatcagcaaactcatgccaagattcttgcttctggattcttttcgcttaggcgtaaagttacatgcgtagatgtaccagttcagagaggctagatgaatatgggactcctcaatattctctggttaatctttttatcggtccaaaacacatgagccctgaaataacttgccggcctttaccttcgtctgatgttatttataatacgtttcttttgcatgtagctccttttactatatcaactttacacttctgaaggtatgtttatgtttccatgcataaaggtacatttcccggagctt

SEQ ID NO: 92866 - DNA, 747 bp, Eucalyptus grandis
  Intron number 1 from transcript Egrandis_v1_0.053637m (loc us Egrandis_v1_0.053637m.g) derived from phytozome v7.0 (c hr-ID scaffold_3; pos 53576751 to 53577497)
tcaagagattattgtgctgttatttactattgtggctattgaaattaaaaaaaaaaatatgtcagtttcaaaagctaatcgactttagaatcttagatctaatttataatgctatttctacaggttattggtgaccctattagcacatgaaatttgttaatgacccaattatcttctacttattaactccacgactccgaggattcaacttcctgcaactatagtctaaatcagcaatctaaagtcacaaaaccaaaagaggcacaacacttaggagccttagacatcctcttgaagtaacaaatcaaaaagtaataaagcagaattgttatagtgcagaatcttccacaaatcagcatggatataacacatcaagcagagtatctgaagattttctttttctttttctttttctttttctttttcattcaatttccacgaaagtcatattgttatccttcatcattaatttctatcataattataggtggcgatatctctatttataccttacaccgtatgatgtaaagtagactcaattctttgtttttatagtatcagagcaaaggagctctagattttaaatttttccaagtctcatctctctggaaccccatttctcttctttatgagatagaaacacagagcaagtcttggagaagatacaacagaagtcatgaatcagagtcatgatcctcctcatcaaaacaagctgaaacctaagccgaaggccgtgatcgtaggagg

SEQ ID NO: 92867 - DNA, 922 bp, Eucalyptus grandis
  Intron number 1 from transcript Egrandis_v1_0.030695m (loc us Egrandis_v1_0.030695m.g) derived from phytozome v7.0 (c hr-ID scaffold_5; pos 13696611 to 13697532 reverse strand)
tttaacggtgctcctcttaaagccccccaacgcttgtatggtttccactagttcagacatgtttttctctccaatgatgattctcacactctattttgccggagatgttctccaaggatgcctagccaccttttctaaaaggtctttctcacggaatctttaaaaaaaatgcggaggtttgccacgtgcgattcttgccacgtctaaccttttgatgggtattcgcggcggtattagtggcactcctgaaagtgtcgaatggcaaaagttaagtggcacacttggagaagctttacaatccgaaggggacacaagtggcctaattagaaggatgataactctgcccatggaccaacttcacgatatttatgcttgactcctttacttgagcatctttccattggattgtctcataaggtgctccacattgatgtggctgtgaatggcagaaaaatttatagagcagaatgacgaaaacaaggtccatataattctagaagaaacgcttgaaaaaatagttgttcataataatattgttcgagaggtggagaaaacaagttatgagaggatgagaacttgcctcgttcacaaccttctacatcaaattattatctccaagtcaaaagatgatgagttcgcgatgattgttgctgacctagtagaaggatgtcctgagactatatggcgcctatccttacacagccaatggacaatataagaagtcatacaagcattaaaaaaaaaaaaaaaatcgccccctacttgtcttcaaaatggtgtcccaaaaatagctaaaaaagctgctggagcaggttaagaggctaaacgtgctagaccttcaaggttctttgaattcttttcttaacgagattctcaatttactattatctcatgtacctgagcttgagggatagcaacatag

SEQ ID NO: 92868 - DNA, 835 bp, Eucalyptus grandis
  Intron number 1 from transcript Egrandis_v1_0.012076m (loc us Egrandis_v1_0.012076m.g) derived from phytozome v7.0 (c hr-ID scaffold_3; pos 26642398 to 26643232)
gggtccaatcaaggtaagatttaaagaaggcatatcttttatgaataatcacatgttatccaagggtcaattgcacaaattctcctttctttctttcggaaaaggttaatatccttttttagattcaggattttcctttatatagaagaggttttcataggcacctaaatataccagaaacttccgccccttagaatcttaaactaatggtatcctgacaaccaatcatgcgtaacatttggcataccttttcaactaatctattaaggatatagttatagtatttgtgcgtgtcctaattttttttgaactaaatggtttgttgctctaagacaatttctccccttgtaaaagtatgtctgtatggcgattcttgttatatttctatgttaatcttcctacacgagaaatgaaaagttacaactgcttttgcacgaaataccatttgaattatcgtagataggataattattttagaaacaaaagttgaccccactacttcaaaataagtgcattactttattatagttttatgagggcgaactaaatgttatttttgtgagtgctaaccggttggtatttatttcagtcaaattggaaggtaagcctaatacaataagaaaatatagttagcacttgtgtattactaacattctttatgcaatgggtatgttaaaaaaacactactacttaagaaacatttaaacaaaacaaacgtgaagcaaaggagaatcatagcaatgacagcatgcgaaccgagttatgaaaaatcaaggatagtgaaaaatcaggtattgcaacgtctaatcttagaggtaacctctctttctttcag

SEQ ID NO: 92869 - DNA, 689 bp, Eucalyptus grandis
  Intron number 1 from transcript Egrandis_v1_0.012219m (loc us Egrandis_v1_0.012219m.g) derived from phytozome v7.0 (c hr-ID scaffold_5; pos 68503425 to 68504113 reverse strand)
ggtcgccgggcgttttcgacgagagggtgttcagggtctgtggaaatgaattctcttgcgctctgctttttttttttttcgtgtgcagtgtcggtgggttgccaagtgcagatcttttctttccccgtcggtagaattgtttgcactgttagccgcagaaagcgttggagaacttcatgatgttgatttagagatggaagtattcgatcctcgaattttaggatccggttaatgtttgtttccggggtttgaattcggtgggagttacttgagctttgaattaaagaattgcagaacacctccttttcgtcgttttgtcgtaacgatatgggcgtataggtgaagtatcgggttcctcttggatgaatctccgatggagaattgcgagaagttttgttgcagctacgagtgttagctgtagactgtagagattacagtagaaaatagtttatacggctgccggaaatgtctgtaagtagtgggtcgagcgaagggatgggtgaatggtgctaactttgcggtggggagatgatcatcgagatataaaaatagctgtccgtatgtttgtactctattctccctgtggtggctctcctgtggatataaatttcacttttttatgcaagcaacattcggcagggacatttcgaggttcttagctttgttaatctgatttcagggattagatt

SEQ ID NO: 92870 - DNA, 408 bp, Eucalyptus grandis
  Intron number 2 from transcript Egrandis_v1_0.010617m (loc us Egrandis_v1_0.010647m.g) derived from phytozome v7.0 (c hr-ID scaffold_3; pos 14869223 to 14869630)
tgggatttgttacacccatcctgagaaacttccaggtctcatttattttctctaacctctcaagaaatctctctctctctctctctctctctctttctctctctctcaagatgttgaatttttactatatatggtatactgtttctatcgaaaaaaagtaatttctttggcaatttgtagaggttatttatcaatgtctacattgcctagctagcttataacttcctccttctccttcttcatgtttgttatgactttgcagtgtttttgcacatgtatatttatggttggttatacctaagtcaacctaactttgactttttggccacacggtggtggtggtggtggtgtgtgtctctctttgtgttcttttgtctgaattcttctctttcttaggagtgacaagag

SEQ ID NO: 92871 - DNA, 881 bp, Eucalyptus grandis
  Intron number 3 from transcript Egrandis_v1_0.005481m (loc us Egrandis_v1_0.005481m.g) derived from phytozome v7.0 (c hr-ID scaffold_927; pos 5053 to 5933)
cacctaggtatatttcttggatagcatgtttgtgctttttggtcattttgttgctttttgcaaagatttagcgttcctcgttttctacagtgttcttgcttttagttgataaattcaatttggtgggcatatttgtcacctgaatttttgctttttgcgaagaagtcagttcgcacatgtatgtgctagtttatatacagtctatacatatggtgatgattaattattattggtgcatgtcatcatttgaactgatgctctctgttgatcttttaagtatttctttgataattcttctctggtcttgtgtgtatttaaactagacacattaaattccattcttgtgtggcaattcataagttggagatagacttttagtctgtgtcaattaaaacatccggtgtttgcacagggatattgtagattattatgaacatcacagggtagcctgtataccctatggtatacttgaatgagctgtttaatgtgttcttttatcttcttgatgatcacggaagtcatttgccaacactggtaaagaaaaaaaaaaccatccttggatttctcttaatcaatccatgatctagattattatcattaaatgggagaagtagtttctcatcaatgcgagtagctaagggatagtgtttctcataatttcttcatatggacactggcagaagcggtcatgtcatggaagttcttttcacctttttgatgtgcatgtctcagactgatcttcattaggattttcccttttctagtttttctcatacttgtttagtttgtttttcctttctttgattgattttctcattatttcttgtttgttttgtttgttcccagcaaaggctgtgcagtatcttcataaccaggggatt

SEQ ID NO: 92872 - DNA, 625 bp, Eucalyptus grandis
  Intron number 1 from transcript Egrandis_v1_0.054389m (loc us Egrandis_v1_0.054389m.g) derived from phytozome v7.0 (c hr-ID scaffold_2; pos 1140590 to 1141214)
attgaagctgctggctctagcccaacaaaatccaggtctctatctctctctctctctgagattatttagttacttgtaaaaaatcccggaatctgcgaacatggaattttatgtggagaaagccatcagataaaaacaaaagagagagaagcaaaatgatgaacatgaaaaagttataatttgcaattttgatggtaataggtttgatttgtcgatcaaattgatatttgaactagcccatctagcagcttaatttcttttgttttcttcttttaaagttgatcgcaaagatcacgcaatggtgaatggtaggttttgcttacccaatgacagaataagcaatagataaaagaaagagaagaagcgagggaaaggataagattaaaagggtgaccacaggcatggatatgaaatatgttgatgcgtcgttcattcacaatatgaataatatatatgtcaatatcagttacgcctaatcaattacaacggtcgaggtccaatataaggtgaccgcttttgaattcttgaactgcaatgggaaagtttgaaaataaattgactatttggttctaatttatctcaattgcaaggtttcataagcattgactgtggggcaacttatccg

SEQ ID NO: 92873 - DNA, 683 bp, Eucalyptus grandis
  Intron number 2 from transcript Egrandis_v1_0.034646m (loc us Egrandis_v1_0.034646m.g) derived from phytozome v7.0 (c hr-ID scaffold_5; pos 54512207 to 54512889)
gcacaagtgtggagtgccgcctgtaagttttacgttccactttgtttctgtttttccaccctctcataggaataaggcttctataggtttatcctctgaacactaagtcagaaattgtgcgacatattttgttttttgaaacagtgcatgattcatatcatgaaaagctttttatggattcaagaccatcttcctgctgaagtgcattctgatattttctttagaatatcagatgaggccctctcatctgatgttatgtatttccaagcatttaccaatcctgatgtgttacagtaccatgcggagagttcctcttcaagtaatctttttggaatattaatcagccttatagagcctaaaaccaaaccgatagtcgtagagatgctagataaaacagttgccttacgactttcaattgtttttatcaggaaaacttaattagaagaaaataggtcaaattatctcccacagagaagggatgtaaagaacattttcccttgaaagaagtgaatcacatcattgaaatctaggacttatagttgagagtaagaaagaataggaatagcatatgaaacttttgattcagaattcattgtaactgcaataaacaaggctgcttacaatgaggtataatttggcgagagtgattttatgactttttgcatatttgtggtttcagtgat

SEQ ID NO: 92874 - DNA, 679 bp, Eucalyptus grandis
  Intron number 1 from transcript Egrandis_v1_0.019256m (loc us Egrandis_v1_0.019256m.g) derived from phytozome v7.0 (c hr-ID scaffold_5; pos 16299905 to 16300583 reverse strand)
ttactcggtccggaccactgtcagacccgacccgggtaagtctttcttcttttttcctgcctgaacatggaaattggcatgagttccggtccagtgtaaagttcttttgaccgatgttctgtgcagtccatacatgttctgatctgtttgtgcacgcacaatacgtatgcgtttcaaatggtctgtgtttgtggagaaataaaggaggaaagggtttgggcgttagttattgcagaaattatttatactgtcgggtacgggcgtcgaggaacgattttgattggaattacagtgggacatagatcatatgccgcttttcatgcatgagaaagcataagattgactaaatatgggttaaattaatggcgatagacttggttaataatgattagatttctcttatatgatcagatatgaacatgttccatatgcccaggtgactaagacaaaatctcttgctcttgttctatatatgaactttctcacgctctcttgaatcagctttccttgcagtccatattgacaagttttatggtgtgttcagattatttcctgaatgagccatgttgtgtcagctgattttctctagatcggcttctcttattaacaggacatatccatatcctattaaatatttgaacttttatttgggacacgattgacggatcgtactgatcag

SEQ ID NO: 92875 - DNA, 932 bp, Eucalyptus grandis
  Intron number 1 from transcript Egrandis_v1_0.040699m (loc us Egrandis_v1_0.040699m.g) derived from phytozome v7.0 (c hr-ID scaffold_5; pos 13475280 to 13476211 reverse strand)
gtcttccgttgattcgattggctgcgtgttagcgagtttttttttttttttttgggtgtgattttagggcggctcggaatgattcgtgatttgggtgtgcttgaattttgataattggttacttgttttccgtcgttgattacgattgcgagcttttgaggctcgctgggggctaggttttggtctatcctgttaatttagggttttgctgccttgggattttgcgttgatttgattggttgcgtggttcgcgagtttttggaatgatttgtgagctgggtgtgcgcgaattttgataattgttcactgtttccgtcattgattacaattgcaagctttggaggctgggtgtgggctaggtttaggtctcttgtgttaatttagggttttgcggcctggggtaattgttctgaggtgaatttttgcccactattttccaagacattagccgatttctatttggtggagacgggtgatggtgcggtagttatcactccctgttaattattgttgggattggtttattgtttaattacatgccttttggtattattttctcttccgacttggtatataacctaaggccgagcacagaatccatgataattaggacatgaatgaagggcctgcaaattcaaatagtgggtcttttactctttgactgtggagaaatattttaatccggttgatggaggcgcaggttctattgatattgtcctagggcactgtccgtgaaaatatttttttgttttgtttccagcgatagattttaatatcttatttttagcttatttcgggtaagttgtgatgaagctatttgatgaatgtttgtctatggtctgatttcctgaatatgacgaaatctctcatgtggttctttgtttataggtttttaaggatctggctttaaggagcttcttattttctcagat

SEQ ID NO: 92876 - DNA, 890 bp, Eucalyptus grandis
  Intron number 2 from transcript Egrandis_v1_0.029118m (loc us Egrandis_v1_0.029118m.g) derived from phytozome v7.0 (c hr-ID scaffold_381; pos 50006 to 50895)
agagcttctaaaagttcaggaaaaggagtcaaagcgtaagtctgcttaattatacttgcaattttgagtcatacttgttccatctccgtttcattactttggtatgccacagttagaatctaacttttcgcttcatttagaagagtctttgaaacttcatcttttcttttaaccttgaacattgatggaatatttatgctgtgggaggctttttgtttttaactctataaagaactccgttgatataatgtcatggttttttgtggcaatgtcatgtcttcaatttgtcgatctactttatgtcgtgtcatttgcttcctactggaccttgagcctatttcttgccagcttagagcttggagagtaaactggcaagtgaaagcatttttttttcatgacaacttccaatttcatttttacctcatatcttagtctggtgcttctgctttccttttacatgcctataccacttattcatgcactgacactcactggtgtctagacacttgagaacgatttcaaccctcacctcaagttattcaaaatcttcaattgacggcaataattttttttctgcattaacaggttgacttaacaacctgtaatcatagggccatctaatcatacacgagctaagctttcaaaactactgatgcaatggatattttgatgtgccactgcatcaggacctcatgtgtacattgggatactaatacgggagatttcgcattgggacctcatgtttagtcttgtggttgtctgctgaccatgtgggatgctaatgcacgatattgtgcatttaggaatcttcaattgacctggttagcaaataattaggcgtttttttgggatttactgatgctgaagatttcttggcttcagggagatat

SEQ ID NO: 92877 - DNA, 864 bp, Eucalyptus grandis
  Intron number 1 from transcript Egrandis_v1_0.031431m (loc us Egrandis_v1_0.031431m.g) derived from phytozome v7.0 (c hr-ID scaffold_3; pos 26568913 to 26569776)
tggagtaaaaatcattttatcacctttaatctatgattgattttacttccatatacaaagaaaagcacttgttgacacctaaattttgacgatctatttagtcatttatcgcaataaaaattaggggttaattttattcttgaaaaaaatattaattgcatagcatatagatttaggtacatttacttttaatttgcatttctttgcatttatttattgaatcgacggtgagcgcaagatttttcacatattcaagtaatatacacacatgaacatatttttgagcagaaaggaaattttcggatggaatatttgaaaaatacaaaagagaatatcgcacgaggtataacgatatatttagggggattatgcacaatatttcaccaaaatttaattccttcccctttatagtggtgtgtgtacgacaaaggaggggtcatacgtattgaatactcggccacatatacggggcttctcttcgttcgagcaaaaagaacaaaaatctctttccttgggtttgtttttcctccttcgtagggaaggaaaaggctgcaagggaaaagtcaaatgtgcagagagaaaagtgacgtgagggagacttgaagagagagagagagagagagagagagaaaaaaagaaaaaaaagggaaaaagttcttcgtcttcgccgcttctgcacgaccccccggcgcacgcgagctcctcggccgctgctgctcgttcccccacgccggtagccgagccgccggccaccgctcgcccaccgcgcccgtgccaccgtgctcgccactgctccggcgcccctgcgccgtctgcgtccggtcactagccaccgccgcgcctgccttgccgcgtctccgagcg

SEQ ID NO: 92878 - DNA, 506 bp, Eucalyptus grandis
  Intron number 1 from transcript Egrandis_v1_0.029341m (loc us Egrandis_v1_0.029341m.g) derived from phytozome v7.0 (c hr-ID scaffold_906; pos 3099 to 3604)
aagaggtaagtaactaaggagttcctgccaaattttgtcaagccagttcgtgggctacccgccatcatgctggatacataaaatttgtcccatattatctatataatgaagtaatttcaggtttgctggtagctgtgttggctttaacaggtgtttgaattgatcagagatattgtaacttgaaacgagatgctttgtttagatcagtagatagactttttatttaagtgcagatttgaaaatttaagtggcctcctgtactctatggataaaattataccaaaaaaaaaaaaaaaaaaacaacacaaagagtgagtcagagagcactttcaacagttgattcgcactcagaatataagttcatccattggaatgcaacattacttgctgaagagagaaattgttgcgtgaagtcaagagcgtgtaccttttagtagtggagataaatacttccattatccagcttgaccgatgtaccgattaccgagtgtttttcttctaggaat

SEQ ID NO: 92879 - DNA, 681 bp, Eucalyptus grandis
  Intron number 2 from transcript Egrandis_v1_0.009149m (loc us Egrandis_v1_0.009149m.g) derived from phytozome v7.0 (c hr-ID scaffold_3; pos 49696533 to 49697213)
tcactatcaggtaattgcagatggtgcttgctcatgccctttgcagatgctgatttgtgggtgtaaagtagccattggagctttacctttggggtatttcgcaaatggctaatcatggctaccttttagtttttatctggtggtttgtttcaaaatttttttgctcctgctctttagtcacaatttctgttaacatgtcaaataatttctttttcgaagtttccgaaacacgtgttaggtaatttgcttaacgtgttatcccaagtaaaatcccagaaatcgtctatcttggagaactgcacgaattctaagtgatgcaatttgatgtatatttcactttgagaaagtaaaagtacctttattggagattcctagtcctcaaaaagttccaagggagcctcatggaggagattaatccgatggatgaagatagcgaatgactgtagtgccagaatcacttaccaaagcagtgagaaaatcattactttagagatgcttgaagcctgatattaagtgtgtagaaagtaaagcaaaatgactggactccttttcttgaggcttctgctttcatatttatcatatctattatagattctcatttacttcttgcaacattagcccacctctgaaaaatattaaacttcatcaggcttttacagcactcaggagtgtatcctgact

SEQ ID NO: 92880 - DNA, 818 bp, Eucalyptus grandis
  Intron number 2 from transcript Egrandis_v1_0.011959m (loc us Egrandis_v1_0.011959m.g) derived from phytozome v7.0 (c hr-ID scaffold_2; pos 25935420 to 25936237)
gagttctctaagaaagttaaaggcgaagcaagcgggtatgccgatttttagtaccttcactcctctttttctgtcttttcttttttctttttttggtagtagagacgctaataatgaaaatgttcgcaatgcataccgaaaggataccaatgacgccgaccattaatgagtagtttgaacgctaggagcgatctgatcagggactgctcggctgtgcttttcgagttcaatgctctttctactgttaaagactcttgccccgtttttatgccctttggttttatcgtggtgttggttcacattttagtctcatttgcttctggtagcttgtaattggagatttaacatcgcttacaatcatatggaattaatctgtaaagtgtcctttctatggttttatagctcaaaacacgcgtaaatgtttgaccttttttcttttggatgagctcatgatatattgatttgccaccatggagctatttcctttaatttgccgtgagattctacgtttgggatatcgagatgcagatataccatttgagtgtcatatagattgcaaatacagaaatggtgaagcttcattatattgtgcatatgtttgggcatatcagttaaaataaaggagcaagaactagagatacttctgatgttgtctgcttcattgttttcggtacttggactttcagacaaatgatattgcttgcctttataatttattggtgtgttcggtttccttgagaggcttattcatgttaacgatcttcttcaatcctttggtcatagcaatccagagtttcaaaagtcagtgaagcagctaa

SEQ ID NO: 92881 - DNA, 844 bp, Eucalyptus grandis
  Intron number 2 from transcript Egrandis_v1_0.030725m (loc us Egrandis_v1_0.030725m.g) derived from phytozome v7.0 (c hr-ID scaffold_5; pos 4095414 to 4096257)
gtcgcgttcgaagacatcaatccctccgctctgaggtaattcactagcttatcccgatgcgcgtttcttcgagcagtctgattggtgctctctctggattgtgctttgagctcgtttagttcggattagctgtgatggaggcttgttgatctacaccgtggctcgactcgatcgagatgattgtaggttgatcgattggagcgggcactgctgtttacctctggagattggaagggataacgagttctgaatcgttttgttttttttttctttttggctggaatgatgggggttttgttcgatcgagatttcggatgagtgatgtggattgggattccgcttgattccagcgcatattgatgtattaggtgttcattgaattagagcggcgcatgttcttttgaatgcttcgagtttcgtctattagttttgaccgaaatgctgcttcgagagcacgacagactgccaagagttgagtcagtctttatggagattgcctggtttagtttgggccgcatgtgagatgaataatgatctgctctcttccttttgtggagcctggcggttttcgatgtgattgggctgtcgattgcattcctcttatgcttttcttatagtaatgttactcgcatctcatgagttggtggtaacttctaagagacatgctactgatactgtggagtttaaggagtgatgccccatggcacagattgcagcattgctcaaaatgatttcactctttggtttgcagctcttttgctgcgctctcgggatgactgaaaatcttaagctcaatgcctgatcgacaggcattatttggtgattccagtggagcacatttcaa

SEQ ID NO: 92882 - DNA, 814 bp, Eucalyptus grandis
  Intron number 1 from transcript Egrandis_v1_0.030938m (loc us Egrandis_v1_0.030938m.g) derived from phytozome v7.0 (c hr-ID scaffold_3; pos 24631383 to 24632196)
gattaaatctatcatcactatttgaccggcaacaggttgaattttgttttcccagcagttattttctatcctgataattatgtctagagtgcagtagtttggcactttcaccagttatattccgtgaattctagcctctaggcccttataaaaaaatttgatatcatagttttcttgattttctactggtatgaaaatcacttgaatactgtttgtaggtgactttgttctttgccccgcctgtgattatatatcatctggatctgcatagtccttaaattcaaggttaaatttagcacatgaatcaaaattttctcctcgttgtgtggattatttttctgtttgcttcattaatgcagaatcagtagttagaaggaaattaaagaaaaccaatgtggaaccagaaatctagattgatcaaaaattgtgtactgaataagaaccttgactgtaattgttcagtgctaaacctgtgaattttttagcattgattaaaaatctcagtcaaaacacagaaattgcagtataatgatcaggaaggcagatgagatgctgtggattgattgtcagaacttctctcttaagttaaatatctatcgcattttagttgtccggttggttaatcttgaattgaaatccccgtttaactgacttctactcatcctgagccatgaggttcactcatagtcagcgataaatctggatagcctgcacataaagaagtttctctctctctctctctctctctctctctctctcatcgctgttcatttgtgtaggatttcataaagagacaaactcgttttgtctcccg

SEQ ID NO: 92883 - DNA, 418 bp, Eucalyptus grandis
  Intron number 2 from transcript Egrandis_v1_0.030938m (loc us Egrandis_v1_0.030938m.g) derived from phytozome v7.0 (c hr-ID scaffold_3; pos 24632249 to 24632666)
ggtctcaaagtccatacacgtaattttaaggtatgtgtaatttgttttgattcatccaaaatggttttactgtccatcagtgcttgaagaatggttttaaatttgacctcacattggattgggaaatattgaatatctatgaagctttctaaaattagttaatgctttttgggcaaaagcgttttccagaacatcccttttcatatactatgttggacaattgtaaagtagacggtttggacaggcttgacttctttttatgaaggatgtgagttgtttgtttaggaaaattgactttagtctcgtcttgagtgaagcatgtgctgtgaaaatttgtattcagagttatccagtctcattcgagtgatatgttttcttcgcagacaagacttgaaggattgtctgcaaataaagccgg

SEQ ID NO: 92884 - DNA, 972 bp, Eucalyptus grandis
  Intron number 1 from transcript Egrandis_v1_0.038210m (loc us Egrandis_v1_0.038210m.g) derived from phytozome v7.0 (c hr-ID scaffold_3; pos 64921135 to 64922106 reverse strand)
atttctccagcttcatcaggcagcttaacacttacgtgggtattcccttcgaacgggattgtgttttttgtccatgtttttgcttgaaacttaccccttggcagctcaacacctattgatacaaatgcgtataatgtctgtatgttttttttggtttgactgtgtttcagctgtcttttatttttccctctgtttcggctgtttttcttcttcttatttgcagttcagagtgtgatcctcttgggggcatccaactactcctcattgtcccaacggatagtccccggggcaaagtagctaggttctaagggaacccactcgccacgttttgctcctgtgttgagattcagttttacccacttgctcggttattagttgtgctttacctagattaggggacgaggaacgaagaaatttggaatggcagatgagatacatcgattctatgcgaaatatcatggatcatgaggcacatgttcactaaaatttgcatccatcggccaggggccaatggcccgtcatcatattcaagtgatgatgctttttatggtagtttgcagaaactaccatgtcaaccaagacgtcaggatacccattaaagatttatcttctcaccggatttgtgtttgagtgcttttctcaaatgttaaattttcatttggattagaaatgcactactgtgttgatgctccattatgcactttccagctggagatgagactctttgagccatcgctttgtttctatccgacgttttggtaaagccttctgacacttctcctttttgggcaagaccaaaagcatagttctgcacttttgtcttcgtatttatgaagttgacggattgatatcgagtcattaaatttgtccataccctctttgggacttctgtttcaatttaaactcctcaacccagcttcctcctattcttcatgcatcatgatccaagatatgtcgcagggttttagggag

SEQ ID NO: 92885 - DNA, 943 bp, Eucalyptus grandis
  Intron number 1 from transcript Egrandis_v1_0.040280m (loc us Egrandis_v1_0.040280m.g) derived from phytozome v7.0 (c hr-ID scaffold_3; pos 5764743 to 5765685 reverse strand)
ctatcggaagacaatacccttttgaacctttaaaggtgatgatatgatccacttttttttccccgcaatcctcataattggtaatgtttacaaaaaacatagtgcacctgatgggcaataagttttaattgcagtacttgagaaagaccttgcggcttatgtttcaagaagggtttcaaatgctcaaggtgaggagaaattttttggcagctaaataactgccgagacttaaaagaactataacagatataatggcagcatatgggttcattggcacttatgaataatgtctactaaacacccaacttatgagctttccagatgtcaaagcagtcccaaaatcaccgttattcactagattgatacatgctgtttaataaataacttgcttcgaatgtgatggatatagtttatatatttgagttccagcatttgttttggccttttgggtcaattttcagcatatttacttagggatagttttcagctggaactgatgttttagtgaattttacccttgattgagtagggaaaatcatgtccattcagcaataagctcttattatgagctaaatctaaagaaatcccctcaagactgagattcacccagtcaacaaagggttggtagtttctctttgattgttgtttagagtttgttttcttgtctcccttggaatgagtgcattgggtttctggagtcaattcattgtccaatatagcatgtatagatggaatcaacttactgattgaatactcaaggttagtaatgtcttgaaactaatcgtctttggtctaaaatccttgaggttgctttttccatttgttacaattaccggtttgtcgatgagtgctcttgaagtagtttgtctggctctgaacctacatatcttcacgcgtgctaaatttttccgttggtgctctgacattactatgcttgtatagg

SEQ ID NO: 92886 - DNA, 894 bp, Eucalyptus grandis
  Intron number 3 from transcript Egrandis_v1_0.031607m (loc us Egrandis_v1_0.028698m.g) derived from phytozome v7.0 (c hr-ID scaffold_3; pos 18214485 to 18215378)
ctaaagttgcaagatttcggtctgtggaagttaaggtgatggcttctgaggctaatctttttgcttcttaaattgcagtgaactttagtatgtgggggatgaggggttttaatgctgaagcaaatgggtggtagcttcttaggctgttctttcttcttgggtgtttggtgatgagattactctgagttggaccatactgaatgagggttcgattgccttgagcttttggaaatcgccttggactacccatgcaaattatgtaataacctgtggcagggcgataatgtaatccatgggcaacaggggtggattttattggtatttcatttggttttgagcaatttgttgctaggaagtttatcgggtggtaataacttcatgcgagaaatctagctggattatgccacagtgacagtgaaaaatgttgcgccattgatgttctggctacttgaatgattagtagatcatagaaggattaatcacatgcttgttagcttgagcaagagggcaaaatatggagtagtaacctttcacaacaaagtaatgtctaaatgggtattttttagaagagtcttgttaacgagtggccttgaagcacttgttaaccatacttaataaggaacgtctttattttcaatacacggattacacaaaacacaagaaagatcatagattggaaatgacaaattttcttcattgaggtgtttaacaagtaacttgagggcacttcttaacaaaatcctttttcaatgaccttttgaatttatacatattgagtttgttctccatgattgtttttttttgttttttctgtttttttatattcctttggcttgaacattgtctcctggttttacaggctgcagaggatagtcaaggcaccaaaccccgaag

SEQ ID NO: 92887 - DNA, 958 bp, Eucalyptus grandis
  Intron number 1 from transcript Egrandis_v1_0.006178m (loc us Egrandis_v1_0.006178m.g) derived from phytozome v7.0 (c hr-ID scaffold_3; pos 71558135 to 71559092 reverse strand)
caaccccatactctgcttcttctcaagctcgacaggtactgcccagttcactgcttttctcgatcttctttgatcatggcttgtgtggatgtttaatgggggttgtggggtgatgggttgttcttgatgcttacggtagagctgttgcttctttgttcttgttcttttggaatgttggggggctctctggcaagatgacattccattgtgttctgtcgcttagctgccactttctgattgcggtggaaatcggtggggatgattttgaggtgaatgtggatatcagtttgctaaacttagttgcactttctgtcatttgggctttcgcgtttaataaaagtaggggaaattttttgtaggtaatattgtcaaatgaacagtactggtgtatcaagtttggagaaattctggacttctctttctatgttagtgaagcagaattctcattatattgaatcttaaagcatattcatggattataaattcttggaggaaaagaaaacttggtcctgttggcttctttttttatttggcgcttggcgcttggcaatttggctttttttctcaactgattgccagttgagtgtgtttgtgccttttttaactatctattaggcttcacgcatttggctttaaggttgtgtccaagtttgtttggttgttgcttattcagcctgccactagggcttttgtcttgccattatgattttgaccatctgtgttgcaaatgttgcaatttgacgattaatttccttggggattcctttattggaagttttattttgaaggccctcttacgttactttgaagatgctgagaaaaatattcattattattagcttggttactaacattatgttcataccacggactgtctcagataggatcctttaatatatttctcacattgcttgctgaactaggttggaaatttggcgacaatttcactgagctggat

SEQ ID NO: 92888 - DNA, 497 bp, Eucalyptus grandis
  Intron number 2 from transcript Egrandis_v1_0.007372m (loc us Egrandis_v1_0.007372m.g) derived from phytozome v7.0 (c hr-ID scaffold_1; pos 16399332 to 16399828)
tatcaaggaagaaccgattaccatatatcatattggtaagcctcgttattttgtctgtgcctgctccattttgcgaccgatttaatgatgtcctttggttataattcatggatcataattatttccgtgactcaaagtgtttttgatttaattagatctcttgttttcacccaccctgagagaaaccttttgacagaagtgcaaaaagttttgcacaagcaaaaacttttctatttgttgaggtgcgataacaccctttttctattcagttgacatgaatgcatagaaacattaggcgactaaaatttgtgttgcatgctgtagcttagctgtactatgtagtgcctcactgcgcgtgcatgtgagagagagacttgtcttgtgggttgtcattcatagacatgataatctgcttccttctatggagttggtgaatattcttttcttcatttaaatgcaggaattattttaagttcctcttgtgttctttataggaa

SEQ ID NO: 92889 - DNA, 676 bp, Eucalyptus grandis
  Intron number 2 from transcript Egrandis_v1_0.036678m (loc us Egrandis_v1_0.036678m.g) derived from phytozome v7.0 (c hr-ID scaffold_5; pos 15177175 to 15177850 reverse strand)
ctcacggtactccttgcctcatgagtctttatctctttcccaagtgacgttgtcgtggaagtgggttcggttgaattcagcttcttttcctcctaaagagctgctttcggttgttgttttgaatctgttgcagagtatttattaactcggtattcatgtttgttttctccttgagatgttcctttcgataaatttttcttttatatcgaagccatgtgttcattgttccttgcagttcaatgggtttccaaatgcttatctcatatttgttatggagttacatagacagaagcttctgcttggtatgatccgcttcataaaaacggtttaggttacatatatgtgcgctacaattctagatgagctcatgattgggataatttcttctgtgtttgaatagaatgttctcatgattagaggtcactccctttcctctagccagatcataactggaactgacgaattatcaagcaaacgttgaatgttctcattgattcatggaaaccttgaattcatattttgtctcccctcattccttctcctgctgatctgccttttgtgatcattgttcttctttcttttgttcctacatgagatgttccgggaagcttgtcgggttctgacttttaaattttgtttggcagaaagaggtcattcacaaggcattggaacaaag

SEQ ID NO: 92890 - DNA, 442 bp, Eucalyptus grandis
  Intron number 1 from transcript Egrandis_v1_0.024800m (loc us Egrandis_v1_0.024800m.g) derived from phytozome v7.0 (c hr-ID scaffold_194; pos 40027 to 40468 reverse strand)
tgcgtgccaagtacttgcgggctattgctgctaaggtgcgcgctgcaaatgttgctcaagccattgttaaaacatctaagatatgaacctacatactcagctgactacttaaagtcccctgacatttctgtatggtattgaaatgggaaattattactgataaaaaaaagacaaagaaagtaggagcatatgcacgccaatctatccaggcccctcattgtctactaatttccatagaatttctgtgctataagttagagaaacatccgagttcttgcattttgatttgttttatcattcaacttttatcttctactaattgctttggcatgtcacatgtgactttctgaattgcttcgtattctcacgcattttccatggaaacttcttttatctttgccatgcagatcacagagagaaagtctgaactagcaaaactcga

SEQ ID NO: 92891 - DNA, 957 bp, Eucalyptus grandis
  Intron number 1 from transcript Egrandis_v1_0.054735m (loc us Egrandis_v1_0.054735m.g) derived from phytozome v7.0 (c hr-ID scaffold_115; pos 82673 to 83629)
ttattactggtatatcacaatcacccttggcttccatatattgactaggaactaattaaactagttatttttcgtttacatcttttcatttaattgagaacattcaatgagcctatcatcatggtagacaaacaatcgactgcaagtctcgtattgggctcattataagaaaacgagagaatcagattctacagtaaataaaattaggcatacactataagttatctaattaatatgagttaaatttaacattaacgctcaacacatgcattcggggaattaactcttttaatttttttttttattttaacattctatcttttgtttttaaaagctatgtactttgagtcttttatcgagaagttgagatttactatgatttactatatttatcccacgtcaacaacccaggacacctggaggttgaagactggaaatggaaggattaggtggaacggataagtcaactgggttaatgtaatacgtccagattaatctccgaggaacgaggattttgtttattctttgatctattcgaaaaaaacagctagactgcgaactctcgccagctaccaatttttctagtttatgcatgaacgtacgcatggaaaaagacaatgatttcctctgcgaaaacaaatcttatttatgctatttatgttgttgccatagcgtactactaatacttatcaacaaaaaaaaaaaagaaacaaattgtttttgtgttaacatatgaacaaggaatttgattttaagtttccaaatatgttgactaggaaaatatatgactattttctgatacacaagatactttcttgttctaaagtattaaattacgcaccatatatatttcatttccttatattttattgcttgttcattagagaattttctttcttcctttttcatttattttttgtaggaactggggactttttgacttgctcccctgacaaa

SEQ ID NO: 92892 - DNA, 838 bp, Eucalyptus grandis
  Intron number 1 from transcript Egrandis_v1_0.013311m (loc us Egrandis_v1_0.007270m.g) derived from phytozome v7.0 (c hr-ID scaffold_3; pos 12565324 to 12566161)
cttcgattcagcttcttccgcaaaggtaggtgccagatctcttccgcctttttctgattcctctatcgccgccgccgtcgtcgttgcccggaatttgctcgctttgtagggtcgatggggttcgaattgttcgaggcccgcggttctggaattcgtgggtaatgcggttgtggtcgccttgatgccggtggtgcgtggattgggtgaaagtttttattttttattttttttggggaggaattggggatttggtgagttaaagttagggtttggattggttggtatttgcaattttggcaatttcgccccgctcgttctgttcttaccccgggggaatctcgtgctggttgaaattctagggttttttaagttcaaggtgttgtttttgacgaaattaggccgaggtagtttctatatctggtgatagattggttatctggtcgtttgctgcttgctttctctctgtccgagcgggcgcgcaatttgatcatcacctgaccgatcaaagttcgttcatttgttagggatatgttaacctctgtcaagtgcggtcatactgttttcaggacaagtcaactgtaattttttagaaaaagctggattcgagtgcttattactctttcaaaattgtttggaatcttgtgagttgaagctacagatgcatgtgaagatatgttttttgactcttaattgtcagcatctgatgttgcatgagacctgagtgtctgggcaactggcattaattttttggccgtctacttcataaattgagagaatcacagtttgaaccctttttttggcaggttttggctgaagattgcaggattttctttgattt

SEQ ID NO: 92893 - DNA, 823 bp, Eucalyptus grandis
  Intron number 2 from transcript Egrandis_v1_0.013311m (loc us Egrandis_v1_0.007270m.g) derived from phytozome v7.0 (c hr-ID scaffold_3; pos 12566990 to 12567812)
ctcactcaacttgaggtatatcgaacttcaagacaaccttatctatgagggtattgcgttcattgtgttataagtctgcatgtgaagaggggatcctctcttcttaagttttttctttggggttaatttacttaaataatgggaatggacatgaagatgagacaaatttgtaaaatgattgattgcgagcatgaacaattatttcttaaagtaggttgcagaatacagattgattaagatgcactttgtgaaatcaaaacatactctctctctctcatgcactctggcatgtgcctgcagacacatctgatatgtgcttttttttttttttttgtccccgatcttgctcattatgcgtagatgatgggcaattgattatttctagattaaattttgctatggatgtcatggatgatgtgaatacttggatgccaaaccccggagaaactcttttatgccttctcttggcgagggagagctggctaatcgttatttcttgaggtagtcttggctttaagtcctatctatatccttcagtctgaggcttaccctctggtacggcgtgctatcaatttgtatgagatggtttcagattttcttaaatctttttatgtttgttattttgctttgtttacttttctccattagcattttggattttaggaggaacagtgcatactcacaaatattgagagcaagtatgtagggaccccgtgtgtttgaatttatgaccttcgattgtgctttaagtgctcctgagtttagttctttatgctgagtgaaactgtgttgtacattttttttcgtgaaatgtagcttcaat

SEQ ID NO: 92894 - DNA, 773 bp, Eucalyptus grandis
  Intron number 1 from transcript Egrandis_v1_0.038029m (loc us Egrandis_v1_0.038029m.g) derived from phytozome v7.0 (c hr-ID scaffold_3; pos 53891030 to 53891802 reverse strand)
ggtatcgcaagttttggtgagtggtaacttccatgcatggtcagttcatgcacgtggagaaggtgatgagtgggtagatggtttatttaggcatgactaggaagaaccagggtttggctggagaaatctttcattaaattttggtgataatttaaaaagtctttataaatcaataagtagataattactctgagtgcgaggaatatggtgttcacttcactcctgaacctagttcaataccattctagcaccaaaggcaaattaaaaagattagctacctatttttccctatatacttacttgcatgatgactaaattgagtagtcttctttccttctttctagatattcagatactcctccagaaagtagtcgactttgtgattctagtgaacctgaaaatcaaagagctaaaagaggggagggagctgcatatttatcaaagattagagaacttgttattcaagcttactacggagtgatgctgaaaaattcttaggtttttatcggttttgcagatctaataagccacttccagcgacacttccagcgaaagcttgtaatatgctccacactaatttcttattttagtgaaggagtgatttccattatgaataatgctataaatacaaaaatgtatttacaaaacttggttttatgcagatttaatagacttgtcttggtatcgttagcattattgatcttgcttgtactgggcatcattatgtttttgtcctctcgtgttttcttggggtcacgtacaacagtgaagta

SEQ ID NO: 92895 - DNA, 634 bp, Eucalyptus grandis
  Intron number 1 from transcript Egrandis_v1_0.020758m (loc us Egrandis_v1_0.020758m.g) derived from phytozome v7.0 (c hr-ID scaffold_5; pos 4515701 to 4516334 reverse strand)
ggcccctgcagctcgtctcctatccgtccatcaaggtagggactttgtgggttcctttgaagtttctgccgttgtggagaagtgggttctgctgttttggttgatcggagcggcggttcgtgtcgtgttggatttagcatttttagttcttttgaatgatgaaataccgagcgatgctacaggaattttgacagaacatgtcaaaatatgttgaatttcctctgtttctgatttgtcttgctctgagaaatttgtctaattttttgtgcatatgtttggactgtgccattctcggttagatggtgccattcgtggtctcttctctattgcttgttttgtagatactctgagaactttgtctaattatttgggcatatgtttggactgtgccattcatggttagatggtgacattcgtgatctcttctcttcagcttgttttgtagatactctgaatgatgatgcattgctctgtttctttttgagatgaaaaggatgatgttttgcactgttatctcgtgcctttcggcgacgtgaatcttcttttctgaaaccaacttggagttatataatttaaagggctcttcttcctatttacagataattggtattcggacaggattgccattgccctc

SEQ ID NO: 92896 - DNA, 944 bp, Eucalyptus grandis
  Intron number 2 from transcript Egrandis_v1_0.005851m (loc us Egrandis_v1_0.005851m.g) derived from phytozome v7.0 (c hr-ID scaffold_5; pos 38164246 to 38165189 reverse strand)
attttgtggtggagttcttgggagaggtataaatgaagtttgtcattacacagttctattatgtttgttgggtataggatattagccttggaacaagtagaagtcccatgcgatacatgtttttaagagtattcttatctaaaactttattttgagattgtacattctaaaataactagaacgaggaaaaaaattcattcttatggcttttgcttggggctcaatcatattataagatgaataattaagagtgaagtatccaacaaatcaatccactcgatcaaattatcaagcatcaaagtacgtttaattattaaattagacaaattaatattgaagtacgttagtcctaccactagtggggtaattaagcattttctggttcttttgtagttaatgagtttttttttttttttttggggggggggggggggatgtttctgtgctgatgtggcgtaagcacgaagctctactctacgcacttatatatattctctctctatttttactttgtttgatcattattgattgtgagtctcgtaatgttcctctacaatctggtgaaagcattttttttttgctttttggtttatgtttgcacattctgtttttgatcattaattcaccagctctatgaagatgagttttgactttgaggcacactatgaatatgtcatggctctgtctttgttttcatagtttttcgaaccttattatttttttttctggtgtttcaaatggaattaaaaccagcatatttcgttcacatgccgcaagctatttttcaccttctgctgaacttgtgttggtgcggttctagtaatccattttagtatgacatgaccctctcacctttttttcccctaaattaagagattaaaatttgctaaaaacaactctatgcctcccccgaatatgccgttgcaggtctatcctacttggaa

SEQ ID NO: 92897 - DNA, 1011 bp, Eucalyptus grandis
  Intron number 1 from transcript Egrandis_v1_0.013111m (loc us Egrandis_v1_0.013111m.g) derived from phytozome v7.0 (c hr-ID scaffold_1; pos 28516045 to 28517055 reverse strand)
agggagtgtttcaggtaagaatatttcttaaattgtgccgattggcatccgttgattaaacaatcatggttattcttaattccttatccattattctattcgtcaagtcattataatatctgtaatgctaacatgtcagtgagatccaggattcctttttatttgctgctgcgatcttcttcagttatgtttaggctttaagttttgatggcactctatgtaagtaggtcttagaaataaagtgaaatggtttggagtgaactagattaaatgtcagtcaaggtgcttgctacccaaacgaggggaaagaagaagattagcagcttaaggactgagaaggtaatccatgaggtcatactggaggaccgatggagattgcttaacatctaaaattgactttttgaataaagcaaatccaccaatatgagccatggcacccaatgcattctcttgttcaagtgattcttttcccctcatgaagagtagtaaagtaattctggagagttatcgtctttatttagagaagcacagtccaaattaattactatatctattccaattctatgtagttttctttccctttaatatcttcttgagtgaggcaaaacccattgccgtgttttcagcactaaaatcgcagacttccattattatttgcagtggtatgctttttgcagcttgagtcacttcatataacatcatctctagtggaatgctacatgcattggaggaacaatctaaattaagatatcctgaaggtgaaaaattctattcatgggtggaaacagctacctctttaacagtgcgatgactactaaattgctgatacaaaaatggtcagcatagcaaagataaattttaaattaactccatgaaagattcggttctcagatttttttaattgcagccgtccagctatattctgtttttagtacttgccattgatttctgatttaatgttggcattgtgcggcaggctttggatcttgtaattgcagaagcaaatcaaca

SEQ ID NO: 92898 - DNA, 658 bp, Eucalyptus grandis
  Intron number 1 from transcript Egrandis_v1_0.054314m (loc us Egrandis_v1_0.054314m.g) derived from phytozome v7.0 (c hr-ID scaffold_5; pos 22466374 to 22467031)
gccgttctaggaatcgatctcggatctcgtaagtctcttcacccttgaaattttaattttcctggttgagttcgatggtacgtcagtctatgctgcgttgtgctaaagtttggtacacgagaggcttttctctaggatagggttttgaataggtcattaggcatgtgcttgtgtagccatgcctatctgcagatgagagtaattagttctttgaaaacttgaaagggaaggcgtgaacctgatattgatttctgctgatgaacgatagatgcaccagcacggtgtatactctcaattcaaatgattcctgaagacaagcctgacatggaaggaaccaaagatacagttccctaattaacagtcctcttttgtgtgtcgttgttttacaactgcatcgacaaggggaacgccaaaatcatgaaaattaatgttctgtgtctttggaaaacactgactgcactccacatccacaagctagaacacaataatggtggaccaaacattgccagtttcattgcagatgaaacaaagagctcttttgtttgataatttagctgagtcaatttagcgtattaatgaagttcgcacctgaatgtgagcttaaacctgcgtgtccttgcaaaacagaattgcagattcttcaggaacttcagagagc

SEQ ID NO: 92899 - DNA, 757 bp, Eucalyptus grandis
  Intron number 3 from transcript Egrandis_v1_0.032702m (loc us Egrandis_v1_0.032702m.g) derived from phytozome v7.0 (c hr-ID scaffold_5; pos 58145889 to 58146645)
gcggtctgtctttctttcccttttatttcctgagttctttctgcaccttccttggcttgaataagctaatggataggaaataaattaggcctataaatcactaaagattcatagctgatgaagagtgttttcttgtaatcttatgaaaagttatttttcttaaagcagctcaaaagttaagtaaataagaaagcaagggcggcagtctctctcttttgatagtggtgatgaagcaataaaactacaaagacaaatctatagtatgtgttatccttgtaggatctccttgtgttctaactgccaatcattgtacgtgccacaaccaaagaataacaatagcgataagaaaacgacattgagaaactgggttcaactgtgcaaatccatgttttcatctttgttgagatgaagaaaagcacatactgctgttgtctagtttgctgattgtttttggagttggtgtcctgatatattcaggtactttatttttataccttgagagatgttgttaaaggaatcagatgttatgcttcatatttggttgacctgagagttgagattcttggcattttataattctaaaagctataggtatcatagtgtagctgtcatgttgctgtttaagttggccttaagcgcaatcataactacatcgtcacttgttcttatttgtctgatatacattgatatttgtttgatcatggtgcattatgtttggagtggtggggttgttgattcgttttccatttgcagtgac

SEQ ID NO: 92900 - DNA, 989 bp, Eucalyptus grandis
  Intron number 1 from transcript Egrandis_v1_0.001787m (loc us Egrandis_v1_0.001366m.g) derived from phytozome v7.0 (c hr-ID scaffold_3; pos 59980915 to 59981903)
ctgataccaggtgaggtgattgcttaattgttcggagtgatgcgggtttgtggtcggttttgaccatttggtttttagtttgctccatgttgcggattgagttattagatcaggggacagcttctttacatattttcttgcgtggctgtgtgcgctacgagactacttgatgagttcttgatgattgttcgggaacatttagtgacgggcatgcaaaaagtgattttggtttgtgcttccgtatgatggtggctttattgccacaattagacatgtttgtgaaacccaggagcatgagtcccaacttgttttcactttcgagagaatggcacatcatccgactgaggtcctgcgaatagtttatatgcttcgcctattcgtgactcttggaagaaggtgagcctggcagcattaatgttggtttcactagaagcattatggattcggcgccacttttgcatgcagttctccttcttgcttggcatcgaactctcttttcgtggattgtcaatcgtgggcttctgcgaaacggttttgagttgctttcgaaaatcattcctcaaatccatatgtccgttcccaaatcatgaaaatgtcgcaaaaaagctgatattttgttggctgctgaaatggaacaacgccaatcatattgctacattcattacgtatcctccagctcacacgtgcagaggcttttgttagaggccttgtcctagataagtctgcttcatcttgttggattggactctgaccaacattaagaatactttgacttacgtcttgttcttaaaacgtgaaattacgtgaggttgtgatgacaattgctgaccatgagctctgattgccatcccttatggttgtcaattgtaatatgtgatatctattctgcatttgcagaatgtgtgacaagacattttcaagtccgcgttgcctttttgtgatcgtatctcgttttctgttgtttgcagggagagtaattctgcaacagc

SEQ ID NO: 92901 - DNA, 974 bp, Eucalyptus grandis
  Intron number 3 from transcript Egrandis_v1_0.013345m (loc us Egrandis_v1_0.013345m.g) derived from phytozome v7.0 (c hr-ID scaffold_3; pos 30369259 to 30370232)
tttacgagcacaatttcggtcaccgtccttaccaggtcctgtcctgtcctttcctttctttctttctttcgctgtctgattgtggttcatgggttgtcgtggatttgccggagtagctctccgtggggtttactagagtctgtcggtctggcggacctttgaaattacacgtcttggaagctagctagtgaccattcatgggaacgcgagagatgcgtgctctggtgattgttgttggtaggggaaatttgcttttggtatgttgcttgatgacaggttcacgggaaatagtttttttttttaatttttaaagaaaaagaaatgtgggttttcagcgataagcaggtcagcgcggcgtattggtgttgacgaggatctgagttcactggttttgtcagagttttttcacggataggcagcaacttatttcatctgccctttcaaaactgacaaaagtatgtgctgttaattctcacattttatgaagaaatccactttttcgataatttcgaaagatgtgaaatgcagacatcgcacaaacatagtgttttcgtttcttcatggacattggggattttgagtgttgctcttagaatttgctgaatgacacatgacttggaaaaggtagtgaaatcaatgccttttaccagtgtctgtttgttaatagaatatctgtcttttagaaaacgagaaaagttccttcagcaccccaatgggtttttgccgttcaagttaaggaactagaattccatagctgtgatcggtttatgcgagattggtccttgagattttagaggatgggctttttattgacatgactcaaaggactacaagacaggaattcattgctttaaatgtttttataagctcttatatatgcttctgcatgcttccttttgacttacccatgttcatgtgtgttatatttttactccatagggcaatattcaaagcctcactgctgctgatctcga

SEQ ID NO: 92902 - DNA, 646 bp, Eucalyptus grandis
  Intron number 1 from transcript Egrandis_v1_0.036919m (loc us Egrandis_v1_0.036919m.g) derived from phytozome v7.0 (c hr-ID scaffold_5; pos 24803850 to 24804495)
ttgtatagatttggtaatgaattcgaatatgatctaagtctgattttattgaaaataattcaaagaaaatttgaaaattagacctctgggaagctggattttcttatatgcctattatttcagtaacagattagacctctgtgtttaggtcagaaaagaggtcgtgtgactattctaatccggtgattacagatcaatcttttttgatatagaaattgtttcacgatatgatagcactttggataagttttttcgagtttgcctttcacttgatatgctgtttaaatctaagcatgaaatggcacttagcataactttctgccagttcacctttcaccattagaatggcatgttcatcaattgacagtgtctcaggatctagttcttttctttcactacattcagcttctttcaaatcgatttctcaagatttagattctcctttccctgctgaatctggaagatattatctttttttgtcatttgcttgtccttgggcatgcatgtgtctcacacacatgaagagtagaggacttgacaaaatccctgggcatactggtacttgcatagtcagtttctgagttcactcatgctatttttatttgatcagttttgagttaaattatcttagatacacgtgtatcgg

SEQ ID NO: 92903 - DNA, 672 bp, Eucalyptus grandis
  Intron number 1 from transcript Egrandis_v1_0.018347m (loc us Egrandis_v1_0.018347m.g) derived from phytozome v7.0 (c hr-ID scaffold_3; pos 76590690 to 76591361)
ggctagcaggtatatgatcttttgattagcttcgtttacgtctttaacctttataagatgcgtctgttttgttgaactgtactgatgcaggttgtacaatgtacatgaatggtgaattgctttatcttagatgtcgacagcataagattagttatgcgatgcttggcttagaactttggtgactactcgtattcaggggacccatattgtaaataggcaaatgactcgacaggactgattctatcagacattgtcttttgtttcatgtcgctgttggcttttgtttttccccagaggcaaaacgaaagtggtggaccataatgtgggacagatattcagtcgtgggaagtgatcatgtttgcatttcttcaacgctgttgtgcctagactagagagtaaattatgttccaaatgtagattttgaggttttctctctacttgaattaatgcttctccatcattttggtggaacttgatatctgtgataagaaaaatgattaacctttcctcaatcaagtcaagatatcacccagcagaaaccaagaattttcagtgcaaccctattgttcagatatgaaacattgaactctagttgtgagtgatttgttatctgatgtgagcttttcttaataatcagatttgcagtcgcctagcggacgatttgaaggagat

SEQ ID NO: 92904 - DNA, 851 bp, Eucalyptus grandis
  Intron number 1 from transcript Egrandis_v1_0.019143m (loc us Egrandis_v1_0.019143m.g) derived from phytozome v7.0 (c hr-ID scaffold_1712; pos 2542 to 3392)
caagtactgcatcctgcacgtcgggcagcccggcggtgagttccaacccgctcggcaaatttcctgtgtgtcccgtgagctggaaaagatgcttctttttggatattttcttttagcttcgtctctgtttctgctgttggatctcttctgggtcggtcgaaattagggaggagcatacagtaccatccggaccggagttagccgatttgtccggttaatgagggtgtcggtctgatttccaatttcataaaaatggaacccgtgattttcgattcaattccctgtttcaaatggaaccaactctttttaaaaatatatatattttttaatttcttaaaaatagcaataaaccctcaaaatataataattctaacatttttttaaaattttttaatttttttctaagtgatcggttccattggaccgaccaattctcaattctagaactattcgatctgattccgatcccaaaaaatggatcccaatttctaaatgaaactagaccagatcaaaaatcaattatctctagtcgaaatcggagggtatggagttcaggtgtgattggcgaagtaaatttacaatgcgggcattagctgttgaccttgaaccccgagctctttgttcatttctaaatacattattgacgggacgaatttggaagtctgaccacctatcgttctgtttaaggaaaatgagaacagcattttcattttttgatttgcattgctagtagtctttgtagttagtacttttttcttctgcagtaattttcaactggattttttctttgtttgcaattggtgaaatctcctccagaatttgcaagggagaatacgaacgagattctggat

SEQ ID NO: 92905 - DNA, 985 bp, Eucalyptus grandis
  Intron number 2 from transcript Egrandis_v1_0.008346m (loc us Egrandis_v1_0.008346m.g) derived from phytozome v7.0 (c hr-ID scaffold_1577; pos 2372 to 3356)
aggttagttttttgtttaggggttgagccaatgttgcggtgaattcactgatttgaatgtcatcatttttatacatggtagggattgctctttcccttttgttttgggggggggggggggggggggtcagggcattggttaatttgtattgcttaccccgactcttgtatgaattgtcattaatagctttgattacttgaatattgtgaagcacgtcacctagctaggttgaatcgtatgtctgtcttttttctccttcgagttgaaggcaaaggggctagtcatttctacagttaaagtcacaaatagtgggacatagtttctctaactcaaatacgttcctctagtcttataggcaatgctcatttgttggacggtttagtttccttccatttgcaatttatgtatatatttatataatttgtgtttttgtagtttcctgcttggctacattcaacaacagaagaaaaaaaatcctttggttttttttttgtgtgatatatcccaagtagtttttgttagtacccataagagcacctcatatgtttcttcatgtgataagtacataagctcattaagtaggaacatcatgagctaatgtgagaacagagaaataagatttcaagcaaggctagtgccagataagctgtcactgcatatctaaaaagattaaaagaatgaaaggaaagcagaggtgccccagctcatatctggaattttcatttcatctttgccttgcagtcctccgtctagaatataggaagaggggcatggcagcacatgacatggctcctaacagctatgttcacgtccattaatcacacctttgctctcgcagtgtttgttggcaattctttgttttaattgtttttgcgaggatggcatttccattgtagatgtggtggaacttagatttgattggatcttgatatttcttttattcccatcaggttagacgtcttctcagctctgcaagacctgtggc

SEQ ID NO: 92906 - DNA, 554 bp, Eucalyptus grandis
  Intron number 1 from transcript Egrandis_v1_0.028305m (loc us Egrandis_v1_0.028305m.g) derived from phytozome v7.0 (c hr-ID scaffold_5; pos 9329944 to 9330497)
gaaagggcagaagatccgagcgtttcgtagcgctggtcagatgtctgacgaaatgcgcgggcgagagtagaaaccggggtggctaaaagccgaaatcggcatgtcacttgcggaatgagtaattcaattctttgtatatctaaagattattttctatgtgtgcctactttattctttccctctggatacacagagatgaagttgctggaggtagcgagaaagcaaatgattatgtgtcgatcggcgacgcacggcaaatgctgctgttctcctgcggtgagggaattttagctttctctactcggaattctgtttttaatttcactaatttactcagatggataatatactctccagcatcagttcagaccttcggaagcgtctctcataaattgactaatggaccctcgcccctcggtgccggcaattgtcttcatcggtcaaagagtcacagagcattgaaatagtcgttgcacagccacgggctcatgcttactcttgattgttggtatttggaagccatcttttaagatcgattcggacgagtcacgtag

SEQ ID NO: 92907 - DNA, 617 bp, Eucalyptus grandis
  Intron number 1 from transcript Egrandis_v1_0.047589m (loc us Egrandis_v1_0.047589m.g) derived from phytozome v7.0 (c hr-ID scaffold_5; pos 30261773 to 30262389 reverse strand)
actctcacaagttctactttacggtctttcccaaggttgctcgcgccacgagcaacgcggtggcttgagcattcattaaaaaatttacgcgaaaggattttctgtcttcagcttcttattaaatttcggaagtaactctaccttggcactgcatcgttgattatatgtttttaagctaaggggtcaattaagttttagcatagtttatttgcatcctgtcacgtaatcgagtctgttgttactaatatcgttgttggttgaattttggttcggtttggaattgtactgcgaagaaatcaatctcctttcgcataatatatttttttatctggagttaacatagaactttggtttcttcaaacaaaagctgaagagttatttccgatgaaggatatttcattgtggaaacaatttcggcaaaatcctaatcatgaattatttgtcattaaacggtggttctttcaagttcttatatgttgcaatgatagatacttgtgggccaatggaaccttccaataggcttctctaatgtatttcctcttcaaacaaacgatgatatcataaaagttgtatcatacaaaataaaggacgggcgaatcggacagcccccaggttaa

SEQ ID NO: 92908 - DNA, 932 bp, Eucalyptus grandis
  Intron number 2 from transcript Egrandis_v1_0.006055m (loc us Egrandis_v1_0.006055m.g) derived from phytozome v7.0 (c hr-ID scaffold_3; pos 79530489 to 79531420 reverse strand)
caggaatttttactttgcgaacgttgtttgtaaaggtgaaatttcatgcctttggtatcttgctttgtcggtctctaagtgtattggtataccggaagttaaggcttacctcaatggtggggatgcaacagggatttttacattgagaacattatatgtaaaggtgaaatttcatgcatgtggtttcttgcttcgttggtctctagttgtatatttcttaaaatttccttattgatgtttccataagcatctcttcctatcctggatgtgagagcagagcctgattggcttgtaagagagtataaacatggttatgcttgtaaaagagttgccatttgagttaacacgatcttttacagattggcatgtgtgatatctattgaacattgccattgttatctcgtatgtttttgtcttcatctatttaatctattaattattccctctcgtcttttctctgtactcccctctcttaaagcagtgaggatgaatctacccattatttctgattagctcgttgacgattactggcccagagattcttctagagacttccttgagaccagtgaaatatgtaggacaaaaatttgttttggctgacctagaagaggagtatccttaaaatagaacttacctaaaaccctcaaattacaagcccttttgaaattttgactatcttcaggaatataaatattttggataacaaaaacaactacgttcgacggattcttttacagttcaatttgcgatgtcagtgctagttcaagctttatttgcatattttcccctattcctggaagtgtaactgttcagctaatttgtcttttaaggcatagcctttaaggatgttctcccttaagtttgtgagagtcttatggggcatgttccaatcgacagactattgggagcgtttgtgcggtgtcatcatctct

SEQ ID NO: 92909 - DNA, 476 bp, Eucalyptus grandis
  Intron number 1 from transcript Egrandis_v1_0.019741m (loc us Egrandis_v1_0.019733m.g) derived from phytozome v7.0 (c hr-ID scaffold_5; pos 2766685 to 2767160 reverse strand)
gtgggcacggcatttcggtcatcgggcccgaacgggtagagattggcagccttctttttagtgtcatcttgagccttttcgatttggtgggcggatgcaatgtcttgcggatgcgtcttattctctgctgcttctcgaaaagtttcgaactttggcacttcaatcgatcagttctttgatgggtttttttttctttttattttgcttattaatgatggagagctctgtgttgaggtaggtgaagatgatacttttttcttcttctttttcagatttttctggggttgttttcttgagtattttgcctatgatcggacaaagtttcatcctcaataggtcagcaaaaaatcggctgttcaggattgcctatgaactatgaagttgccatgtttatgtcagacatgtctttatgggttggtgtttggtattttgaattgacagggtctcttcggctcccacaatttcgagtttgtcga

SEQ ID NO: 92910 - DNA, 404 bp, Eucalyptus grandis
  Intron number 2 from transcript Egrandis_v1_0.029963m (loc us Egrandis_v1_0.028025m.g) derived from phytozome v7.0 (c hr-ID scaffold_1; pos 39097273 to 39097676 reverse strand)
gcaatcaggttcgtccgtccgcagccgttcgtgtccgttgcaagcgtgtcgcgtcacgaagcaggccttgcccttgctgttttatcgcgttctgtacattgaaaaaaattggcttctaggcattttacgatgtgcttgatgagaaaagttgggtttttgaggcaatcgtttatatgggaattcgattcggggaaggctctaggcctctgccggtgtcaaacgaagaagtagtaatttttcgaagcagtcggaatttaggtactcgcgaattgccagcaagttcctgcaccttttttcgtttcttgctggcgattttgttttttgtccttggattttccacgtttttactcactgtttattcttagaaataacaattttttgccaaattatggatgactagatat

SEQ ID NO: 92911 - DNA, 593 bp, Eucalyptus grandis
  Intron number 2 from transcript Egrandis_v1_0.011308m (loc us Egrandis_v1_0.011308m.g) derived from phytozome v7.0 (c hr-ID scaffold_259; pos 18308 to 18900 reverse strand)
gagcctctatctcaatccttactcctggaatctaggtagctaatatctcgtcattatgctaaatttgttcggttatgacttatgagtttctacttaacttttgctttgttgttcccttttacctattatgaacagggttcacaattcccattatgcttcctcaatttttatttttatttttgtgttgtctcattatttgattgttatggtgtttgaattttagttaatcgattggctaattgtgtccacatttttggagtcacaaatttctgtgtgctctttatgtacttcagaaatcaattatctccttctgtaggaagccaatgaacttaattttctgcttctatctccttttttaacatcttctgtctcctttcttcttgtataattttgtgggtgaaatatcacgtggataaactgtctaaataaaagtctggcagaaaaatagaaagagaaatggctgactagtcattatatgtccagtgtatattttgatgtggtagaactcaaatgctaattagttcacaacttcatctgactacattaccatacctgcagttgccaacttgttgtttattgattcacccgttggt

SEQ ID NO: 92912 - DNA, 443 bp, Eucalyptus grandis
  Intron number 1 from transcript Egrandis_v1_0.051793m (loc us Egrandis_v1_0.051793m.g) derived from phytozome v7.0 (c hr-ID scaffold_3; pos 14133938 to 14134380)
ttggctgaaggggagtggcaagttcacacttcacagtaacatgtaactctagttttcgcctggcaggtcaacatattttggtgttgcttcttaagtttttgtcagttaaattatgtttatcaaatactttaggtaggaaggatgtagactgagttagacatgaacattttatttgattgtcctcaatgtttatcatgcagtgagatactaaggcatgcttttgtgcatacaagtaatggaatggcagctgttttctctttctgtatatactttatgttgtagataagatcttttcatatgctaatgacatgcttctctgtgactagcttactctatattgaagaagcttaatctatattgaagttatctgttatctaaactgcttagtataaatatctctctgttcttgtcttctactagtgtttccaattttcattctgccc

SEQ ID NO: 92913 - DNA, 489 bp, Eucalyptus grandis
  Intron number 2 from transcript Egrandis_v1_0.044787m (loc us Egrandis_v1_0.044787m.g) derived from phytozome v7.0 (c hr-ID scaffold_5; pos 5346058 to 5346546)
tcttgcccttcaaaaactccttttaagttcgtattacagaaaaaataatgtgtattgacatgatgacggcatagttataaacatcaatgtagcaattgaataagtgtttgtagatatttaagtacaatcgctctctattcatgaaataaaacatgaaagtattcatgaatttggcctgtgtatgatccgataccctttctctaggtaacaaaagaagctagtgtaattcgttgaacaaacccaattcatctttaacctatttttaaatcgttcttaatgtcgtgtgaagactactaaaaaaattcatgcgattcactaattcgtgccatattgaacttaatatatgccatggctcgaaaaagattagatgggcgagttgaactgtgtcctaattcaatcaaattacattggatcttaagcggaacaatatccatcttaggattctctctgaggttgacctaaatgaagtcttcgtctcgattcagctaa

SEQ ID NO: 92914 - DNA, 1017 bp, Eucalyptus grandis
  Intron number 3 from transcript Egrandis_v1_0.008989m (loc us Egrandis_v1_0.008988m.g) derived from phytozome v7.0 (c hr-ID scaffold_1; pos 30258668 to 30259684 reverse strand)
ttactcaacattcagcagttccacaaggaatactggtttgtgtcccattctctctgtctcacctttttcaaaatttcggtactacaaaaaaaaacatttgtggagtattatttctttcacggtggaccctacattgccttttcctttccatttgctcactcacccttttcatctcaaaagctaaggaggaaccgaatcattttttatatgaaaactgatggtcttacgctagattcaaatgtaggctgtaattcagctggcgatggtactgcaagtgatatggatgtcttatacgtcggaaaatgttttgagtgttaatatggtgcgtgttgttgttgattaaaacagcttcgaaagtgcaaattttttcatctaaggtaaataaaattttcgtactctttaatttttcaattttcaattcaaagtgtattgttacctttagagtaaactttaatgcctagagggcacttgtgattgtgaacaagacctacatttgctttactttgtcaatctttagattggcttgtcatgctttcaccaatgaaatgttttgttttgtcttccaggcaatctttttctgttttctcctgtgacttctgaactcttggtattaaattctggctcttgccattagtagagaaggctagatctagtttgcattaggtgttcgagagtaagcacatcatgttgttgcttttccatgagtgagctagagggcaaccaacttcctgctcgtttttcttttcttttgatataaagcaagtaaaatcacataatcatctcatcagatgctttagactatgtagaacagagcttcttgtttgctctctctgttctcttggtttcttgatccttttcagcttgactgaggtccttataggactaagcatgttaagtgggtgtgctataactctcatttacctgatggttgtgactcatttgtgtttcattgtgggattattatgtcgcactgaattgctctaatccatgttctttatgtaggatattatacacgca

SEQ ID NO: 92915 - DNA, 954 bp, Eucalyptus grandis
  Intron number 2 from transcript Egrandis_v1_0.034921m (loc us Egrandis_v1_0.034921m.g) derived from phytozome v7.0 (c hr-ID scaffold_410; pos 915 to 1868 reverse strand)
gtgtcctttgtgcaattttaagcggagcactaaaggttgggatctctgttttcaatctctcagtgtgcttgattcataattatagagatggttctgcttttggagtctctttttctgcccccccccagttggcattgaattttatataaagtctcaagattgtcaagtgttgcttctgttgtgtcctgccctttctgtgttcaactctttttataatggtattgtctgtgttctgcccttttatagtggcattgttcaccattgttcttttataccgcaaagatttgatttttttttttttcgtgatgcactggaaagaaatagtttctttacctaggatttcagaaagttttcatctttccatctgcaaatgttccattttgagccttctgcataccttgggacaattccccttgtaagactgtattggttagaagtatcttagttctcgatttttgatgatgaggatgatgatacattgagagacacactaagaatttgataattggggaggaaaaggaaaaggctgaagaaaaattctttttatgccaccctacctgtaatactggctaatatgaacttggagaaactattgtgctggccaaaatcattactcagtaggcctttcacagaatttgttactggttacacccgagaccactagtttggggaaaaaaatagccatttcaggtcaaaccactaatgtgaaatgcatatcttagcacggtcgtctcattctctgactatgtctgctgtctttttgtttggagtggtttggctgttcagtcattgtgtgtttttattgttatttttcaaatagtagttgccagttagctatttattagaccttaccgttttgctcttcaagtcaatttctacttttctcaataatgtgccttattgatgactttgctctcagatattgctggaaaagaaattaagtacagagtaacc

SEQ ID NO: 92916 - DNA, 774 bp, Eucalyptus grandis
  Intron number 2 from transcript Egrandis_v1_0.029800m (loc us Egrandis_v1_0.029800m.g) derived from phytozome v7.0 (c hr-ID scaffold_5; pos 55493408 to 55494181 reverse strand)
ccaaggtaagaatttgtttatattttgagcccaaaatggttagaaattgtacgtttagaacaaaaagtttagtccaaaacatagatttttggaactcatctgtagagacaatatataagattagtttatggagcgacgtgatgaaattctgttaggcattccattatgatccacttgttttaatatgacaagggtgcccgacttactcaagtagtataatctcattgatcatgaaatttctcattatcttgtttattatattagatggcggtcgaaaccttggtaattgacctaaagataaacttgtttgccacttgatggtgtgggaatcaaacacgtgctgccagtacaagtaaaactaattcgcttgtttaaaatactcgcatgcaatttgtaaaccaattccggtaaccggggtttaatatgcctagcaatagtatgactcgtttagggattcctagagcaggcttgagaagcacatattgatcatagtaggttactctggcccatgaaaagtaattttatcagctgtgacggtattgacagtaagacataagagccaaccatgtttaaagcacgcaccaagtagacaaaagctaaagcttcactatcttataacataaagaggtcgatggaaattcctggacaagattggcaggagatgttttcatttccctcttgatgttgttctttcaattggctggttcttcggtttctttctacgttgagtgtattgtaggttggcgaaggcgattcttcagacgagagaatatc

SEQ ID NO: 92917 - DNA, 521 bp, Eucalyptus grandis
  Intron number 1 from transcript Egrandis_v1_0.019786m (loc us Egrandis_v1_0.019733m.g) derived from phytozome v7.0 (c hr-ID scaffold_5; pos 2766685 to 2767205 reverse strand)
tctccgaacttcgcacgccggagctctcgaaggaggtaatttgaggtgggcacggcatttcggtcatcgggcccgaacgggtagagattggcagccttctttttagtgtcatcttgagccttttcgatttggtgggcggatgcaatgtcttgcggatgcgtcttattctctgctgcttctcgaaaagtttcgaactttggcacttcaatcgatcagttctttgatgggtttttttttctttttattttgcttattaatgatggagagctctgtgttgaggtaggtgaagatgatacttttttcttcttctttttcagatttttctggggttgttttcttgagtattttgcctatgatcggacaaagtttcatcctcaataggtcagcaaaaaatcggctgttcaggattgcctatgaactatgaagttgccatgtttatgtcagacatgtctttatgggttggtgtttggtattttgaattgacagggtctcttcggctcccacaatttcgagtttgtcga

SEQ ID NO: 92918 - DNA, 442 bp, Eucalyptus grandis
  Intron number 1 from transcript Egrandis_v1_0.019755m (loc us Egrandis_v1_0.019755m.g) derived from phytozome v7.0 (c hr-ID scaffold_124; pos 95868 to 96309)
acgccacaaatctccattttcgaacactagacaaggttgttctagctctattcctcacgaacttgggatttttgtttgtaaagttaatatccggatctattttgtattttgctttgctggcaacgattcggtcaaaatccaacgatatttcgattccccacatctccttgtaattctagaattaattattttatagagaatgtagtccgcaattcccaagttgtctttgagttgatccggtgcttcttgtgtcaaaaacaggagattattcttgggtcgttgaatattaatttgcagtttggctctcctgctttaatacttgtggatgctgttatttgcttgagaataatgctatgcgcgctgagaaaatattcaaatgatctctacgttatatgatcaagtgcactttctttgcccgcaggtttataatcaagacggcaag

SEQ ID NO: 92919 - DNA, 1041 bp, Eucalyptus grandis
  Intron number 1 from transcript Egrandis_v1_0.035737m (loc us Egrandis_v1_0.035737m.g) derived from phytozome v7.0 (c hr-ID scaffold_3; pos 70441993 to 70443033)
tatatcatccttgcagaagacaggatcctacataaatttttgcgacaggctctgtcgattacatcagtaacaaactaaagaattgattttccagttttgagtgagtcagctgatgtaaatgcaaactttgctcattgcattttgtattcaagtacgttgattcatcctaagacgtaaactgagaatataccttggagattctgaggagtaggccacagcaaaatatatatcatgacaaagaacagtgaaatctcacatctaacttcgaataaatcacccttcagaccgcttcgagagaattgggacactaaaatttcctatcaccgactgaaaaatcttaaaaggttcctctttttttgcttttttccttatgttgatgacttgacgagtgaaggtgacatttgggaaatatgaactgtgcttagctgctctgatcttggaagccaaagtcattgagcatactatcaaaatcaaagtccaacaggacttggtcctgttcggaactgccgtttgcagaccctgaatattcgctcttcatcaccacagaacacgaatcagaatgacttgaaacttctggcgtggacgatggtacatggctaaaatccgaaacttcagtgagacttggaggacagagaagactcgagttcgaagtgggtattcctggattgaagttctgcttggggaatcccattgaattagcagcatattcccgattcttggtctcaggatcgattgaggccgagttctgtgcgcagacctgatagtcaaagttactttcaggcactgttttcagagaagccagttgcttcattagcttcttcttcagcttggtgttccagtagttcttcacatcattatctgtccttcctggcaatttggaagcaattaccgaccacctgcgtcaacagcaagcatggtgtttctatcggacttaggcataactaaaaagttgcggaagtttgttgaagtctaatgaaatcaacaagtgtgaaaaaagatcctgattatggaatgaactttgttaaagcttgcctgcttcct

SEQ ID NO: 92920 - DNA, 644 bp, Eucalyptus grandis
  Intron number 1 from transcript Egrandis_v1_0.021367m (loc us Egrandis_v1_0.021367m.g) derived from phytozome v7.0 (c hr-ID scaffold_5; pos 25323890 to 25324533 reverse strand)
aaggagttctcattagacccaagaataggattgtggtaagtccactccacttcatattctctcaaccctttattcctattactgatatatatatatatatatatatatatatatatatatataaatgtgtgtgtacacacgaatgtataattatatcttacgtcatttacacatgcattgagaattaacttcttacacttcttacaataagatggtgattgtgaataagaaatgggtgtttgaggatttcttgattaactccctaccaatctataatcttcacctatatatattgcaaaaaaaattaggttttttctttggtcaaatccatgtcgaagataaggtgatccgtcagtagtgagaatactaaagctacctagatttttgaaagaattgttgccgccgaaaaaacttcatgcttaccattgtcacggatctcgatacaacggttttgcaacctaattttcttgctttttgtgtatgaagtttcgataattaaagtgcactacatggatggtgaattgattctttgaattaacttttgatttgcacttagataggagaagtaggcgatcagattcgatgtgtaatgtcatcctgataattcaatattgtggcagaaacactgggtggaaaaggaatcg

SEQ ID NO: 92921 - DNA, 489 bp, Eucalyptus grandis
  Intron number 1 from transcript Egrandis_v1_0.019678m (loc us Egrandis_v1_0.019678m.g) derived from phytozome v7.0 (c hr-ID scaffold_3; pos 57452693 to 57453181 reverse strand)
tggaagatcagaaactcctgtggaacaggcaagcagtattctcagcacttccatattcaatttaatttttcaagactctttatttacttctgaacagcgagtctacatataaaactgatccatataactgcgatcatcttttattcgattgcaagtagcagttcatgatcggcttgtgcgttacgttcctatatttttgatccctgaaagcttgatgatttgcttacaaagcaaaagaagaatcacatatacaacgagggatttcatcttcttatgtttttccttattttgatttattttgatcaataaattaattaactggttcacaagagctagttaatccttcgttgtaccaatccatccaccttgaaatatatacttacttaaacctatgctttcttcattttacaatccttttttttttttttttgttgaattactcggtttcttgagttcatgatctttttcataacttttaggccgaccgac

SEQ ID NO: 92922 - DNA, 808 bp, Eucalyptus grandis
  Intron number 4 from transcript Egrandis_v1_0.001561m (loc us Egrandis_v1_0.001561m.g) derived from phytozome v7.0 (c hr-ID scaffold_5; pos 12949542 to 12950349)
caattggtaataatgctgtgcatgtcagcttccttccacatgtgtgctattctgcttaattatattctcccaatcatttttaatgtgtggccacttttcgaagatgctactcactatgttggaaactgtgtcaatgaatgagccgacctcaaaacaaatttaccaaaaatccctaagaacatggaagaagtccattttgttagcttaccggatacttcagtttagaagcaaggtttttgtgcaccctatactgcaaattctactgcctcttttatctggtctttttccttttgtggacaagtgatacttcaaattcttagaatcttttctacagatgctctctaaactttgagatcttgattttgacatttgatgccaaaacactcaaggcatatctattgctttttttgaccatttgctttttattacaaatataggcttcacttaattggttttcctgaggagtatgcatgttatgctgttagaattacagacacagaaaagttgaatgtattaattttatcaggatatcatgcataattcttattaccatgaactctctgtttctcccgtctttaaatgaagaaaaagcttcatgctaatgaataaaattgtcagaataaatttttctgtcattctatgacttttcttttatttggaaacatccatctgtggatttttagtttagtattaaatggacttcacaagaccaccggaatgattagacaattttcttgatagtctgtttattactattattgcttgaattaacaacatagcttgcggtatattgtcaggaaccgtgttt

SEQ ID NO: 92923 - DNA, 940 bp, Eucalyptus grandis
  Intron number 1 from transcript Egrandis_v1_0.022753m (loc us Egrandis_v1_0.022753m.g) derived from phytozome v7.0 (c hr-ID scaffold_5; pos 15959825 to 15960764 reverse strand)
atctcaagaggttcttcgttctgtgctttcgctcgaccagtatgtgtgtaaatatgtatgtttccatgtgttctcacgtcgcgtacgagcgcacatgagaaggtgaattgtttccggtcttagggatgaagtgtagtagtaaatcggttcgatgaacagttcatgggctaatcacaaggaaactcgaaacacccttttggcctcgagttaagttcttgccgtcgagtgcttgtaaagaggttgaatagttcataatgattgttcccacagcagttctaaagaaaccctcttttgagaaccggcgagctcaggatgaattttttctaccattgcttgcatccgaaataagatctggttcatgtcgcttgtataagaaggctagagttgtcagctgctcttgcaacttctcttccgttacgacttctttgtatgtttatttgttttctgtttctttttgtgtgcttgctactgattccggaacagaagaattgcgaattggcggcctcgaaaggcaactatagtccctaatctctgcctcccagggcgaagcaatgaaatccgaaacaggcgatccatataaagtgtgtgcacgaccagacattgggaaattcctactcatggatgttacatagttcattgtgaatgcctgtataggtcgccactgtgctttttgacatcgggttctgatgaatatctgttctatcctacaaattctattatgacaaagtcagatagttttcgattttgtttgtatgcattgcctgctgctccctgcggtgaaagtgcactcatcaagcagtaggcttgcaatgattcgtccctttgctaatccaggacaccagtcgaggatatcagatcactccggctgatcacagctatcaagaccccgtacctacccgatggcagattggacctcgaagcctacaatggcttgatcaat

SEQ ID NO: 92924 - DNA, 702 bp, Eucalyptus grandis
  Intron number 5 from transcript Egrandis_v1_0.054758m (loc us Egrandis_v1_0.054758m.g) derived from phytozome v7.0 (c hr-ID scaffold_5; pos 25770093 to 25770794 reverse strand)
ctcagtcagaggaagatactttatttggaggccatgtttgaaacctttaggtaaagttgtcaagtttatttgcatatgcataaatcagcaagcatttttagattttctggctatcaagaaactgaagacatttctttttaactgaaggttaaaaaccaaatggtgtataactttaaagaaagtaaagatattattttctgaatatacagagcactttgctgggagatctattttgtttgcttttggtctgggcgagtgaagcagatgggccaagcttcatctattgttgttgtttaggcttattggcagtggcaggacaaagttgcacacatcgtatgttctgtttttaatctctctcatatcgtcttttaggtgcatcaggtttgttctatcatttcaactcatactccttactgctttgcagatctgtcggaattaatagtatatctatgaggtcttgcacttgttaaaattccacctcaaaaatgatgaatcaaggagtcacttttactgcttttgctagcgtctcagtttgcattctgaataaatactgcatatatttattctcttttttgaatgaaaaagatttccacccttgcagcacttgtgggggaaatgttctcagaaatagtgtcacacattttcaacattgccaatgataggaaaggcatttctgatttactatttcaggtggtagacctc

SEQ ID NO: 92925 - DNA, 1023 bp, Eucalyptus grandis
  Intron number 1 from transcript Egrandis_v1_0.002962m (loc us Egrandis_v1_0.002962m.g) derived from phytozome v7.0 (c hr-ID scaffold_3; pos 3781771 to 3782793 reverse strand)
gatctccgccgcgtcaccgccgattctaggcgacggtaacttccagagcttcttctttttactttattttcgattgacttgatctgtgcagctttgcttggaacgtgatggagagctcaggatgcattgtgctttgcctcgtgcgaatttcgctttcccacgatgtgtttatttttgttttcgagatttacccaagttgttttcatggctaaaataaattgggttcagcttgtaatctgaattgggaaggaattcatcgtgtggaagctgggtaaggttcatctcggttctgtaagtggaagtgccacatggaagagcaataacaatgtcggctttagctccgtgttcacacatggaatggtgattatgtcaatagatctcccacgtccttgagcaagtaattgaaaacttgcgcgcattttgaggttttgaatttcggtcatctgctttccagcttatgctccatagactacaattcccttctgtggtgatggagccttgtgggggttaacatgccctgtcatcttagacctgtttagtgtgaaccactacgagaaaaaacccaaagaagcttataaggtgaagccgcagtcttgaataacattgaacaataggaaggttcttctgcaactccatctctctttctgtagagccctgctgcagctgatcgaaacccaggattcatgtaaaaaagtgtaaaaagaagtaggattaggttttagatctatgaataacttttggtggaggactctttgcttgtttattttatctttcttgccgctttataatccaccagggtggtcaagagatttgattggacattattccatccacttaaagcacaaaacttgttaatgtcactagtctgcatgggtgcattacaggaatgccttgtcatcataagcatgctgcttaaatgcaatttatcgctggctttagtcatcagatgagaactttggatgtaattttgcaatctggtcttggttaattgctttatgttcattatatttacatctctcagat

SEQ ID NO: 92926 - DNA, 897 bp, Eucalyptus grandis
  Intron number 2 from transcript Egrandis_v1_0.026121m (loc us Egrandis_v1_0.026099m.g) derived from phytozome v7.0 (c hr-ID scaffold_3; pos 14632277 to 14633173)
ccaacgctctcacgacgttggataagctgaacgaggtaccgatcgcctttgctcctcctcgtcttttgattcgaggtccgtctcggtcggttgatcgcgccgccggcgttcggtcacggggactcgattcgtgcttcgagtgttttgtttttttggcttctttcacttcgatttcctcttaataatcaagccatcggcgatctatctcttctctgagggttgaagaaatggttcttcgattttgttttgtgggaaaactggcgaagtatagatatacgtacttgaactcccctatggggactctgcttggggcttggggctcttggccttctgacgatagtttcgcgtttgatgatcgagtctgtattcagtattagctacttgcacttctatgtgatcatgtctcgtattggtacacaacctcatactaataatatctcataagctctcagacttattttactcctgaaagtgaaagctgtttgtaagctcttgcttttttacgtggggaagttatctgtgcgcatgttgtgctagttcagccaaggcacacaatcacacatttgttcagtgcattgaaaatttgaatctgattatgtaatgggtaaaagacttatctgtatctgtaaaatttcccaaggggtccattcttttatgtggagagagtctttcatttcgatttcctctcaagttgtcagtaatcaagaaatacttacttcaagtacgtataatagaagaatatgtgcttctgcatttgtttatattaagatatggatttgtttaattagattgtaggctttcaaaatgatagaactttagtctatacgtgtgattacggtaggttatcatttgtatatttaactagttcattttctcctttctgcacagacacttgaa

SEQ ID NO: 92927 - DNA, 464 bp, Eucalyptus grandis
  Intron number 4 from transcript Egrandis_v1_0.026195m (loc us Egrandis_v1_0.026195m.g) derived from phytozome v7.0 (c hr-ID scaffold_2; pos 60033730 to 60034193 reverse strand)
gcttccctctccaacctctccaatctcaagttcctgtaagcacctactctctctctctctctctctgttcttcttcttcttcttttgcttcaaagcaagcaaatttctttagagaagtgcttgtaactcgatttctggttcgctatcaaaggtgggcttcgatttagaatatctttgattatgctaagcaatgctcatcatttgcagtatttagaatatctttccagtccaaggcttctcattttcagttctggacagggcatagtttcggtggtttgagaagcaatatgagaagagtcatttattgactatcgttttcgaagaggccataaagtcctctgttttttattttttatttttttccccttgctttctctcttgttttgtgaggttctgaatatgaaatgatggcactgtcacgccatgcaggcgactgaacgccaacaggctgaccggtgaagtcc

SEQ ID NO: 92928 - DNA, 737 bp, Eucalyptus grandis
  Intron number 1 from transcript Egrandis_v1_0.044647m (loc us Egrandis_v1_0.044647m.g) derived from phytozome v7.0 (c hr-ID scaffold_1559; pos 197 to 933)
acatcttcaacgacatcatcactcgagacttcagggttctctctctctctctctctctctctctctctctctgcgaatttgttattttgtttttggttgctcttgaattacaaggactcaagagagtttggaattagggataaggtcagcccgatgacaagaaaggtcttgctcggccacggactggaagatgtatgaagtaatttgcatgagtaaacaaatccgaagatggtcctaacctggacattttagtcaaaatttcataaaatccctagtatattcctcagacaaaactataattcataagcaaaatcttgttattcagaaaaagtctggaccactacatttccatttactaaatctccagtcttatcatgtaaatctaaattcttttttttgaaatagataaaatgatattgttcattttcttcttcttgagatattaatttttccacacgccgtattccctgtgccggtacttcaactaatccaaaacatctggttcgtttaattgtacatgaaattttatcaatcccttaattttattgttcttgtaaaccacaacgcggtgtaacgtacttattttacatgcaccatcaatccaacgtttgtgttctcgataccaaccatatagatttcacatgaattgtgactatgcgaaaaccacacaagtctaagagtgcgattgatgtgaatgtccagagcgagagcaagaattgctacaaagtgatcaagcg

SEQ ID NO: 92929 - DNA, 957 bp, Eucalyptus grandis
  Intron number 1 from transcript Egrandis_v1_0.013347m (loc us Egrandis_v1_0.013347m.g) derived from phytozome v7.0 (c hr-ID scaffold_3; pos 54520170 to 54521126)
ccttccttggtggtcagagacactgtaagagactctctctctctctctctctctctctctctctctctctctctcctctctgtatgcggaaacaagcaaaatccaatcaagcccataccttgagagagatattttaaagtggtatgtctcttctaattttggggtttctcgaagagaaaaaagggtcactaaaactagaatctagacctattttttgacaccagaatctgataagaaaaggaggcaagaaaacgaaaaaggttaggtttcaatccgtctcctcctccttctcctgctcatcttcttcctttttcatttgttttccttaaagagcaatcagatttgatggagaagggagtgtgtttttgagtccaaccaagaaagccaaagctagatgaggattgaggctttttcttaatatttttggggtcaaaaaagcacttttttttgcccatctcagttttaatactatatcatgaggtgctagattcactcgcgagggatgggcaatgataggcaacagcttacaattcagtgcgccagttgcgtttcgcttcaagttccaacagttcatgaccaagtgccataaaaagcttagttatgtaggagaaattaaactaggaaaatagcatgttgttttatatctcactttcttgaaatcctccaagtatgcgcaatattatgtgtcaggaattttgtttcagtataggatcttgtagatcataatcacacacaccctttttcttcccatgatgttcttcgccctgtaaaagaagcaaacaacatgtagtcactcatcgacttttgaatcttttggcccctcttttcaagttcctttttgagcatttgttaacatgaatggacttttatttttttttattttttttggtgcgatgactgatgaccctttgtgcttttgtttccttggttttgaataggtgcacgtcctaccacgag

SEQ ID NO: 92930 - DNA, 685 bp, Eucalyptus grandis
  Intron number 1 from transcript Egrandis_v1_0.012064m (loc us Egrandis_v1_0.012064m.g) derived from phytozome v7.0 (c hr-ID scaffold_3; pos 42203098 to 42203782)
atagaaaggtcggttggtgaatgtaaaggttctctttttaactcacacggcatccaaactttaccttttcaaaaccggggttatgggctagaaacccagttatttgaaaattcatgaaacaagaagtaagagtaaccaaaacttttgacaagaataacataattgttagaaagaaaaattcttgaaaactaagaaattttggtgtactaaagacagacacaaattttttgaattaaataaaccaacactctttgggatcatgtgatttatgatcatgatgtgcctgatgtgtataattagtagacaatttccatcgttccacggatcgtaattttatattatttagccgttgtccaatgtgttctcgcatcaactcacatttttaattttatttatttatttatttttgcaagcttccctccctacgagaacttcagaagtttgacttttgttttcaatttttatgtcgattttaaactatgaagattatgcaacatattcatcaattgatttgaaaaattgatcttcgttatggatgttcgatatctttcttgctcgcttttaatattagtcaaatactttctacataaacacttagaacatcatttcaatccatcagagttgtctatttgaattattgatgctgaaagtactaatttctggactaattttttaacaaggtttt

SEQ ID NO: 92931 - DNA, 780 bp, Eucalyptus grandis
  Intron number 1 from transcript Egrandis_v1_0.015541m (loc us Egrandis_v1_0.015541m.g) derived from phytozome v7.0 (c hr-ID scaffold_846; pos 7048 to 7827)
gacaaaccgaggtatgttcataaaaccaagcctttacattagtcaaattcattgagcttattaccaaaaaaggtggttttatgaaacatgaatgttctagaaatattagcaagttaaaagacatccatttcttaatcactagggaaaagtgttaaaaaaaatcttaacattttaattgtgtcaatttagtcttaaactttttgatttagtatcaatttagtccatcggactaattttggccaaatattactaatatcaacgaaaattgtcctatgttacacggcgatgctgatatatataatttttaataatatatattttttttcatatttttctgattttgttctttccttttttccttttcttccttttaccgaccactaaccatacacttccgctcgactaggtctcaactaggtttaagacttttcttatactttttcctaaatcatcacaggcttgatatttgggaaagaagtcattcgtccatataattaactgcgactttacgcttcacgttattttcacactaatttcatctagattagaaggaagatagaaacagagaagcagaagaaattcaacaagaaatgagattcccttttgaagacaacacataatagtcacaaacatttgaggacttaaaaacactagaagcaaacttagtcctcaaaagtatataacatgggcttgtctagttcaaacttaacatcaactggtacattctgttgttattcctctgcagactataatcttccttactaataaaggagtagaccc

SEQ ID NO: 92932 - DNA, 967 bp, Eucalyptus grandis
  Intron number 1 from transcript Egrandis_v1_0.018500m (loc us Egrandis_v1_0.018500m.g) derived from phytozome v7.0 (c hr-ID scaffold_3; pos 29112690 to 29113656)
attgggtgagtcgttgtccctctcctatttcgtattgtttcatgaaagtttcgtggcttctttttagctggcgtttttagggctttgccttcaatggaaaatcatgcttcttcgcttctaagtcacatcattgagttttggcatatgataactacaatgtctttatcttttggtagtacctagcttttagcctagtcgtcaaaaggtatagatagataataggatatcgtttgaagcctttttaataatgcaaagtaaattttgaagtatatcctttgcggttctagaagtatataatctcgatctgatatgattaaagcggaattacctcattttagagctgttcattgagtggctattgcacctttccaacgagggcttacataagaatataaaaaaacttcaggtaatgtctttctgaggccaaaatttgacaaggttataaacaaaagtcattctgctgcttcttgactgcctgtctactcttttgtgtctacgatatgaaattaatatcaagcacggacaccaaaaaaaaatataattgcataatacttatttatatatattacgatgtaaaccaagcccatctaaattgttgattatgtaagccctataatgaagcccacattattaataattcaaattttttgaatggcttcgacccatagttatatgcagtcaattggtagaagcattaaatttataacttagacatttcgctctgcagattttggggcttaagattttgcaagataattacaaaattgagattctttgattactacttttgaagtctgggaattcgtaacaagatatcatcagagcatgttgtttttggagaatcgaaattctttacatcccaagaatcacatggaagtaatgaacatgtgataaattatctttggatgagacattgattgattggattcttaatatgatgatgaaccgttccaattgcagggccctc

SEQ ID NO: 92933 - DNA, 772 bp, Eucalyptus grandis
  Intron number 1 from transcript Egrandis_v1_0.006000m (loc us Egrandis_v1_0.006000m.g) derived from phytozome v7.0 (c hr-ID scaffold_5; pos 22293642 to 22294413)
gcctcgacatcctccacgatccctggttcaacaaggtaatcaatctcctcgtcgagttgagtgagtgagttcgttcggcttccggtgcctgagagcgcgtgggggaagccgagacggtcgcgccgggggggagtcgtcggtagcgaaggcggattgtgtggagggagctcggcgtcgcctcggaatgtagtgtcggcggcgtcttaatgttctgtccgtttgtcatgccgaagttgctccggctactgtcctcgttcgtgaaggaatgttcggccgatgacttcgtttttggccctttctcatggccttttttttttccttcgtttggttggttttgagatcgtgtaaggtcttctagtgaggttggatctcttttgccattgggaaggagcatggtgtgggcgactgctggaattcagcaactgaacacggatttgttacttggatggtctgggagggagctgtggttactcgaattttcatttcgatgaggatttcattctcttacgattttaaggtttaccatccaagggctaaaagttctagtcgttttctgttttcgagtaaaccgatacaccgacatactgtggcactgttgatcagatggttggctggagtggcaattacgcaaattttctgtttgtagataataaatctttggaaggattaaatttttgtcatttaggatcttaggttgattcagttattagagttggtattttgattgcgtatgtgactgacccctttgcatttatagggaacggcattctca

SEQ ID NO: 92934 - DNA, 873 bp, Eucalyptus grandis
  Intron number 2 from transcript Egrandis_v1_0.022373m (loc us Egrandis_v1_0.021140m.g) derived from phytozome v7.0 (c hr-ID scaffold_3; pos 14609695 to 14610567 reverse strand)
aaagtgaaattcaacaagtgagtttagatgtgctagtaatttctgtaccgataattctttggggaaccatggctctttgtataagtatgacatgaatcaaatgcttgcgagactgcatcgtttttgagtaaatggacatggtgcagtttctagaaagtatcctctaggaaaatgagacaaagctgatttcctgctaccttgtgatgacttaacccacaaaaagaagtttctacttttccttttgaaatactggcaatttggcattaaaatttttgctgaaaatgaaggttgcttctaccgatcatgcttattggtcattctggcaatatcaccacttatgtcttgcatttgtgattctatgttccgagggagccgctaaagaagcaactttttactctcatcacggattctatttttcttctcttcttattacctgggacttgggagaggtactgggtttgattgattaccattttgatggctccatccctttgagaattatacagtaaatactcagagggattacagtagaatgtcttgaatgcttttctggacctgtggtcctcccaattgtatttagttaagtttttttttttttgcctgtggggtgtgtcaagggttgtgatagaaacaagagattatcaataaccgtggtttcctgcatttgtaaacttttcagagaagttgcttaaaggttgtttggagtctgaagtccatcaattgaattttgcatctacatagaattggagcgaagtgcattgtagttttagagccttctttgaatgcagggaactcttctttctttgttaatattacttcctttatctgaaaattgcagatttgatttttcaaattcgtacatttggtttgaat

SEQ ID NO: 92935 - DNA, 460 bp, Eucalyptus grandis
  Intron number 1 from transcript Egrandis_v1_0.022373m (loc us Egrandis_v1_0.021140m.g) derived from phytozome v7.0 (c hr-ID scaffold_3; pos 14610637 to 14611096 reverse strand)
gttgtcttgacgatccccagaaggctcagtctaaagtgagctcgtaattttatccctgaagtatttccccattaaatctacgggttttcgcgctgtttcttcagtaattttggagctgttgctactcggagtgattaaaatttgcgtttttacgatgtctggactccatgtttatgctaagtgttttctcttgctaatgaatgttgattatgtggttcttttgatggtttgggggatggcagcttgatagttggggtgggggcttctttattgatgcataaattgtgatacagatcctcatgaggtttgtttttggttgtgtagatgggggcttctttgttgattatgtggttcttttgatggtttgggggatggcagcttgatagttggggtgggggcttctttattgatgcataaattgtgatacagatcctcatgaggtttgtttttggttgtgtag

SEQ ID NO: 92936 - DNA, 782 bp, Eucalyptus grandis
  Intron number 2 from transcript Egrandis_v1_0.018331m (loc us Egrandis_v1_0.018331m.g) derived from phytozome v7.0 (c hr-ID scaffold_5; pos 9198744 to 9199525)
ctttcagggcccttgcaccttacttgcgttgactggtaagaccttcagattctctttactcattgaacaaaaggctcaagtcatagcttttatatttccatcatgtcttatcaaaattcccaaagtttcctacacctttgtctcaattatttggtgatggttaattactgtcatactggacttttttagcatgcaaaactaagcactgttcaaggaggtttgtagtaccgacaaagaatgtgttctatctacttctgaatttgatttgtgtttttaacagaaaaacttccctaatgtgccacgggcgcttgtctccctttgcaatttatttaagctgagggatacttatctccagttgcttcatcagagttttgctagatgctaaattgaaaaggaggaactttgctagatatgtgacctttatatgtcatagggtgttatcgctatgtgttggtttgcctgcgcatgcaccatatatcgtaacttcatcctccacagttgccatttaatactctattggttcatggacacatccagttcgtagtttttggacagaagcagcatgtgggtgccagcttttcgttctgcaccaagtttggactgcatgagaagctttttaaaaaatatggcattttaaacttctctcaaattgtttggctcttgagtttctttttctttttgtgtgaaacaatgatatgagcatttagcttagtctagccacaattcttatcagcaaacatattgacgaaaataacatatcttgaacttctaacataggaata

SEQ ID NO: 92937 - DNA, 990 bp, Eucalyptus grandis
  Intron number 1 from transcript Egrandis_v1_0.009020m (loc us Egrandis_v1_0.009020m.g) derived from phytozome v7.0 (c hr-ID scaffold_5; pos 54261454 to 54262443 reverse strand)
aacccgatcaacactgtattcagtgagatccgatttctaggacctggttttatgtattgttgatggttcagtagattgtttttgttggatcaaggcttcattcaaagacgggctgatctatggtttttttgcagcctttactttgacttggtgcgtgttgttttcctcgtagatcacgatgttatggcgcgcgtgctgtgtttaggagcgctcgttgcagtttttcttcgtgatctgctgtaaatctgagtactcactgtatgtatgtatgtattttccagatttggcttgtctatggtcctcctggataggcacttttttattttattttattttataaatattttggtgttgctcgccagttgcttttatgcttggtggtcagcttattaggttcttgtactcttatcgtgctggcgaatcgctatttgttactggatgtctttaaaattggtctttccgtattttgaggtctagtctcgaagttgcaagcaagcgtgttgtactcgccttatgtataaccgagagtaaagtacggtgaagaaagaatagttgcaactactcatgctttatgtacatgttccctatggactgtctgccatctgtaattcaacgactttgtctggcggcgatattggagtttactgtttcaaaacccatcaatttcttaagagggtgatcggttcgaattttgtacgtaagaaagaattgacttggtatgcttccgctgtgtcggtgcttcgatcaactttaatatatagtgttaggtctcgacgtttctttctttctttcttttttttttttgcggggcaggggggggggggggcgtggaatatgggttggtgcggtgaaaatattagtttcaaagttatagttagcttttagcttttagacagcttggttccataggtggggatactctttgttgaatggaataccgctatacggtttttgttgcttgggtgatttacacttgcctttccattacag

SEQ ID NO: 92938 - DNA, 853 bp, Eucalyptus grandis
  Intron number 1 from transcript Egrandis_v1_0.006435m (loc us Egrandis_v1_0.004757m.g) derived from phytozome v7.0 (c hr-ID scaffold_5; pos 5717780 to 5718632 reverse strand)
cccgtttcggctcgtgacggttcgagcttgttcaggttctttggattctccgattcttctgcattgcttgctttgctcaccatttcctgtgtatttcattctttttcccttctgggttttttgaatgatgatgcatttgatttcaaatttctcttcttttgtttttttgcccggaaaattagcgagtaagaagaggaaagtggtttcctcaagtccatgactttgcattcggttcgcacgttctgtcgttgatttgagactcaatacattcgcccgccatagctctttttttttttcttttttttttcttttttaatgaattgtgcttctttgaccactatggcaatggagaattcgaaggtgcgggtgactcattgggatttctgaggtacataagactcgtttacagctagctgcgtaactgtcatacgacaattttaagattgtgttacgaggttcttgtgcttaataagggcacgtagtaatgttgtagggtacacgccatatacggtagaagtgcccaggattcagtagtttctatgatgaaaaaatagagctttggtgtggattgtggactatggaataatcaggaatggcgtaatatggcctcgctatgctgagcaaaatctgggatcgattgggtcaactagttggaattagtgaacttagagctcaaaagttgttgtgttccaaacttgtttttgacatgtgtttagtttcttatgatggcttttggggcagccagcatcttattcgtgatttcctgttcgtttattatcgtaaaagtgtaattattttcttccttaaaaccccagcaggagtccatcattaagctgcttgctctggttctttt

SEQ ID NO: 92939 - DNA, 703 bp, Eucalyptus grandis
  Intron number 4 from transcript Egrandis_v1_0.048255m (loc us Egrandis_v1_0.048255m.g) derived from phytozome v7.0 (c hr-ID scaffold_5; pos 25481352 to 25482054 reverse strand)
ctcagtcagaggaagatactttatttggaggccatgtttgaaacctttaggtaaagttgtcaagtttatttgcatatgcataaatcagcaagcatttttagattttctggctatcaagaaactgaagacatttctttttaactgaaggttaaaaaccaaatggtatataactttaaagaaagtaaatatattattttctgaatatacagagcactttgctgggagatctattttgtttgcttttggtctgggcgagtgaagcagatgggccaagcttcatctattgttgttgtttaggcttattggcagtggcaggacaaagttgcacacatcgtatgttctgtttttaatctctctcatatcgtcttttaggtgcatcaggtttgttctatcatttcaactcatactccttactgctttgcagatctgtcggaattaatagtatatctatgaggtcttgcacttgttaaaattccacctcaaaaatgatgaatcaaggagtcacttttactgcttttgctagcgtttcagtttgcattttgaataaatactgcatatatttattctcttttttgaatgaaaaagatttccacccttgcagcacttgtgggggaaaatgttctcagaaatagtgtcacacattttcaacattgccaatgataggaaaggcatttctgatttactatttcaggtggtagaactc

SEQ ID NO: 92940 - DNA, 844 bp, Eucalyptus grandis
  Intron number 1 from transcript Egrandis_v1_0.005496m (loc us Egrandis_v1_0.005496m.g) derived from phytozome v7.0 (c hr-ID scaffold_5; pos 57113487 to 57114330)
tcccttgagagtttcttgcaattagggtttctctggtacgcttctctctctctctctctctctctctctctgttgtctcggatcttttcattcaaattacgtttcttgcttccgagttctttgatttttgagcttgcccacgagttttcctgcgatacccatgttctgatttggcttggagacgtcgcgggaggacgatctgggcgtcctgtcgaacttcttgccggtgaatttccccgttttcgattgtctgcagtgataaaggttcctcctttggggaatttctggggtcatccgtcagtggttgggggttgtgcgtttcttgattgctcgctaaagggatctttgatcgacgtttcttggttcccgtgttgtttggcatactgagagagtagatgtcggtggagtgagaaaggtccaagcccctttttttggtttgtacggttatgtgatggagtgaagttgttgacttgttgagacttgtaattaccgaaaacgaaattggaaaagaaagcacttgcgggcgcgtcgtgtttgcttttcctgaggcgaggtgccgattctagtggctaaggaataaggagtattattaatgatatagattccggattggtttttttcgttttcaggagatctgcgattagagaatgccgtgcttgtacttgttaagagtggaaccatttaattggttgtttcccatcatataacgtgatgtttcgaggatatcatttagggaaagtgtaattaagcgatatggaattttctcttggaggaagtattagtcagtcaactgagttttgaatcattattctaatcatgtaagttttctacagctgcgagaatc

SEQ ID NO: 92941 - DNA, 796 bp, Eucalyptus grandis
  Intron number 1 from transcript Egrandis_v1_0.031569m (loc us Egrandis_v1_0.031569m.g) derived from phytozome v7.0 (c hr-ID scaffold_3; pos 74038823 to 74039618)
cgcaagaaacgtagttcagatttctccacaaccaaggcatagcggtttaaactgtaacacccagcagactgatggaagcaaccaatccctcagttgttccaaaatttatgctaagcattggtgtgaaagggtattggaagaggacctatgcgaccgtatctagcaatacttctctatccttttaaagttaatatgtacgctgtaagattgtatatcaggcattcctgacaggaagacagaactttccaagcattataagagttgggggtcaaaagaggtggcaagcaaaatgaaattcacagagagcacattgaacttttagatccgtcagtgactaaatttgattaaagcacaataaaccaaaaataaaatggttattctactgtagtgagcatttagatatataagagtataatgcgggttgcttctggaaatgaattgtctggaattacacgccattctcctccgggtggttgtcgttttcttctgaggaaaaaacaaagatcactatgaagttcattttcatatcctcctttcatctttagcaaaatctacttcaatagccaagtgaatcttactcagaacagaacacttttgctttctaaaggtgtgggaatttcgagttaatatatattcccaaaggctaagaaaaaaagtacaaaaccattatataagaatgtctttaaaattttcatttttttctgtgttttgggccacacaaacagagaatcgaatgtagaatatagagcatataggggaagaagcctgaagttggtgatttcatctcaattgaccg

SEQ ID NO: 92942 - DNA, 856 bp, Eucalyptus grandis
  Intron number 1 from transcript Egrandis_v1_0.043972m (loc us Egrandis_v1_0.043972m.g) derived from phytozome v7.0 (c hr-ID scaffold_3; pos 14051280 to 14052135 reverse strand)
gacgtcattaccggtatgaacgccacggcctcttccgaattttccctgattttcctctttcgttactagctagctacttcgataatgaaagagtcgtgtagtagttggcaataaatacgttctcgctgtaaactcgtgttccgtagaagagttcttgcgggatacgtcaacgagacaatacgcgtacctaaacttgtctaccgggcgacgtgggcgagatcccgtcgactcatttaaaaatagtagaaacccattctattgaccgaaaatgcgttaagattgactcgaagatatatggacataggaaagaaccccagtaataatcatatatgaactcgtagatagtggaggcattcaatttcttatttcaaattttagctattgtaaaatctgcgccttgcggtatacttcgttggttgaaacagtgttcttcggggtcttctaatttctagaaggtcttcgctgcgaatgtgttgtttacttgtcttttgctttgggcttcgtcgtggcaacgcagcccatgtgtgctttccttagatcttcctgttattattgttcccagattatattagttgaagaactgtaggctgactggaccagtcaaaggggtcaaatcatgtcggagagagagattaatggaaatttccctcctcctttttaacaattgctttatggagtactattaagatctcgtaccgactgaaaacgcgcttcttgatttgtttatgcatggtcaagtcgacaagctacaggtctttctatttgctttcttgtttatgagggattgaacgtcgtttcttggtcttttcctttaaattcaggaactggggagcttacaacttgttcgcccgacaaa

SEQ ID NO: 92943 - DNA, 764 bp, Eucalyptus grandis
  Intron number 1 from transcript Egrandis_v1_0.050443m (loc us Egrandis_v1_0.050443m.g) derived from phytozome v7.0 (c hr-ID scaffold_3; pos 53840365 to 53841128 reverse strand)
ggtatcgcaagttttggtgagtggtaacttccatgcatggtcagttcatgcacgtggagaaggtgatgagtgggtagatggtttatttaggcatgactaggaagaaccagggtttggctggagaaatctctcattaaattttggtgataatttaaaaagtctttataaaccaataagtagataattactctttgagtgcgaggaatatggtgttctacttcactcctgaacctagttcaataccattctagcaccaaaggcaaattaaaaagattagctacctatttttccctatatacttacttgcatgattactaaattgaacagtcttctttccttctttctagagattcagatactcctccagaaagtagtcgactttgtgattctagtgaacctgaaaatcaaagagctaaaagaggggagggagctgcatatgtatcaaagattagagaacttgttattcaagcttactacggagtgatgccaaaaaattcgtaggtttttatcgcttttgcagatctaataagccaattccagcgaaagcttgtaatatgctcaatactactttcttattttagtgaaggagtgatttccactatgaataatgctataaatacaaaaatgtatttacaaaacttggttttatgcagatttaatagacttgtcttggtatcgttggcattattgatcttgcttgtactgggcatcattatgtttttgtcctctcgtgttttcttggggtcacgtacaacagtgaagta

SEQ ID NO: 92944 - DNA, 786 bp, Eucalyptus grandis
  Intron number 1 from transcript Egrandis_v1_0.042605m (loc us Egrandis_v1_0.042605m.g) derived from phytozome v7.0 (c hr-ID scaffold_5; pos 32920933 to 32921718)
tttgtcctacatcgatagaattagctttgtcaaaggtttgaatgtactgtaccgtaaaactaggcattattaattacttaagttggttcttaaggagcagcatttctaagcaaacataataaaatatttattagaagctttgccaataatgttgtaatgcgtttacaaataatgggatctagtgatggcataccactagtttcttgatcaaaagtcaaagctagatattgaattgtatatgtaaattctttttcttcataattttcttctaagttggtttcattttctttgcataacttcaaaggaatttaatttttatttattttttgaaaactttcattgtgatagaatagtattgacattaatctattacatatagtctaaatcaaaatttaaaaaaatgttcactcagtgcttgccacattaactttgcttctctaattggaacatggcatgatgcgtggcttaattttgtcacataacccacattcgcatggttgctacatggcacttcacttttactttttttattgccacatggcatgacatatggcatagttttgccacatggcctgcatctgaccaatatccattagctttttgatttatcatctctaaatttcaatctcttagaatatgtacatacagatttgtaattactagtaaagtttctaattgtttactaattcatcaatacaatatgtaattcacaaaaaatcaaattatagtacccttttaatgacatgttggtttcattgtttttgcaggacttccaacaattgaagt

SEQ ID NO: 92945 - DNA, 534 bp, Eucalyptus grandis
  Intron number 1 from transcript Egrandis_v1_0.025648m (loc us Egrandis_v1_0.025648m.g) derived from phytozome v7.0 (c hr-ID scaffold_3; pos 70658606 to 70659139)
gctcagcttcctataaagtaagtttgatcatttcttgtcccgcatttgaactcgatccgtagtacttagttctgctatcatagctaagattcgattcgattcgatcagatgtgtgagaatagaatgtcatcctacctaactcaaactagatctcacgctcgtgttaataagctggtcatctagagaatttcttgtgtttcatgacataatagggccagcacgaatcaaggcacgagcacgagagcgaacccgaaaatggtcgctcttagttttgattcatcgagagaagaacaaggaaatatcgtagtacggtagttcttgaagcattcggattgcaagagaaacaaaagaaagaaagggtttatctcaagccactaaattagtcgaactgggatcatggcgaatgtggagctgaacttcctaacaaaaccctataaacaacagctacaaaaactgtagtgtacacactcatgaagtgacgctgattgaattcgttgatttcgtggtggtgcaggagagggctctcgaggtatt

SEQ ID NO: 92946 - DNA, 938 bp, Eucalyptus grandis
  Intron number 1 from transcript Egrandis_v1_0.007369m (loc us Egrandis_v1_0.003736m.g) derived from phytozome v7.0 (c hr-ID scaffold_1; pos 36511629 to 36512566 reverse strand)
cgatcgatcgatcgcttctctcctcagtacttcaagtgagtcctgcacacgcgctagtcgacgattggcggttgggggcgggggcgtggatcgcttgtgctgctgcttcgttgatttttttattttttttattttttttgttggctcggtttagaaaatttctggttgcttgatcgagcgcgggatgtagtgatctcgaaaataccgagccggtcggtgaatcgaactgagccgcgaaacgagggcggctcggcgacgatgcttgtgacgatcgatggtgtggacgtaggtgctgaatgtggatgatattgcttcgtccttctctgtcctttgtgcctgtcccgcacatgctttccgcataagagtttcgtcttttgatttggcttagaaatcgaaaatgccgcttcttagtgatttgatgtagagcgagtctgatgaatcgaaccgagtcacgaaacaagggaggctcggtgatgatgcttgtgaattgatggcgtggacgtaggtgctgaatgtggatgatgtcacttgattgttctttatcctttgtcccgcacatgctttcggcatgtgagtttcttcttttagtttggtttggaaattttggtgcttaatcgggcatggatgtaatcttgaaaatgccgcttcttagcaaattggggtgttgtcgagccagtcgacgaattgaactgagtcacgaaacaagggggggcttagtgatgatgcttgttacgatcgatggtttggacataggtgctgaatgtggatgatatcacttcattcttctttatccattgtcctgcacatgctttccacgcaaagtttcttctcttagtttggcatatgttcaccgaggacgtgttgttgctgtttaatgctatttggtccttttcagcttattggtttgttgatgtcatttgcatttttgcaatgcagat

SEQ ID NO: 92947 - DNA, 642 bp, Eucalyptus grandis
  Intron number 2 from transcript Egrandis_v1_0.023658m (loc us Egrandis_v1_0.023658m.g) derived from phytozome v7.0 (c hr-ID scaffold_3; pos 11601620 to 11602261)
tgggagtgtccgcattgagcgatctcgtcaaagaggttagtagcctttctgctgtgtttattctgtgtccaccgaagtagcaatgggatttttaggcacggtaggtaattttggttgtgtgtaagtgaacgattgcacacaatgggtgtaaggtagcaatgtattctggggctttgtcaataaagatgcagaatgcaatatgattgcaggaaagctgttctatgcatgtacatatagccagaataaaatgattgctatctgctcccaggagactggattttgagtggtcgaagtatctgaagtttgcaggatggagagaatcactggaagtaggataagaaaacggtatcatgtcaggaagttggattgattttcaatgctttttcatattggcgtcggatcttaggcatttgagtacagttaaaatggacattttcttcattaggctggcatattttgtttttggcagtgtagatggcaccttgtttagaaaatctccaactctttggccagtagtttctcatagctttctcttagaacgttcgaatttaacatcttgtgattttgtaagtaccttatcctgccttagcactcataatttctgtattacaggtagacgctattcaggcttgtgggggtcag

SEQ ID NO: 92948 - DNA, 958 bp, Eucalyptus grandis
  Intron number 2 from transcript Egrandis_v1_0.017714m (loc us Egrandis_v1_0.017714m.g) derived from phytozome v7.0 (c hr-ID scaffold_5; pos 26962860 to 26963817)
attttgctactcctcgactttctgcccgagagaaggtaagtaaccaaggtgttcccactcaattttgtcaagccagttcactcgcttcacaccatcacggggaatttgaataatttggcccatattttctatgtaatcactattttgatgtttacttgtagctatggcttagtatgtgttagaattgattagagatatggaaacttgaaacaaggagttggtcatctagaggctttgcttttcttttcttttcttttcttttcttttctgatcataaaagtaaaatgaagttcctgtggagagaataaaaagaaaatatagatgctacgtttagatcataatagagaccttctattaatagagtgattttggggttgcgctctttgtgaaacaaagttgaggttagtgaccttgtaaatttaagtggccttctgcattgagtaagttgaagaccactttcagcagttaattcggtttcgtccatgagaatctgaggcactcatcaacaaattgtagtttgaatgattaacacattcccgtcacaaccattactttccaagtttataactatcgagatcttaattacttgcacaatacatattgatgcgtgctttatttcttcactggtcctttctcgatcaactttgcatctttacattgagaacccttgccttgattgtactctgcattacatgttttaaacacctgactttaggtgtagagaaatgggcagatattggcataaagtgaattgtggttctttcaatattgttcttcttcctctgtgctgcactcacgtactaatctgaatacaagttcatccattggaatgcaactttacttgccgaaaaaagtagttgcttgaagccagaatgtttacctgtcaatagtggagataaatacttccattagtcctgcttgagcaatgtacaagtgtgtttctcccaggaacttggag

SEQ ID NO: 92949 - DNA, 869 bp, Eucalyptus grandis
  Intron number 1 from transcript Egrandis_v1_0.001107m (loc us Egrandis_v1_0.001107m.g) derived from phytozome v7.0 (c hr-ID scaffold_3; pos 73938594 to 73939462 reverse strand)
gctggaatcaagggatataacttaaaagatcacaggtaattaatgacaaatgttgtactttcatttctaaatttagatcattgtttcttaatcacgacaactcaatttatagatcaacccctccccgctccttctaacaatattctgaagtcaaatggaagttgaaatggtgtgcaaattaccatgttcgttttataaagtccatttcatcaggcatataatttttcagaactcgtaaccgatccattgacagcacttttgcgtaaagtttctatcacatcttatgccattcttccttgtgataattcctattacagtagaattttagagtggccatttaagggtggaccttacccatgaattagttaaaaaaggtgtgccccattcgatatgggattgtggtgccccaaactcctgcactaaaaagtattgacaccttcgtcagtgttggtcccactcaagaatgctctctctatttaatgtgcgatttgatctattttcaccctttgtcaagctagatgcattgcacgaaccaaaacaattggtctggttcgcccgcttggctatggagcaagttttgatgaatacatcgcaggttagaacgtcactgatttgaccatctaaaagctcttcagaaccgccccccacatcaatatccaaccatcattatctgtaactgagatcaatcttctcggcttggggaggactgaatatgaaataaactgataatccatgcttagttttaacaatcaaaatttatggttttacatatttatgcttctgcgcatgtttgtggtttctaaaactaagacggttgcattatgtatatggcagccaagataaacttatagcctttgttctggaagaag

SEQ ID NO: 92950 - DNA, 917 bp, Eucalyptus grandis; identical to SEQ ID NO: 92718
  Intron number 1 from transcript Egrandis_v1_0.028398m (loc us Egrandis_v1_0.028398m.g) derived from phytozome v7.0 (c hr-ID scaffold_3; pos 58785861 to 58786777)

SEQ ID NO: 92951 - DNA, 503 bp, Eucalyptus grandis
  Intron number 1 from transcript Egrandis_v1_0.032334m (loc us Egrandis_v1_0.032334m.g) derived from phytozome v7.0 (c hr-ID scaffold_5; pos 29318929 to 29319431 reverse strand)
ccttggtaataattttcatcttcttttcaatttttgaaattcttttcccattttataatttagataaaattctcgtattcaccttattgacctgaatcatcatgttattaacgagcattgaatgcaaaagatctcaattaaactcacatatttcaactcgacataataatggcatgccatgcgagattggatcatccttataaatgaacaatagtttgaatttaattgatttccttcacccatcagctagaggaataagatttccctacaattggcttaaacaaaaaccatagttgtaatccatagcactatttacaggatcaaatgcttcttttcaaagtgaataaattaattttttttctcaaacttatcccatgctcagagcttgtataaaaaaaagtatacataatagagaacttttttttttttgctcctttcctgtttaccttaactcattttgtttcgtgcacgcaatttctgattaatgatgtgcaaaatgcagc

SEQ ID NO: 92952 - DNA, 1025 bp, Eucalyptus grandis
  Intron number 1 from transcript Egrandis_v1_0.019301m (loc us Egrandis_v1_0.019301m.g) derived from phytozome v7.0 (c hr-ID scaffold_5; pos 8079506 to 8080530)
ggggaaagaagaacgaagatcaagtcgccagtcaggtaaaagcctctcaagcatactatcctggacaggccagtgctcttcggctccttgatctccttttttcactcctacacttcgaacctacccgatgatcattctccaatcaatcctaaatgtgcaaaaaagattgactattcccgaagataaatttggaatctccgttgattttgtcgcctatacaaacggatctccagtttccagaagtagcgttcttcggtttaaggaaagtagcttgtgttcacaacgattatcaatcagaagctttcttgcaaaactgtccttcagattggcaatttaatcatcactttctatatttgaaatcctagacagattactagttgtgttgttcaaaatagtggcgcttgcgtctgaatgtttatgtgggagttgatcttcggattctgatgttgtttcactgtagtggactctgtaaatatttcaaggttttgaatatctccgcatatgagatttgccgatatccatatggtcaatatccatgatgttgttgagatgctatccaaagatatttgaacaacaacagaagggttctgaaaaatgtcaagatattgacttctcttcatggtctccatattcaaagagcagttgattgaatctgaaacaacttctcttcattagtagttcctgtaagatgataccgttatgcacgtatcagattcaagacgaaccaaagaagattttatcaatttcaaaattttattaataggttttctcaatagtaattgttaatcgtatagcatgatggtctctactcgtgtgaataataattgtaggaatgtcaaatgatgcttcaaattcttatccattattgattacatatggccaagttgtttaaacgctagtctgtcacaccacatctgatcgtctgagttcagtagtcgtaaaagattgatatttactcgaaatctaactgggttttgctttcctcaaacttttgcagaagttggtggtgaaagtggatctaggtg

SEQ ID NO: 92953 - DNA, 937 bp, Eucalyptus grandis
  Intron number 2 from transcript Egrandis_v1_0.036068m (loc us Egrandis_v1_0.036068m.g) derived from phytozome v7.0 (c hr-ID scaffold_2524; pos 1631 to 2567 reverse strand)
ctctttcttacgatgtatgtctcttatctggctgctggatactttttgcagttgggtcttccttcattctaactgtttggttgggagtgttgggtggggttcttttgttacgttggtcgccaatttgctgtttctctgttgaggcttttcaaactaatcacgggtgttgctttttgcgaaatgattcgtggaatttatttgttgagttttcctatcatagagcacctggaatcctgcactttcgagaaagctctttctacaatccaaaaactactcgttagtttcatcatacaggataaactaacatctgatagcattatctagttgatcattataaaattttactttcctgctcttgtcttgcatttgattaataccttggagactgcatgtggttttgctaagagcagtagtagtgctctgcttaactttttgagtttttgttcttttcttaagaaaagatgaatgttccctttttatgcaaatttggaagcacgcattactaaaggtcatagttaaagaaggttattatacgagatcaagaaccaaatctggcgacgcgcacatactcttcaaagatgttgttagttcctgcataaaatacgtgagtctgtttttagcacacttcagcctgaatagcatctttccgttgcatccagcgaaatatatccgtggaattgtcatgcagtaataccattgtttgttgctttttgaatgccttttctgccttttgtggtagtcgccttgttggcagttggggtctgttgtcattttatattatttaaatatgtgtaggtgacgtattcaacttttacttgttgtctcaaacctcaatagctcacatcgttaattaagctttgtttgctacatggttattgtattactatttgttactcttgttcgcagatatctcggttattggaacttttccttgttt

SEQ ID NO: 92954 - DNA, 984 bp, Eucalyptus grandis
  Intron number 1 from transcript Egrandis_v1_0.019500m (loc us Egrandis_v1_0.015924m.g) derived from phytozome v7.0 (c hr-ID scaffold_1; pos 17459819 to 17460802)
gcatcggccccgagatcgccgaatccgtcaaggaggtccctctctctccgcgctccgcgctcgatgatgcttttttttcctcccgttcttcgttccgttggttgatcccgtcgctgccttccggcccgtgggtttgaatttcgtgctttttagcgcgtatcgtgtgtttttttcgggaatcctcgctctgtcgtttgtctgggattctttttcctcgggaggatggagaacgggcggatggcactttgttgtcttgcttgctgaattctggtggtagtatagtggttaaataggatcattgaaatgacttggtaaaccgcccggccggacttcttggagttttaggtgcatacgaaagaaattcatgctgtttcggagagaattggttaccatagttttggcatggagctgactgtctaaagtgtcaggacctggtctctacaatggctggttctagcatctctggattcctggttttgtttgcaatgataaatattgccttttagcttagcactagaaagtcttcttcttctactagtatgtgggcggcgaattgatttttcttttatttccttaatagccttggttggttcttgcctataaatttcctgtttccatttaccataaagaatcttcgatggacatgctcgggtaattgcagattgaggccctaaaccaattgctcttttcttaatttagctttatgctgatatgagggcactaactggcataagtttgcaattaaaatttccctgagagtagagatggatattacattctttagttttgagtttctttcctttttattttcatctttttctcatcttatcatgcagtttaacttctgtgttagctgttctcactatttccttagctgcccttaatcttatttaagcagctgagtggcggtcttgcttaattttagtttttgctgttttcacgaatgtaggttttccgagaagctgaggtgccaattgagtggga

SEQ ID NO: 92955 - DNA, 555 bp, Eucalyptus grandis
  Intron number 6 from transcript Egrandis_v1_0.015171m (loc us Egrandis_v1_0.015171m.g) derived from phytozome v7.0 (c hr-ID scaffold_3; pos 21619811 to 21620365 reverse strand)
gactttctttgctaaaactcagttaggtcaaaagatttgattcaatttgtatgagaagtgtgaatctgtgttctaatggaccttgttcatttcaaggattttgcaagtcttccgaattttgacctatcttgattagaatgtgcttgttaaacatggtgacatggtccaaagattaaactgcaaatttgattatttcaggcgatgctactgagcatggacaactgggtaaaggttttcgcaataatgacttccttgttaatataagtttagatggaaaattgctttgcttccattatttgttctcccttagtttctcctccagttttgattggttaaattaataatagattgatgtttattgtgcctgggtggagcatcaattggcaatgactttttaatattttttttaaaaaattatggttgtgtacactttattataaaagatattttatgatatctattagggttttaggtggatgtgatctatctggacatgttattgaaattgattgtaggattgttttattatgtagttcgtcttctcaacagcaacag

SEQ ID NO: 92956 - DNA, 393 bp, Eucalyptus grandis
  Intron number 1 from transcript Egrandis_v1_0.009671m (loc us Egrandis_v1_0.009671m.g) derived from phytozome v7.0 (c hr-ID scaffold_3; pos 42931174 to 42931566 reverse strand)
gaaatttgaataacattttagaatttcacgagaaagcaaaaaaaaaaaaagggttctgatgggtagtattactgtatttgtcgatattttatgtactccgatgtcgaggcgttcggaattaaacgggagtcgaattataaaattgccgaaaaacataaacaaactaaagtttaagaccgaaggagtaacaagaaaaacaatctttgacgtttgcagtacagcagtacagcagtggtcgcgacatagagtacatgcatataaataccatatctttcctcggggccccgcctaaaaagggaagaaagggaaaaacaatcattaaacagtcgagccacacgtgtcctcgttaaaacaccagaagaaccctgtcactccccaattctttcacacctt

SEQ ID NO: 92957 - DNA, 766 bp, Eucalyptus grandis
  Intron number 1 from transcript Egrandis_v1_0.049852m (loc us Egrandis_v1_0.049852m.g) derived from phytozome v7.0 (c hr-ID scaffold_1; pos 28488627 to 28489392 reverse strand)
cactggcttgaagtgccagtaagcaactgtttacttttgggcaccagggaaagacgcacataactgccaaatgggcattttgctttcaattactgtcgttgagcagactttgatgtttcggctttgctagaatgtggtgtgtagaacttttgaatggtgctaaaatgtccagaaacaaaagcaggaatttgtgtttgttatggctgtagcattttccttctcctcttacactggggggaaagatctcttcagcaagtcatctcatctgttgggaaaatgaaagattgtgtatatggtataaacctttcctcgcaaatattgtgcatcactctatgagagaacttgctttttgaagattgtatttgtgtcagtctcaaatttcgtcaatctcgaagttgatatttatagcttgattgttcgtctggcctcttatttagctacatactgctgaaaagaagaatgataaatgaaaattttaaatttgcatactatacgtaatgccctgcctttgaatatgagttacttggttttgatttgtggaatcgcaccatgcagatgaacagatatgggctaatcataatgagattctttactaatttgcctgttgatttctgttttgttaagggtagaggtctcattctggcttgtcagttaggaatatcactctatcattatccaatgcattgaatcatgtcgcagagactccggagattggttggagtttactccatggtgaaataatcatataaaattttgcaggctgagc

SEQ ID NO: 92958 - DNA, 981 bp, Eucalyptus grandis
  Intron number 2 from transcript Egrandis_v1_0.014926m (loc us Egrandis_v1_0.014926m.g) derived from phytozome v7.0 (c hr-ID scaffold_3; pos 76107347 to 76108327)
gaattcccctgcagctaaggctgcttcagtggaaggtactttctttttctttttccttgttctttctatgaataatttgaattcgttgatcatcgggtgcctataatatttggtaaatacccaaatgggattcttcttttctttttctttttttttaatgttcgagtatttatctacctgagctatgagaacccagtagctattttcaagaaaatgttgagaatttgacagagtgatcttgtggagcgagtgcaagtaatacagttaagattgtttctagtacgcctatagcctgatttaattaatcgtatcatagtaagtaaatctaattaactttactgaggcgtccatgttcgacttggtaactttctgcaatttattttttcgtgctaataatctgctacttgtaaagttgtgagtttctagaaatgagtatgttttatggtgaaaccgttggctcgtgccatcagatcaatctgcttccactaatacatatcatactctctgcgaagacatatttacatgttctgccatgaagaaaattttggaggattatttggtaggccaaataaaaggtgctagctctgtcaaactattttcttggaattgcaaagaaactatacacgaacagaaaacaattaaagcagtcttgtgtttgtgcacatgagcatgcattgtactattgagaacccatccaaaccaactactcttggctaccccttgtcaaaaccaaatttgaatggccctgagtagatacagaagattattacagcttataatcttaagggattaagggccaaaaataattgcctatcctgtatgtcctgagcaaaattgactggactttgttgcttcgttttcaccgattgttcacctctgatttcttcttgttcatctcataagcttgacatcattccgtgtaccttttctgctcttgtaattgtagagagtacttctgcagtttcagctcagacagctgaa

SEQ ID NO: 92959 - DNA, 881 bp, Eucalyptus grandis
  Intron number 1 from transcript Egrandis_v1_0.012520m (loc us Egrandis_v1_0.012520m.g) derived from phytozome v7.0 (c hr-ID scaffold_1; pos 6969407 to 6970287 reverse strand)
aagtgagttcactcttccctctcaacatttcgaggcttgatcgattatttgatgatcgcgttcgttttagctatatttgtgggactttttttttataataatattgtattttttgaattattttattaatttttatccttttttttcattttttcccctctccctccttcctcctctctcctcctccctccttcttcctttggctctggcgaccggccagaggggagggctggccggtcgccggactgaggcgaccgggtgagccctccccagatccggcgaggggggcctcaccgtcactggccaatggtcacatcagtgctagccggccaattttgactagatgaactgatttggcataattataaatggcctaagacttaattggtcaaaaagataaatttaggattgaatcaattataataggttttaggacttttttggtaattttctcaaactgtaaaaggtttaggacttaattggtcaaaaagataaatttaggactaaatcaattataataagttttaggacctttttggtaattttcctaaacgaggatatatggcaaaggaagcataacattgattagcttttgcctcgtgacagctctaaattgctttcgttctgttttttgttcgtgggattgtgctgtgaattagatgcgaagcataaagatctccaatgttgccatctcgactctgttttgcgattttggcctgggccaatcgcattatttcctcctgattcgaattaaactttcttggaaacttttacatagccagtgagctgatattgttactgggtttctttgctgtcctgtttgccaaattgtaccatcttgattgtacttttgtgctgacctgatcttcacgcagtcaaac

SEQ ID NO: 92960 - DNA, 642 bp, Eucalyptus grandis
  Intron number 1 from transcript Egrandis_v1_0.026111m (loc us Egrandis_v1_0.026123m.g) derived from phytozome v7.0 (c hr-ID scaffold_3; pos 56612474 to 56613115 reverse strand)
ccagtgccataacgacgatagataaattgaacgaggtaggattctgatcgtttccttctgtctaattctttaaagtaatttgattgcttatgatattttgtctttattcctgttctttttattttgattttccattttctcgttggtggtgtccagaggaccatagattttctggagggtcatcgtgttaatagtcgtagcgtgatctgggtttatgacccattaatcagttgatgttgctgatatgtttcagctccaggtcatcctaggttaggtcatcctacatgtaatttatcatcggttggatggttttagtttgtggaatttatttgattttgggattgtaaatttccatttatatctcaattggtgggtgaaattagagaagcaatagatttgatgcagccaacaatctgttctttaatttttttactagctagacatgtgatactcagttctttaatttacgaagtgatataaaatcatctgtaaagcccctgtaacatatgcaaaactgcttttgtcttgatccgatgtgtataacatgttatacccattcaattaactggaaatcgtgctgaaatttgcgggagagcttcttcagattgttacctctgccacttatcattgtagacgctcgag

SEQ ID NO: 92961 - DNA, 867 bp, Eucalyptus grandis
  Intron number 2 from transcript Egrandis_v1_0.050162m (loc us Egrandis_v1_0.050162m.g) derived from phytozome v7.0 (c hr-ID scaffold_5; pos 5888177 to 5889043 reverse strand)
agcacagttggaaccaaaaggatttggaaccaattgtagggtatgcgaccctttgctactcaaatttaattatagagtgtgcagcttataaaatatgcgaaaatataagactcaaaataaactccataagctgatacaagtaacacactcaaaacaactagctgatacatgcacagactcagctattctattttcttcccttctcgatcacggagggataactcgctctgaggctgtagtgcctctcactcttgaagttcaccgttgcacctggtgacttcttattccgaagctctcattgctggaggctttccctgaagctcacatacgtgtggcttccttgctggcctgaagttcttcgcctgcatgtggcgtgagtccctctccctggcctccctactctgcctgcggtggcttgaggctgttaagcctctcttccaggcctttcggcctgctccttcaccttgaggccttatggccttctcctttgaggcactttggcctgatttacgtttgcactcccaagccctatttatagacatcttccaccgcctgaactctaccgtcttcaacgcgcaagagttgaagttgaacttttattcttgacagtcaacaattgtgggctgcttttccttcacgtccaagttctagcaaagttgaactttgcttcctgctccttgaaggctccggtaacaattatactattattttaatgtgtccattctttttttaatcaacttgtggcttcttcaagaattcttcttctttggcggtttacgaagtgatgctgcagcacacttctctttggcttattattattatattaggtgttgtgttccaacaagcactgcgctacctgcacaaaaa

SEQ ID NO: 92962 - DNA, 735 bp, Eucalyptus grandis
  Intron number 1 from transcript Egrandis_v1_0.019680m (loc us Egrandis_v1_0.019680m.g) derived from phytozome v7.0 (c hr-ID scaffold_5; pos 10911333 to 10912067)
attacgtcgagcagctcgagagcagagcttctgaggtgctttctatcatctgtggaacgttgaaattttacccttttgaagaaattctgcattgtgtatcggaacgttgggagatttgggatggaaccagctttctgtttaaatttgaaattttgggggaaaatgcgtggtgagactggcatgagcgattcgtaggcttgagagtggcaatgattagtttcggtggagggagagatgatattttaggaggtggattgattgagctgcgtgcaagctccttctggtcgatttgagctcacttgatgtgagcttgtctcgagttttatccgagttcgagcggtcaagtatcaaactttgacgaatttgatcgtcaagtaacgttagaatcgctgtaatttctgttctttttattgtgtttttgatgctcgagctggaaattcgagttcaagcttgagtcggagcttatgaggctcgagcgcatttaatagttatgcactccgactcgagcttgataaagtcaagctcgatggaacatgagttgatcgagtcttcattttcaaatctgataagcgctagagccgagttgtgtcttggtcatatttcttgtcggcagaacttttgctcctgattatgacatgacttcggtctttgatcatcgtcgctgtctctcatgaggaaatcgttgttgcacacgttgaagattgcagaatcccagagggagctgtcggaagcaag

SEQ ID NO: 92963 - DNA, 1028 bp, Eucalyptus grandis
  Intron number 1 from transcript Egrandis_v1_0.016882m (loc us Egrandis_v1_0.016882m.g) derived from phytozome v7.0 (c hr-ID scaffold_5; pos 28863229 to 28864256 reverse strand)
aaagcttcacgaacgaatcttactctgtttcccctgtaaagctcctttccttttctctttgaatatatgcaagctaaatcatatttgtttttttttttacttagaatggacattgcaacgtttttcttacttgctctgttttggtgtcgagtcaaactggtttcgttcaaacagtgcctggcaaatttatgacctgtttatgattcttcagtggctgaatatggtctgttgttttctgggatttctagtgaatagttgggttggatgcttccttttcctcttgttaaacttgagtttgattggtcattgcatttttccttacaatttgattactgtctatgaagtgctcgttctaatgttctaaatgtcaaagaaggagttttgggtggccaaaacgacaagttaatgactccggagttgccagtcataagtaatccacaatgctcttcagaacccaggatgtatgatcactggatgtgctagacagataatgatatagcataatttgttagcggtgacaagtagagtaacgatcacattcattattcatgataaaattcgatagtaattgatgttcaacgttgtatttttaggagaaatcggagtgtcaacacatgaatttggatggccggtactttagtcgttcgtgctctagtttttggatagcagactaatacaggtgtattgcctagttatttcttgagattactcctctttaaagatggtagtgtctgttgtatcctgttttattccatcgttcaaacaaattaaagaaatttcttgaaactgcttttttattacactgacaagtttaaaagcagttacttcaccaatgcagtatttgctttcgtttttgtcaggtttttttatatatttgaatcagagaccatggcctgattagcagggtggatttttgtagtggtgatgattgttttttcaaagtctcattccatttgaactgttcaaataaggctaactgatcagcttgtgtagttgggcaagtctggggcttctggtgggcaaaacag

SEQ ID NO: 92964 - DNA, 1031 bp, Eucalyptus grandis
  Intron number 1 from transcript Egrandis_v1_0.024627m (loc us Egrandis_v1_0.024627m.g) derived from phytozome v7.0 (c hr-ID scaffold_1; pos 1099675 to 1100705 reverse strand)
aagaagcccttcctcatcctcaccctcctctccaggttcctcccgttccttctccgagattgaccccgatccatcggtttcccgatcgcgacttcggtgtcgaagtttccgatcgctgaaaaatcgatctcgatcgtcgattttttgtgtcgtcggctctcgctgttcgattctccgcgcgtttgagtgaagtcgtcggttcgagcttcgattgtcgactactgcccgaggcctttgtagattatgttgtccgacttcgctactaggtcgttatagtgtttggtaaatgaagaaatgattatgatgctgtctaaagatgccgcggtcagtttttcgattgcaacttaggtcgaagtctgcggtcgattctctgggaagttggctcgagcagcgcggtgcctctccgcgttcgagctcggttttgaagtcgtcggttcgagcttgattattttgtagattaagttatccaactgctggggtcttcgcttgtagcatcgacgaacttttttcatcgggagtgagacgtaataacttgtcaatgcccggggtcgttattgtgttgtgtaaatatagagtggattatgctgctgtctaaagatggacctcattcctaagagcattttttattacattaatctgtgtaaggttgtgaatttcggtgtaaattttttgatatctctagtttaaatgcaaccatgggatattaaatatttgaggaaattgatctgctgtttgaggggcgcgaatctgttgcagaatgaattcttttggctaatgttgtgttgcttgctggtgtgctgttttcttaagcagcaacgacgttcttttttgtatgcattgattgtaccctgtcttgattagttaacgttttgttctaccagaaatgggatggcagagaatgagataatcaaactggaaattgctttggtttggaaaaaaaaaaaatttctatattttgagtgacatgcttcttttgagcatttgtagtcttatgaaagtcaggtcttttcaaacttgtgcagtacacttct

SEQ ID NO: 92965 - DNA, 344 bp, Eucalyptus grandis
  Intron number 4 from transcript Egrandis_v1_0.003216m (loc us Egrandis_v1_0.002828m.g) derived from phytozome v7.0 (c hr-ID scaffold_5; pos 73609465 to 73609808)
acagtggccaaggtaaaaatactaaacctgtaaacttcttgtcattaccacatgaaatgtattgaattatttggagaaaaggagggttgcagagtgatcagtgattatttcttagtccctctcagcagatgcatgtagatcaggatatgaaaatcctaagtttattaccacactagaaaaggattgtttatgaaccttttttgcatttatctcctctatcattttgatgttatgtaccatctccttctttgtgtgatggctatcattaaaggaaccttgagtccttcaagacctctgccatgtttgcaggtggaacatttgctctttattccttactttgccgt

SEQ ID NO: 92966 - DNA, 901 bp, Eucalyptus grandis
  Intron number 3 from transcript Egrandis_v1_0.024453m (loc us Egrandis_v1_0.024453m.g) derived from phytozome v7.0 (c hr-ID scaffold_2310; pos 1030 to 1930)
cgttcgtggacgaggtcaagaggagaagcgtggaggtggcgctcgccaagggcagcaagtcgacggtggtcgaagctccagcggtggtcagagaaggagcagggaccaatggaaaggtcgagctggtctcctcctaaagggaggacgacatgacgtggcaagaatcgacacgtggatgagttgattagaatgttcgacgagaaaatattgtgtcggacataattacattgtgggaaaaataagtggaattaatttgagtatgaatcagacctgatgctttagttttgggaataaatcatgctatcgatggaatagggcgggacggtcttatattttggttcaatgttcttgaaatcttgtacaatttgtaatctaatctaattttatatgttcctccttttccaaatcctccactcttgcttttgttatccttattttaatttgatctcacatttcccttttttttactcacctaagtaaggtattccacaaaccgataagaagattgaattgatttctacacgtgtgagctcggtgctaattcagacgagattcgatggtgacaacgtaataatacttatagagacaagtagactgagtctatcttataataacaaagatgatgcgataatgtaaagggattgttggagaaatgtccgagtttttcttcccccaatcacccaataatttcaagtcctagccttagtgaacaaaatttaccggccattgtcttgtttcctgatttaaatagttgtagcctaaacttttttattaagactagactcatgggcttaaacatggtcacggtcaattgataaaataaagccttcttaagtttcaccgccatcagctaccgccttacacgtgaaacggttgacccgcgaagcttgacggaaagtaa

SEQ ID NO: 92967 - DNA, 1015 bp, Eucalyptus grandis
  Intron number 1 from transcript Egrandis_v1_0.041905m (loc us Egrandis_v1_0.041905m.g) derived from phytozome v7.0 (c hr-ID scaffold_5; pos 67263844 to 67264858 reverse strand)
cgtcttccctgagatccgcttcgttccgagcgcgtgtaagaatccctctccctctctctctctctctctctctctctctctctctccctctctctctctctctctctctctctcacccacgacggcggtggatgtgatggtgggtggttcgtggtccaaaacggtggatagagaacctcggtagcgcggaaaagaatctggtcgcgaccgccgttaatgtcgtcatgtgcagccgagacaaagggaggagaaccattttaactcttttttcctttcttgttctttttatttttatcttttggctgcatctgacttggtgactatgtgtcaaagtagtaaataagaaatatacaatatcgcacagtttcatctccatgtgataactaaaaccaatcatagtataattattgacatatgattagctcgatcggtttagtaaaataagtttaggcaatatgttactccgaaaaatgaattgcatctttgatttatcgtcgacatgatataaaccaaatgaatcgtaatttggatttacttgcacattgtctataaggggtcctagatagaatttataaatccatcattcgttggtgtttattgcgttgtggttaaggggctgtctagccgtcttgattctttctgctgctttgactatttaatcagaaattactaggagcaccaaaattaatagtaggatatagtcacttgactctacacttactttttgtttctagtaaatccatacaatggtttaaagaaaagtacaatattaggataatggaggatatccgctgaaaacagttcacgttgaccaagattagaaaatcgaagaatttacgatgtgctaaaagcttaaaccatttaaagatcggtagacgattgaatgcttctttatgcttcttataaatcaaatcatgtagcaaatttctactgtcatcgacaatttggcgatgattaataagccaaaatattgtcatcagtaggaaatctacccatatctggggcaaacgaacag

SEQ ID NO: 92968 - DNA, 902 bp, Eucalyptus grandis
  Intron number 1 from transcript Egrandis_v1_0.022790m (loc us Egrandis_v1_0.022790m.g) derived from phytozome v7.0 (c hr-ID scaffold_5; pos 57825589 to 57826490 reverse strand)
gacaagctcgcagccctgtacactcctattgaaaagtgaggtccttgttcgctctttgctcttgaaaacagatgtctgattattgcggaatgttttatcgtttcgaagtattaaaactcggtccaatctttagttcaacaatcatgtacagatcgagagttaaatgcgtgatttctctgctattaaagatgacagcactcaaatttgatcgatgctgaattagtgtaagcatcgtttagaagatattaaatattcctaatcttgtgctagctcgttgggggtaaaaccaactcaaagtaaatcacttttatagtgaaaagtagttaaaaaaatcaaaacccatttcaatcgcagtgactagaccttcatatgacgcaatgattttttgttttgttttggttattaacaaactgtgttagttgggtattaaaaaaattggtcaaaaagaggtcacacatcttgcacggggagaaaatcatgaaaattgagatcattcccagttgtaaagtgcaccgtgaaatttacctattgaggttgctaatgcgattaatgcttggaataaactaactaattagatagatattcatcaaatgaagggaaaagtgcaatatcagtgagaaagagcaataggcttttcaagcaagatatactgagtagaaagataagctctacattggttttgtactttgttaatttgattttaggattcgctgttttgggagcttcttaaatcggttattgatccaggatgctggaccttgatttgtcctacaatttctcaatgatgaaaaaaaataattttacttattaatattctttttttgttttgttttgttttgtacatggccatgtgattcaacaatttgtggatgtgggcaagagggcaggttttattgctctca

SEQ ID NO: 92969 - DNA, 987 bp, Eucalyptus grandis
  Intron number 1 from transcript Egrandis_v1_0.023006m (loc us Egrandis_v1_0.023006m.g) derived from phytozome v7.0 (c hr-ID scaffold_5; pos 2137493 to 2138479)
catctcctccatctccgccggccaccttacctccggtaaccaatgcattcttcgaattttatgtaatggcgaggacggtacgatgtaaatcagtattcttatcatatatttcttaagtaatctttagggtaataggacgtcgttgtgtcttggcaagtaaggattatgttattatccgaagagtgtgaagtccatgaaaaagcgaaaaaagccattatttctatagttagattacgtacttccttcgccagagttcgtgccatgtagtatggatcggaccgtcgcaagttactagaggaggtaggttggattgtcacaggttagttccaataccttaaatataaagagtcagcccgtttcacgtcggccaagcgcttcgaaaaaagtctttgaaggaaactcatagagcaacaataactatttagaggggaatcttaggtgtaaatcacttcataggacccgtcccttcggatgtgataattcagattttacaaatgacacgttcttaagtttcgcccttgattgctatgatccaataggtatcatgctttgccaatgaggggaatcgtgagctaagaatgattacattgcgtcaatgttgtgaaacatttaattatcaacatttttctgcaatagattaccgattaatcaaataatgcaaatacaaatctcttaaataatcaataggtatcatgctaaccaaccttggaattctctcgttttgtgttggtccaaggcatttggaacaaagtttccattagaagtcaattgatagtattctcttgttactaatggcttttgggcataaacgtttcaatattgtgtactttccctttctagggagaatcgcatcaaaatcctagatcaatcggtccttgcgtcatatagattcttgcacgcagttacaaaactcaattcttggtatcttgtgagggcgattttttaaaatccatcaaggtgaagtggatcgattctccttttcaggag

SEQ ID NO: 92970 - DNA, 780 bp, Eucalyptus grandis
  Intron number 1 from transcript Egrandis_v1_0.040323m (loc us Egrandis_v1_0.040323m.g) derived from phytozome v7.0 (c hr-ID scaffold_2; pos 32936408 to 32937187)
gaaaaatacggtatgctcgatatgttatctcgatatagtaggaatattgtccctagtaaaatgtgcattgtacttgttattgaagagatatttcacaaacatgactgatgacaccgacacatatcatcaaccaatggaagtttttcatttcagattgcttgtaaataatattttatataaagaattgagatcctctaaatttgggaatcgactaacaatacaaatttacctcattgagaagttgacaatggcctttggatggccaggctcgttttccttttctttttcttttttttgcttttgtttttccttttttacacctttttcctttttgccttccctctcctctatcacaagtagacccaccaagagtaataaaggaactttatgtgcggatattccatgtggtagtgacaatcgatctaattgaccaatcaaaaggagatacatccaaacatggcgtgaagtaagatgagattggtaacataaaagcaattgattggtaacaccatattataataactcccgattcgtgacataacatactttccctctgaagaggcccataaatctctctctctctctctctatacattcaaaggttgccgacccacacctcctttgttgtcgcaaccaagcagtgaccctgacccctgcgactcttgagcctccattggccgagcgagctcctccgtcaccggctccatcttttattgcagatcgatgttttaacaccattgaacaaaaaacaaattgttttgcagggaagcttttcttcac

SEQ ID NO: 92971 - DNA, 649 bp, Eucalyptus grandis
  Intron number 1 from transcript Egrandis_v1_0.043951m (loc us Egrandis_v1_0.043951m.g) derived from phytozome v7.0 (c hr-ID scaffold_5; pos 62089070 to 62089718)
acttttaaggcaagaaggttatcgtgtgcctgcaggtttgttcctataagtttcaagtcgattgcaatagcgaaatacagtgctgctatttatacataacaaaagaagacaactttttttgtcgttgttttgtctagttacgtggaagccctaaaatttccaatattttgttaaggatgaaaatggacaagaatataagctgattttttaatatattttgctgatttaagaattggaaatgtttaattgcgatgaactctccaatggatatccatcagtgcatgttacattgtggacttatgccagatattaagaaatgcattagtattctggagttttgttcaaaatggaaagtaagaactaattattcatttcaccaaaaaaaaaaaagaactaattattcgtattacaaaaatcgaattgaaaaaacctagatatatgcccatttccttaatttgttctcttatttagtttctttacattaaaaaattaaaaatttacatgagatgaaatagttttaaccactttaggattttttttttcgaaaccaaagtatgcacatcataattttgaatgagtgaagcgacttataaattagatatcagactatgctttttgatgtattagagtcgttgtgctttttatgcag

SEQ ID NO: 92972 - DNA, 414 bp, Eucalyptus grandis
  Intron number 1 from transcript Egrandis_v1_0.045459m (loc us Egrandis_v1_0.045459m.g) derived from phytozome v7.0 (c hr-ID scaffold_5; pos 9340315 to 9340728 reverse strand)
ggcaagtccgaactcaaggacatcaagtacgacaggtgagtttggacttttactgactcatctatgcccatgccaggccgtgtctttctcttgatgtttctcctagattgtgaatctgttcttgattttctctgggtgtataatttctgcatgttgttacactacatgtggcatccattaaaaaaatatttactcaaatttgatgctttgtatattgaatcttctcagtcacagcagtattatgttcacatatttaaatcgcttctcttgaagaacattggagcttcctagcatatttccagactttccctcggaaaactggtctctatattctctctgtagttacattcataagtttgttattgttgtcttagcactgcagttgacgtggtgttccttttgatatagattggc

SEQ ID NO: 92973 - DNA, 904 bp, Eucalyptus grandis
  Intron number 1 from transcript Egrandis_v1_0.015136m (loc us Egrandis_v1_0.015136m.g) derived from phytozome v7.0 (c hr-ID scaffold_5; pos 2903412 to 2904315 reverse strand)
cgacagcggcctcggccccctcgacgcattcgcaggttccctcccttttttaatgttgatgggtttctccagtcgtgggtcttcggtgcccggttcgtgggtccgtttgttgttgcgcttgcgttctttgttttcgttaattgtgtcgttgagctgcgatgagaagcggaattttagctgggattatgagtataaacggccgctcgagttggagttcgctttctgtataatgtaacttccttttggcatgctcaaggtagaatctttagcaagatcaggtagctgctctcacatgggtaagtcttgatcatctgcctgttggcccacttggtgtttgtgttctctccattttcgatgtcggtcggtttctctagtcatgggtcttcggcgcctggttcgtgggtccgtttgttgttgcgcttacgttctttgttgtcgttaattgtgtcgctgagctgcgatgaggagcagaattttagctgggattatgagtataaacggccgctcgagttggagttagctttctgtgtaatgtaacttccttttggcatgctcaaggtagaatctttagaatcaggtagctgctctcacatgggtaagtcttgatcatctgcctgttggcccacttggtgtttgttttcccttcaatgtcggaaaactgaaggtgtttttctttggcacatcctactaacatgctgtgcgttggcattttgatgtgttctttctcttgaaggcgttttggtgtttcattgtgcaaagactgaactatttttacccaaactctttcttgcagaaccttccgatagcagttttgttttgcaattttatgtttgaattacatggctataattaccaggtaatgcttacgtcggcagtattgtcatattaactgttgtgactacag

SEQ ID NO: 92974 - DNA, 637 bp, Eucalyptus grandis
  Intron number 1 from transcript Egrandis_v1_0.017880m (loc us Egrandis_v1_0.017880m.g) derived from phytozome v7.0 (c hr-ID scaffold_5; pos 67622786 to 67623422)
caagaagatcacgaaaatcctgtgtgagatccctcgtgagtccttcgcctttacctcatttaattaatccacgtacttctcttatcgtgtcagtgaataatagaggtatgcatcaattctttttcttccctttcctctttccatagtatttgcgtcagttctattgtgtactatagggatgtgcaaaatggaccgtctcgaacaaggaacaactcgaattgggaaccgaactagccagtttgatttggttcctaggagtgtcggtttagtttccgattcctaaaagtggaaccggttcattggaccgactaaattactttttttattatttttatttttttcaaaaaaattagtgggttcaatttattgctttcgaggacttaagagcttataattgaacaataagatatttggattgaaccataagacttgttttgagctcttaatttgttttttgtcatgctttggataataagatgttatgatggaaccacgaaaaaaaaataatgactggttccattagattgaattgggaatctcaccccttattgtatagcgcatctttacctgctacaatttatgatgaatagtaccgagtgttctaatatttggagctaataaaactttgtgaacgcag

SEQ ID NO: 92975 - DNA, 677 bp, Eucalyptus grandis
  Intron number 1 from transcript Egrandis_v1_0.006125m (loc us Egrandis_v1_0.006125m.g) derived from phytozome v7.0 (c hr-ID scaffold_3; pos 41327079 to 41327755 reverse strand)
atcacagggtatcagtctttttctcttgcttgcttgctttatgaaatcactagttattagctcatctcatctgtgacatctttgtgtctattagtctaattactataggtcacatattagcttttctatgagatgctcattctggacaataagactttaccaggactgatcctgatataatcatcacattttcatatatactcttcataatgctaatactaatgtttttcctcaattgagtgatggctgatatttgccgcagcctctctgtctagcggctacaagattgcttcttttctattagtagatagttttgatttttttttttttttttttttggtggggaaacttcaacttgtgtagttttatctgctttccttaccttcttctttgtttgatttagcctcgcaagggtattggcagtgcactatgttagcttgagttttgcttctctttcatttttcatacacctatttcagtaatgaggagggtgctgctcatacatttttttgggttgtttgtgggagaatttatccttccaattgacctgtttgttcttttacatttggttcagttaatcagttagtaatgtgcaagatacatattatgttaatccgcatgattaagcataattggttaagagctctctaaactttttacttattgtggtgacagtt

SEQ ID NO: 92976 - DNA, 1033 bp, Eucalyptus grandis
  Intron number 1 from transcript Egrandis_v1_0.010730m (loc us Egrandis_v1_0.010730m.g) derived from phytozome v7.0 (c hr-ID scaffold_3; pos 19984225 to 19985257 reverse strand)
aggagggagtgcttaagattgctgattttgggcaggtgaggatttgaggttttggctttggatggtgcgaaattctggcttttgtcgtataggggttgcggttcaaatttggttttttttagaacgaaggacgtcattagtgagtgttttgcgggcggaaatttgtttgtttggcactgttggtgaattgggatttgatcttagctgctggggcacgggagtaggaactaggaagtggaagatgactgatcctatgttgctcgcctcatcgtatatgtcggagttctctgtcggttcagggggtctgtgttactgtggtaatgtctttgccttgctatcgccgggcattttccatttctccagttgggtttttcgaaagtttgcatgatgttttgtttgctcctcagagtgatcttgacagagacgagctcgaacgaggatttgtcgactatgagatctgtcaatcgtgagatttgcttgaattgtcaatttagtccttggcagtggcacggcatatggatgcaaggctgttgaccctgtgaccggagtgagcttaaatgttgggaagctggtgaatagggtagatatggagagatatcaccacataaatgatattttgataatgtcagtgcgattatggtagccaacttgtagaaacaggctttggtgttgtcggtcgcagtgggtggtcattgaagttaggacttgaaagaagtcggtggctattttggtgcttagaagagcactgcatgtagcgcatgtttggaaatgatttgatttctgccgattcagtttcaaatcagtgctgattgttgtcgtaagttaattttcacttgactgacttggtttgtaatgcctttaaaagctacagtgcttcgcatgaattgctcttgacatcttcatgcaaatgtcagttattctgtatctttagagatgtcagatctgaattcataagttgttcaactgaaaaaaggtcctgtgtttatagttttctttatcatttcattcactgatcaggcaaggatactcctgg

SEQ ID NO: 92977 - DNA, 712 bp, Eucalyptus grandis
  Intron number 2 from transcript Egrandis_v1_0.030795m (loc us Egrandis_v1_0.030795m.g) derived from phytozome v7.0 (c hr-ID scaffold_3; pos 6899153 to 6899864 reverse strand)
tcggggtgagtggaaacaaagccattctctatgttccattactattttttgttgcttctatgtacctatcgcaagttgcaaattgtgatgccgaattctattgttaattcactgagaagattagacgcatgtttgtgtttagcttgattttaaaaggaagacatggtttccctgggcattgagctttgttgcattaatgaaatttcttccttagaaaagagagtcagacttacttttcagaatatgtaagtccagaaaatgggtgtttgctgctgataatagtatgcggtaagagtagatatttatagcaccatagctgctcctccaaaatgtggatggatgtatccaagcgcatctgaacacatcaagctgtttattctatttcggagatagggatatgacgttttctatggcactattggactcacgtgtgattttgaacatgttttgttggtcgatattacagaagtttgaatatttgaagggatgagactaagggtttttattttgggaaaggactaaaatagcaatgcaaattatgcgatagtgctgctctgtttctcttgttgatttagggctgtaggtgcattcctttattgtcattatcgaagtttgcaatttattcctgcgtgctatcttctaactcgtgcacttcccatcgcatttctattgtacagagaagaagctgtgcctgttgctgagacccctgcac

SEQ ID NO: 92978 - DNA, 882 bp, Eucalyptus grandis
  Intron number 1 from transcript Egrandis_v1_0.022486m (loc us Egrandis_v1_0.018566m.g) derived from phytozome v7.0 (c hr-ID scaffold_5; pos 16464396 to 16465277)
ccttcgctcgcgggcggcttcgctctccgtcggaggtacgcagctctctccctgaccgtcattttccttcgcgtttcgagctgttgctccccggcgtttcgccgctcggtcgggatttcgccgcggcggcggcggcggcggcgaggagcgccggcgaaatcggagctcgtgtatccggtctgcgttgtaggatgaggagaagagtgcagagaggttggctcgcttctgattgattaacagtagtgcgaagagagagagagagaggagtgagcgggagagagggagggagggagggagggagtggtttgttagtcgctttagattatagctgctgcgcgatcttttgatctttcgatcagaggtctgccgcgtgatcttttgatcttttggataggttgtcgtcccgtgaatagagtgctgcgtgtgaaagtgggacgctggaagggactcaataggaagtgaggttattgatttgctttttggaacaattcgatgtttccgcgtgttcaaccgagctacgagttgcggtttagctatataccggcaattgattcccgtcttatgagtggctatgtttgttactgttatggtgtatcgttgtgcccttgtttgttcttatcgtgttgaaaatccttggatttagttgatgaaaccatattagaagtccatatccttgattgggttaaaaaggatctttcctgtggcagaggacagagtgggatgtagattatttttgccttctttctgaaaactttttgtagtattgcgaaggaatgatgtacaaaaattccaaatctgtggtttttggctattcaatttgtatcaatatgactctttgttgacgagcgagtgattggatctttggttttgggtatttcagat

SEQ ID NO: 92979 - DNA, 362 bp, Eucalyptus grandis
  Intron number 1 from transcript Egrandis_v1_0.013081m (loc us Egrandis_v1_0.008268m.g) derived from phytozome v7.0 (c hr-ID scaffold_3; pos 52494887 to 52495248)
cttgcagctggggaagagccaccctccaaactttggtatgcttctctctctctctctctctctctctctctctctctctctctctgtgtgttggtttttgtggggttatgtgaattatggagcttctggaggaggaggaggatcttcaataacgtacagatacttgagtttaggtctggactctgcccacctgctcgcacagaaccaccaaaagagaaaaagtaatcaagagagattaatttgagtatttgacaagcatggcgttagcatttcctttgtttattataactttccttctgcaagtcttggcttctcaaacgtgatcgtctctcatcaggatctgaaaaacacacttctgctaa

SEQ ID NO: 92980 - DNA, 893 bp, Eucalyptus grandis
  Intron number 1 from transcript Egrandis_v1_0.041161m (loc us Egrandis_v1_0.041161m.g) derived from phytozome v7.0 (c hr-ID scaffold_5; pos 59892421 to 59893313)
gggtccaatcaaggtaagatgtaaagacggcatatctctatgaataacaacgtgttatccaagggtccattgcacgaattctcctttctttctttcggaaaagattaatatccttccttagattcaggattttcctttaaatataagaggattttataggcacctaaatataccagaaacttcggccccttaatatcttaaactaacagtatcctaacaaccaatcatgcataacattaggcatactttttcaactaatctgtagtatttttgcatgtcctgagatttttaatctaaatgatttatggcttctaagataaattctccccttgtaaaagtatgtctctatggcgattcttgttatattctatgtcaatcttcttacatgagagatgaaaagttacgactacctagtcatcatttggttacgttcacacaaacgcaactgcttttgcatgaattactatttgaattatcatagtcaggataattattttagaaacaaaagttgaccccactacttcaaaataagtgcattgctttattatagttctgtgaagggcgaaccatgtgttattttggtgaggactaaccagttgatatttatttcaatcaaattggaaggtatgcctaatgcaataagaaaatatagttatcacttgtgtattactaacattctttatgcaatgggtatgttaaaaaaaacactactacagaaataattaaacaaaacaaatgtgaaatgacggagaatcatggcaatgacagcatgtgaaccgagttacgaaatatttatattttttttataaattaaaaaaacaaggatagtgaaaaatcaggcgttacagtgtttaatcttacaggtaacctctctttctttcagacggcaacaa

SEQ ID NO: 92981 - DNA, 854 bp, Eucalyptus grandis
  Intron number 1 from transcript Egrandis_v1_0.001311m (loc us Egrandis_v1_0.001311m.g) derived from phytozome v7.0 (c hr-ID scaffold_17; pos 448194 to 449047)
attatctgacggtggggctttctccgcgcattttgtgcgtaattgatgcatccttctgttgctaaccgttcggaaattcacgtgtaattgagttctctgttgtgtgaatgcgcgagagtcagtgcaatgtggacgggaaatgatgacggttcttcttaaagttgagaaacatgtaattggggagcagttgcatcttgctttttcatcaagttaaagtttttatgtttcgaagttgacttgacgaaagcttggtttcagttttcgttttggtggtagcaagagagatttggttgctatcatggagaatgagagcgagggagatttgccaattgaccaattatgttatagaaagtgctgtttttgtcctggcaagccctgttgctgtaataaattttgtggaatgtattttctgttgcatttcctgttggcagtggggattcagaagttgatttgatattcatggtggcaattcatgttccgaggaagctcaacttctgttttttttccctgcgatttgcttaagtgcttgtgtggatagattggcattggacgtggcgcatcatagctgtgatttcatgcggttttgatgtttgtttaaacaattaggaattccttgaaaggaaattttctccatatagttttcgtctttctgtttagagtactcttttgtgccattggtttaatttttctcttgagtcagttacagacatgtgctggaattctgagtagattatgaaataactctgaattgctgctgtaagcatgactgtgcgatcaacttcaactcatcacgtgttataattttcctttttgttgcaggttttggcattaccattgcctcatcggccattatt

SEQ ID NO: 92982 - DNA, 479 bp, Eucalyptus grandis
  Intron number 2 from transcript Egrandis_v1_0.051384m (loc us Egrandis_v1_0.051384m.g) derived from phytozome v7.0 (c hr-ID scaffold_5; pos 37120506 to 37120984)
aactaacaaaaccagcatcaattccggtactagaggtataaaaattgtataatgctcaaaacgtgcattcaattttcatggtaaacatataaaggtactcattataagctgttttgtgtatcataatgcacttcacttgcttttacgatctaaactttgatcattctctgagttcctgttactatttatgcctagtgagaaaaatctgcagactaaattcaaggaatcactttgtcttgataggggtgaaacaaacaaaagttccatggattgcaatagttagctcagtcattggatcgtgtttactctatccatcataggttcatgcatttttttaaacaggacaaagagattgaagaaaggtatatatgaattcatcttgcttgccattagaagaccatcttctaaacttcaccttataagagtaacctcttttactgtcagagaaggaaaacagcctagaggttcagttactttat

SEQ ID NO: 92983 - DNA, 542 bp, Eucalyptus grandis
  Intron number 1 from transcript Egrandis_v1_0.035932m (loc us Egrandis_v1_0.035932m.g) derived from phytozome v7.0 (c hr-ID scaffold_5; pos 120324 to 120865 reverse strand)
ctctcaattgtggctgccgtctattttcaatatgtgtggcctccttttatatgcatgcacgaagccccccaccaaggaaagaaaatgtgataaaatattataaaatcttcacttttgtttttctttcccctctcgggtgcgctcaaaatctgcgactttcatgttttcgaacgaagaatatatcacgccgtgtacgcttcttgctgatacattatatgaatatataaaacgtcaactaccatatcatcctttctttttattcattttcattggtcaaattttccttttatgctcttgaatgaatattgacacgatatttcttttggtcttgttccgattgtgaattttcctccaagtatttgacgaagatatccatttcttgtttgaaataaagaaatgccttcatatctatcaagcttaaaatcgttcgttcgagtccatccaccatcgtcgacccaatgtgactgcaatagaaaaatgaatgcacctaaaattatttgttatgcaattaatattttttcagggataaaattaattcttaa

SEQ ID NO: 92984 - DNA, 517 bp, Eucalyptus grandis
  Intron number 3 from transcript Egrandis_v1_0.038265m (loc us Egrandis_v1_0.038265m.g) derived from phytozome v7.0 (c hr-ID scaffold_5; pos 9060426 to 9060942 reverse strand)
tgcaccagttcactggcctcaactggtatggatggatatttatttcctgatgtttgttttcttggacctgttggcaaatctctaatgatgtaaagtggcatctcgtccagaagttttcttcaaagaaacacatatggttcaatcaaatgcaatgggcttacatatttagaaaatcatacaccagttttgatggtgggttcaaaatcctgctagataaatcgacaaaatcttgtaaattaagtgtttgactttcccttcatggaaaaatttgtaattgctttgcctttagaaggtgttgattgcttgttgaagctattgaagagggcaataattgatacttgactagttagtattctatgtataaagctaggatttgtctttttgaatggggagcatccactttctaatgtgggtgatattataaggcaggtattacaatatcttgcaggcaggttttacaatatcttgcacatgtctttcaggtgggcttccattgtggtgacaactctcttgattc

SEQ ID NO: 92985 - DNA, 677 bp, Eucalyptus grandis
  Intron number 2 from transcript Egrandis_v1_0.019150m (loc us Egrandis_v1_0.019150m.g) derived from phytozome v7.0 (c hr-ID scaffold_1; pos 13812315 to 13812991 reverse strand)
tggtctgtcgggtgtatcttcggtaactatctctatcgaatctgttgccggaagtggttgatgtctcttgttcttctcttgctccattttctgaaagccttttgcatcgaccatgttagatctctggcttgcttctgctgaaatcacgttcttctccagtgtggaattcgaatattgttcgttcggatgttgtagacaacgtttttaggatggcatttataggttgttgatgttgaggtgtaggtcttgggtttccgtaggtattgagttcttcatgttctttgatttcagatttgtcatgagaatgtagagtccataagataggctggagactgtgttgattggtagatcatcttatttttagcatagttgacgaaaagagttgcacgctgaatggaaattagagacacgacacgcttcctcacatgctctgcttcaattgactgtgcttccattcctttgctttcaatcatttttagtcaagagatgcttgttccagtgagcaacaagtcccggctttctctgttccttctgtttaatgctgtgattagttttggatacatgtccttgctttggtcaattttaatctacgttttgatttccttcagcatgtaggaagtatgtttcttgtcttttgcttgtcctaactctagatgtctgaattcatcacagctgag

SEQ ID NO: 92986 - DNA, 940 bp, Eucalyptus grandis
  Intron number 1 from transcript Egrandis_v1_0.012509m (loc us Egrandis_v1_0.012509m.g) derived from phytozome v7.0 (c hr-ID scaffold_5; pos 662430 to 663369 reverse strand)
agtccctgaccaatcggacaggtgggtggatttctacgttcttgctctgcacgttctgcgatacagggcttgccagaatgacaaaatgcattggcgaacgcaatgagaaaagtgaattcttttttgcctgtggagttctttaattgatctgtttcttgctttatttggtttgtcttgcgaagttttctaaaattcgctgtgaacgatgcggcgtcaagttagatcactctgggctagcaaaatctgatcttattctgaaatgttcggagatgaatgccagatcaaggagctcattttgtggcgtctgcttttatgttttggaattttcacattaagttgtctttctcttacttgagttcatgaattggtggaaagaaattagattacgttatgtggcactctgctttacatactaatcctactttcggactgcattgctgattattcatggtaatatatctctgtatcctctgttttgttgactccttcaataaggaaataatttatggttggaattttgctcaggatcttgtttgaaattaagatcctgaacaaatttctgaccacacataatttccttattggagttaacaaaacagaggatataaatgtgtgtgtgtgtgtgtgtgacagaaaatgagaattcatctttgatagatgaaggtcggttctctacaatctaatatgaagcttactcagtcattgaatgcaatcaacataaatcttaaaatttcctgaaaatataagcatttttaatttgctgcgccgatatgtataatgcaccgtgcatagagcaatcagacttgatttttcttttgcatgtattaatcttctcttccaattttgactctttgatcgaatttgatggtgtgctgtgttgtatcgttaattgctctttcacccaatcttttgcagaaacttgtgatatctttgttggaga

SEQ ID NO: 92987 - DNA, 593 bp, Eucalyptus grandis
  Intron number 4 from transcript Egrandis_v1_0.010523m (loc us Egrandis_v1_0.010523m.g) derived from phytozome v7.0 (c hr-ID scaffold_5; pos 5692008 to 5692600)
acacattaccaaaacatctttttcattgtaagtttgtgtctcatggctacattgattcattttccttcatatacatatatacctgtgaatctaaaatgtctaacttgttctactcgagccgtctatcagtacctctcgttttgggtatccactccatatattggtaattgtcaatgaagttgtaaatggtgttcaattgataatatgtgtgcgtgcgtgcgtgtccctctatttgggtgatttcgaccttggcatctccaaatggatgtcttacattttattaatttttaacgtggattttttctttagaaaaaaatcatttctttgaacttttgcgtttcctttctcctcatcactcctcagtgttagcccagtcaaattctttggcctgtttatatgagataactggacctaggtgaaactggttttgggtactggcaatttttagtccccggtacagtattatcctttttagcaacattctcctttctttctgcatttggtttcattgttttctttaaccttttaagagagttggtacataatggaagactgaatttggagtatgttttgactcaggggatacacagccc

SEQ ID NO: 92988 - DNA, 969 bp, Eucalyptus grandis
  Intron number 1 from transcript Egrandis_v1_0.007967m (loc us Egrandis_v1_0.007967m.g) derived from phytozome v7.0 (c hr-ID scaffold_3; pos 62428293 to 62429261 reverse strand)
aaggcagaggcgtctgaatcgcgcccccggttcaggtatcgttattataattgtcgtggttgttgatgttgttattatatgctaatttgagctgttgtcgttgttagcttatttctaatcttgtcttcactggagtccaggagaaattagttaatatatgggctcagtgtgctccattggttgtccaaagcttgatttgctgctacttgtttgtttattcatttaaaatatatttgttttcgccacattttttgttctgattcatcagtagtttcgtttgagcttaagaagatagaagaaaggagtctacttagaagatacgaatgcatattcaatgatggaggttgagactttgccgggcaatttaatgtgtttgccttgttatcctagctgaatttttaatctggttgacatgcacacgttacggagggaaattgggagtaaggttaatctctaaacaatagaaagaaacaaggaaggttatgtgaatcgaaggggaagtaggtttctgatgtccacatttccaatataattttggagaaattactccctccctggatttcccagtgaaaataaatcttccaaaatttcccttctgaaccttttgagttgtttttgtcggtcaatcagcaatttaatgtgcgatgagtgtatatcaagacaattagatggtgatactgtttgatcattacacgtgaatgatggaagcaattatgtttttcttgctttgcgggctgtgacctttaacttaggaatttttctcttatcaccactgccatcattcgtgtacacttgccatgacatcccaggtgactgcctttggttacctgccatcatatcattgcagggcaagattagtgccatgtccataaacttgttaagctgcaagttgcatatctagccgatcgatttactttttgagattaaaaatagtcgcaccacttcgtgattggtcatttaggtgaagtc

SEQ ID NO: 92989 - DNA, 661 bp, Eucalyptus grandis
  Intron number 3 from transcript Egrandis_v1_0.020684m (loc us Egrandis_v1_0.020684m.g) derived from phytozome v7.0 (c hr-ID scaffold_2; pos 63245822 to 63246482 reverse strand)
agatcatgtcggtactgttgcttttttgttcttcttatatcggaaaacgactaattctagcaaatccttttgatttaaacgcacagtggcttgggatttttgctgacaaactggtctgaagaatgacacgcgtacatgttattgagtctgctttcaaagatgtatataaccttcaaatacttgatgtcaaaatttgatcagccagtgtaaacgaagatttgtaaagactctatgtccataaaaaccccatcagctagatacaacaacctttcttggaccacctgcctctgtagacattttgagcaaatgaaccctagctaggtgatttatatttggcggcggcatccaatcataaatctctcttagagtcctataccatagacttgggagaattatgaattagttggcgcgtaacttcaaaccatccttgatcttgccaaagtatttttcagagtcataatcattgaggccttgtctttccacagtttatgtagcatgatattcgacattttctatgcaacgatgtttttctctcgttttcaagtgaaagttgcatctttttatggtttccgtaattaggttttacagtagtttcttgttatgatctcatctgttatcatgcactataaccacgtccgtttgggctccagattcttggtcg

SEQ ID NO: 92990 - DNA, 925 bp, Eucalyptus grandis
  Intron number 1 from transcript Egrandis_v1_0.045625m (loc us Egrandis_v1_0.045625m.g) derived from phytozome v7.0 (c hr-ID scaffold_50; pos 179538 to 180462 reverse strand)
ggatctcaaagatacagggtaaggttttagtatttttttcatttttcgttgatttagatatttaattgatattaataatactcatcctagcatcaaaagttaaaactacccattgctctctctttcatcaaattatcactcaattcacacatatttaattactactaactacacatccactcaatcaaataaacagtcaattcttgtcaaaactagataatttctctagaaagacttgacaaatcaattttgaattaattatttaatttgcatcttttagatagactagaaatactttctcttaacttctaaatctaatttgtgtaggatttgaaataagaaagcaattgttctggctattactattttaaaccatgcaaaactagaaaaaacagagcactcaccatatttgagcaatcaaaaaggaataaacaaatcctttgcatatttaaaggaagaaagtccacgggtttcgatttttacaatttatggacgagggagcatcttttgtaaagtttaacatttataaacttatataattgcaactcattttaagtacattcacatggattttgattgatatattttttccttgtaaaaagagttagagcttttgtaaaattaatatttctttttccagctttctttttttttttttggttggggggggggggggggggggggggggcggccaatttacttacaattgactttttcctacttatccgtagagtatatatacaaaaaaatttgggagggggccagtcgccccatctccaccccctctcccttagctggtttgcgtttaacttctaatatttctaaccttgatagtttaatattctttctgcgatggatctgactaaaccctttcgtatcaaatatgacagccacggtgaactcattagatcaatcatcgctgaag

SEQ ID NO: 92991 - DNA, 593 bp, Eucalyptus grandis
  Intron number 1 from transcript Egrandis_v1_0.052365m (loc us Egrandis_v1_0.052365m.g) derived from phytozome v7.0 (c hr-ID scaffold_5; pos 32885139 to 32885731)
tttggaacttaggtaaccaattcatatcaattagtgtcaagtggtgttagtaggactgctacttttgcaacatcttttgtaaaagaattataagagggcctcgatccacaaaggatgtataagcttgaatttttgtctagtgctgaaaaatgttttttttttttttttaagtgtcaatttaggagtattaacacctgaatttttgccaactagtcaaaaatacatttttataaaaaaaagaaagaaagaaagaaagaaaaacaaaaagaagagagaaacaaagagaaaagataaagttccagcccatcccttaggttcggccctatgtagcctagtacgaccacaagcgcagcccaggccttttagcttaattcgcatcaacccatcgctctaaccaattgaaacacttttagcccaacttgccattccctccggcggcatgcctccgctgccgtcgatggctcctccgtttcgtttttccctctccaatgatcaccactacctttgcctgacgatatcgatattgatccgactacgctggcttcacgatccttcaaggaccgagctccaactgcctccctcctcctcctctt

SEQ ID NO: 92992 - DNA, 718 bp, Eucalyptus grandis
  Intron number 2 from transcript Egrandis_v1_0.019130m (loc us Egrandis_v1_0.017626m.g) derived from phytozome v7.0 (c hr-ID scaffold_3; pos 3262107 to 3262824 reverse strand)
tgtatgtgtctccgtaaagctgctctcttaacctcactttgttttaagagtagtgggccaggagtcatcctggtaattttttctgtgttgggtccatataaaaagacattcctgtagatagcgaaatatcctaaacaccattctcttgtcctgagtatcgtgaaacacatgttttgatggcgactgttctttgtccttggggttgtgcaaggtgattgagtgatgatgttgcaagttagtcgaacccatcaggtctatccgttcttagtggtttctaattcttgccttttccccctctttccagtgggagtcgtaaatcccgattagttgtcttatattctaagctcatatattagaatcagctcttactttaccgtataattgatcggtttgtaaggaggatctcatctagtctagtctatgccgttcccccttgttaccttattcattctggtgacaagcatggaatgaacaagttccacttagatccctttgattccaatattacttgtgggatagcaactgctgtctgcacttaatcattcttcataaggtttatcttcaatttttataatgttattttttgagagtctagttgcgagcataggagttgacttttacactatagctttaggcacaagattgttgtcctttgtacttctggatgcagttattacttgttgaaatcatctggcatttcttaccgttttcaggtatt

SEQ ID NO: 92993 - DNA, 917 bp, Eucalyptus grandis; identical to SEQ ID NO: 92468
  Intron number 1 from transcript Egrandis_v1_0.000377m (loc us Egrandis_v1_0.000263m.g) derived from phytozome v7.0 (c hr-ID scaffold_1; pos 40219342 to 40220258 reverse strand)

SEQ ID NO: 92994 - DNA, 366 bp, Eucalyptus grandis
  Intron number 2 from transcript Egrandis_v1_0.028198m (loc us Egrandis_v1_0.028198m.g) derived from phytozome v7.0 (c hr-ID scaffold_36; pos 131034 to 131399 reverse strand)
cagtaagatcacctattcaacagcttagcacattttgtttttgacatggtttatgttttcttcttccgtgtcaacgcatgtatgctgtgaagtacatgattttgcttaaattgcaaggcattggaagattaaggacagattacataatacggaactatgtttttcatcagttagtcaaagatttgatcatgaggttgtatcaccatttcgcataattgatagaacttcttgcaaaatcaagtggatttctgataatttgatgagtcacaatttcttgtgttagcatctaaaaatagaactccatcttatatgagacaggctgatgaagatggaagtggaacgttgaattgtcaggagtttgtgact

SEQ ID NO: 92995 - DNA, 902 bp, Eucalyptus grandis
  Intron number 2 from transcript Egrandis_v1_0.022453m (loc us Egrandis_v1_0.022453m.g) derived from phytozome v7.0 (c hr-ID scaffold_3; pos 39387360 to 39388261)
ggcggtcatcgctctccgagctgttcggggccgaggtgatggtttgtgccagtcgttgcttcctttctgatgctgatctgagttaaaatctagctgcccgaccggctttttatgttgttgtatttgaggggtgggggtcagatgttggagctattcttatcttcttcatggggggattagttcagcgtttccgtggaatttgttttgagtagagtcgaacttggtgtttatatgtttggttcttccatgtgctgttgaattagcagtgaacatttcgcgcggggatgtattagcatgtgtccggtctgtgtttttccaatgtctgatctggaagagttactgagctctggtgtggcacaaaaggcatattcagtctccctctgttagaaattggaagtagttcttgctaatatcgcagcagatggaaatggaatcgccatacttcaatcttctcctgccatgatgttctggggatagtcctcatgacatgagtttggcttagtttgatatgatcatataagacaaagaagttttctcatatgcaaagtacaaaatctattggttaatgtatgtgttcgtcttaggtaaaatataaacttctggagtatgtattaccgagactaaataagttgcatcagtttaatagatggaatctgcaaaatggtacgcattagggtgtctctttaaagggtcgttggaagaaatgcgatcgttgctcaaactgtatagaataagctgaactgagaatctgtaaattctgataacagtagcaaggattctgtgcgtggatatttgttaatgcaagtttttggtggtgttagtgattaattgtaataggtatgtgtaatgtctagattattgtacttaatatagggaattttttcatcagagatctcttgttc

SEQ ID NO: 92996 - DNA, 923 bp, Eucalyptus grandis
  Intron number 2 from transcript Egrandis_v1_0.046695m (loc us Egrandis_v1_0.046695m.g) derived from phytozome v7.0 (c hr-ID scaffold_5; pos 43699843 to 43700765 reverse strand)
tcgtctatccatttcaagagatcatatcaccgtacatgcacccattttcatcttcatttcccagcttgttttatttcacgaaaaataaataatttaaaaaataatttcttgaacattattatttatattacttaaaataattaatcaataaaaaaatattatcattaccaataataatttatgtctaaatatttttgtgaataataaaaatattttttgttcatgcatttttataagtgattcacgcgataatttttagaaaaatattttttaaatcattttttttttggcaaaacaaacaagagactaaatcaacaatttattttctttaatcttttatatatacatggacatatcggtataaccagcatcctatggagcagtgtgccatttatcaataagtctatggttcggattctccaacttattgaaaaatggttcacaaagttggttcattcatcgatgttgaaggtctttcatcaggcgtcgaaataaaaccttttgtttttatcactcagcatgcaagttttacaaatcaaattttgatactatttggcattgttgagacagaacaatacatgtttggactttgttcacatgtctgacattatagtatgagattacacgttatcaagtatttctcatagcttactattttctttgtaataattcaaagatgtcctaatcaacgtcacatcaataacttcacacgaaacagaacaatgaagcaagattattgctacatgatcaggggaaaaaaataatctgacgcttcttacgagcttcactgatttatttatgcgatcattgagattatgcatttttgctcattgcgtccattgagaatagtgagataacatagtgtgatgcttaagtgatagtaatataaatgaaggaggagatcatcattttgtctattgtgg

SEQ ID NO: 92997 - DNA, 910 bp, Eucalyptus grandis
  Intron number 1 from transcript Egrandis_v1_0.010000m (loc us Egrandis_v1_0.010000m.g) derived from phytozome v7.0 (c hr-ID scaffold_3; pos 64949585 to 64950494 reverse strand)
atttctgcagcttcgtcaggcagctcaacacttacgtgggtattcccttcgaacgggattgtgtttttttgtctatgtttttccttgaaactttccccataggtaagagcaaactattcgtataaatgcgtataatgtctgtgtatgtttattttggtttgactctgtttcagctgtgtcttttttttttactctgttttggctctctttctttttttgtcgttcagagtgtgatcctcttgggggcatccagctactcttcattgtcccgacggatagtccccggggcaaagaagctaggatctaagggaccacactcgccacgttttgctcgcgtgttgagattcaatttaacccacttgctcggttattagttgtgctttacctagattaggggacaaggaacgaagaaatctggaatggctggcgggatacatggattctacgcgaaatatcaagaatcatgtggcacatgttcactaaaatttgcatccagcggccaggggacaatggcccgtcatcatattcaagtgatggtaggttgcagaagctaccatgtcaaccaagacgtcagaatacacattaaagatttttcttctcactggattagaaatgcacttccgttttgatgcttgcactttctagctgaagatgagattccttgagccatcgctttgtttctatccgatgttttggtaaagccttctgacacttctcttctttatgggcaagaccaaaaccataattctgcacttttgtcttcgtatttatgaagttgacggattgatattgagtcattaaattgtccataccctctttgggacttctgtttcaatttaagatcctcaacccagattcctcctattcttcatgcatcatgatccaagatatgtcgcagggttttaggaag

SEQ ID NO: 92998 - DNA, 997 bp, Eucalyptus grandis
  Intron number 1 from transcript Egrandis_v1_0.050547m (loc us Egrandis_v1_0.050547m.g) derived from phytozome v7.0 (c hr-ID scaffold_3; pos 73522843 to 73523839 reverse strand)
ttatcgaagcagttgttttatactcgccttgctaggtaagccttttggcaagttggtgtcttatatgtgcagcatactttgtgtctgttcttgcacattggttgactacattggttgactacattggttgactaataattgttctgttggggttttaactggcgtttcctatacctagttgataatcttcatctataaaacggagaaaggcattctgccgtggaagttgggaccattcttgtcaatagtaactgcacggaaagagaattgtcggacttgtaacgtagaccgagggcacaagagttttggttcggcttttcccccttagcacgtttgtcctttgcaccccccaaggtaccaatcactaattaggtagttggagatattcactggctaaaacgcttatcatgacacttgtgtttattcaagtttctttagtcaaaactatactttttttgtctgaacttagcatgaacatttcaaatgcatgaccgttgagtcttttaataatatcaaatggcacttcagtctttgcatgaattgagtatgtatgaaagcactagggcaatatacgtgactactgggtcttttgataatatcaaaagaaacttccgtctttgtgtaaaacgagtcaatatgcgtgactgctaggtcttttgataatatcaaaagaaacttccgtctttgtgtagagtctatataaaagtattagggtaataaaacaaagcaaatggagcacttctaattgagagcatcaactggcaatgcattttttttaaagggggaacatgaaatttcatgtgttatgcaacctttacgacattcccaaggttgcttttcatcctcgaacagaaccaacttgtttttgttcttatagattgcagttttcaatgtctcaagacagcttgattggatagttatgctgctttgaccggtcataacgctgttcatttgcttcgcagcattcctcatcgttacgaggcattctggagggaac

SEQ ID NO: 92999 - DNA, 960 bp, Eucalyptus grandis
  Intron number 1 from transcript Egrandis_v1_0.026142m (loc us Egrandis_v1_0.019520m.g) derived from phytozome v7.0 (c hr-ID scaffold_5; pos 12855804 to 12856763)
gcgtcttgccaaatcgtggacacctccagaaaagagtacgcaatcctcttcttgagcgaagacctttctgtaactatcggttttctagtggaattaggttgagacatgttatgcgttttgctttggagggtgacatgagtcattaacattatagaacttaaactatgacaccacggattaataatgaataaataaataatcggcaaaccctctctctctctctctctctctctctctctctctctctctctcttatttctagcgtaacgaaattcgatcgctctgacagcaagaaattttttttttttccgacctcgttaactaaagaatttgagatgttctgatgttgaggcagagggatgctggcttttcgttttaccatcacccctcggatggccctgaaagaagttcaagccttagtctatggaatttgttcatgaactttgttttgagaagctttcttggaattaagcgtagcctgagtttatgcacttattcaggtgacatacatacatacatacatacatacatatatatatatatatatatatatattatgaactcacaatgtttgagtggttcctcttaattgagtattttaggcacttaaaaggcatgaaaggtttttctcattatcaaggaaaacgaatagttttattcttacattattgattctatataaaacgagcattagtataattgaaactgcgatgtggctttgcttatttgcgtagcaaacatcctggatgcactcatcaacaagctcctgttattaactatccttgactctgttgcttgtcttatgttgatttttcaagctacccttttctatttggctctccgaaagttgcaatttgaattttgttgctgccttgtggccatcgattttgtcttagctaaattgcttccttcatgttctgttcagcgtgcaagtgctgattttgtcacctacgagggatt

SEQ ID NO: 93000 - DNA, 805 bp, Eucalyptus grandis
  Intron number 3 from transcript Egrandis_v1_0.008536m (loc us Egrandis_v1_0.008536m.g) derived from phytozome v7.0 (c hr-ID scaffold_3; pos 43512991 to 43513795)
cagaagagaagggcaaagcaggaagggaagacaaggtaacgtctctttttttttttttcctttgttatttttctaatctttagcagaatgttgtttctgggtttctgacttcatatcttgcagaataacgaaatctgaataggttttgagtttgttcaaacatcataatattcgaggaatgaaagaaaaaagaaggtttgatcggtttaaaaagggtgggagaagataaagtgtgagggtttgcttaatgccaataatgggaaaaaatgttggctaaaaaattgaaaagaacatgaaagtttcaatgcttgcaggtgctaaatctctgattcgaaagacccctggatcttgtgggtttcttctgatagattttgtatcggcttgtttttgcccaaagttggcatttattatgagcttgaaagatcctgatgcgtctattctctgtggcatgtaccaaatacccgcaaccggattcttctttcatcatttcgtttggccagtttatttatttgggtgagttctctctctctctctctcgtggtcttttcccttattatttcaactttgctttcccatcaatgtcctcactgtaatacacacggccttctgtttcacgggcgaagctcacaaaatctttgaaactcgagtttgaccgtgtactgggctttactattgtggagaacgaatgattctcttcatctgcatgagcagtttgaaaagactccgctttgataagcatgcgttgttttatttttgtttttgctcatgtgtgttcatattgctttttgtcttatcataggtggat

SEQ ID NO: 93001 - DNA, 497 bp, Eucalyptus grandis
  Intron number 2 from transcript Egrandis_v1_0.021520m (loc us Egrandis_v1_0.021520m.g) derived from phytozome v7.0 (c hr-ID scaffold_3; pos 11779735 to 11780231 reverse strand)
ggttccagtcttggaaggttggtaatgtttgagttttactgcaattccagcctgaccaagatgaccacttgttctgaaaattacaactttctagcttccttcgatgtttcgccatttgattgtgattgctacgtggagtggtgccttgtcaatgtagatgttctcctaaattaccattgattttcaaaaactttggagtccctgagtaggatggaatggtttatgtgagcggcaacatcaccagctggagaattctgttgttgatttcgttatgctttgcccgacaatgcccttcctcttctttttagatatccatacctgcattctgcaaggcaggagtttctaagaatgtcttggttttcaaaatattagtccttccttgaaattgtgatcacactctctggctgcttgtgggttgcaaagaacttactctcttaaaacatatgcaacattgatcatgttgtgtgatgctgattattttgcaggagcgcattcct

SEQ ID NO: 93002 - DNA, 1033 bp, Eucalyptus grandis
  Intron number 1 from transcript Egrandis_v1_0.021184m (loc us Egrandis_v1_0.021184m.g) derived from phytozome v7.0 (c hr-ID scaffold_5; pos 55098034 to 55099066)
attgcgcgatttgaagctcaaggtcgcccgcctcggtaagctttcccctcccgtcatctgaaaactcgtcgagtttcaggcgagcccatgttcgaggaaacgaatgattcgccggaaaatagttcgtgaggacgtccgtaccgtgaatgagcctgtgaattcatgtgggtcggggccactgattacgtctggaagttagtggagggaagctgagcgttcgagaatggtactaagtctctgttttgggactcgagtcgatttggtgtgcttcagtttactatctttgtagggcctgaaattataggagtgatgagggaagagcatggttgactggcgatattgtaaatctgctgagcatgatgtggaattcagattggttactttacctggtattggtagaagggtagttagtgattggcgagaggcttctcgtacagcttgggggatcgcggaagggggtggcaatgtcttgtttataatctcactgggttttataatcatgactggtttgtgtctttgcaattggtattcaacgaaaactcgcttatctataggtctatggcgtttctcattcaaatagtgattcttggtggcttatatcattggcgaaattttgtgtgaaatagcctttgaattgctatatttgtttggcccgaagttgcgtgtgtgctcattttatacaccatcagatgtctttactgttcttttggggacttcgtggtgtcgaaccagttttggtttccatcatagtttttcttttaggcttcttcaagatttttgaactttttttctggtggaaggaaccactgatgtgaatgccattgacagtcatgattgaaatctaatgtattactctgttgatgtcctggctgtttgcctgcatagcagttgaggaaaaaatcttaaactcatggttatttttcctagaaatttatctgccactacatctgtttgttggagaatgaccttagatgagagtcactgatggaacattgtagaatccatccttgaagagaggacccaacacctggat

SEQ ID NO: 93003 - DNA, 754 bp, Eucalyptus grandis
  Intron number 2 from transcript Egrandis_v1_0.013748m (loc us Egrandis_v1_0.013748m.g) derived from phytozome v7.0 (c hr-ID scaffold_3; pos 7494990 to 7495743)
gagggatttcaatccaaccacataacattggaaaggtacttctgctgctttggttcaccaattgtcagtatcggtttatccttttcttctaggtattatgttgaattaccgataattgccttgactagcctaatgttaattgaaaagcacctttctgaggtgcaggaatgtggatacgtgattggaacgaatgcaggaattcgtgtttacgtgcttcttgctgaccatgaattctattatgatcagtttcctgtcagccagtcggattcaatgtttgattattgaattattgccgattgtatttttgacctgtcagcatgatgacctgtttagtgcctcttatgcgtttctcttatatattctcaacatctggaaactttatttcctcactaacctgagaaaagaaatgaaactgaattcaaatttgaaagattatcagatttgtcaaagtactgattggctgtataggaactttatctgctgttgtttgattcaacttttctaagttgatgaaaattatatatgctatacacatgtcgaagcatatatgatacttgtgtgaaccatgagttctgcaagaaaggcaaccataccaagttcttataaccactgtgcatggtaatgatcttgataagtacgttctagcttggtttccaatctatgtaattcatgtatgttgagttgtgtcgcacatatgctcttaaaagaatttatgatggttgatcttttgttcagattttaacctgctgctata

SEQ ID NO: 93004 - DNA, 612 bp, Eucalyptus grandis
  Intron number 1 from transcript Egrandis_v1_0.050571m (loc us Egrandis_v1_0.050571m.g) derived from phytozome v7.0 (c hr-ID scaffold_5; pos 5447229 to 5447840)
tacgagtactcgaagcatcctcgcaacgttagtgtttctttccctctttcccttttctgttaggttgctaattatcctaaatacaccgtttggtaggtatatcttccttaatgttcttgtcgacatgaatactttagacacattattcattctgtgtcaaccttcgataatctggtatgttgaaaaacgaaaggtgcttgcttacttaatttcgacacttttaatggatcttaactagttctatcgaatttcgacgcaatagttttgatttgatggataacaagaatgtgtttaggactaatccatccacaatccacaatggactgcaaaaaagattagggtataaaagaaattctttgatcaataagttatttgagaaaggttaccaatatccacgattgatttggaaagcacaatattatcgtaccgccattttgactcacattatagattaaatatacatttataaggcataattattccatcatttaaatatatatatatatatatatatatatatttgttgtttaatttctttttttccctttttctataacaggaaaagataatttaattttttttaaatataatgcaggaaacggaccgtgtctt

SEQ ID NO: 93005 - DNA, 834 bp, Eucalyptus grandis
  Intron number 2 from transcript Egrandis_v1_0.006054m (loc us Egrandis_v1_0.006054m.g) derived from phytozome v7.0 (c hr-ID scaffold_3; pos 48498082 to 48498915)
tttcagaggtacattccatgacatgatgtttacctgatgtttccttgctatgttccaacctatgaatttttttttgtgagcttctttattcattctttcaaggatgtcgtcatcgaaagagattgctgagtcaaaaggtcaaaaccatgaaactgttgtattctcgtttggcattttcaaccacttttccatgggatatctgtttgcttactgcgctttcttttcctgaaattatctgtctggatacatgatactattacactttgcaaaactctctgaggacagttgatttgaacacatgtcgtcatgattactgtttgttgcttgtattggctggttaatacaatcaaaagttttaacatttggatgctccgtagaccttgcattccagtacggaacatgttgaaattgactataagccacttcccaagtagatcagttctaattaatcaagccattcatcagtctggttgtttttttaagctcctagttcctccctacaattaatcaatctgtctaccgaaatattcatttttcctttttgccctacctttattatttttaggatttacatttcataagtgttattttgcctactttatgccttctaggttttatagtccttcccagaataccacagaattcttgttttgaaactttgttttggtggcataatgccgatcatcgaggtggagtgagactttcttctgaatctgttttgagacttatttctatcatgcttctttctattttgacaagttagacgttaccatcattgatcatgggtattctactccagtattgcaggaaaggctaatctggaaaaggctgatc

SEQ ID NO: 93006 - DNA, 742 bp, Eucalyptus grandis
  Intron number 1 from transcript Egrandis_v1_0.032059m (loc us Egrandis_v1_0.032059m.g) derived from phytozome v7.0 (c hr-ID scaffold_3; pos 2441586 to 2442327 reverse strand)
gattcataagggtggtctcatctgttgtgcagcaggtagtctgttacaatctttgttatgatttctctacatttcttgatacctcctgtttgctactattttctaaaatcctgcccatctctcatcgtgcatgtctttagtcacactaaattcctaaattttgaacatggagttgaactacttgtggatataagacacaggatcttgtgtgaatgacatattattctaagtcgaatagcattatatatttgaaatacgagctgttttgttgggattttgaagaagatactgttagccaggcatttgcacatgacttgaacctgtttaacaaagttccattttgcaccttttaagatcatgatgaaatactgacaatatcacattgttatttgttgaaatcatcatgtatttgaagggccagagagaaattgcatggctttttttttttttaatttttctttttatctttgcttcctgcaccttgacaacttagggtttgttgataccttttcaatttcgcacatactacactgaagacatgcattctttcttgtttcaaaatgaaaatattgccagtgtgaccactgaaatctagagaagctcagaatattggtaggatcctaaattcttgagccagcggtgtaagcattttatattggttgattatgtgcatgttgctgaagcttttggttttggttttgtctctctttcagtttgcaaatttcttcagctggcttctgaa

SEQ ID NO: 93007 - DNA, 692 bp, Eucalyptus grandis
  Intron number 2 from transcript Egrandis_v1_0.012244m (loc us Egrandis_v1_0.012244m.g) derived from phytozome v7.0 (c hr-ID scaffold_5; pos 44698592 to 44699283)
ggaagtatgtatgtgtttctggagcagtgccgtgcatttgggtatttttcctttcttgttcttttggtgggtattgctggttttgggtttcacttggcttgaatgagtttttatttgcacctacctgtgtcgtgcgcctgagtcagatctgtttttccttgagcaggttcagcttttatcctcacatctgtggcagaacctagttgcatgttagtgggattttgaattggatacccttgattctttcacaatcttatatgatgattttgatagtttgtttccttcataatgtttcctgggtgatggctttaacatgtggtcgcgtgacctaatctattgtttttagctttagtgaaccctgagatgtgggaccattttgatttgttctgttttgttttacatatttattatgtccttaaatcagttgagttgattggttgagttaagttaaatggaggataacataaaatcttttagtgttattttgccatgtgtcgtcttcaaattctaaagaagatttaatgcttgttaagtcaaaatggtttcttctcattgatgtgctcgtatctgataaaaataaccttgttttgttacagtgacatacatatggggcactctctgctcgttcgtgtcagttaatttcttttattgttgcagcaggtgattaccaagaagagcctactcaacaaact

SEQ ID NO: 93008 - DNA, 659 bp, Eucalyptus grandis
  Intron number 2 from transcript Egrandis_v1_0.019325m (loc us Egrandis_v1_0.019325m.g) derived from phytozome v7.0 (c hr-ID scaffold_3; pos 47973394 to 47974052 reverse strand)
cgagaaaggtacgtgtttgaaagagaagttggtcttgaattggtccatatcatatgtcaagtacaatatggtaatatggcattcgagagccttttataatgtatatgtatgtgtatgtgtggcatctggtttgtgttggaatctccttgacatactcctcatttgagatcattttgcgctttttaactcggttctaaatgcatttcataagttgctgtctggaaagacgtattcttttaaggatcacaagaagattgtttgcttattggaaaagacattacagttatagaatggtagtgaatataccatgatgggaagaaaatgaatagtgcactaacagatcaggaaatggttcttaaagatgggtgagtcagctgtttaatcattctgcagaatcagaagataccaacttgtgtttgtgagacttgtgctcagtcctgttctgttactctagctttaggtatggtttgaatgatagtagcatggcactactgaattgaagaataagctttccaagttgcatcatcttctgtttagagtaagagttaccaattaatgactgcaatgagctgtacactatgcaatgctgtaaagcggaactttataattgcttaataattaattaaacttttctcctttttttgtttttttggtcccag

SEQ ID NO: 93009 - DNA, 1007 bp, Eucalyptus grandis
  Intron number 1 from transcript Egrandis_v1_0.000749m (loc us Egrandis_v1_0.000749m.g) derived from phytozome v7.0 (c hr-ID scaffold_3; pos 3288033 to 3289039 reverse strand)
tttctctcttcttcatcttcactcccgcacaaaggtaacctcctcctcttctccctcctcgaatctccggcgttcgatgatcgtatttatttatttttatttttatttttttaaatttctggtcgaattcctgaaatgggcgtagcattgtcgaacgagctcttgcatgccttccgatctccccccgtctttcgcgcacccttctctcccgtcgcattccctcgcctggtccagaaacgaacgggattaggtcgtcggatcatttttcttttccttttcatttcacgggaatcggacgagttcacgatattcgaggcgatgatcatcgagaaatgaaattaaaaaataaaataaagggttgtcgaatgccttctttttttttggtttcttcgatggcgtttgttttaaaccccgttttttctccgttcgagagttgattcgctttgcttagatagcttcaagcttgttcttttatttgccttgatgaccgaaagggaagacgaccgactgacttcctctatggccttgtgaatgcccggtaagaggatggcaatgagtcgttcatgatcctccaagtcgagtgatgtatgtttcgagccgagcgtccgtcgtgtccttcgctctcctggcttgtacggtttctccctgaagaatttaatcgaccttttagttttattgtgctagaacatcacttgagctgaactgatgagccactttgctcgtatcctgtaacaattattgcgactgaagattgggcaagtaaatgggtctcggtatggtttggcatttcggaagaatatcgaatcctagtatgatggctctgaatcttgatttgtcgtagattgtgcggttttgtccttttatggctacttttgaatcgtatcgactcgttccttttagatacatccagttatgcttgccctcgtacatatgttgtatttcgtcccttgtgctcctgattattcactcgctacgatgtttcgtgttctatgcagtttgtgttctct

SEQ ID NO: 93010 - DNA, 825 bp, Eucalyptus grandis
  Intron number 1 from transcript Egrandis_v1_0.011976m (loc us Egrandis_v1_0.011976m.g) derived from phytozome v7.0 (c hr-ID scaffold_5; pos 9665551 to 9666375)
cgcaaaacagtcagaaacggagggacaattactaggtacttcattgctcagtttcacctttcggtagctttagcaatttatgaatcaatagttatagtggaattcaaatgatcgaaatatcaagcattaggcaccataaattcaatatttggggaatcagatgtctcttttgtttcttactagctaaccaatatacaattaaaccaaaatccaaaactttgctcctcctttctaatgaggttaaatattgaagaggcttttataaggataaataataagcgattttgataggatttatgaaataatgtgaagcttggctatgttacttcttccgtaagcttcatctcaagtccacctcttttgcaattgtgaatagttggcttaaaaataagagtagagattgataaggaaaatcatgaatcgttatgtggcaacatggagatttcactcgaatttgtgtaggagattagtagcacattcaagtgacgagatcacactcgagtaatccttgcgctactttcatatttcttcatcaagtatttttattgttgttttgcatttgcttgagtcacttaattcaagccacagtttagacttcttgattttccaaggcatagatggaggcatatacaagagctttgttgtggtccctattttccccttacaaaaacataaatgaaccacaaattataaagaactatagcgtcttacttatacgtctaaaagcatatattcgtccttgaagtaatctttttattacagttgaatcttcctattgctgagttgcaatttgttgcctgatattgtgtagtaatcaccgaagac

SEQ ID NO: 93011 - DNA, 698 bp, Eucalyptus grandis
  Intron number 1 from transcript Egrandis_v1_0.011476m (loc us Egrandis_v1_0.011476m.g) derived from phytozome v7.0 (c hr-ID scaffold_3; pos 79686358 to 79687055)
acgcgtttcggattcaattcggcgacgaatataaggtaagattattaagattgctggtggagcggttgggatatcatactttttcctttccatgtttgaacccgtgattctttgttgatgaacatctatttttgcatggtgatggttctgaaagtttctgccctttaaactcctcctgcttttgcatgatcctgagacattcctaagttcttttgataaaaacacattccgggttcaattccatgttggaattattctagttattgcctttgatcatcatcatttctcagcactacggcttcctcttcaccaaattttgatcgttctttgatcttttacccctgcacttaattaaaacacgcatccatctctttacttttttagaacgtaactcctgtaaataaataaaatagttccctttttcttttccttagctgtctatcttacctactggttctgttttgggtctattaacctctgttcaccttttttttttctgtcctgtcgatcgcataatattgtccttttttgaggagagccctgttttggtgtgatcaaggtctcttggctttttcctagagctgaagcttcctctgaacaaagcattgatgcgaagcttgtccagacgtgaaagtaaatgtgttcacatggggctttttgcagatatttgtgaaggacgtgtggaaagagtacacggg

SEQ ID NO: 93012 - DNA, 856 bp, Eucalyptus grandis
  Intron number 1 from transcript Egrandis_v1_0.027120m (loc us Egrandis_v1_0.027120m.g) derived from phytozome v7.0 (c hr-ID scaffold_1; pos 39980518 to 39981373)
cgcaagctcttcttctgctgccgaatatcaacgaggtagcgccacctctctcgccggagccccgttgctcctctggctttggttttcgtgtgttcgagacggttctcgtgatgcgttcttttccaccttcaatttcagttttccgatactcttctttccccccctcgactatgagttctctgattttcctctggcttgaggctttagacgtggctatttctcatcttttgtcagagttccttgccttttcccgttcagattttccatgcgtaaaatggaaatccaacaaaccaagaagcaaaacgatgccgagaagagtgctcgtgttttcccccctttccgtctgctcattcacattggtttttgcttgtgcaccccattttaccgatctgaaatcgaatgctgcttcgtgatgaggctaatagatggaaacgtcagtatttatatccaccgattccctcgtcttttagtcagagatcaaaggaggttcctgtatagcgttatccccattagatcccgcaaacacctaccgaccatcaggcattaatacttagaaataatagccaagtgccttaccacaacattgctagattttcaatgttctttgttaactaaccaccgtcgaatttagattatttgtcctaaatcttacagatgcagtatgctcttaaaatttatggacgtcattgggattctctctactttaagcagcttgttacgtgatcaattgcatcgatgttattacaagtatatattatatcctatgagatttgcatgaagctagatatttcgtgtccaaggtgcttgcttggctctgatgtttgttgatgtgtcttctttgtagacatttagaagc

SEQ ID NO: 93013 - DNA, 690 bp, Eucalyptus grandis
  Intron number 2 from transcript Egrandis_v1_0.027120m (loc us Egrandis_v1_0.027120m.g) derived from phytozome v7.0 (c hr-ID scaffold_1; pos 39981416 to 39982105)
gttatagaaacaattgcatcctctgggacattctggtatccaagtaccctcgcgcaattttcctttgaatgatcctgtttctcattgcacacatgatcctactttttcgcataactgaccacagtaaccattctaacctctctgctgtcaatgctactttatttaattgttaatcgagtcactatggttgtatgatgcatgtttatcttggcatatttgcttgtggatgaaattcctgtcttagtgtttggattacgatagaaaaggttgtctcattcactatatcaatgtagttattctggttttgcatatttcgcatcacctccattcatgatccagaatagacgcttcttgtttcttgttttgctccctctttgatgtccttctaattttgtcatcactgggggttggtttttgtccttaaccaaaaggataggagataacagataaagcttcttaatttcttcaacaatggtagcattctctgcttaaaaaaaaaaaaaataagaataattcatttaagaagtcaatcatgagactcactatgattggtgaaccttatagttaagtttgcgtgtcctttcatcctttgacatgtcaaaatttaattaaacttgtaaatgtttagcttttgaagaatgaatgttgccttgactttgttggaacttttcattaatctctcaggattga

SEQ ID NO: 93014 - DNA, 828 bp, Eucalyptus grandis
  Intron number 4 from transcript Egrandis_v1_0.027120m (loc us Egrandis_v1_0.027120m.g) derived from phytozome v7.0 (c hr-ID scaffold_1; pos 39982352 to 39983179)
aaggtaaattattaacattgataacttacttggcaaatactgaaatgcgccttcagctcttcatctgctgttgttgtgaattctcagctactcttgcaattgcattagttgatggttcttttgatataggcagaatatacttaggactttctttctcaaagctcgaaggtagtccagtggttatcccgagttattgcacttgcccctgaggttgtactgaaatttcttttttagctcggaattgcctttgttttcttataatttgacaatatattttcttcctgctggtcttccgaactgattgtgtaggtagaatactctgtaatggtaggatgaagtgctgttctttaaagggaaatattattatttgttattattttattgggttaggtggttaatttagcttgttggcctgtaagaaatttagttttgagagttgtaggacatcctttaatagactgatacgactctgtatatcttgaaaatcttaaatggtaaaaaattttcggtttagtgcttctctatcatctttagatatcatttctctaatcagagattgtcgtgatgtcatctttgagtatgtcatgcatctgagatcaaacagtttattctgtaacaatgtgtctcttaggtcaagaaactagagctcattgggtgcttatcataacacttttgctaggtaacaagccttcgttgttcttttgctctgcctttagtgcttgaagcaagtctgtgacttcgattggatttttgtagggttacaatttagggtgtacttactcatctgatgctattatgtgttttactttccagctcttctcagcttcg

SEQ ID NO: 93015 - DNA, 750 bp, Eucalyptus grandis
  Intron number 2 from transcript Egrandis_v1_0.035329m (loc us Egrandis_v1_0.035329m.g) derived from phytozome v7.0 (c hr-ID scaffold_5; pos 73813676 to 73814425 reverse strand)
aaaggccaaggccgccaacgagcgccgctacttcggtatctcctctcctccctcctgcctttcccgcccgtttgcgttcctaattcgatgccctcgttcccatttccggtttttttggctaaagtttccaacttgttcatccctgaatctgatcgccgcattaatgttgggttcgtgactgtaatttggtggggttccatttgaatttctatctctagattaaagctcattccttttccattcttgttctgattggacctgcgcttgtggcaaccttagtgatttgatcctcttgttctcgattggcattccatttcaagcactcattgactggctttgtattgctaagctgaggaaccagtcccgagttctgtgtactcgagacaaaagcaaatgatttggtttctttatcacaaatgttcatggcatttgtgctgagcaatttcctcggtgctccagagtacgtgagatatgtctttatcctgggtactgtgtctatgagtacatgggaagtggaatgctttcaactaagtacccgtttcgaagggctgttttcatggaagatcgattaccggcatcattttcaagttgttacttagtcctaaataaaatgtgctttgatggaaaaatgaattgagaagctatcttgagtgaggagttcgtggaagtagagtacattgactaaatttatcaaagattgtaggtgatacatggcatactgactccatcttcatttatttgcagatcaag

SEQ ID NO: 93016 - DNA, 565 bp, Eucalyptus grandis
  Intron number 1 from transcript Egrandis_v1_0.026571m (loc us Egrandis_v1_0.026571m.g) derived from phytozome v7.0 (c hr-ID scaffold_5; pos 12614042 to 12614606)
agcaaaggtaagtatcaggtacgtccctaaccaaccatcattgcttttgtcattttctatttttcaaagttgggtcgactaaaaattgcaggtatcaattttgtctttgagtggaacctcttcgaactcccacccaaagagcggcagctgttgacacctgaaattttttgttaacattttaatcatccattttgcaaaaatatagaaaaataaagagccaaaaaaaaaaagaaaaaaaaaagagagaagaaaacaaaaagaaaaaaaaacgacaaaacaaaacaagaagaaaaaaaatgaagtgaaatgaaaagaaaaaaaaagagagaaagaaataaggaaaacgaaaaaagaaaaataaaggagagaaaaagaaaaataaaagaaaaaaaatagaaaagaaaaaaaagaggccattcacgggggttttttcttttttttcgggctctctttctctcctctcgggggactctcggtgaactctctctctctctctctctctttgggggggctctctgataatcacgaaggaactctctccgggggagctctctctcgatcaagt

SEQ ID NO: 93017 - DNA, 358 bp, Eucalyptus grandis
  Intron number 3 from transcript Egrandis_v1_0.024424m (loc us Egrandis_v1_0.019127m.g) derived from phytozome v7.0 (c hr-ID scaffold_5; pos 73102283 to 73102640)
gttcatcgtaagtagaatatgcctaatttgtcatttgtggatatagtagatgttattggcgagaatacagaacacaggcattcggtcatctgtgagacttccttttgttttctctctcttagaatattcaattttctctgacctataaaaaaaattcattctttgacatgtttgaattcatgattatgcagttttcctttctaatcgacccttagtgtgtcttcctcgtaataaattcatgttaatggatgagatgaacttttagtgccacacgttcctcaagtttaataatttatttcatttgaggtctccgtaatcatgaaactgatgaaatttctatgttcacatttacagtgga

SEQ ID NO: 93018 - DNA, 542 bp, Eucalyptus grandis
  Intron number 1 from transcript Egrandis_v1_0.032687m (loc us Egrandis_v1_0.032687m.g) derived from phytozome v7.0 (c hr-ID scaffold_5; pos 29344063 to 29344604 reverse strand)
tccagcagctcggcgagctcggtgcgctgctgccggtgcttatgccttggtaataattatcatattcttttcaattcttttcaattatttttccattttataatttagataaaatttgcgttttcaccttattgacctgaatcatcaggttattaacgagcattggatgcaaaagatctcgattaaactcacatatttcaactcgacatgataatggcatgccatgcgagaatggatcattcttataaatgaacactagtttgaatttaattgatttccttcacccaacagctggaggaataagatttccctacaataacaaaaaacataattgtaatccatagcactatttacatgatcaaatacttcttttcaaggtgaataaattaatttcttttttctcgaacttatcccatgctcagagcttgtataaaaaaaaagtatacatagtacagaacttttttttttggctcctttcctctttcccttaactcattttgtttcgtgcacgccattgctgattataatgtgcaaaatgcagc

SEQ ID NO: 93019 - DNA, 496 bp, Eucalyptus grandis
  Intron number 2 from transcript Egrandis_v1_0.031116m (loc us Egrandis_v1_0.031116m.g) derived from phytozome v7.0 (c hr-ID scaffold_1; pos 97486 to 97981)
caaaggagatacttgcctcaagtgtttggtggaaggtacttttgctctgtcttgtaactatatgtgttgggataatcatgaactcataagtttgtaccactgctcggatggacagttcccttcattattagggattattgccttgaacattgttgtttctgataattgtctcatggttattcttcagattttgtcatcccataacattagctagggtcttttgttgtttttaactctatattatcagggcgtgtgtccacaagatgttgaagatgctttatgtttggatcatcttatagcctttgagctccttaaattccttccccttggtttgatcaatttgcttttcaatggctgatgcttctgtaggaatagcttgaaccaattttatgtagtgggcctctatcaccaagagtttgccatcccaaatcgattttttgagattttttgttcattttcaggaggaataataaaagttcccgagctgtttttgctg

SEQ ID NO: 93020 - DNA, 948 bp, Eucalyptus grandis
  Intron number 2 from transcript Egrandis_v1_0.011900m (loc us Egrandis_v1_0.011292m.g) derived from phytozome v7.0 (c hr-ID scaffold_5; pos 35677621 to 35678568)
aggaaaagaattatctagagaagcaggtgtcgtttcttgccgattcatcttcttcaggcaaaatggtattttactctttggatttcatcactgtctgtttctctgacatgtaaaactttttaaaatttaattttatttctaatttattttgggacatattgtggttgagtcagcctatcgatttgccaaagacttcctaagtagttatccctaaagtgcaaatgaatttacttgttcctcaagcctgcatgtttcttcagcaataactaacactaataattgggcaggatgatgttacggataattaggatgaatctgacaaatcttggtacttgagaggtgtgggagagcatcggtcaggatttgacattttgctctcttattttttttagctagatataaacttagttaggcattcgtttctgttgttctctcgtgaattgtttgtctgaaatgaatctatagggctagcttttccttttggttacctgtgcgaagcatctatttttatattcatttctgattaaatatatgttcaagtatgaaaacaaagggaggactagtatgattagttaagtgggtgcaaacaacacgacatattatcaatcttgttaagtgaaattgaaaaggatcagaattggaaacttttcataaaagtggaaacatccagatattcaaccgaggaaattggctcagcaattaaaaaagttgattcttttttttggaaaagcagtatttttctttttaataatcaaattccataaattttgtcttcagtggggcaaacttatcagcaatttctatttgtattttcaatctgcagaatccagcttgcttcttcaatatgctctgaaattgttattactgtcgtgtatcctgtgctaatgtaacagttggagtttgctaattgcaggaaccttcccattccagtccaactaatttggagac

SEQ ID NO: 93021 - DNA, 716 bp, Eucalyptus grandis
  Intron number 1 from transcript Egrandis_v1_0.050545m (loc us Egrandis_v1_0.050545m.g) derived from phytozome v7.0 (c hr-ID scaffold_5; pos 72154313 to 72155028)
tactccgccggctcccaaagtagatattgccaaaggtacggcgtttaatctcatggaaaaaataatatcctcctatgttcatgggctaatatgggcaatttgtgcattgcaagggcaaaaagtatgagaacctaaatgaaattttttatgtatcaaggtcaaaagtgtatgtaaaccttcatcaatttatttgagtgggctaatagctaatggattttgctaaagaatgcctccaaggcacttgttaacaagccatttaaagtaacttcgaagtctactatacaatatttttctctttttaagtgtaatcaacactttttggaaatcataatattccctgttacgtgtgatggccactcactctttcaggattgcaatttaattgatggttttagttatgctaacaaaaacagtcatctgatcaggcaccttggctgctatcatctcttcagtcgctgtttttgtaatgcttctcttcatcagttgttgttaccttcggaggaggccagcagagaagaaatatgaagctgtacaagaaggaagtggtaatgattgtccttttataaaaataaacacaaaaatgaaactttcaaatgagaaactcaaaatattttgaagctatgaccggaagacacgaaaaacaagtccaagtctaaacgactttgttgttcactcatgaaggtgtaagcgagatcacatccttgaagtccttgcaa

SEQ ID NO: 93022 - DNA, 702 bp, Eucalyptus grandis
  Intron number 2 from transcript Egrandis_v1_0.004065m (loc us Egrandis_v1_0.004065m.g) derived from phytozome v7.0 (c hr-ID scaffold_3; pos 4122941 to 4123642 reverse strand)
tctacggatacttccttcgaaggtattactttcgccgctcgattcgtctctgggtgttgcaaattgtgtctggattggtttcgggtggtgttgtatcgtcttcttccgggtggttgaggctggtcattgacggttttgggttggccttggttcctggaattgcctgagttgcatgattgtttgactcccgaatggtgtgttaatgtgtgaccctggcgcgttcactgtcgatcagagcttcgacttttcttcgtaaaagtcgcgggtaatcatcgatctttcgattcctctcgaattctttctcctatagtggtgtttgtgtaggtgatctaaaaaagtttgtattttttctagcttgcagtttggtttctcctcatcagctgaaaactttttttttctattgccaataatactgagcttggtttgactttttggagtcttggtatcaaaatgaaacagtgactcaatcttggactaagggtggtggtgattttgtcattttggaaaagatgataatgcaagttgtgcctctttctgagttaatgaagaatctataatttatggggaattagcattatgttgtttctctttcttgcttattttctgaggaccttttgggagagacgagatcttttaattctgcagttttgtgctcttctcattttctctttatcttccaggagatctccttgacccgtctaa

SEQ ID NO: 93023 - DNA, 757 bp, Eucalyptus grandis
  Intron number 1 from transcript Egrandis_v1_0.021158m (loc us Egrandis_v1_0.016762m.g) derived from phytozome v7.0 (c hr-ID scaffold_5; pos 36720916 to 36721672 reverse strand)
agtcactccctttgacctgagttcagaaactccaggtctgttcaacatcccaactctctgctgatcttagctccgctttcttttttattttcttttccggagtttgattctgcagtttgctcgatcttacctgccatggcgaaactgggctcttcctgtcacccttctcaagccccagaccgttcgctcgaattcgggcttcggttctgcaatttagccgcggcgttctctcgtttacttatatgtttgctgatactcgtaatctgaatgagcacttgatgatgctcgtcttttgtgttcgtctctgtttgctaaggctcttcacttcatttcgttctttgatcgcatcattgtatgcgtctcgatcgtcaccaagtgggttgtgataaggactttggatgatgtataaagttttttttttttttttttggtaaagtgatgtataaagtttttaaactggttaaaccgggaaaggtacactgtgatcggttgaatgtgcaaaagctgagtcctaggagaaccgagtttcttttttttccagcgggtataatatggtcgttcctttaatttatatatgccgattacaaacccaaattctgaatctctatgcttttttcctaaatgaatctttctagtatttaaatgacagtcttgttcaactaatgaatgctagtgtcaaaatcatattggaccgatggactagttctgaactactttctaaaaaatccatgagaacagaacaagtactgttgagaag

SEQ ID NO: 93024 - DNA, 726 bp, Eucalyptus grandis
  Intron number 2 from transcript Egrandis_v1_0.040773m (loc us Egrandis_v1_0.040773m.g) derived from phytozome v7.0 (c hr-ID scaffold_5; pos 51994658 to 51995383)
tgtcaccactcaaggtcagtctctctctctctctcgctctcccccccccccccccgggtccctctcttaaattttgaatgtttgatacgtgtactatctgtaccacagggagttgagattcttgtaaatggaagaaagatgcctgaatggattctccagtgtaaagaggactccatatcttttatggttcccccagacctacgtggcaacttcttaggattagcactttgtgttattcttggccagaataaaaaacgcatgttcgaaaatctatttgaggtcgaaatatttgttaatggcaaaagagagtatttccgtttgacatttatttctccattggaatccgatcatgtgaggcttgtatattgatattgctagtatgagtacctagaggggggtgaataggtatataaaatatttttcttcaacaattgcacaatactagacagttgatggatttgagacaaacgataatcaaagtaagactaagagaagagaaaattgaacacgcggtttatagtggttcggcttatatcaagcctacgtccactcttcttcactgacagcctattggctggattccactatgaacaaaagagaagttacagcacagctttgccttgattccacagtgtagatgttctaccacacctcctcaagatttctcacaaatatagactctcttttgtatacaagtattcgctcaaaggaattgtctaaacaaaa

SEQ ID NO: 93025 - DNA, 542 bp, Eucalyptus grandis
  Intron number 1 from transcript Egrandis_v1_0.018184m (loc us Egrandis_v1_0.018184m.g) derived from phytozome v7.0 (c hr-ID scaffold_3; pos 13261658 to 13262199)
cgtcccgccctctccttcgtagacttcgcccgcgggttagatatcaacaccccacttagaaaagaataatgcaaaaaatagagttgtggatgttagacaatgaagagtacatgaacctataaattttattagatgattgtctaagttaaaatatcggatatgtacaatcaatgacatcaattttagtttggagaagagatccaaaaaatgcgagagtctataaagagaataagccgatgtcagtgtgaccgtgcaagctatttgatagaaggttgttgtcgcaataggagagcgctatcaagaaaaagcctattttattattaaaaaacaaaaaatgcatgatcctaattacatgcatgaccttattgaaaatcaagaagtattcgtgttgtctctaacactcatctgggtgtgttcttgatttgtaaattcgcctttgttatctataaaagattgttaaccttttcgattgttgtcgtttatccgcgttgttggtgtttggtttaggcacgggaagacttacaagacagcggaggagatca

SEQ ID NO: 93026 - DNA, 773 bp, Eucalyptus grandis
  Intron number 3 from transcript Egrandis_v1_0.043952m (loc us Egrandis_v1_0.043952m.g) derived from phytozome v7.0 (c hr-ID scaffold_5; pos 43137 to 43909)
ttgttgctgctattaaagcagctgggaatatcaaggtggtgttgtgcctagtaatttcatttcaagttcttattgttggtttagcatttgactaatgggtgttagcttgattcttgtcttagtggtttaggtgcatcgcgatctccttgcgagctttgctttaatgaaatgggatggatggacttatctatatgtagacttcaacttctttctttttaaaatggtcataaccttgtgtagaagtcatcagtgaaattcaagagtaactattttgaattcaactataggagagcgtgggaaacatgaactagttaatcctggaaatggtacttagtagttgtcgctgctttgggtggtcgtcagtcaatggcgagtggaactcagcatgctcacaaaaggcattcgtcttacctgatatcttgttacttgtgaaagtgtccaagcaagtagaatgtctgcctattctatacttgacagagttatttggctactgctctatttcttctatttttcttatagcacttggggtcgactttgctgaattgctgaatttattgattcacttatgatcactttctactatgttatagtaacttatcgaaacaactcgaattcagtctcatataagtttgtcttccttttttcgtgggaactcatacatgttttttggttaaggggaatatgctctaaaaaatgttctgctttctaacaaaaatgtttcttctgatttcattgtgtttatttttagagattcttgccatcaaagtttggaa

SEQ ID NO: 93027 - DNA, 927 bp, Eucalyptus grandis
  Intron number 1 from transcript Egrandis_v1_0.042002m (loc us Egrandis_v1_0.042002m.g) derived from phytozome v7.0 (c hr-ID scaffold_50; pos 44316 to 45242 reverse strand)
aaagggtgggatctcaaagacaccgggtaaggtttgagctttttttttttttaattagatatttaattgatataactttaaataatacgaaatattatcattcttgcattaacagttaccactacccattgttctctttttcaccaaattgtcgctcaattcccacatttttttttaactattcaacacacatccactcaattaaatcgattcctttcaaaagtagatgaattttccacccaattaaatcaatccctttcaaaactagatgaatcctccattacgacatgacaaatccaatctgaattcattattcaatttgcatcttttagattgaataaaaacaccttttcttaacttctaaatcaatgttatgtaggtttgattttataaagcaattgttctagctattactatttttactttacgcaaaactaggcaaccgagcacacactaaaggaagaaattcaaaggtttcgatttttataatttatggatgaggaagcatcttttacaaagttgaagatttcgctcttagcttaaaaatttacatgtttaaccatagtataatacacaattgcaattcgttttaagtaaattgactggattttggttgatttttctgaaaaaagagttagatcttgaaagtatgcttgagattattttgtatattatagatattaatatacttttttgacgaggaggggggcagttcacttatagttgattttcttcctatatctgtacagattatacatgcaattttttttgggcgcccccgccccacctccacggttggtctatgtttaattcataatactcttgagcttgatagtataatattctatttggatgtttcttactaacccgttttttttatcaaatatggcagtcacggtgaactcatcagattaatcgttgctgaag

SEQ ID NO: 93028 - DNA, 320 bp, Eucalyptus grandis
  Intron number 2 from transcript Egrandis_v1_0.020822m (loc us Egrandis_v1_0.020669m.g) derived from phytozome v7.0 (c hr-ID scaffold_5; pos 25568992 to 25569311 reverse strand)
gcgaatcgaagatcgactgtttgatttcgcaacatgtaagaccctttttctcctttcctatttcaataattttattttttgatggtttgattagggttcttacacttgttctgggatttcaagaaaaaaaacccagaaaacattaacaatgtcggctctgttcccggcgaagaaatattaaattttcacgaattgcgtcaagaaattacttattgttgaaagggaaataggaaaattagaaatttcctgacaactttcctgttctggacgtgtctgcagacacaggcattcgcgagaaaactgaaggagaaagacagaga

SEQ ID NO: 93029 - DNA, 864 bp, Eucalyptus grandis
  Intron number 1 from transcript Egrandis_v1_0.021516m (loc us Egrandis_v1_0.021516m.g) derived from phytozome v7.0 (c hr-ID scaffold_3; pos 54609402 to 54610265 reverse strand)
cattttcgcggtgtccgccgtgtaccttgttgcaggtgagcttgagtgagctctttcttgctggggttttatccttgaagttattgcgaaagttggcggttgtgaggaagagaaggagagctgaagaaatgagctgtgtgaattgagtggttgcctagttatgtcccaagacttgattttaggttcaacccatgtgttgtcttatgagaggtctttggaaggataaggtctttcagtattcaaaacatgctttactgtagagagcagaccggaaaataattgaggaagaaatggaatggtaggttggaagtgaaaatcgtggacgagcgcccgtggccattggaagaaatgggctaaaacggaaaatgctgttgggaattctcgtaggactaccttgcattctgtgcagcaatatgggaaagaacaagttgaagttgaaactttgcacatggtggttttgcccgatccttctatggtccttttgagatatcgagtggaccgtgtacctgaagtgtttctctagttggttatcgctactaatgcaccctgttggcccaggggctttgacaaagaaacgatgatcacactaacacgttatggatcgatagtttgatcctttctccgcccttgtatcatttgggttgttatatattatatattcaatggccaatcagtgcgttgcaagtctgctctccatttttgggatctccaatgttgtgccttcttgctagatgtctcaattttatcttgattattgtatgaatatgatcatcaagacgcatacgacacgatcatttttcagtatctcatggttttgagtattctgcagggttcactgtcgcttactctgctccaacaaggcat

SEQ ID NO: 93030 - DNA, 695 bp, Eucalyptus grandis
  Intron number 1 from transcript Egrandis_v1_0.020845m (loc us Egrandis_v1_0.020845m.g) derived from phytozome v7.0 (c hr-ID scaffold_5; pos 72497889 to 72498583)
ccgaggagagaatcaaaggcaatcgtaaggtctgtacttactcctatcgctcatcttgatttttcttgtgtttggttcttttcctcgttttgttttgatttatcagcatacaatccaaagttggtttggcttcctcatcatatatccaatcaaccatcacgtgaagtttttggtattgatggaacttgacccttgataattagtttgattggactctgaattttcacccagagatgcaactatgacctaagtaggaggccggataacaatttcaatacaaaacgaaaaggataacaatggacagcatgaaatttgctaggaactatcgtaagattagtgatgtcactttaacagaagcttctcttgaaattcttggtttcccttgcgtgagaagccagggataatgtgtcattaaatagaagaagaaaaattcaacatttgtgttcgtgtgtacataagccattcattagtgtatataagccgttcatcttgtcacagctacaatcactatacacatttgatctaaataaatctaagaaactatgaaggtttgtgaattctgcttctgagcttgtgtttgggagtccagatatcttgttcctctgctttttcatctctattgagttatagctggtttcgcatgttgacggtgtctgtgcactgatccacagaagaagatcgtgttgaagattcag

SEQ ID NO: 93031 - DNA, 778 bp, Eucalyptus grandis
  Intron number 1 from transcript Egrandis_v1_0.038723m (loc us Egrandis_v1_0.038723m.g) derived from phytozome v7.0 (c hr-ID scaffold_5; pos 19991719 to 19992496)
agtgagaaacaatcgtttgctcgtaagtcatgaatgatcgattttggtcccttaattagggctcaaaatggtaattcgcattttgactcgataagtcgcaaaattgaatgtgtagggcggatttaaaatagttcataaaccaaatgtcgaagaaagaactatacctaattatgactaacataaaagtaattttatttttgattgatttagaacctaaaactgaaaaattcaaaaattaaggttcttaattgaattttataaaatttttgatagaaaggttagattggcattaaaagaaatgtatttatacatttttgattttttggtcaaaggtttaaccaaaagtcaactattttgttgatttttcctaaaatgttgattttttggttaaatctttgaatttttgagaaattgagagtaaaattaaggcgaaatagaatctttttggataaaaagttaatttttgacccgagattgacttttagtcaaagagttgagcaaaaagtcaaccgtttggcctttcagatttttcttgaaaatgaattagaaattgtttaaaaatgacaatgcaaaagaaagaagctagaaacgtcactttttagccaagaaattggtgctccatcacgatcggaatcccaaatctcgatttttacctttaatgacgcgtcgactaaaaatcatgtgttaacaatacataaattatatatatatatatatatagatatatatatatatatatattatatgctttgtattatattttgtacgtaggtggtac

SEQ ID NO: 93032 - DNA, 1019 bp, Eucalyptus grandis
  Intron number 1 from transcript Egrandis_v1_0.034649m (loc us Egrandis_v1_0.034649m.g) derived from phytozome v7.0 (c hr-ID scaffold_5; pos 11316388 to 11317406)
ttgctggttgccattagcctttgggtctagggagggtacaaaaccatccccgttcttctctgttttatgtccggaaacattgaagaggcaataccgtgcttgattgttgttcatagtttgattaaaacattgccttcggtttgaatatgagacctgtgttgacgatgcacatgacctgttcgataaattgttcatgagatgtatttgcaaaacgatgctttctattgtcgaatccaaagattaattgttgtagtttgcatgttataaactgattagtggtcatttggagtaattttcatgaaatttttgtcatgagattctcctcttttccccccctttttgagaacggagaaaacattgacaccaatttagctttaagcattttcatgagcattttatttcatcatgtttttatgatcatgcggaacttctataacctaacaaaagattgcaagaatggaattaattcatgctaagcaggttggagaattgcttcttcttttcgttgtttcatatcttttgctatgcctttcatctttcaatccttcttctgagagagaaggttgagttcatcttagctcatcttacatgtacctgttatttcatatagttgctgaaattcaataccataaatttgctgaatctgtttgtactattcttcggcttcatgcaatttccctgttcttggaaattccaagttgttgaatgcttgaaagcacttgcctctctgtatctattatctgttcttcatctgaagcatgtgcactttctgacttttcctgaatgtacatcatgtactccaattatgctaattaaagtgagagaagtagaaacaggatgtgctaaaatcctagtaggttacaacgaaattgatgtgggaagagagggcatttttcaactggaagactccccaaatgggaaattatcacctcatatttgccctgataattttatgttaaatgctgtatatggggtgtctcaaaggccccccattacaaatctggcagttctagagaagc

SEQ ID NO: 93033 - DNA, 513 bp, Eucalyptus grandis
  Intron number 1 from transcript Egrandis_v1_0.002365m (loc us Egrandis_v1_0.002365m.g) derived from phytozome v7.0 (c hr-ID scaffold_3; pos 50547994 to 50548506 reverse strand)
aagagaaaaagagcggtttgtttcctctgcgttttcgggatttgtattattatttcttcgacatgaatatggtggaatcgatcctctgcttgtagttcaaccctccaattgctaaaggtcgtctcgaatgttggaaatcttcttgtgacgtgaacgattgaaccaatgtatgttcgaaatcatgagatcctgtcaaaacccgaagtactactgatgttgtacgctgattctgttaagtactgttttcctttcccctaaaatttgagatatcatttaaatttgagaaaattatgaaaagattacgtgtgaatttacgcaccgacatttcattgtcaagaaagttgccagaattttggatttaaaaaaaatatcaaaatgagcgaatcgctaaattcagttgctaaggcgcttgctgtgtcggcttcgtctcaatcggaaccataaaattttgtttactcttttctccttgatttgacaggaatcatcttcaacctcatcgccgtcgtctgaaat

SEQ ID NO: 93034 - DNA, 974 bp, Eucalyptus grandis
  Intron number 2 from transcript Egrandis_v1_0.040309m (loc us Egrandis_v1_0.040309m.g) derived from phytozome v7.0 (c hr-ID scaffold_3; pos 71430832 to 71431805 reverse strand)
agatatctgcgaaattccacctggaggttttcctggtaaggtcggtttctgtatttgaggttatagctgatatgagaggttcacttttgccaaagataccagtgtctacttctcatttgtcatgtcctccttctccctattctttcctagaaaccctgatgctagatctttcagtattatacataatctcaattgcaattgttcggtgaaatgtgtttactcctgtagcttgttgcatagcttacattatacgaaagtggataaatatctgcgaaattacacactgctgctggataaaggtcttcttaaattatacaaaagtgggaaaagtaaaacgcaaaggtaaaagaaaaggcaaattggtgttgagagaatgcattgcacttgcttacgatcatcatataatttgatcgtcgaatcaccaagttaaatacagtaggacgttttaatcagatttataaattaatcccctttttggtagatttaagtcttgggcttttacaaaattagaaggaaaggaaagaaagctttggatgtggttgctgacaccatcttcagtttaactagcttggttgcttaaccctttattggtattgattcgtaagtgatccactgtggccgaatttgtttccaataattgtgaagtcgtgtaagaacagttctcgatccttttcctaattttaggccatgaacagttttttttatgcatagaccaccaaatatgatagtttctcgtgagtatttaaaatgtcactcttgcatttatcgcagcaagatcaggcatttgatgtggcagtggagttcggacgtctgaaatatgttaggaaatgaattcggtgcattacatagcatttgtaggggacataataccccgaactagaaatattgtcgatgaattgttgatgaaagatctcattgattttgtttaactgcaatattgcaggagtccgagcttttggtcaacattaaagaac

SEQ ID NO: 93035 - DNA, 691 bp, Eucalyptus grandis
  Intron number 1 from transcript Egrandis_v1_0.028064m (loc us Egrandis_v1_0.028064m.g) derived from phytozome v7.0 (c hr-ID scaffold_3; pos 48014060 to 48014750 reverse strand)
gatgtacaatttcttgctgttctcttcattcttttgttttctgggtgatatcaagacgagggcgagttcttgattttcatcatttgggggggcacgagagtggccgtaacgagctgcgtgtttcttagcgggttcaggggattttcggggtctagcgaaattgggtatgccctctttgtgtttgatgatatgtgtcaaaggtcgatactttagttcggggtgcaccttgcatccccactttgacggaggctctcttttatggagaagaagagttttcccgtaatgcccaatccatacgtgggtaagaagaagagaattcattcgagtttctcatgtagtccttttttggccctttttccctaagatgatgatgggatatggatcccattaatttgccaggagtttaatttcaggattcgggtttttggtataccgtgctacggattgaatggaagctttgaggaatgtgttgtggctcatcatagaactatcttcaaagcatagccgaagctctttttaatttggttgccgatgtctgtttttcggcagttcttgtgttctccgctgaaaaagagtcatttttccattcgtgtctcctgcatcttattcttatgtctagcaccatgtctaactaattttatgcgtcatttgtgcaggtatctccaaagagtaatctgtcgattccgtggac

SEQ ID NO: 93036 - DNA, 1052 bp, Eucalyptus grandis
  Intron number 1 from transcript Egrandis_v1_0.008663m (loc us Egrandis_v1_0.008663m.g) derived from phytozome v7.0 (c hr-ID scaffold_5; pos 68230056 to 68231107 reverse strand)
agcactacaacatccaccggagactcgccttgaatgtgagttcttcttggataatcttgcaatttttttttcttttcctttttttgccccatattacaccatatattatttgcaatttattggcctatatattatttcgtgcacaaacattaatttcaagaatttctatatggctttctctttgtttcaaattttattttgatttttgattttttttttgcttaaattgggagtcaaatcattgagccaaggacaccccatgttgtgtggtctcaattttctcgtacattttttttttcaaactcttttcgtacaataagtgaatgtgaaatggagggttcctttttcggccttaagttctcttgagaattaatcatttgtatggtactttatgattaattatcgggtagaagctattctataatgtggtttaatcgtcactaacattatctcaatcatgcattcaacttataggaggttattcataataacacatgtaagcacttgacattgtgatgtggatcgaaaggtagtattcaaccactatatgaatatactaacccaaacaaaaagaaaaaacactatatgaattgtatacagagaatttagttatcccttaaattataactctataactagtagggtggcaatgaaccggtttggttcgaatctttattgatacttcacccaagtcccaacttgcataggaattgggaccataaaatgattgagtcaggttatcaagtgacaagtttcattttctagtattcatgaatgtgttcaatgtttagtagatgctttttactctgattattttgatttctagacaagtttgataatgtttttgggatcggttcgggttaatgagccgcaaacgaaccggaccattgggaaatctattgttttacttacaaaccgaattgaaaggaaacccgaggcaataaaagatccaaaattctttgttcgggtctattcgatttagttcggatttcaacgcgggcgggttccttttcacaggtaacattactcttctgcggagagccactgaaccc

SEQ ID NO: 93037 - DNA, 843 bp, Eucalyptus grandis
  Intron number 3 from transcript Egrandis_v1_0.018641m (loc us Egrandis_v1_0.018641m.g) derived from phytozome v7.0 (c hr-ID scaffold_3; pos 61347338 to 61348180 reverse strand)
gttcctgctgaggtatcaagaactttttctactggagaaggctgtttggcatctcttggtctatttctaactttttatcctccaatttgtttcctctcaatcttcaatatatgtgctctcattatttgacatatcttatcatggcttgggctctgatgcataattgttgtgatggaacttgcttgatgtgtgatttggaggagaatgactatgggtgctctctagaagtttgatctttttttggcaaagatttgttctgaggcgatcaattgcaaatttctgatatgtgtacaattgtttaatttcattgatgtttggctttggcccaaatccagcttcctctttgtataagatgaatagaggaagtgagattttgaggaccgtaaaatatgttggtccaattgtttgatatgtaccgtggaggagaatgattgtcagtgctcagtagaagtttgatcttttctggcaaacattttttactgaggtggttgattggaatcatccgatatgtatacaattgtttaatttcgttgatgtttggctttggcccaaatccagcttcctctcagtacaagatgagcagaggaagtgagcttttgaagactgtaagagatgcttccccttggtcgattcctttaggaagtgggtcaataatgtggtgtgatagacaagtaactctgaatgactgtaatgacgattttgatgcctgagggtgctttgtttaagatccagaaggcagaacttggctcaagatatgcttgagtaacataaatcttgagttctttatacatttcctttttagctgcaggttcttacagagctgaaaccatttgttgtacttgc

SEQ ID NO: 93038 - DNA, 862 bp, Eucalyptus grandis
  Intron number 3 from transcript Egrandis_v1_0.008269m (loc us Egrandis_v1_0.008269m.g) derived from phytozome v7.0 (c hr-ID scaffold_3; pos 53058109 to 53058970)
tattgtggactccggtttcgagcacccatccgaaggcaaacttcatactcattgaacttcttttgatgtttatgtattggtcgtcgactggatcgtttacgtgttgtgtgtgtgtgtgtgtgtgtctttttttgttctatcagttctatatatttggataagatattgtggaagcaaagagcggatgacggcagatggatgtaaggaaaaggaaatctggatggggatgaatgaaaaagtattctttttctttggatatcttgatgtgtaagaaaattcttaagggaaatcgaactgttttcatgcttctttccagttttgatcactttaggaaggcttatgaacctctcgtagcagttgtgatggaagatgatgtatatatctatggcttttgtcttcatctttttcacatcttacgtagttttccccttttgagttcttctgtattcacctgccgagcatattaaggaatttgttctattgtggatgtttcttctaaatttttctagtttttggatgactctgcttctgaaagaaaattgaggcaattaattagcttttccctggagaaaagatacctttgacttgcatgattgcctagctttagcccatgaatattagttttcctgtgattttccccttttaagtttttcttcagaattggcatttctctctcctttgtgccactttcagtgtcttatgcttctttacatctaaactttcaggtaatattctagcatcacaatctttcagccaaaaagttatggtggtaaacctttcaagtgaaaggagcaggaacataatatttacttaccaaaggttccttcaatgcaactttctttgattcatcagtccaacacga

SEQ ID NO: 93039 - DNA, 916 bp, Eucalyptus grandis
  Intron number 1 from transcript Egrandis_v1_0.030384m (loc us Egrandis_v1_0.030384m.g) derived from phytozome v7.0 (c hr-ID scaffold_5; pos 14886197 to 14887112 reverse strand)
cagctcactttggagttcgggtcggtcttctcttctgcgtcgctctcgctctcgcttttttttttttttttttttgcccctgaattttgcctcttttgaacgccatctttcatcggctccgtttcgagctggtgcaaaaattgtacccgtttctttaatagcggaatctgcaataatggatgccctttgtcgagttgtccgtcttttcctagtgaaagtttgagctctttacaccggagccttccttccgggtatatttgcagctgtttgatggggttgtgggggggtttttgcattttgactgacgatttcatttattgtattttgatggggtgcgagtcttttactttggaggagaagattgagtccgcgtttgctatggtaattcatagtttttcttgttttagttgaatttgagattcggaaatgggacttccgagcttttcctcaggagggttcctctcgaaaaatcacgccgaccccttacggctgtattaagatggaattaatgatgcatctggaatatgtacgattcgttgagtaagatgctgtaccgttcaagaggaaaggttgaatttttagcgagttctgttgtggttcctctcttgagtttcctgagcggaatatgcagcttctacattaccattgaaatcttgcaagtcttcctaaccttagtttgctagagggagggccattggtccttttgttgatgaacttctggagttgtttaaaatcttgggtcgtgtttcgattgacatggttccttgttgtgtttggcattgttctgttatcttccttgcccggcaatgcttttactgggtggttttgccacaaagagccctgtcgtcaatctgaataagttttttaatgcctgaatgcagagggggactggagcttctgtgtgattctgtgaaga

SEQ ID NO: 93040 - DNA, 325 bp, Eucalyptus grandis
  Intron number 1 from transcript Egrandis_v1_0.024891m (loc us Egrandis_v1_0.024891m.g) derived from phytozome v7.0 (c hr-ID scaffold_3; pos 11605737 to 11606061 reverse strand)
ctgctatactctatcaggtttgtcgagatctgaacattattgaatcagcttaaggtcgtttttgtcaggcaggtctgatgaaactagcatttagccaatttgcttttgatgaatttctcattcttgtttagtctaattcatcagaattgaaacggaaaatggtggtgtgtgtgatatcctttcttcgtgttcgttaaggatgactttgatgcaaatttcaggtccaacttacacggttaacttttttcagtatggtgaatattatataagcaaccagtccatgtttttttctttgactgatgtacgccgttctctctttagggat

SEQ ID NO: 93041 - DNA, 756 bp, Eucalyptus grandis
  Intron number 1 from transcript Egrandis_v1_0.050062m (loc us Egrandis_v1_0.050062m.g) derived from phytozome v7.0 (c hr-ID scaffold_1; pos 36569921 to 36570676)
ttctggttcaacttctatacggtgttgtactgcaggtgtatgtatactcgttgaaataacttttaaagttaaggacacaaaggctcgtcccaagatggcaagaatcgacagataagaagaaaaagaagtaaagtaaattatgtttttgataattcattgatgaaacataactgtgcacgatcaaaaaattgtcaggatctttaagatgcctatgagaaaaaaaacttaccctttttcgagttttcctcatttggcgatcaataagtacaaaattcttttcttttatgttcgttgaaaattacaaataatgtaatataaatataatctaatgacactggataaacactcactaaaaaaggttttgtaatttccaacatattgtctttcccgtgctgaatataattaatgaaataaaaatcgagactttattaattaaacatggttaattagtacccaaaaagcactatttgataaaaccttttatagtaatcgacaatcatttattacgtaaatatcaatcgaatgtgacgtacaaccgaaaaaaaaagaaaatcgaatgcgatacaagaagagataatcaaattaagtagataaaaaaaaagggtttaaaattggataattggatcgaattgccccaatttttacgatctcgagagatcatcaaccatcatatcaaaaaatataacaggccagagataaaatattatttcaggtctgaaacaaagaaaatccgaaagggggaaaaaggaaaaataa

SEQ ID NO: 93042 - DNA, 1058 bp, Eucalyptus grandis
  Intron number 1 from transcript Egrandis_v1_0.001751m (loc us Egrandis_v1_0.001751m.g) derived from phytozome v7.0 (c hr-ID scaffold_3; pos 10043955 to 10045012)
ggagaccttgctgactctcgtttggctggtcaatagtcgaccatagccaaggccaacgactagctagagaaagaagaagaaaaacaaaaaaaaaaagagaaaaatataataaaattattaaaaaaaattaaaagaaattctaagtcaggtctcaatcctatgaatgtgattgtacttcccaagcccaaaaaaatttggaggtagtaccaaacatatttttatttcagaaatagaaattttgtacaattatcaaatgcattattttgcttagaaacttgttgaacaaaaaaaaaaaaattatttccaaatataaattattctcggaaatagaaacgttatcattcacactctatgatgacccgcattggtcctaaaatcacacttcatttgcaaatgatgcaactgtcaaatttaatcacgatgcaatcgttacatggatactggtgtttttttttttttttttaagggactcaatactagtttctcatgatttcttctcacttatctttaagaaatttagatgtcggataacgctgcagaaattcaaccgaacgatactcgctaaactttggaattcgttcgcaacctctcgttgatttgacagcttacattgaatggttattgttctttaaatattctttcttttcttttgttttctttaattattttgaaatgaaaaagggtgggttgatataggtctcaaaaatcatgaatgtgaggactcaaatatgcgatgcacgtgatacccaccactcatctaggtccaaatttcaggactttgatacgaggttaaaaaccatagggggttctgccgagcaataaacaaaagcaaaccgacacgtttcgcttgatgtttggagctgatagatctcaagctccgacactggagaaaccagaaaagctctggacaaccttcaattatgccgagactaacctcataacctcctcgtattcgcttcttcttccccttcttctcctacatccactgtgtcgtcttcctctgcttcctctcccatgctgcagagtctcaaatccaagatcaagaactgcaagtgctc

SEQ ID NO: 93043 - DNA, 798 bp, Eucalyptus grandis
  Intron number 1 from transcript Egrandis_v1_0.037980m (loc us Egrandis_v1_0.037980m.g) derived from phytozome v7.0 (c hr-ID scaffold_3; pos 38280890 to 38281687 reverse strand)
aggtaatttctatgttttgatttgccaaaagggtctgaatagagagataactgcagtatcttattgcggcactcctaaaatcaactgtcacatatttgtatttgtagtgagcttgcttacatatgttttacatgactcagaagcatctcatagagatcactagcttcatgtactcttccttgctggcttatgtgggtatcaggtgctagttgaaggacataatagctctcctgcaaaaacttccaagtgatgcatgatacagggaattattaggtcactaccttgactgtggtgagcccaatgcaatcaccatcgtgggctaagttttgaaccttgcagcttcctttctagagtctgttaagttcaatctcaccatcaaggctaaattctcagttttctttccatgaaaatcatttaggtattatcaattacgtggtaataattccattaattttcccatcttggtaaaaacagtatgccttcttcccttttgatttgcgaatgctgtagaatcctcccgcactcaaatcggtaaatgttgatgcgattgatacggcgatcaaattctataccagggttttcattgtagagtttatgtaaagaacctataacagtttttttctccagcgtacttgtgacatccttactgggtcttagtatgttaaagaaattcattattttcgaataagatatggcttagtatatgtatataatgccttcaagtggctcggatgctacttggttccatatacattgttgatttaagtcatgatgtcttctctattttatgacacagac

SEQ ID NO: 93044 - DNA, 736 bp, Eucalyptus grandis
  Intron number 1 from transcript Egrandis_v1_0.010360m (loc us Egrandis_v1_0.010360m.g) derived from phytozome v7.0 (c hr-ID scaffold_2149; pos 3845 to 4580)
cggcaaatatcaaatttcctgctttacctttagtggtaagaaattttgaatttgttcagttaacaaaaaagaagaagttgtgaggacatgtctggtcaaaatctatgaaatttgatctaaacgtgaaattgagttcgataattgagttcggtcatatgtatgtcttttcacaaacctatgtgatttgaaaatgcccattaagatcaaatattttagtaaatgatgttgtggatttttacgtataataataaattcatctattatttatttaatttgaattcatgtaatttaaaaatggccattaaaatcaagtagtttgataaatcctgctgtggtattttgtaagtataataatgaatgaatttttattgatttgtttatttatttagttcagattccgccaacaaatcttaacggattgaaccaagacactcattacttgattatggtcaataggtatcttttaaatttttttcagctttcacttacgtattcaatttcccttgtaggaattgatatcctcttatattgctgccaaattactctgacgctcacgctctttgccattggtaacattactacaatcttcccactgtgaaattgatttaatgttcctagaagcaaacatttaacataaccacaaattggttatcataaaaattgcacatcctcaattctcttgcgttttcaccaaaatacagggggattccccgttgtgaaattcatcctgggagcc

SEQ ID NO: 93045 - DNA, 632 bp, Eucalyptus grandis
  Intron number 2 from transcript Egrandis_v1_0.003935m (loc us Egrandis_v1_0.003935m.g) derived from phytozome v7.0 (c hr-ID scaffold_3; pos 35893396 to 35894027 reverse strand)
gggtcgatttgcttgcggcattgcctcttccgcaggtactattatggactggtttttcactctaagtcgaaaccgttgttgtatagttccaggcaaaacactagacctttgtgcatcgccgatattttggctaatcgcttcagtactaatctgatttagttcagacaagatgctaattttctgtgcaactgcaagctatggcaatatctgtttgctgactttgatattgattttcttctgagatataacgaaagaaggaactaagatcatcatgataagtcggctcatttaacattagaaattatgctatggatcatttcggttgtaatcgaatggatataatagaagttttttggctgagataaagataagaaagaaaggacatagagaggctaggctgctttttcatcagtaaagagattttccaattaaattcagtgatcagtcattagatagaacatgactttgtgtcccagatcatgctttgagttgcatgtagttcttcacttctcttatgtcttttaggtaagaactctgttgttttactatgaattcatgaccaagctaacttgatattatttttccattttgggtcagattgtgatctggttcatcatacctgcgataagaag

SEQ ID NO: 93046 - DNA, 754 bp, Eucalyptus grandis
  Intron number 2 from transcript Egrandis_v1_0.001700m (loc us Egrandis_v1_0.001700m.g) derived from phytozome v7.0 (c hr-ID scaffold_1; pos 34407567 to 34408320 reverse strand)
gcctcgaaggccttgcccattttctcggtaattcgttcttattattattcttattattattgaaagcacgtgtagaagctgtaatctctgcgaggagcagtgcccttgcgattatcgattgcatgtttgtcgattggtgtatgtgcagtgagaagaatagaactggaacttgagttcagtaagttttaggtcgaaaatgttgatagtttggtccacaatttggatgttgaaggtgaagactatcatttattcactgcgaaattcactatttaatggatattttagcgacgaatctggtagaaagaaggcatgtaacagatgtaggtaatttccctaaatttagtgcaaaatcatgcttcaacatgtcataccttgtattctcaattcatggcatgaagcagccttctaggaaaagcggtggttgtttgtgttttgaaagctcatcttctcatgttgattttagaacactagttcgttatgtataaaatcatgttcacctgaaagcagtatcttcagtaacgaattttgatctacaagatcaacttattacacctttgtcattgatccattagcttttactatttcctgattatgtatacaaataagctggcttcttggagtttcttttttctttttgggttcttagggtcccaattttcatgatgcatgtttttttgcctcaaaaggtgcttctttttgtatcatgtgtctgtgagtcctgccttcttatatctgatatgttgttgcagagcac

SEQ ID NO: 93047 - DNA, 636 bp, Eucalyptus grandis
  Intron number 1 from transcript Egrandis_v1_0.046257m (loc us Egrandis_v1_0.046257m.g) derived from phytozome v7.0 (c hr-ID scaffold_5; pos 55242688 to 55243323 reverse strand)
ccaccaacccaatcgctaaggttacatccaagcaaggagagagaaagtagatggtgtggagttttttcaggttcatattgttgtgtttatcaactattcatttctgcaaaatcgagattgagatttagttaccgatagtcataaggtacaattagttgtagttatggtcaacacaatgactttaataagatatcaaaggaaccttcatcagaagtaccagtgagggaaaaaaatggttcaaacaagtttagtttgattcaagaggacattttttcagaaatgtttcacaagccaaccaaacgatttcactgctggttttagactcgacaaattgaaactagaccgatccactaaattaaataatgttgtgtgttcttctaaattttttattatctgtcattcagattccagatagttgatttttgtatttgaagtagctcattttgtataaatgagtgatctatccggactttgtttgatttaatttctctttgaaaacactagtctctctaagctattccaatttagtgctgatttacgagttcataaaatagcaagagcaaacagtggagaccaaaactcaaaaaactggttggtccagtcagtttggtcccaaaccttttcttcaaacagtat

SEQ ID NO: 93048 - DNA, 399 bp, Eucalyptus grandis
  Intron number 1 from transcript Egrandis_v1_0.022960m (loc us Egrandis_v1_0.022960m.g) derived from phytozome v7.0 (c hr-ID scaffold_3; pos 74609106 to 74609504)
gcaacaggagcacttctttcccgagctgcaagaaggtatccacattctagaactcaattgcttttcgtgtcaaaaggttcaagcaaagtatacaacttttccgccacgaaccctcacgtgcgctgttccttaataagcatgattcaatgtcatggaaactgaaagacagtagtttgattttgcttgggcagcatcagacgaaggctagcttggcccattaagcgaaacttcttatctcagtttctttgtaatcataacgttgttctcgatcgatcttcccaaagaaaaacgatatggagtttttcttgcacaacttagacattcacatattgatatagacacgtatagattaagtttgagatgattattttccttttcagactagagggaaaggtggca

SEQ ID NO: 93049 - DNA, 507 bp, Eucalyptus grandis
  Intron number 1 from transcript Egrandis_v1_0.043407m (loc us Egrandis_v1_0.043407m.g) derived from phytozome v7.0 (c hr-ID scaffold_5; pos 24658107 to 24658613)
tctctttctcgcctagaatttttggtattgttgctgcttttggctcatttgggaagaatatattacttttgagttgctgcctttggttcagattgacaaagtttgttaggtatatggagttcctaatatacttctcgttcaaattttccaaagctcgtctggatcacctaaatctcattgcaattgcagtaattttggcctacctatgttgtggattttatattatacttggagggattttgtatatatcatccatgagcacagatgtcatatgatctgatcatgttttgaattcaatctacattagctccttccagtcccagatgtcatatgatctaatcatgttttgaattctcgatactgatgcagtcattcttataagaagattgagagcacaattattcttttattgttggtatctgactatgctttttgttgtgttgatcatgtccacgctaactgatgttttcagttggttggccagctcaacaatagtgctgtctcatc

SEQ ID NO: 93050 - DNA, 449 bp, Eucalyptus grandis
  Intron number 1 from transcript Egrandis_v1_0.049099m (loc us Egrandis_v1_0.049099m.g) derived from phytozome v7.0 (c hr-ID scaffold_3; pos 44032974 to 44033422 reverse strand)
attcttcaagaacgcggccactaagttgcaaagtgggagtttctgccttggcttttctgtacattggtttctctaaatggtggctcggttcgtttccttttatcgattttattcagtcttttcttcttttctgcctgaatgaggaggaagatcggaagtttgaaagtttgatgtgaagaaaacgtagaaagtactcgttatggtagattgttccgaaagagaatgtgggcatttatgctttcctcgtttaattggacaaaaggaaaataacatggtttcttgatctccagagtatgcattccgcatgtgaacgtgtacagtttcgaagttcagctgctcagtgtccatgttgtgtaatttttagccgtgtttcctcttttttttctgcaaaattaatcaaagttcttttcttgcttaattgtgcagctcaatcaagcttggatagccac

SEQ ID NO: 93051 - DNA, 659 bp, Eucalyptus grandis
  Intron number 1 from transcript Egrandis_v1_0.010258m (loc us Egrandis_v1_0.010175m.g) derived from phytozome v7.0 (c hr-ID scaffold_3; pos 74963593 to 74964251 reverse strand)
ttgcctccgaccctgccaaccccgagatccttgcggtgcgtgcgcttctcctctcctccctcgttcgtgttcttggtttcggtttttttcccctttctgggcaccgcttttggcccttggaaattgatgtattctgggtttttgagagctttcttgatctgggtttggttgttcattagggaatatgcgtcttggggagttgcttgttatctgggcctgtttgttttgtgtactctattgctttgcttgtgatgtttgattgatgctgaactcagtggaagatggtgagaaccccaagttacgattttgatcattttttcgatgagtgcttgagaaacccaagagcaatcaggagaggtttcattatgttagaggtactgttgtgttgggcataattatgatcagcttatctctagctgcgggttatggagggagtatgcattttgagttatgtctatattggataaagatacttgttggctctagtttctgtgtgttgcgtcagttaattgtgcgttagcggtcaatgctttaagatgaactctatttgcatgatgaagtaagtacatgtgtgtaaggtcctcatccatggaagggggtgctggtggtatttttttttttttcctttgggttccaatatactctacttccgcaggttc

SEQ ID NO: 93052 - DNA, 516 bp, Eucalyptus grandis
  Intron number 4 from transcript Egrandis_v1_0.040430m (loc us Egrandis_v1_0.040430m.g) derived from phytozome v7.0 (c hr-ID scaffold_331; pos 31402 to 31917)
acattgagaaacaaacctccggggaccataagaaggtgagagctcttcccttttcgtagttctcttctgtttttagctcttggtctgcatagttagccttagggaaaccgcacttgatctcacagaaatcattacggttttgatttcttagttgaggacttctttttgacacgttctgttctaaaccctacccacctttttatttctttccaagattttgttcatgcatgctggtgtaaggatgttcccgaggtaggtcatgttaatgagaacctctacgttcagattgcatcaagaagcttctctattaatttttgcttcaaacatgtttaatgcgaagctatttgccaacttttaaatttgtgtctactcaataaaaaagatgcatagggaatgtaatgatctaaattttgtactagctcttggaatctttatgcaaataggaacaagcatctatcaatctagataagtcaccagtttctgaaccttaaggctttccgcagcttctgcttaaat

SEQ ID NO: 93053 - DNA, 349 bp, Eucalyptus grandis
  Intron number 2 from transcript Egrandis_v1_0.052215m (loc us Egrandis_v1_0.052215m.g) derived from phytozome v7.0 (c hr-ID scaffold_2553; pos 2133 to 2481)
ggttttctcatccagtattctgtcagaaatcagaggtaattatgcgtgatattctaaattcacgtaagtcgttagaacatgccctttttcacctttcttgcatcatcaattaaatcttagaaaatgtcagaaatgcagaacgttttccatttttgtttttccttggatgaactgcatagaaaaaattctactcagagatatatcttggatctgtcgcaagttcttcctagtaactttaaatcatcacagaggagctagcatgcatcaactactcaaattgatttcattgtgcacttcttgcttttctgtttcagctttggtacccagtttcgaaaaccttaacagaaga

SEQ ID NO: 93054 - DNA, 732 bp, Eucalyptus grandis
  Intron number 1 from transcript Egrandis_v1_0.026431m (loc us Egrandis_v1_0.026431m.g) derived from phytozome v7.0 (c hr-ID scaffold_3; pos 11608599 to 11609330)
gcaaatcacctgttaagcctcttcaccttgctgaggtggcgcaactctaggattgtctggcccgagttcgcacaacctaggccgacggcttgcctttggtcaccgtctataatccctgcctctgcacatgctcgccctctctatcatttctttgatttttcttttcactttgaagttgctttataaatatacaccaaaatgagcatccaactattattacttccaccaaatgccccttcattcaaaaataccaagaaaatgtcaagccattagctattcatccagtattaggtcaccgtgttcagaatcgaatggacaatttgtagggtgtcgtctctgctacgtttcatttacaaggcgttaagtcaacttgggtatctgctttccattaagcttgagaagtcccagcccacatcattttaatgggttcttatctgttgatgttgagttctttcatgtgttcgtgctcttactattcccagctcccatttgatacacgcaagcttgggcgcttccgtgtggcaagaaaagaatttcagaaaacgagaaaacatcaaagctgtgaattttggatggttattgaagaacaccaagtacaaatccattcatcttgaacaaagatcagatagtgccgaacacaatttcagttccaaaacgaagattataaaattaggcgaagaaagaacttgacaaaaagaaagaacatcaaagcggtgaattttgaaaggtcat

SEQ ID NO: 93055 - DNA, 979 bp, Eucalyptus grandis
  Intron number 1 from transcript Egrandis_v1_0.009227m (loc us Egrandis_v1_0.009227m.g) derived from phytozome v7.0 (c hr-ID scaffold_5; pos 4682714 to 4683692)
ctggttcgagtccgcccgcagctacccgccttctcgtgagtcccgctccaatcgccgccgccggaaccgcgtgccgttccgattttgctttcctcgcttattgcttcgcctgtggtttccgccccgaaccgctcgatcgcgccgaatgcggttggtttttgttttttgggggcgggggagattagtgcgaatgctccagtttcgccctgcaattagtgtagtttctctatgagctttagtggaatgtgctccctctgtctttctgttcaacaatgtaggatttcagctggaaagtttgcggctttactcgagcgtttgagcagctgctaagttcttgagtcgtgctttgctcgggggaaaaaggccgcctttttcccttttttcttttatcggttttttggttgttgttatcaaactgcctggaactgttcgagtgatttgtggcttgtttgaggaccgggaagaagcgcaaattctgggaactgtcgatttagattgtctggatgtaaactttgtcggaaatggaatgatgcaaagtggaggtttgttgacattcggagtctaattgtagacgaaaagatgtgtaacagctttgaatctggggcctttgggcttggttcgtactatttgtggcacgcgacaaggaaaggagggcaaactttgcttttgattgccgtcttttggtggtgatgacaaatttattggcttctctatgtgctttgatatctatcgccgtaatttgtatcgcgtattaatgatacaagtggattctctttgcttgtgtgatttgtcatgttaaggcttggtcaaatattgttgtttgtatattgttgatgtgccaatacagttaggagcttttactctccttcttattttccacacacgcagatttgaattgttcaatgaagaccttacacattccttctttcttttcgttcttcctctgcaacagcgtttgtggtgaaattgattctgagag

SEQ ID NO: 93056 - DNA, 972 bp, Eucalyptus grandis
  Intron number 2 from transcript Egrandis_v1_0.037645m (loc us Egrandis_v1_0.037645m.g) derived from phytozome v7.0 (c hr-ID scaffold_5; pos 10647317 to 10648288 reverse strand)
ttcctgtgaaaacaaaatttgtagattttgagaaggtggagaagccatgtcaacaagctaacataggaatttgtaattgtagaacatcctgtgacacccccactcttttcgaaaaaagggtactagaagatacaggcctatctctcggtatattaattctaatagaaagttcagattttcatcaaaacaaagaatacacttattatttcaaattgggcttttactttttgccaaaaaaaaaaaaaaaaaaagccttgatcagtgtgtgattacaaattttgcagtcaaactacaggtttaaccacatctaaactctgaagtctgaaccaaacactttgctaatatatatgagactttatgatcatgcagacttctttgtcaaactggttggctgcacacaaaataaggttgaccgagtttgttaaaatacaactgagacagatcaaagtaagaaatcctacatggcatgggcttcctgctactgcacacttctaggaaataggtcttactaaaagtaagcaatggcaaacagtttgaagaagacagatggtagaccaagagaggcccgagaggcaggtgtctagacagaaatagcactaagctatttatatcattaaaaatttaatttatgtagtcaaattgatcgaggctccctgggcaatcattcttcactgggagcaagcatagttgaagtctagagttatttctgtagttgaatattagcattagatattaaactcggtaattatatgagctttcaagcaagaatcactagataccattcatgatattcacgcatggatccatttccaggcattttctcgcctgaaatccagcaagtacaaggtacatgtaccaactgacaaagagagtcacaaagatgagcttcaaccaaaacagcattggcaatatgcttagaacagtggagtaccttaagtatatcaaacaccttttcagcagtgtacttctgct

SEQ ID NO: 93057 - DNA, 655 bp, Eucalyptus grandis
  Intron number 2 from transcript Egrandis_v1_0.049437m (loc us Egrandis_v1_0.049437m.g) derived from phytozome v7.0 (c hr-ID scaffold_5; pos 62103274 to 62103928)
ttaaggcaagaaggttatcgtttgcctgcaggtttgttcctatgagtttcaagtcgattgcaatagcgaaatacagcgttgctatttatacataacaaaagaagacaactttttttgtttttgttttgtctagttacgtggaagcccttaaatttccaatatcttgttaaggatgaaaatggacaagaatataagctgattttttttttataaatattttgctgatttaagaattggaaatgtttaattgtgatgaactctccaatggatatccatcaatgcattagtgttcagactaatgcattgaaggactataggtgaccaacatataataataggtgaaatcttaatagttggccctaatacaagtaaaacttatatacttaaggagttggcatttaggttcagactaatatcaaactcacaaatcacagtttgaagcatgacttaaaccagtttcaccaaaaactataaggaaaatgatggactctatatctccattttctctaatctctatgtcatgagatcaatagaattttcaaatgaataatttgtttcatttaaatgagtatactattatgtattgttgcttcagtttttcctcatgcgtatcctatatttcaggtggtggaaagagttgggattgggagagaag

SEQ ID NO: 93058 - DNA, 448 bp, Eucalyptus grandis
  Intron number 2 from transcript Egrandis_v1_0.033822m (loc us Egrandis_v1_0.033822m.g) derived from phytozome v7.0 (c hr-ID scaffold_3940; pos 2219 to 2666)
ccgccgccttacggtgccaccgcctcaggttggcttcggttcgccgtttgttttttttggtcaattgcgggctgtcgagtttcgttcgcttttgcatttattggacttctgtgtattgtgattgttcgtcgcctcgacttaatttggctatcctgtttttcactcggtgttttttgtgggtgtatggatgttcggcacgaatattatctaaatctccgcaccgatgccttgtgctcaatgtgctagttcatgatagatgcatgcggtggatgaattcagatttgttctgtgctaagtttagggctgcttccattgctgttttgttattttgagtggttattgtattccgggtgaggaagaacgtgctattctttgtttcaggttatgtgctgaccttaatgaatgatgctactgaatgtgcttgttccaggattgtccagtagaagtt

SEQ ID NO: 93059 - DNA, 742 bp, Eucalyptus grandis
  Intron number 1 from transcript Egrandis_v1_0.049037m (loc us Egrandis_v1_0.049037m.g) derived from phytozome v7.0 (c hr-ID scaffold_5; pos 19539666 to 19540407 reverse strand)
aggattctagtatctcaaattaaattgaagtcgaagtgcaagtcacagaaaattcacaaaaggtctaacactggagaatggaagccctctgaaacaaggcccatggcattctatccacttgcaaatttaagactgaatcaaaagtagaagcagttctccctccattatatcaactcgatttgattagtcttcacctattatcaaaaccaatgcttttggtgccatcgagactgcgttttaggagagaggattcagaaagttgcatggaattgaaacaataaaaaatcacatgcaacttgggctgctccgctcctacggttctcactcatttagccagccattgctctgtcttttctttttctgacgacgggctaaactcacatgctctgcatctcccgcatcatgcgaagggtaggatcgcaagtgggatggactgcgttttgaatgcacatctagcagcccaaggctgcggctgccgcggtgttgggaggacaaagaagccgagatttaaaagcttgtcacgttggtgcatatttgatcagacgctccatccgatttcctaacagttaagagtgattagacagcgaggggacaaaaaacttacaagcattagttctttcatgtccttctcaatcattactctttcgttacattgctgatgtgcatctcttcttgtagagcaatcttgtttcccagaactaacgaaatagatcaagatgcgtagctctggttcaaggataag

SEQ ID NO: 93060 - DNA, 494 bp, Eucalyptus grandis
  Intron number 1 from transcript Egrandis_v1_0.019955m (loc us Egrandis_v1_0.019955m.g) derived from phytozome v7.0 (c hr-ID scaffold_5; pos 10886324 to 10886817 reverse strand)
agaaggtcattggcgatccttgcctaaaaaagcaggttaaacttcaattgctctcttttcatgttcagctgaaacccttcggaggccattactgcgaacttaaaaggagtgtctcttacggggatttcccggatgatatttttttttccttctcttctaatgacagaagaagagagaagctgaattggctagggttactaattcctccagtcatatgccgtgagggttttctttgttctgtttagttggcacttttttgatgtcgtttcaatcaaaattatggcaaatgtaaactttcttgacccaagcgttgattttccagccgagctacttatagtgtcgctctaggtggatcatttccctgtataatttctgtctgctttttgaggattaatgatgagtggggtcttgaacagaacttgcagaacttgagagaaactgacccttttttttttatcactattgtcttgtgcaatgcatttagggttgctgag

SEQ ID NO: 93061 - DNA, 663 bp, Eucalyptus grandis
  Intron number 1 from transcript Egrandis_v1_0.026931m (loc us Egrandis_v1_0.026931m.g) derived from phytozome v7.0 (c hr-ID scaffold_3; pos 71579476 to 71580138 reverse strand)
cttctcaaggtcataatccttggtgacagcgggtatgttggtgatcaacctccttattctttgtttcttcttttgatgttggtgtttatgcgttttctgtttgaaacccgagaaaattggaggtttaatgatatgataatctgaaggttgagggtatgtgaaatcctgttcaatgagctctgattcttgagaaggaagatcgggaaaagggaaattagaaagttttgaacttgtcgggctcaacttgtttgtactaaatattttgctggaattttgaggttaatgagaattcgtgtctaattctgttctcttgccaaggttaaattcccgtctaaaagatttgttgcgaatggaacctcatttgaagctattgttattgttctagatgaatatgatgttgcagggcgtttgagtggcgagatgattagatgggcaaatgccaaatcagaatagaattggattttacgctgctaggttttgtgatacttcactcgcaaccttggcaactattgaatcttaaaattgttgcgctcattgcaagcgatgagagcttattctgtgtttcttgttgcattgttacatgcaaatccatcgttcttaatttgttttacttctttaaattttggtctgttttggttttgtagggttggaaagacatctttg

SEQ ID NO: 93062 - DNA, 951 bp, Eucalyptus grandis
  Intron number 1 from transcript Egrandis_v1_0.039374m (loc us Egrandis_v1_0.039374m.g) derived from phytozome v7.0 (c hr-ID scaffold_2; pos 52143104 to 52144054 reverse strand)
tcttctccgtcaagatcatcaccaaccacttcaatgtccatggttatgtaaaacttaagttcatcctgtaagcacatctagcctttcaatccaatgagcaactcgtatccgaagatagttagctaagaatacttccgtgatttttcttatcgtatttcttcaagccggcagaagttatataaagccatgtcagtaatcgcagaaagcatcttaacgagaatttggatgttggacagctgatgtacatgacggcaagaccaccaagaattcaatatggttttaatttccttcgtttctagattcgttagagacttaaaaatttcacaactattcttccacgatcatctcgctctaatcattatcataatatatgagcaacgtcagactatataaacatgtgcgtgtcttcgtgagacaaattattagtacatcaacaaagtgggaaaagtatttgaccaaaagaaagaaaatatccaaaaaattctaaacttattgtgtgatggctgattcagtcctaaactttttcattttgccaattcaatcttaaaacttgtaacaattttctaatatattccatctagtcaattttagttaaaaatcaaagacaatgactagcgttgatgttaactaatttttatatttttcttcctcttctttctttttcttatttttgcgtcggtagccagccataggcaagggctctgatgccctcactagttgttcccaatattatatctgggtgagggtgagggtgtcctcgcctgtggccggcaattgaagaccaatggggaaatattaaaaaagagaaaaaaatgagaaaagaatggacgcaaaggttacccgggttcatcaacacgacatattggtagattttaccatgccctgactatgatgaaaaaaggtttagaacattcaggaaattgaaacacaatccatcatacgaagtaattg

SEQ ID NO: 93063 - DNA, 971 bp, Eucalyptus grandis
  Intron number 1 from transcript Egrandis_v1_0.037322m (loc us Egrandis_v1_0.037322m.g) derived from phytozome v7.0 (c hr-ID scaffold_3; pos 2824442 to 2825412)
tggctaggtcctacccgtccttgcttaacttgagggtaccagtcttctctaccaaatttttatcaatttcttattccaaatgagttgttcttctgtctacttaggatgcgtttggtaacgtttattcccaagaacaatttctatttaaaaacaattttttctatttctgttcgcgggaacaatttatgggcaaaaaaacgcgtctgtaactgcacataatttctattcctggaaccaaaaaaaaaacacacccgtttggtacaagaataaaaatctccattcccaaaaaaaatttattcccaattttttcatttaatttataaaatgccaattatagttgattatataaagttcttgaaagagtaaggtggaattggaatcataaattcgtgttttttaaatttaaaaaaaaatgccgtcattggctaattggaatcataaactcgaatgaggcctaatatgctagataactatcgccattgatcattcctgcagcgtttcgaactaaagccaatcggcagagattaggctaaatgcacatggagccttaacaaggaaaaactgtatagaaatattctcattattctcttttctatacttcaagtaagtcctcattgtcattattcaatcaaaagaaatcacattgtatccgacttacggacaataacacgatagtaaaacctcactcaatgcagtaacagagtaatctataactcggatgaaccacaacaccccacaagctctacccctctcattaccatctgcttctcccctcccacattcgtcatgcattttcagcgaatccatcatttcgaaaccgccgactcctcgagcgagcgaaacagacagaaatttaaaaaaggctgtaaaaagaggccactccacgcatatacatgctcatttccacaaaagccaccaacacagttccaaaaattaaaactttgcatgtctgattgcaggcgaaagttttc

SEQ ID NO: 93064 - DNA, 499 bp, Eucalyptus grandis
  Intron number 2 from transcript Egrandis_v1_0.008819m (loc us Egrandis_v1_0.008819m.g) derived from phytozome v7.0 (c hr-ID scaffold_5; pos 28798931 to 28799429 reverse strand)
gggttgccgccgtcgaggacaaactacaaaaaggggttagttaattctcgatgtcatttaatttttcattttctatatctttggttttagtttaggtccttctccgatttaattggaacctaaccagttacataaagctggaaaagtaaaaggtagataaagtgtcagtttctctggttttcatgcattgaagaactaatattgctgacaaaaacatgattctgtgtgtttcctttcgactgcaggtataatacttccactcttacttaacaaaaacaaagcgatactccggtgttattgcagaactaagtcaataaatcaattatttgtaattaatacatcattgatcatcgagatgcttatcaagcatttgacatgtaactgctgtacaaagtttttggataaaaagggacataaacttctttaacctctacaaagtagagcttctcaatctggatatgaaaggtagtacattttcttgacttgcccaggttccaga

SEQ ID NO: 93065 - DNA, 632 bp, Eucalyptus grandis
  Intron number 1 from transcript Egrandis_v1_0.046395m (loc us Egrandis_v1_0.046395m.g) derived from phytozome v7.0 (c hr-ID scaffold_3; pos 7444379 to 7445010)
cgccgcccagcacgaggctgccctcgcggccactagtgaggaaggagaaggagaagtaaaaaataataaaaatattctaaaatattctaaaaaattaaaatattattaaaagttgtccacgtcagcaccaatcaggccacgtcagctggccaacgtccagtcagcaaaatctggccaaaattggtcggaaagaactaaattggcacaacgtaaaaaggtctagaacctaattggcacaaaaaaatggtttataactaaattggcacaaatacaaaagatttaggacttttttaacacttttcccttggtaatatcacccaagaaaccttgtttagcttctcaaaatctatgggaggcacatcaggacaaaactaaaccgtccaaaactaaaccttaagctaaccattatctccctataaaaatgcactttccaatcaaacaccaatgatctaaatgcatttgatcatatgccctcttgaaaaagaaatggtaaagtccacccttttgcctttcctttgcatggtcttcttcttgctcatggccatgccttccattgatgcaacagcttcatcatcatcatcattttcactattaaaggatcttattacacttcctggacacaggatttcacc

SEQ ID NO: 93066 - DNA, 658 bp, Eucalyptus grandis
  Intron number 1 from transcript Egrandis_v1_0.035447m (loc us Egrandis_v1_0.035447m.g) derived from phytozome v7.0 (c hr-ID scaffold_26; pos 21864 to 22521)
cttgaccagccatccaatcatttagtaagttttagtcattttctgcattttatgactttgatttcttttttagttatgcttgttgttgttcttgcaccaattgaacttatcggaatctggtctttacattgaaaatacagtagaaccaatcagtgaacacagctccaaagagcctctgccatcttacatctgagcttatagtggaacataaaccaatctaattgttccaactggaaaaatattgggaatagaacatttatgctaagcctgatcagtgtttttgtattacagtagtgtataataccgagtagttcagatatctgtgcctgtagctagtattgggctttgcacatagttaatgtggacatttctttgtttataaatttggagttttaagttatgctatgatgacctactaaagtgttatctttgtaaattgttagtttcttgtctaaggatagatagagtatgactctgcgttttttgctatccccagctgaagggtttggatgtggcttaaggtactcattctggtcttattccaaggaggaattctgatggtgagattgattttcttgccaacatacttccatttgaccaacgatggatcgtcttcacagctaatagccctcttttcaccttgatttgtaggttagtc

SEQ ID NO: 93067 - DNA, 842 bp, Eucalyptus grandis
  Intron number 1 from transcript Egrandis_v1_0.050014m (loc us Egrandis_v1_0.050014m.g) derived from phytozome v7.0 (c hr-ID scaffold_5; pos 5748444 to 5749285)
tgaaacaacagctggaggtcactgtcatctctcgctcatttgctttcctgcatgctttcgcttttggagtgagtttgtaaatgttttgagcagagccgttagtcactgcgatagctgaagtttttcttttactaaaaagttttcagtgatcagatattccttcattttgggactcattctaccttatgttctcaattgtttactatctatctttattatagggcaatacgtctcacttacgacttgtgggttagaattgtatgatatgatacctagtgcctttttgtgtaatgtgcactctgacaaactattgtaggggatttattgaaatggattttgaaatttattaacattctccaaaaaaggtactgttaataatcccgcaggtactgaaaccattaaaagaacacctaataacttattgacaagtaaatcccttatgaattacaacccttaaagggattatcgttcaaagggaagtagactactcaagaatttcacatttcatttatatagtaatttagaattgaataaagaattcttttccttggcgcagctgggccatcctggactgaaccagagagagaaagaaataacttgaatcaagtgcctgtgtgtcactcttacaagtaacatgaaaaggactcgcaaggctcataaccttgaggtcacgggttcaaatcccgtctccgcaacatttttgtgataaaaaatgggtttgtctctgttaattattaactagtaattaaattacttactactttttattattacccccttttttggggtagaagaactggagggaagatcatttacagtaaaggtggggtaatatacctttt

SEQ ID NO: 93068 - DNA, 602 bp, Eucalyptus grandis
  Intron number 2 from transcript Egrandis_v1_0.011271m (loc us Egrandis_v1_0.011271m.g) derived from phytozome v7.0 (c hr-ID scaffold_3; pos 48025540 to 48026141 reverse strand)
gagcctctatctcaatccttactcttggaatctaggtagctaatatctcgccattatgctaaatttgttcggttatgactcaggagttttttgttaacttttgctttattgttttcttttacctattatgaatagggttcagaattcccactatgcttactcaaattctttttttttttgttccgttatctcatgatttgattgttatggtgtttgaaatttaattattcaatcggctaattatgtccacatttttggagtcacgaatttctgagtgctctttatggacttcggaaatgaattatctccttctgtaagaagccacttgtttaaatgaacttaattttctgcttccatctccttttttacgtcttctgtctcctttcttcttgtataattttgtgggtgaaatatcacgtggataaactgtctaaataaaagtctggcagaaaaatagaaaaagaaatggccgactagtcattatatgtccagtgtatattttgatgtggtggaactcaaatgcaaattagttcacaacttcatctgactacattaccatacctgcagttgccaacttgttgtttattgattcacccgttggt

SEQ ID NO: 93069 - DNA, 489 bp, Eucalyptus grandis
  Intron number 1 from transcript Egrandis_v1_0.011271m (loc us Egrandis_v1_0.011271m.g) derived from phytozome v7.0 (c hr-ID scaffold_3; pos 48026188 to 48026676 reverse strand)
gaggtgaaaaaccattccacggctttttgcatcatttctgacttttgggtattgaatatcatttggctttttgctgcttctgatgaatcggttatgaatcctttggactcgactaatttcggcgggttttagctgtttcggttgtttcggttttgttttagtacggtacatgaaatgatcgtttgctttgcttccttttcactgattctctttttggtttctgattgatactgtactgtttttctttgtttttgaccttactcttttccgtagatgttagctttagttattgatatgagaaaattccgcttttcttttgatgctttttgttcttttgggctacgctttgcatcttaccagtgatccaataagcttctttttcaccttatctgctgtttttattgtactgttgagtcctttgttatttttggctttctcttctaagcttcagatggttcattgcagggccggggtgctcgtcaatcgctt

SEQ ID NO: 93070 - DNA, 1025 bp, Eucalyptus grandis; identical to SEQ ID NO: 92952
  Intron number 1 from transcript Egrandis_v1_0.024678m (loc us Egrandis_v1_0.019301m.g) derived from phytozome v7.0 (c hr-ID scaffold_5; pos 8079506 to 8080530)

SEQ ID NO: 93071 - DNA, 587 bp, Eucalyptus grandis
  Intron number 1 from transcript Egrandis_v1_0.009547m (loc us Egrandis_v1_0.009547m.g) derived from phytozome v7.0 (c hr-ID scaffold_3; pos 76395426 to 76396012 reverse strand)
cgatcgatctttttgaggtgccgtccaggtccgaggtcagttttccgatctgggtcggtctagatttgcgggttcttgatgggttttggtttcggtggcgtccggtcctggcgtttctcttgaatctcttcgtcttggtcgccccttccattccggttttgtcctgggaaagttttgttgttcgtttttgttggcctccgaatttcgatcgtgggtcctgaaaagtttttatctttctgtggttatgcgaatgagggataaagaataggtttttagtgatgccgatctcagttttggtcagcttgttttgacaatgtagattgtttgtttgattttcttgataaaatgaagattctgtttggtgttgggaatgttattataatctgaacaatgttctgttgcatcttttgatgccgtctgtaactaatttaactatgctggaagcatatgaaggatgatccgtatgagaaaagtttgatacagtttttgtcacttggaagattcttcatgtgctgttttccgtagtagttcttcgatgccctttgtttgtgtctgatctaatctgggcgaatggtatgacagggaaa

SEQ ID NO: 93072 - DNA, 459 bp, Eucalyptus grandis
  Intron number 1 from transcript Egrandis_v1_0.012869m (loc us Egrandis_v1_0.012869m.g) derived from phytozome v7.0 (c hr-ID scaffold_1; pos 11299572 to 11300030)
gttgtgtattctcttctactttgttataaaggtatgctttccctctttttgtgctggttctgtcctggaaaatttcttgggtgttggaaatttcgatttttttttttatgggttttggtttctgggtattgcatttttgtccgattttcctcatgcttgatgtgggtttgatcttcttgttgcgcaatttagctggcacattactggtttatgttgcgtgtgttagaagatagtagaaattctaatagttagaacagtcatttttaatttaactcataattcaaattaaaatagaatatgtatttctagctaatattaatagttattagttatatataataaataatatttatctaaattaattaatatttttatatagtttatagaattctaatttccttttaatttctgtacatatcggcagttggttatattgtacaaagcgttcataaaagtaag

SEQ ID NO: 93073 - DNA, 628 bp, Eucalyptus grandis
  Intron number 2 from transcript Egrandis_v1_0.018851m (loc us Egrandis_v1_0.018851m.g) derived from phytozome v7.0 (c hr-ID scaffold_5; pos 3283698 to 3284325)
ttcttgctgtcaagtacatagagaggggaaccacggttgaatttctctcttcttcttgtagacagcagtttattttgtcgcatgctaattccgtggccccagttccaggagatctctttctattgatgaactgctgataatggttgtattgacagtgaatctaaggcacctttagtgaaacattgtgcgctcagcaaagggtatgatgctttctcattaggctgtgggggaatcaagagctgcttgcccatagatgtgtgtggcgattcaaaacatttcccatctttcttgggcattatgaatagaactacattttttttgcttctatgagtaggcttggcaactttaatcagcagtcctcttatctttgtattgtggctggtgaacagattacttcatatttctctagctttcaaggcaattgtgacgtctgcatcttagacttaacaaggagaatcgcaagttggtttttttatttgattagggagtgattgatccttaagacctcggttttagttactgctatatccttctcatcgatttcatccaagatactagcttattgcttgagttttcagtctgattttaccagatacatgccctgactcatatttttgttatcagattg

SEQ ID NO: 93074 - DNA, 612 bp, Eucalyptus grandis
  Intron number 1 from transcript Egrandis_v1_0.044375m (loc us Egrandis_v1_0.044375m.g) derived from phytozome v7.0 (c hr-ID scaffold_3; pos 20901842 to 20902453 reverse strand)
taacagtcagatcttcgaggttggagacatcttaggtaagttgagaccagacattttagtgtaaatttggtagagaactacactaagcgacatttcactttgaaatgtcatagcgccgaataagtacgttggattccaaattttgtacatcccatacacaagagtcatgaatgtcgaacttttataagtgattatttttagataaatagttttcaaattattcttttttcatgaaagaaacagagtcataatcaaattttgattcgattgtacaatcgcacaaagatttgagaaacaaaaaaatgcattgatgtctgttttcgcggcaaaaaaatcagcataaacattgagagtataataagaaaaattcatacaattaatcttatctatcattaatttgagtatcatttctatccattctttgaaataaggtcacttgcgtgaaatttacttcacatgtggacgtagtatgctctaattttctaataaaagtgctattccctttgtttaatttcacgaaaaacatttttaatttttaaggaacaattcttggcatactaattattagatccaaatgacgattttgtcatcttcatgcagtcttcaacttca

SEQ ID NO: 93075 - DNA, 934 bp, Eucalyptus grandis
  Intron number 2 from transcript Egrandis_v1_0.017263m (loc us Egrandis_v1_0.017263m.g) derived from phytozome v7.0 (c hr-ID scaffold_2; pos 63510583 to 63511516 reverse strand)
ttaaccagggtcagaccaaggtccaggtaattttctgaactgtaattttgaaggcacgacatctttggattgtggattcctctttaactcattgagtaaggtgttctggttgtgttacccttcttggggtttgagttgaaacaaattatttatctttttagtacatttaaaagtttttccatcagcagattttcttttcaatctgtgttgaagtatttgaattgctttgcttctctataggcataaatgttttgagatatagtgcttgatagaattgctttgccacctgttgaaatcatacaattcaggtatcaaaccatatggttctgttggatccatcttcaaaatgatttgacatgaacatgtggggaaggagccagaatcatatgctcgaatttgattttcgattgtgaggaatgaatcaaatacaattgagaatcaagatcgagcagtttggaactttagatacagttttgatttttctagttactggttaaatcatagctttatatgatttcaaatgttcgaaggagaagaatacggcaaatctctttcgtgatttttttgttttgtttttgtgaagtaaaggaaattataatgcttattaaggatttagtcacccacgtttctgtggaggaatcaaggtttcatacgttgggtatttagttcactgcacagcctaaacctgacgtacacctgttacacttgcagatatcttgtatatagcttgattgtagcttggggcaatatgggtatctcttgcttttgatatctaatgatgatgataattttattcttacttctctgaaagttatgaagagaaaatgggttcacttctgtttctttccttgtggcttcagtgtgtccacaattgtactttcaatcaacaattaactaattgaagctgattttgatattttggctttaccaggtg

SEQ ID NO: 93076 - DNA, 621 bp, Eucalyptus grandis
  Intron number 3 from transcript Egrandis_v1_0.023574m (loc us Egrandis_v1_0.023574m.g) derived from phytozome v7.0 (c hr-ID scaffold_3; pos 7962532 to 7963152)
aagaacccttcattcattgctctctagggtgcaaggtaactttatttctttatcaacaattaatcatgttgtttgattttcttttcatgcataattatgagaagatcaggaaatgatcattcaaagcaacccctggagaaaaaaagttcgggctaattacactgtaatcccctcaacaataagaattcttgctcattcaaacccttaaaacacacacacaaaaaaaaaaaaaagtgccttttgattgatgttatcatactgtcaaattttgcacttaaactatttttgtttcatttgctacatatcatatgatctcagcttcttccttactctgtatatacacatacacacgtaactattttcaatcctaaaattctcttggcgtccttctttcgtaaaatttgttacttaagataacatcacgccttactttttgaagatttcggaaatacaaatttaatagtatatctatcattatagttgaaagtgtgaattctggcaccatttcaactagagtatcaataagggtttacaagaataatcaccatcgcatggtttgtaaagttctttgtccgtgtacttgaaggtggactatttgctgaaacacaagaaggatctcag

SEQ ID NO: 93077 - DNA, 633 bp, Eucalyptus grandis
  Intron number 2 from transcript Egrandis_v1_0.042855m (loc us Egrandis_v1_0.042855m.g) derived from phytozome v7.0 (c hr-ID scaffold_5; pos 11636525 to 11637157 reverse strand)
gttcaggacaaggtcatgattgatatgtgtattgttctttccatacaagagaagaaattactaggttctccgtagataatatgaaagctgcttttttgaaagttagattctcaccttgagtttatgttcgtccaccttaaataggactaagcctgacagatttgctctatggaattatgtttatgcttttgattcattttcatatgaattttatttctcccaaattccatgtttctaaaaggtatagacatgtactctgtgtcgtcttcatagtttagacatctcgtgtcctgtggtatgagacgccgagttacgaggctgttgctacggctctttgctgtagaattgtagtttcaatctgaaacttcaaatttcggtatttgggatcgaagatgtttcatactgagataaaccattttcatatatgtcagagtgtgatgcatcgtttatgaatcatgctttctctgcatcattttcgcatccgggaagtacagttcacgacagtttaggctcttgtgggaacaggttctggtgtgaatgcattctcatactcagggaagaatgccagattttctgagtttttcaaggactccatgaaagaatacaacgagctgttcatgtagacgatcttgg

SEQ ID NO: 93078 - DNA, 932 bp, Eucalyptus grandis; identical to SEQ ID NO: 92908
  Intron number 2 from transcript Egrandis_v1_0.005951m (loc us Egrandis_v1_0.005951m.g) derived from phytozome v7.0 (c hr-ID scaffold_3; pos 79280594 to 79281525 reverse strand)

SEQ ID NO: 93079 - DNA, 795 bp, Eucalyptus grandis
  Intron number 1 from transcript Egrandis_v1_0.033075m (loc us Egrandis_v1_0.033075m.g) derived from phytozome v7.0 (c hr-ID scaffold_1; pos 6128858 to 6129652)
ttggatatctgactggttaatttagatgtttctgcagtttaaggaattttttttcttgatcgaattttctgtagttaaggatgtgtagaaaaatgttgggttgcaattaagacttaagaccacatatttggatatgtgccgtggctggatgaaggaaaggcagagatgatatggacgatgtccaaataatacagccaatagtgagggtgaaaagtagggactcgaaccctcctctgcgtctgcctaaaatgaagaaatgagccggggtaaattcgattatattgatttaagaatgagtaaataattgcagaaggatctgggaaaatgtgaggacaagaggatatcatcaagaggaaggataaatgtggcgaatctgattctgattcttgggtaagtaaagtggaagatcaagaaggaaagagaatgggaagagaaaagttagccattaaaatgactaggacaagggcttcaggagacgatgaaggagaaggaggaagagtaaggaattgtctgagtgagacaagcactgccgatcaccataagaaagagtaagaaagagagaaggactagtacactggtgactttgacatagataacttggatttatttcgaaggaacataaaaggagcagagcaggagggctgtcataccataaggttatgacaataggctcgtttgatttgactgcaaatttgtgaaggtgtgaagcagtcaagaagagcaatgaaaccattaagagactgttccatcttgatcactcccatgcttcatttttaaaagtgcatcggaatttat

SEQ ID NO: 93080 - DNA, 823 bp, Eucalyptus grandis
  Intron number 1 from transcript Egrandis_v1_0.053069m (loc us Egrandis_v1_0.053069m.g) derived from phytozome v7.0 (c hr-ID scaffold_3; pos 65283103 to 65283925 reverse strand)
tctccggctggcatctggttaagcagtaagtcgaccctttaatcctttctgagaatgcctactgtttgctctgtgcaaaaaaaaaaaaaatgttgattacagaatttcactaatttccatggcaatagattccttagggttgtcgaaaaccgaaccgaaaagtttcggttatcattcggttcaatttttattaaaagtcaaaactttttttttataactattttggtttttatcggttcggttaaccgaattaaattgataaaatctaaaaaattttcatttttttaaaattattatttaaaaaaattattgaaaggagtgcatgtaggaaaaaatgccaaagcaaaaatcgaaaaattgaaccaaattgaaccaaaccgaaccgaactgggatttcagttcggttcggattggatttcgatttggttcaataaattttcttatcaatttagttcgattcggctatctaaaaaaatcgaattgaactgaactgaaccgaaccatttacacccatcgtgacaatacttatgcataaaatgggagaaaaactaattcacgcaaattgaagcaggaaagcttatgtatcttgacaagcgactacgcaaattgtgagttgagtatataaacatgaaggtggacctcgtccctctactagcccatttctgtttcagatgtcaattgcttgaaactgagtttaatctgatctatagtgcttgagatattgactgtggcttgattttatttgagattagctgagtactttttgtatccaatgtctttgaatctaccaggcgtgagtctaacgtcattaagagcattatca

SEQ ID NO: 93081 - DNA, 593 bp, Eucalyptus grandis
  Intron number 1 from transcript Egrandis_v1_0.008018m (loc us Egrandis_v1_0.008018m.g) derived from phytozome v7.0 (c hr-ID scaffold_5; pos 51552069 to 51552661)
acaggtacgcacaaatgtgacaatggtgttttgtgattgttagctcgtgattgcctgttagatatcagatcatatgcacttttttggatcttcaattgaagatacaaagtggagataaattagacagtagacacatgatcaaataaccaaagctcgtagattctttgaattgattcttgctgtgtggataatgagaaatttatcaaacataaatagtgcgattcatagtgccttagtcattattgtcttcagattcaagttctttgtaattttcctcgcgtacatgttggcgcaggttcacccacttttcatcttattatttgctattcttcttaagaaattttccttatcacgtcagaggttgaattcctgctatggctttgaaatgctaaaacgggtttttctttcttttgagtgcttattagagatgaagcagatctcatacaatgcatcgtgaaggaattattgattcgtctcaaccaaacacccttacatgtcgctaagtatccagttggaatagattcccgagttcaaaaactgatatgtttgtcacagaaagagttggctgatgatgatgttctgatgataggtct

SEQ ID NO: 93082 - DNA, 997 bp, Eucalyptus grandis
  Intron number 2 from transcript Egrandis_v1_0.008018m (loc us Egrandis_v1_0.008018m.g) derived from phytozome v7.0 (c hr-ID scaffold_5; pos 51552723 to 51553719)
agacaatttcaggtttgtagttttttggagcaagttagagaaaaatcacaccaaagcggtggtcttgtttctttacaaaaggatcttctatctgagatcctggttcatcctttaacggtctacagtgtcgctggaggaattagtttgatacaagaaagactatgttgcaagaaagttctcctggttcttgatgatgttgaccatatgaatcaactgaatgcattagctggaaaaggcaattggtttggagaaggaagtataatcattgttacaacaagaaataaacaattgctgacttctcatggcataaatcgtgtgcatagaattcaaactttaggatgttgtgaagcacgagaccttttttgtctgcatgctttcccagatagcgagagtgttgaaataggagtggatctcatagatagagcactgcattattgtgacggccttccgttagccctcgaagtcttgggctcattcttatgtggaagaaacgaagctgcatgggaaagtgcattgcataaactttccaaaagtcctgaccaaattattaatcaagttctcaagacaagctttgatggattggagaacaatgagagggagattttcctcgatattgcttgtttctttaagggaaagggagtagaatacatcaaggaagttcttgatgactctggttttaacacaatcataggaatagaaattctcatcgagaggtccttgataaaaaatgagtatggaaccctgcaaatgcatgatttgattcagttgatgggtaaggatattgttaatgaggaatggcccgatgatcctgggaaacgcagcagattatggcttttcgaagatgttgaggaagttctctatgaagatacagtaaaagttgttcatgtccattttgcaacatctcatttttttactttgctctgatttggattgtaatatgtaaatttcgatcgaaaattttgtctgacgattgaatttgctctgttatggataggta

SEQ ID NO: 93083 - DNA, 794 bp, Eucalyptus grandis
  Intron number 1 from transcript Egrandis_v1_0.013173m (loc us Egrandis_v1_0.013173m.g) derived from phytozome v7.0 (c hr-ID scaffold_5; pos 19400177 to 19400970 reverse strand)
attgcagggagagcatccgccatccctggtatcaggtaaaaatctcgacttttccgaaattttgtaaagagttcaaatcattccgacgattaccgacgatgatgtttgtcaagcggcggtttttaccgttgacgccgatgctagggtttctgggttgctcttcgattcttctttatgcttcatgaattgcttgtgggattgatcgttgaatggtaatgccgatcgttggtttagcagccctaatcgccaagttgcttgtcttgagaaatgatcccaattttgccgcagattccagctcgcaatgctctaaaaatcttaaaaaattgagagagagcccgcccctgcactcgaattagctcttgccttcttcccctgagctagggtttcgatcgttttcgtccgtgtcttccttccatgacaacttgccggttgaacgcttgcgagtcgcgggttcgtgggtgatttgggtaaccctggtgttgattgttgtgcaaatcttttgatgaaaggggaggactttgctcaatgagtctgcacctgatctgattggtgcatcgatcggatctaaatgtagttgaacggcgtgctaaccgcttctaaattataaatgcacgactgacctttgatttagttttgggtattccagtttttcttactcgcattaggatttggattagcccctccccctggagggaaataaggtttgcatgatgaattatcccctggatatttacatattttctcttgcattgtgtacagaacagctctaattgcggcataacttggtcctggag

SEQ ID NO: 93084 - DNA, 1006 bp, Eucalyptus grandis
  Intron number 1 from transcript Egrandis_v1_0.014412m (loc us Egrandis_v1_0.014412m.g) derived from phytozome v7.0 (c hr-ID scaffold_5; pos 54874337 to 54875342 reverse strand)
tcaagcatcccaccagtattccttgattccagtgatctttttacgtctgatatagctaatatgagtacctagagggggggtgaataggtatataaagaatttttctcaagcaattgcacaatactagacagttggatgaaatgataatcaaagtaagactgagagaagagaaaatttaacacgcggtttatagtagttcggcttatatcaagcctacgtccactcttcttcactgacagcctattggctggattccactatgaacaagaaagaggttacagcacagctttgccttgattccacagtgtaggtgttctaccacacctcctcaagatttctcacaaatatagactctctctttcgtatacaagtattcgctcaaaggatttgtctaaacaaaaaggagcttcagactttggaattcttctatcgcgcacaccttgaacaactaagacagtcttccttatatactcctttatgccatcatacccgttggcacttaccaaaggaattcctccaatctacccgttggacggaatcaattaggaagattgtccaagctataaatggaacgtgttaatagcccatcaatcatgttcgcccatacaatcaggatctcggtttccataagcagaaccttccaataatatttaggcaatcaccggatcttcaattatcgaatcaatcttcgatcaatcaaaggactccgtttatgtcttctccagccatgagatcttctccagttgataaggttaaatcctcaacgaaacatccagttctagataacctttcttcaacgaattagacactgtcaatgaggatagactttgagtcttgagtctggctgtcccaaggtcttcagactttaaatatcagagtctgcaagccttcagactagactgatagaaacgatttgtcaacttcaaaacacttcaagaagatttctccaacaacgtcaaccattcttacaaactgtcaagctctatcagaggccaaaggaatcttg

SEQ ID NO: 93085 - DNA, 728 bp, Eucalyptus grandis
  Intron number 1 from transcript Egrandis_v1_0.018090m (loc us Egrandis_v1_0.018090m.g) derived from phytozome v7.0 (c hr-ID scaffold_1; pos 5341913 to 5342640 reverse strand)
ctgagagctatatcgcctccttccaacctggttcggtgagcccggctcaactcttctttttgttttgttccttgtgaaaatttgtgtcgttttacattggtttctgagaacttgattttgcatgcttttgcttgctactgttcttggatcgttgattctcaggctggctaaatagtatttcaggtaaatagtatttcagaactggttatacgttgcatttttgtcacgactgtgatttatcaaaggattgtttctttctttgtatcctattattgtttatgggttgagttattgtaatctctgaggtacgaccgattcgaggcgtctttgaaagcatatccattgctctaaatgtgtcccaatagttcctgaaaaatgtgttggaggatttggtgaattcaaagaaccgagtttatgttcgtaggtagagaagctttcacgtttagcatttgggtggtccgataaaatcatatttaactagacaacacggcttgctttcatcgcttccattcactgtgttaggatgatgactgatgaaagtagcttgcacagggtatagaacaaagtacataattgtttgaaacgaaacaacactgaacacggctctgtaagcattgtgcctgcgattcatcagaattgcttcgaaatttatgttcgccaaatgcgttaccgtgtgtcaacacatctgtgcagcctgttaccggatttggagtggcgagagtcctgga

SEQ ID NO: 93086 - DNA, 974 bp, Eucalyptus grandis
  Intron number 1 from transcript Egrandis_v1_0.017815m (loc us Egrandis_v1_0.017815m.g) derived from phytozome v7.0 (c hr-ID scaffold_1; pos 1086897 to 1087870)
ggtcgcggcattcgtgattgcggtagttgggtaggtgcgtgcgtcctttggccgattcccctgcgcccgtcgatccccgaactaggtcggaattccctcttgatcgacgaaaattcgggcgtcttttgattgagctgctgctttcgattgcttgaactgggttctagttaggattttccagctgttttattttttattttttttccggcgagttttacgtttcgcgcttcatgaaccggttcgttgcttctgcaacggaaccagcgttaattctgtctcgatgagcaatcgtgctgtcctactcctcattagcttagctgcgggtttttgagggatgactccggagatggggttcaattgcgtgttacgcttgcatttcgacggtgttaccacttttcatgaatgaggacacacgctagcgcttcaagttagggtcttggtttggaatgaaagatatgttcttctgagcgtagccattcggtttggttccgtattgatgttctagcaattttgagtcttttagctgccggaacgtggtggtttctggttcagctttcatcagttggctagttttagattatttcactgttaattggctgacgaataacgtcatgcctggtggggcaatacgtgactcgtggaaactttcttcaccagagacgtgggcgcagcttcttgtttttcctccattactttgttgaataagggatacatcatttcttaaagtacgaggaagaatgagcggttttttttttcttctttcgagattgagaatagataattactcatgtgcttgagcagtcaattcaaatttatgtcagtccatctcgtgtttctccttgccttatagattgagttgtgttcttctactttatcaagattagattgtgatcatggtatcactttgcaaagtgaatttaatgaaattggtttttataggttgatctctcgtcataatcagttcttgcggatta

SEQ ID NO: 93087 - DNA, 674 bp, Eucalyptus grandis
  Intron number 1 from transcript Egrandis_v1_0.052065m (loc us Egrandis_v1_0.052065m.g) derived from phytozome v7.0 (c hr-ID scaffold_3; pos 24334863 to 24335536 reverse strand)
tagcagtaatacctttgaagtcggagatattttaggtaggccgagaaatgacattttagtataaaattgaataacatttactacaccgagtagcatcctatatgcaagagactcataaaatgttcggcttttttgttgtagttgcaaacggcacgtcagaaggccaatcccacttgctaagaacttgaagatagaagaagcaatttccaatgctcattagaaaagaaaaaaaaattgaatttcgaaagtttcatctctttcaatgtcataaataaaatacataactttcgaaaaatagtcaatatcacttatatggatattcttttgacatttttcttttcaaatgatcttcttttctcttcttttttttttgggcctgtcgtactcaaactctcaatgtaatgatttgtttttcctgaagtaaataataaaaaataaagcttatttgtcactataactaaatattttacataaataatattgtctataattgatgttagtattatatctattcactctctaaaattaatagtgggaaaatgtcattttttgtgagattttctttgtattttacggcatatgctcttctttttgtttagttccaccgccaaaaacctgctcaatcttaatcaacagcttgttctctgatcttcatgcagtcttcaacttcaaca

SEQ ID NO: 93088 - DNA, 724 bp, Eucalyptus grandis
  Intron number 4 from transcript Egrandis_v1_0.018757m (loc us Egrandis_v1_0.018757m.g) derived from phytozome v7.0 (c hr-ID scaffold_1; pos 6126738 to 6127461)
cctttgattgttcttgtacataaccgctacaagaggttagtattcagttctcattcttcatctttccacaattctattgcttgcaagccgatacatgtaaggccttccaagctgtctaaaaggtgccatatcttctctttttgtacgggaaatcagtgccactttctttctttgttgtttgagagagtacatgatgcacttttaacatttttccccttttggaagcattgatagcagcatgcacagttgcagtttcttttctgtcactttatgtagttcttttgtaacggagtagcttgagttgatttgcttccagttaaattattttctgactcatttttggaggcgaggaattcatttagctaagtatcttggcttgcaaaacatgaaaaatgctagtatcttgaactcacttttaccagtgctatgattggttgagtttctgttgtgtctagtgatcatttgaaatatcggaagacaaaatgtaaatgtacatcttttgattattgcctagataagtttagaaaagaaaagtggcaaatgatttgcttttaatatgtttgtttggctactttatgttattgaaatggctgaagcccttggaggtagataatatgtagaacttggttgtttgtcgtggtctggatacactgtttgcaactgtaccattgctgaaagaaaccttcctattggatatttgaaattatttttaggccaaaagaga

SEQ ID NO: 93089 - DNA, 410 bp, Eucalyptus grandis
  Intron number 1 from transcript Egrandis_v1_0.031226m (loc us Egrandis_v1_0.031226m.g) derived from phytozome v7.0 (c hr-ID scaffold_5; pos 58520469 to 58520878)
aagctgaagttggatctgctgttaaagtatgtctttcttgagactatgatgtgggtctttgttttcctttcagctccttttttgtttggaaattgtaatgattcttcagattgtgatatgatgtggatgcacatttgtccgaactcttgcttgatttgattgtgaacatttaatgtgtaatagcatacttagtaactcatcttacatgattagcatgacggtttcatgctatccctggggaggggaagaagtttacttttctcttgttatcctggacgtttcgagttaaacctggccgaaagggatattgctttcgagtttctgtttatttatatctgtttttttaatttgtttataaattagctgtttgttaaatccaatgaacttctttttccccgatcagagagaag

SEQ ID NO: 93090 - DNA, 941 bp, Eucalyptus grandis; identical to SEQ ID NO: 92639
  Intron number 3 from transcript Egrandis_v1_0.011565m (loc us Egrandis_v1_0.007560m.g) derived from phytozome v7.0 (c hr-ID scaffold_3; pos 4402621 to 4403561 reverse strand)

SEQ ID NO: 93091 - DNA, 583 bp, Eucalyptus grandis
  Intron number 3 from transcript Egrandis_v1_0.008984m (loc us Egrandis_v1_0.008984m.g) derived from phytozome v7.0 (c hr-ID scaffold_3; pos 20374366 to 20374948 reverse strand)
gatattagtgagtaaagagagttctgtcttagaatttccttgctttatgaatcagtggaaggatttttcagattccagtatacgttcttgtgaattcaaagataataggaagaaaaatgttgtgttgagcttgtattttacaatgctttaattacggggtagctatattttggttggtagtatattcaaccatctgggttttactaaggataactattatcacttgatagtggtgcagtcgattcttatttgtgaagttgtggaggaagaagcaagtatttttgcaaaaaaatttccaccgtaaagggtgcatatctgtttcagggttgtccttagttctgattttgtttgaagttggtaaaatttatgtcagtcgtatctctttaaaccttattttcggactgcgtcttgtacttaatgctggtgatgttagagtggtcttctgaatgtggcgatttcctttattcacattttaaccttgcttgtgggtgagggattccctctccctcctgtgtctgtgggtatccaaatttcaaactttcgttcgttgttctgcagcattcgtggccagtgtgcaattatc

SEQ ID NO: 93092 - DNA, 535 bp, Eucalyptus grandis
  Intron number 2 from transcript Egrandis_v1_0.050869m (loc us Egrandis_v1_0.050869m.g) derived from phytozome v7.0 (c hr-ID scaffold_20; pos 207788 to 208322 reverse strand)
gagaagccatgtatgtttttctagattgacttttactttttggtttttacctaatttaaatcttacgagatgcatacttttgactctttattcacacaaaaaaacacccaaaactattatactatgtagatgctggcacgcaatgtcaaatataacattttcataatttttcgaaatttgaatgtcataaattttgcaagaaagaaagaataattttttttttaaattttaatttttacttaatccaaaacaaacgggccgatgcaaatacatattaatattactatttaaaatcactataaaattttcaagatctttttataaaatgaatatcactttgattttatgaaaaaaatttaatggatttctggaaagggctcataccccatctttataactctcaacttttgaataccatagcaacaattctcatacgcatgcatatgtcttctattgaaagaatatgatgctctctctcttctttagtccgtactgagtaggagtgtattgcagttgagtgctggctaagtgcctc

SEQ ID NO: 93093 - DNA, 1002 bp, Eucalyptus grandis
  Intron number 1 from transcript Egrandis_v1_0.025633m (loc us Egrandis_v1_0.025633m.g) derived from phytozome v7.0 (c hr-ID scaffold_3; pos 23291536 to 23292537 reverse strand)
ggctctactcaaggtaagatgtagagaaggcatacatctaaagattaattgcatgttgttgaaggttcaaaagcaccaagttctgatttctttcatttggaaagttataatacccttccaaagattaaggatttcctatgaatagaataggaatttgtaggtacctaaaaccataagctcatgcggttgatatattgaattgataatatctcacaaccggtcatgtttaacgttagagattctggaaaaaattaactatattaatcaaatatactaaacgtataactacaatatttgtgcctatctcgatttttttaattgaaattgttattgtcttctaagtgatcttctgcccacttaaaattatgtcttttagcaattcttcttatatttctatgtcaatctcctttcatgagaaatgaaaagttacaactatataggtatcgtttggttaagttcttacaaagattttaactgctttttacaaaaaaatactacttgaatggtcatcgatagaatcaattatttaataaaaaaagtcaacattactacttcaagataagtgcattgctttgtaacaagttttgtgacggtgaattatatgttatttttctgagtgcttaccagatgatttttattttagccaaattggaagatatgcctagtgcaataagaaaatatagttggcacttgtatatccctagcattttttgtttgttttttttttttttgcaccatatatactcaaaatactaccaagaaacatttatataaaaacaaaggtgaaatagtggagaaaaagaaatgacacatggaaaccgaaaattgtaacatgcacatgttttactatattttaaaaaactctatataaaaggagtagtggagtatgaccattttttaaaaaatcttaagaagtctataaaaaagaaaaagaaaaaagctagcggaaaatcacatgttgcaacggtccaatctcatttatatatcctctctttctttcag

SEQ ID NO: 93094 - DNA, 693 bp, Eucalyptus grandis
  Intron number 1 from transcript Egrandis_v1_0.039064m (loc us Egrandis_v1_0.039064m.g) derived from phytozome v7.0 (c hr-ID scaffold_5; pos 59797524 to 59798216)
aatttcgacaagctggccttcgcagttcattcccagtaagccaatttgacttttttctataaagaggaaaaagaggagagaaatttccaggctctgctattttttttttttggggttaattctcgtttcccttttctggtcgttgttatgtttcttgcggttgaattctgtgttttcaattcaatttcggaacttgatttgagagctgggatttgtggatgtgatttcatagttttggagctctgaacgtgtttctgtgacttctctaggatgatgactgtgtactttggtagtttttttcttgggtgataacttttgaggttgtgactttgactggttttttgctgaaccttttggtatatttgtcttctctgatattgaagtagttggttatgttctctctaggttaggtgtgaactgatattctcgttctttctattggtcactaatttgctagcttggtgttgcttgtcctagcttttaggtttcatagcctaattcatgaaaattgaaccatttcgtcgtttggaggaccttttattgtctctgctcatccttctctcaattcaagaggctgtatttgagttagggcgaaattatatccacgtgctaagtttcctacttgtggtctttgttgttggcatcagttgcttcacaggaagtacagtggaaatttcattgtgaaccttttgg

SEQ ID NO: 93095 - DNA, 594 bp, Eucalyptus grandis
  Intron number 1 from transcript Egrandis_v1_0.007992m (loc us Egrandis_v1_0.007992m.g) derived from phytozome v7.0 (c hr-ID scaffold_5; pos 51483539 to 51484132)
acaggtacgcacaaatgtgacaatggtgttttgtgattgttagctcgtgattgtctgctagatatcagatcatatgcacttttttggattttcgaattgaagatacaaagtggagataaattagacagtagacacatgatcaaataatcaaagctagtagattctttgaattgattcttgctgtgtggttaatgagaaatttatcaaacataaatagtgcgattcatagtgccttagtcattattgtcttcagtttcaagttctttgtaattttcctcgcgtagatgttggcgcaggttcacccacttttcatcttattatttactattcttcttatgaaattttccttatcacgtcagaggttgaattcctgctatggctttgaaatgctaaaacgggtttttctttcttttgagtgcttattagagatgaagcagatctcatacaatgcatcgtgaaggaattatcaattcgtctcaaccaaacacccttacatgtcgctaagtatccggttggaatagattcccgagttcaaaaactgatatgtttgtcacagaaagagtcggctgatgatgatgttctgatgataggtct

SEQ ID NO: 93096 - DNA, 997 bp, Eucalyptus grandis
  Intron number 2 from transcript Egrandis_v1_0.007992m (loc us Egrandis_v1_0.007992m.g) derived from phytozome v7.0 (c hr-ID scaffold_5; pos 51484194 to 51485190)
agacaatttcaggtttgtagttttttggagcaagttaaagaaaaatcacaccaaagcggtggtcttgtttctttacaaaaggatcttctatctgagatcctggttcatcctttaacggtctacagtgtcgctggaggaattagtttgatacaagaaagactatgttgcaagaaggttctcctggttcttgatgatgttgaccatatgaatcaactgaatgcattagctggaaaaggcaattggtttggaaaaggaagtataatcattgttacaacaagaaataaacaattgctgacttctcatggcataaatcgtgtgcatagaattcaaactttaggatgttgtgaagcacgagaccttttttgtctgcatgctttcccagatagcgagagtgttgaaataggagtggatctcatagatagagcactgcgttattgtgacggccttccgttagccctcgaagtcttgggctcattcttatgtggaagaaacgaagctgcatgggaaagtgcattgcataaactttccaaaagtcctgaccaaattattaatcaagttctcaagacaagctttgatggattggagaacaatgagagggagattttcctcgatattgcttgtttctttaagggaaagggagtagaatacatcaaggaagttcttgatgactctggttttaacacaaccataggaatagaaattctcatcgagaggtccttgataaaaaatgagtatggaaccctgcaaatgcatgatttgattcagttgatgggtaaggatattgttaatgaggaatggcccgatgatcctgggaaacgcagcagattatggcttttcgaagatgttgaggaagttctctatgaagatacagtaaaagttgttcatgtccattttgcaacatctcagttttttactttgctctgatttggattgtaatatgtaaatttcgatcgaaaattttgtctgacgattgaatttgctctgttatggataggta

SEQ ID NO: 93097 - DNA, 812 bp, Eucalyptus grandis
  Intron number 4 from transcript Egrandis_v1_0.032750m (loc us Egrandis_v1_0.032750m.g) derived from phytozome v7.0 (c hr-ID scaffold_5; pos 58188933 to 58189744)
gcggtctgtctttctttcccttttatttcctgagttctttctgcaccttccttggcttgaataagctaatggataggaaataaattaggcctataaatcactaaagattcatagctgatgaagagtgttttcttgtaatcttatgaaaagttatttttcttaaagcagctcaaaagttaagtaaataagaaagcaagggcggcagtctctctcttttgatagtggtgatgaagcaataaaactacaaagagaaatctatagtatgtgttatccttgtaggatctccctgtgttctaactgccaatggttgtacgtgccacaaccaaagaataaaaatagcaataagaaaacaacattgagaaactgggttcaactgtgcaaatccatgttttcatctttgttgagatgaagaaaagcacttactgctgttgtctagtttgccgattgtttttggagttggtgtcctgatatattcaggtactttatttctataccttgagagatgttgttaaagttatcagatgttatgcttcatatttggttgacctgagagttgagatttttggcattgtataattctaatgcttcatatttggttgacctgagagttgagatttttggcattgtataattctaaaagctataggtatcatagtatagctgtcatgttgctgtttaagttggccttaagcgcaatcataactacgtcgtcacttgttcttatttgtctgatatacattgatatttgtttgatcatggtgcattatgtttggagtggtggggttgttgattcgttttccatttgcagtgac

SEQ ID NO: 93098 - DNA, 805 bp, Eucalyptus grandis
  Intron number 3 from transcript Egrandis_v1_0.008187m (loc us Egrandis_v1_0.008187m.g) derived from phytozome v7.0 (c hr-ID scaffold_3; pos 12574530 to 12575334 reverse strand)
gtttgtggacagcgtcaagaggagtacggaggctgacagctgtgttgtacattccagtcacatatgtcagataggatatgtctatttgcgacgaggatttgacttgatagactacttgtgatgactctactttgcttttcatcctgaatttagttcatatgtatctaacgagagttaggtttataaattggtcattgtgtaatgttggaaacctgtcatggagaaagatacttgggtgagctattttcaagtcatcacttggctctttaccattgatcatcttctctctggctgtgattcccaaatgcaataaaataaaatgcagacatatgcacaaaaatacgtgtctgggcggtttgatgtggtgatgttatgtcaaataagttaggaccattggcatctaccccctgcaagaagagaacaaagagtttgtttgtcatgcttgcattcaagtaggtttagcgaacatactcttggtaaaccaactacctgccctgtgattaatctattgatgtagtccacccaatttaagatgtccaattactttaagtaattgtatttcctgatgtgcacctatttgtttagtttttggtttcaaactcaatccatttcactgcagataagatcagattcattttaggagataggtctttgagtgacttaatgttttaatcaatgtttctggaatatacctgcaaattttgtctgaatcaattggtggggcgatgttgcttaaattaatatttcgtctgttctttttcatcatgcagtgaggttgagtgaaacattatacagtgtaaagagc

SEQ ID NO: 93099 - DNA, 882 bp, Eucalyptus grandis
  Intron number 1 from transcript Egrandis_v1_0.029493m (loc us Egrandis_v1_0.029493m.g) derived from phytozome v7.0 (c hr-ID scaffold_5; pos 23601903 to 23602784)
agctccctcgctccaattccctaccagaaacccccgtaagctctaagtgccttctatagtcaatgttctgttttgaagtggatgagtagaagtgagaactccacctcctcctctacatgtttagttttctcaaaataagtcgggcgattcaagttgctcctcattttacatttctttgatgtttattggtactttttaattagaagctggatgaaactagctgtatcgttagacgatttaacatatttttcccgtgaggtcaaaatattggttatctattcttttcccgaaggagaagtctactttctgtctgtttgacatttgctatatttactttccgcattttggcagcaacagcagattctgtttaaccgttaggtagtgattgcattaagcaaattattcatgttctagtaatttctatcagtaagtgttgtttatgtattaattaccagcatcattgttagttcaacatggagatgctgcattattgaaggtgggcttggctggacatggaaaattttcttgacttgagcaaaagacccaaaatactatttccttgataggtgctttatttattttattttagcaacaagttttttataaaattagccttacgacatgttgttacaatggcttcaaacttatctccatatttaattctagtagaagctagcctcatcaacctgcacttggtcattattttcgagcagtatctgagatcgttgttgcacggagaatttgcacgaacctttgtggttgaacttcactgtgacagcagttgccactattttttgtcttttgtaataaatggagccttataaggcgagcgtgtacaaagaacaaataaatatgtggaacgcgtcttctgataatcaggaa

SEQ ID NO: 93100 - DNA, 1012 bp, Eucalyptus grandis
  Intron number 2 from transcript Egrandis_v1_0.018018m (loc us Egrandis_v1_0.018018m.g) derived from phytozome v7.0 (c hr-ID scaffold_5; pos 3747310 to 3748321)
ttgagcgaatactctggtgctgaagggttttgcatgtatgcccgtataatctcttcatatccttttttccgtagccgggttacttaaattgatcttctcatcaatgtgatcacctctctatagttggtttttttgtactttgtgagatttatttagaattccttcgtgctactttatatgtcttgctcagactggattactacactctatgaaaagatttcaagtatttgctaattccataaaccaaaagattgtaaagtttgatttgacattgaagagagacgcacacttaggtaagacctgagtttgttttggaagctggatgccctctgattgtttccttagagatacatctatgacattatgagtgagaccttcttcgcccaattaacacatagacgtccatcagaagtgcatctgaagagattttatgtaataaatatcaggtcgctactctcctatgagtacgacgagcatgttcattccattgtgcataatctttgtccatcatagtgtgcaattgctagtcttattactgacttctgctccttttctgagacaacttacagctatttttttttttggtaaggaacttacggctatttttatatctgcagaattttattttcttttttatatagcaaaaatcattggtcaattatgcctgactcgatattaactggattgaagaaattatcagtcattcaaactgcataatgataaatgtctgtgacacgcataatttccttaactgttattattctcgataaagtctatattggcaatgctgtcctattctattcatgtcatcttcatccttctgtaaaatctgttttatcaagccattttttttatagataaatttcctaggaatatggcctcatgttgctttgcttttctcctcttgttgtatgatgataatttctttctgaagaagcttagtattctggttttgcataacttgtttgaacgctagcttcacctgtctaattttactgcagagaaattgggg

SEQ ID NO: 93101 - DNA, 602 bp, Eucalyptus grandis
  Intron number 1 from transcript Egrandis_v1_0.009394m (loc us Egrandis_v1_0.009406m.g) derived from phytozome v7.0 (c hr-ID scaffold_1; pos 16853602 to 16854203)
gtagttttgcgaagcgaattccttgctccgttgtggtacgtctcttcagcgttggagggattttcggctctgaatttcgtcctttctctctgccttttccttctttgaggttgaaattaagccgagcctgtacttggatacttgcttttgtcgaaccgatcggcgcgaaaacggcgaattagacgcgcgagttttccgaagttgcggaaaccacctggtccggagcggaaattcttgatttattccatttgatttttgcatgtagcgatgagttttggattgcgagggttctggtgctgggcctgatatgcggtaacccgtcggtctcgaaagcttatcggttgtagcgtgactgagagactggagtcgattctgaaacttaggttttgtgtttttggttgcccagtgaaagtatatactacttcggaagtcaagcgactaataaagtcttaggctttctgcctcgcgactttagcagaccgaaacgaacgcgttttctttttcatgttgtgtttcaaacggacacgatcgttttgagcttgcatgcttccattggtaattaattttcgcgttgtggggtcgtggaatttcgcagtttcact

SEQ ID NO: 93102 - DNA, 888 bp, Eucalyptus grandis
  Intron number 1 from transcript Egrandis_v1_0.004500m (loc us Egrandis_v1_0.004500m.g) derived from phytozome v7.0 (c hr-ID scaffold_3; pos 26628274 to 26629161 reverse strand)
gttgtcaaggtaccttttcccgtcttttcattggacccacctcacatccgaacgagtgctcctgtatagaatcgtggatcattatttgcataagggcgaccatgttaaatggatccaattgcataaaaaacccagagaaagaaattcttagaaacttcaagtcagaggaccaaattttgacttgatgaatggtacgtgtttcaaacgattctcctagtaatcacataacatttataatcttaaaaatcataacaatctaggctgttaaacacaatcatattttttttcctttcagatgcacgaattttcattgcttgaaattaaatatgacctatgaagtgcttagtaataatctgtaaattttcacagctatcattccagatatagctagacattcttctctcttaagtttaatccgtacaattgttttacaaactgaatcagtcaagtgcaattgagtttataaacagatggtccataccgaaccctcaatatgaatcggtaaagttagcttctaaatcaatttcatctaccgatgttaaaacatccagcattattctgtatttatagacaattatttttgaatttttttccatgtaatgtgttattctaattagtaatggcacaattttgttggataattcttaaatcttctattctaaacaaagatcaaatgcttggttacgcttaggctcttgagataatgacctatcacttaaaaagtgtggtgaggtatcacgatctcaggaaaagcaaattaacttgatatgtcctctcatattgaaagtgttgccaaatcatggaattctatttactttttcaactttcttccaattgaaatggtgtcggattacttattccatttggaatatattcctccagatatcg

SEQ ID NO: 93103 - DNA, 939 bp, Eucalyptus grandis
  Intron number 2 from transcript Egrandis_v1_0.011576m (loc us Egrandis_v1_0.011576m.g) derived from phytozome v7.0 (c hr-ID scaffold_5; pos 67995610 to 67996548)
tgattgacggtagaactgtaagttcgttctttctaacacgcttggtttttttttttctctccttgctgaaaattgcattttcagcagaagtgcatttagtttatccatactatacctgtgaacactgaacaggtgaaatgtatgagatgtttatcctttcacaaatgcaacgctgcttatgtcagatgcattataatatgatatttgctaaaagggtttcagatgtgcatctatgtgcccagtataaatctttttaagataacagcaccaaaattctattccatcggtgggtgagttctcattgctatatgtcggatttcagctaatttccatgttcagcgtgaacattccaaagggatgcacctgagattggtgttggcaaataaagaacttactaaagcagattgtaatttagccattttctactaagcatgcatcttttgcggattggtgaaaataaacaagagtgcaaatgtgatagcaactagtgtgcatgtgcagaggagaatgtatggcaatttgttatgcattagaaggatctcaattatttctgcattgtgatcagcagctgtttcatgattattgcctttacattggtcctttcctttttaaattcatttaactttattgctacaaacaagtgaaaagatatagatgagacaaatagttgcctattttttcttttgattcagtgtgagccatctaaatcttagtatagctcaaatatcaaggggctcaaatgccattaaccattgaggaatggtgaaggtgtatgactaatatattgttgaagatactcaatttagagtttggaggtcataattttatttcagaggacaatttaatagttgagtgttgaataatatgaaaagcatcgaattcttgttgattaggtgctttaatgtgatcaggttgaggcaaaaaaggctgtcccaaggg

SEQ ID NO: 93104 - DNA, 707 bp, Eucalyptus grandis
  Intron number 2 from transcript Egrandis_v1_0.014366m (loc us Egrandis_v1_0.011230m.g) derived from phytozome v7.0 (c hr-ID scaffold_1; pos 22650511 to 22651217 reverse strand)
cttaacgcccagggacggtctctctcgttatccctgtaatgcttcgtctctctctctctctctctctctgctctgacatgcaaattatacgccttgcttcagaatctgttcttttttactttttttcttgtcttttttgctccgtttgtttgatttgatgggttttgggcgcttctctagtttaccagcagaagcaacatttatattggtttctcatatgcgcttgttgaatccttgatgtctcttccattcctcttgcttcagtgatactcttgttttctgtatctgatgaaatagacagagtctgctgataacttctttatgaatctcagtggaaaagcttgaatctatgttcctttccttagcttttccggattctttcgcaggcagctattggtcagtggtcaccgctcttttaatggcttcagtatctacctgttctttcccctttaaagtttcttctgtactccctgcctctagcagaaccattctcattggggtctactacatcagcctcttcatctatttgatttaatgcatgttatttctactcagctaagagaaacttaatctgtatctgccgtaagcttgtacttgctgaggcataactgcttcatggttggtttaagttgggttttcagtcaaatctgcgtgtgcgtgaagcctaatgtagtgtgttcttcttgtggtggcggtggcagttggga

SEQ ID NO: 93105 - DNA, 621 bp, Eucalyptus grandis
  Intron number 1 from transcript Egrandis_v1_0.043205m (loc us Egrandis_v1_0.043205m.g) derived from phytozome v7.0 (c hr-ID scaffold_3; pos 9145074 to 9145694 reverse strand)
catttcctgcatcgattgatactctatcagttgatgtgattttataatttgcttgatgcactctctcctatgggggttttgtcaattgtgtatttgcatattaatattccttttgttgtcaacgttcatattcagaatgacgagggtgatgcctatattcaagctttttctgatgatacgtggctgttgagagacaacaaaaactttatctcctttttggctttatcattttcaaatatgctaatagtttgaaccttcatgagtggatgagagatgagataatgaaatgaacgaccatatcaacatgaccttatagtgcacaattcaagaacattatcttgagcaatttgggaatgttagctctccatttgttgctcacttgctggaatatggcttgcgaagtgggaaaaagttggaaatgcaaattgtgaaatgtttttgttacttttgatcataaagttgtgaaaacaatgggttgtggagtagcttgcatcctgcggcatacaaatagcagaggtatatatttgattgctggatgtagtttgtttatatgatatattggctggtgtgatcgaagaatttgtcaatgacacggttgatgcggctcttgacacagaggac

SEQ ID NO: 93106 - DNA, 838 bp, Eucalyptus grandis
  Intron number 2 from transcript Egrandis_v1_0.007646m (loc us Egrandis_v1_0.007646m.g) derived from phytozome v7.0 (c hr-ID scaffold_3; pos 47323818 to 47324655 reverse strand)
tggtatgtaatgttctaattcttgttgatcaattagttagccaaattatattgcggacatcaatttgacagtccatttaatttattagagtgaacacatagggtgtaaaaagtagtgtacggcgcttacttcagtattaacaatttttgccggctcacttaagtaccagattggaaaaaaaaaagatcactaagtgtctccgataagaaatttcagccaaaaaaattacataaattttttatttaatttttttatctaatatgacatttttttggcactaaaatgataattttttaataatgcctggcactaaagtgattattatttaataacgattgacactaatagtgataacttttttacttgatacacaactttgtttaagggttgtatgctgattgggcatgctgacgagccacgtaaaattgagaaattaataaaatatggccacgtcaaaattttggtgatccagatcgaagttagcacttaagtgatctcaaaaatatatttgacattaaagtgggtgctatacataacttttggcacttctagtgtcattcttctcataatatcactaacatgtttggtttgctctagttttgatttgtttattagttaactttctctatacgattctcgtatcccaagttcttcaaaatgtcttgctttgaaaggtgaatagtcctttcttctaatttctcagtttagtatgttgttttttcatcaattccagttgatctagatgttgaacatgaatttttcatagtatctcatgatagtatcttttctcatgttttgtttggccatttagaaatctttaacaagttcaaggacatca

SEQ ID NO: 93107 - DNA, 839 bp, Eucalyptus grandis
  Intron number 1 from transcript Egrandis_v1_0.044079m (loc us Egrandis_v1_0.044079m.g) derived from phytozome v7.0 (c hr-ID scaffold_3996; pos 911 to 1749 reverse strand)
tggaagagtgtgctcccgacaaggaggcaagtgtccccttggtttctctggctctctgttattcttgtgcttgatttggagggagcgaaaggaaaaaggaacggcttttggtgttttacggcatgggttttgggtgtttatgttcgtgtatatttgtgtacgcgatgatttcgtgtctgaacgtgaaatttctttgtttatgccacacgggtcttgcatttgggcttgaattggttacattgtatgctagtattggtcggtgttctgggtttgatgtagctgagaactatttctcaactttgagtatgtgaattccgatgaagatggggagtggactttcttggtgtagtcccagttccttttgagatgggggcacctcctgtggacatttcatgctcagaaaacacagctttctttggtattagtcccatagcttgatttgtggacatgagaagcttgtttgtttatggttcttaaagctgaactgcctaattttaagccaaagagatgagctttgatgttcatggcatggtttcttttcttttatacttgattctttaggatataaggtgctttttttgcttttcatggtcatgtaaagctgaataaggaaatttcttgttaatgaaatgattatcgatgtacataaatccttttggctttttatgattgtgtcaagctgaagaatatgagttcgctttaagatactttgatgtctgtggcatatgggtctcgctgtaattcatataaggggaagtttcgacctgtttatggttttatatagatggagaatgggaataagtctactggttggaaatgaacaggtaggaaaagtgagc

SEQ ID NO: 93108 - DNA, 611 bp, Eucalyptus grandis
  Intron number 2 from transcript Egrandis_v1_0.031222m (loc us Egrandis_v1_0.031222m.g) derived from phytozome v7.0 (c hr-ID scaffold_5; pos 23051471 to 23052081 reverse strand)
ccatcgccgaactcaacagccttcggccttctcgggtacaccctcaaaaccctaatttcgaaatcccttgcacccctcccttttgagcattcgatcgtccaaaaaagctgcgatcttgatactgaaccgtgcgcgaacgagatgggttttatgggttaacgtgcttcttttacactgtgcgaagtgacccatgatagatactgggattggtttatgtgggttgtgctgattcagtcgaattgggtgttgatgagtgcatatgttgtagctgctgtttcttcagaaaatgttatttagagagactaaagaaagcttcttgctgcagtaggaatgaattcttcgtaaacggatgctttttttgtgtgaagatcattgcagaataatgtggcaatttcttctatgttccagaatagatcgaaagctgttgttttttagtgacgttgcccgatggaccagtgatttctctctttgacgtgtattttaaatttgattcacaatcacaagaaagaaacaccctctgttctttcatatttattattgggagaggggttcatttatgtctgttttcttggtcagtctgtttatcagagaaacgggaacatctacttcag

SEQ ID NO: 93109 - DNA, 578 bp, Eucalyptus grandis
  Intron number 3 from transcript Egrandis_v1_0.003865m (loc us Egrandis_v1_0.003828m.g) derived from phytozome v7.0 (c hr-ID scaffold_3; pos 75708549 to 75709126 reverse strand)
atcagctcctgtctgcctaccgtatccttattagcatggtgaagttcattttgcaagatatcatcttcttgttgttagtttcttatcatcatcttctcctccagatttattatacttgaggtgcgatcatgatccaccattctgcattaggtttggtcgccaattgaatcatatgattagcaataaccgccccctccccttccctcctccaaccaaaaaaaataaaaaataaagaaaagaaatgcattcacttacagaccagagtacctatgccagatgtcatagattttctatatatatatataagaggtaaaataagaggattttaccctttcgatcatgatacatcatggtaaaagaaaaaaagtggtttgagtcacaagtcactgaagagattttcaaccattagaaacttctttgatatgttatgaagttgaggggtaagctggactctcaatttatttgctcctcaaattgggaggattccaatgcattcttgtacaacaagaagcatgtaagggtgctggttcagatttagctgctcaaactcttggatatgcacttaacattattattag

SEQ ID NO: 93110 - DNA, 377 bp, Eucalyptus grandis
  Intron number 2 from transcript Egrandis_v1_0.003865m (loc us Egrandis_v1_0.003828m.g) derived from phytozome v7.0 (c hr-ID scaffold_3; pos 75709189 to 75709565 reverse strand)
attcacagacttactcattgagagtgaataagcaggtaatcactgactcagcatacatggaagtgccattttcctccctgggtgtgtcttgtctcaataccgtttttacttttgctactctaagctgtttgattcggagataatgacttttttagtgatggtaacactgtgataagtatcatttgcagtgtctcactttgttgtgtgttgctttttaaaaaaactggcttatttatggatttccctcgtgaagatgtcattggtattttggggactctttggtttgggctcttttctccttcatggaggcattaactttttgctctgttgttttctcctcaggtttcagtccctgctttgaaagagcaggtagcttc

SEQ ID NO: 93111 - DNA, 715 bp, Eucalyptus grandis
  Intron number 1 from transcript Egrandis_v1_0.017285m (loc us Egrandis_v1_0.017285m.g) derived from phytozome v7.0 (c hr-ID scaffold_5; pos 67532447 to 67533161)
caagaagatcaggaaaatcttgtgtgagatccctcgtgagtcccttgcctttacctcatttaattaatctgcgtacttctcttttcgtgtcaataaataatagatgtatgcatcaattctttttcttccctttctctttccataatacgtgtgttatttctattgtgtactataggtgtgtgcaaaatagactgtccgaactgggaaccgcccaaattggggactgaactagctcgcttggtgcggttcctaggagtgctggtctggttctcaattcttaaaagtgaaactagtgttcggtggtccggttccctattccaagggtgaatcggattggattggaccgacaaaatatttttgttttgattatttttattttttcaagaaaattagcaggtttaatttattgtttttgaggaaataaagagcttataattggataataacatatttggattgaagcataagatttgtttcgagctcttaatttgtttctagtcatgctttggatgacaagatatgtggatggaagcatgaaaaagaaatagtgaccggttccattggattggatcggaaaccgatcatgcctattgtatagcgcatctttacctattgctatctatgatgaatagaaccgagtgtttgtgatacttgaagctaataatactttgtgaacgcagaagtaaaagatcgaatcttcgacgagaaacaaaac

SEQ ID NO: 93112 - DNA, 651 bp, Eucalyptus grandis
  Intron number 1 from transcript Egrandis_v1_0.044004m (loc us Egrandis_v1_0.044004m.g) derived from phytozome v7.0 (c hr-ID scaffold_3; pos 5960411 to 5961061)
aagcacgacgtctgcattcaagccaaaaacagtgagtttcggcatcaattccttcaacttttcttcattgaatcaattgatataactagttagtggcccacatgtttgcatggatgtattttatgaggacgattgtggaagccatttttgttggtgaataatagctttactcgtctatacacgcatggattcacattcctaaaaaaacatattatggagtggagatagagaaaatggcataagggactaatgggtcaaaagaaagaagagacatgagtaagattaatgtgcctacgagggctcccctcttccacaatgtcattaaactatctcttcattcataagccaactttaatcactattttgaggtctggggtaggggattgtgagggagtaaatgctcttgtgagggcaatgacatcaacatctgctttttattacaaagagcgcatgtctagatttctctttctcgtggaccggtcggggacaataacttcaactaatactctagctcgtcaaatgttctaagtgatggcgatgaaatcatatcgcgtgattgttcaatttgaacttttattcatagagcaggttgtgtcgtcctcatagaaatattggaattgtgacgctgagacctggcggggtgttgtgcag

SEQ ID NO: 93113 - DNA, 683 bp, Eucalyptus grandis
  Intron number 4 from transcript Egrandis_v1_0.047288m (loc us Egrandis_v1_0.047288m.g) derived from phytozome v7.0 (c hr-ID scaffold_3; pos 3488912 to 3489594 reverse strand)
cttgtaagattttttccattcttcaacttcgctttcctgagcatgctcctcaatgctcttagcatcacagagaagatccatacttcatgagatagctaatttttttgcaacaaattgctactctactttattctttgctaaatgtgggttggaaaattgataggcatgatttcttgagctaatttggtaatggggcatgactcttttaatttcaactctgttctgaaacagagggtggacccttagattatgggatactagttcttagataagcaaatccctattggtttgttatatttcagttatttgaaggaacgagtggtgaaaattttgatgtgaaagaaggctaactttagtgatgaaagaaaagattttaagaaagtactggaatatttagaaagacatggtatgttctcttcttgaagccacattaggaggagaggggtcaaatttgaatcgaatcaatggctacttcccttagacatgcatttatacccttctgtttccctgccctgatttcagaatgttagtttgtcaatattgctgcttcctgagatgagggttactctgttccaagccctctttatcacaaatcaaggcatgattccagctgtcttctgcctcacatttctaatttttgcctctcaggtgacgagtgtgggaattcatactgagtggggttt

SEQ ID NO: 93114 - DNA, 1047 bp, Eucalyptus grandis
  Intron number 1 from transcript Egrandis_v1_0.032669m (loc us Egrandis_v1_0.032669m.g) derived from phytozome v7.0 (c hr-ID scaffold_2; pos 44937780 to 44938826 reverse strand)
aatccttcgtccctcttccttctacgacggcaacggtgactgaggggccgagcatgtcttgcgcgcgctctgctctagactaaggggccgccagtggctttagatctgtgatgcctcttgcttgctcaatgagctgggctagttcaaatcggtaagattctcctttgatcgctctgcgttatcttcctctgcaaagatctcttttgctctttttctcggtgttgtccttgggtcgcatgcagagggtatctgggtttttttccttttttcttgctttgctccatttgttatgttctttgagatgttttcttggtgggtgtcgaggcgaaggttttgtttttcttctacaatgcgaactctgatctgtgctactgcgttagcccttaaaactattcgttttctgtttcatctgctcctaattggcttttgggtaggttgtaggcagtgcaatatgtcaagaacactatttcagaccttctcatgaatcgagtggatttgtcacttttagttattacaaaggtgagaataggaggttgtcgagaattgctttggtgcagatgatttaccatcactttcacactttttacaaagaaaacatcagttagtccgcttgctgcctccgtttgtatgtttcccaatgagaatcctttcttaaggtcttgtattgctgatgataattctttcttaattcttcatgatgtaaaattcagttccttcataaaaactagggactcccctagaacatccttatgacctttaatgatctcgaattgatggcatccctttcttataaacaatcatgctcagggccccatggtgctttagtattgaaattttctctgctaattaatcgacagcctgtacatatgatatctttatccatccatagtcgaggacttacagcatgaagtcccaacagtctttgcctgccaaatataatttctatggcttttttcatactctacttatttgaagaactcctaccctatgttctttttcatgttcccattagttaggcgagctcctaggttgtttggggatctatcc

SEQ ID NO: 93115 - DNA, 600 bp, Eucalyptus grandis
  Intron number 2 from transcript Egrandis_v1_0.047398m (loc us Egrandis_v1_0.047398m.g) derived from phytozome v7.0 (c hr-ID scaffold_20; pos 149154 to 149753 reverse strand)
aggagaagcaatgtatgtttttctggattgacttttacttttgttgtttttacctactttaaatcttacaagatgcattcttttgactctttatttacacaagacacccaaaactgttataaaatgcagatgctggcacataaattcgaatataacattttcataatttttcaaaatttgaatatcataaattttgcaagaaagaaagaataatttatttttaattatttatttctacttaatccaaaacaaacgggctgatgcaaattcatattagtattaccatttaaaatcactacaaaattttcaagatctttttataaaatgaatatcactttgattttatgaaaaaaatttaatggctttctcgaaagggctcgaaccccatctgtataactctcaatattgaataacgtagcaacaattcacgtacgcatgtacgtcttctattgaaagagcataatgttctctcttctctcgagtccgtacgcatgtacgtcttctattgaaagagcataatgttctctcttctctcgagtccgtactgagtaggagtatattgcagttgagcgctggctaagtgcctcacatccccaagtg

SEQ ID NO: 93116 - DNA, 729 bp, Eucalyptus grandis
  Intron number 2 from transcript Egrandis_v1_0.047071m (loc us Egrandis_v1_0.047071m.g) derived from phytozome v7.0 (c hr-ID scaffold_3201; pos 3260 to 3988 reverse strand)
atttcgtccgggtatggttggaacattttaatcatgtctgtgactctaccttcccatttcatataatttttagtttctacataaatgacaaagaagtgcattatgttgccttgtgagtgtctggttgctttttgaccaaaaagtgtctagttgcttccaatcctttgcggggatagagggatatatgtgtttgttgatgtgatatcatgtctccgcgatatgttaaacccaagttaaaccaggtttttttttttttagtttttccactgagaaagagacaaaagttgatggttcaactggagcctttgctaaacccgtcattgtccagattacctgtcctcttcatatgggagttgatggccaaaaagaattaatatgggtgttgtgaaatgttctattttaccttgtctgtccacttaaagaatcatttaaaatatctttgtttgctggacaagaacattctctagcatctttaggtaaatcactatcaacattttcctggttggtattgcttgattttgctactttagtcattctgggagtatatatatatatatatataattttttttttttttgcatagtctatttttgcaccttccgttgtgtgatattaaattacagtggaagcatatataaatcaaatgttatgtggttattttctcacgaagcttatgaaacgttccatctgaatgtcatgtcaggttcttcttcttttctacccgttcct

SEQ ID NO: 93117 - DNA, 669 bp, Eucalyptus grandis
  Intron number 1 from transcript Egrandis_v1_0.043461m (loc us Egrandis_v1_0.043461m.g) derived from phytozome v7.0 (c hr-ID scaffold_5; pos 65479040 to 65479708)
gataacctctgtgttatcttaccctgcttccacaggtaagaacatgcaatctatttgaagttacggttagtaggagaagaaagctatagttcctgccattaacttaacttctatgcttatacaatttgagctatggtccgaacaaaatagaaatttgtggagaaagttaatctgcataatgggtgttcttagacttttatagttaaagttctctttcaaaatgacagaggagatatatacaacggtcaagatcttagaaatttgtgtacaccattatttcattcacctcaatgaagaattcaacttttagcaaattcatttttcagaaatctggccctgttttctcagaaatattattagttgcctacatcgcttttattcagtcagggatagcctatagcgaaacttgtaacatagagaatctaaagaaacatagagaatctaaagagacttagtttacatatccttgattatggaaatagccaaatatgcagaaaaattactgaggtaatcatctcaagctgaacatttctaaaaagcctctttattattatgggatggagttcaccattagtgtagacattacatctctcttcatagcctattgatattccagaatattccattaatcaagatgtttatttgactcataaaaggaacgggggataa

SEQ ID NO: 93118 - DNA, 497 bp, Eucalyptus grandis
  Intron number 1 from transcript Egrandis_v1_0.031875m (loc us Egrandis_v1_0.031875m.g) derived from phytozome v7.0 (c hr-ID scaffold_5; pos 29294371 to 29294867 reverse strand)
ccttggtaatagttatcatgtacttctcaattcttgaaaaaaaaattcacattttataatttagataaaatttgcatcttcaccttattgacctgaatcatcaggttaatcacaagtattggatgcaaaagatcttgattaaactcacatatttcaactagacgtgataatggcatgccatgcgagaatgaatcatccttataaatgaacaatagtttgaatttaattgatttccttcacccatcagctagaggaataagatttccctacaattggcttaaacgaaaaatatagttgtaatccatagcactatttacatgatcaaatacttcttttcaaagtgaataaattaatttttttttcttgaacttatcccatgctcagagcttttataaaaaaagtatacataatagagaacttgtttttcctttcctctttaccttaactcattttgtttcgtgcacgcaattcctgattaatgatgtgcaaattgcagc

SEQ ID NO: 93119 - DNA, 945 bp, Eucalyptus grandis
  Intron number 2 from transcript Egrandis_v1_0.000181m (loc us Egrandis_v1_0.000181m.g) derived from phytozome v7.0 (c hr-ID scaffold_5; pos 3316248 to 3317192)
ggtgcgcgcgctgtgtcatctcctgaagaagcacggtgagtttggtcctgacttgaatttttggatgttctatacatttttcggatgaaaggaacattgcgcgatgctctaactttgttgttggctcttttgatccttcgacaccatgtgagtcatttttactttgtcaagtgttcttgaatttatcataacagctgtcagcgcaaggcaaatgatattcactacctattagcatctgtatttgcatatatcttattgatggggccactactggtaaccttactcatattcattcagttggaaatgtagtggggctagacttgctttcctgtgagtcttctgggttttgtgctccataattatgatggattcttgaaattctgatgaatttgcaaagtaacctggatatgcactcttataatgttggcaaggtgcggttacaatctgtataagtaaaatataaggtcaagacaatctcataagcaaaatataggggataactttaactctctgtcccatgcaattttgatgatgaaaggcatgtagatttgaagaactgggtaacataaacaagaatctgcacatagaattaaaaataaattgagtctatcaaattgaatgttacctttgatgtaatgtcaacaatttcaaatccaaaatcttaatatttttggtttgtatcctttgaaaacaatgttacaacatggtttggcctttaactttgggttaacattgaagcgatgtcaattgattgaaaaaatacattttgagcaaagaatggaaggcattaaattaatttaaaactttgcactgagtgaaggaaaagaatggatggctgagaatgccacttgttcttcctcctttataaaagtcaggtgaaagtaatatataggaagaaagtgtgagatcggcttgctgactttatatgttctacaggggttactc

SEQ ID NO: 93120 - DNA, 626 bp, Eucalyptus grandis
  Intron number 1 from transcript Egrandis_v1_0.045165m (loc us Egrandis_v1_0.045165m.g) derived from phytozome v7.0 (c hr-ID scaffold_3; pos 36281795 to 36282420)
ccccatcccggagttaccagcaaattcgccgactggtgggttttttaccaagaggccatagtcaaacacaacttcagctccgtcattaaaaaagtgaaggttaacgacctttttccttctaataccaagaaacccgaagaaaactcttctcccggcactcgtaagacctaaaaaaacacaggcatcagctagctacctacatgatcagtttaatttcaatctcatgtaccaaaattttatctatatctgccttacgtgtaacaccctggattattcattcgagatattatttactttgagtcatcccatactgagttgtctctcatcctgactattactccctaccgtcgttgaactggctcgttacaggtccactagctttcatgtgattcatccttgaatcataaacccaccaaagggggtttcgcttctttatcacattattccttaattaactcacttataatatttagtatgtcctgtattcaccgttttgtttttcggcgtacatttaggcaatttctcaaaagatcaagggaagaaaattaattataaagtttttgacagaaaggtagaatatatcttttcaggaaatgaaggcacgagtgacaatatcaggagcaacg

SEQ ID NO: 93121 - DNA, 608 bp, Eucalyptus grandis
  Intron number 1 from transcript Egrandis_v1_0.029320m (loc us Egrandis_v1_0.029320m.g) derived from phytozome v7.0 (c hr-ID scaffold_5; pos 17837758 to 17838365)
gaagtatcggagtgatggtaaattatgcaaccccttataatgagctatctttatggaattcaatatgtatttttctgataagatctatgataatatttcaccgccttgattcatttcactaagaaaagtttgtgaggtaatgtttgcctgtacgacacattaaggtcagctcagaatgaaaatcaccgttcttaggttaattcaaatggcttggatatcgtcatttagtttcaacaaacggcacttgaaattttttatggtattttgaacttactcaaattaaaattcacatgtaaagtcagtgtgaagtactaagtgcacctaaatcaccttgtgtaccccaaaaaaaagaaaataaaagaaaagagaagaaaagaaatcaccttgtctatgactcagtccggaccggtccaaatgcttaagcctcaaaatccgatcggaccggtgctactagaccgtgcttgcttttgtatcgcttccctcccattttcttcgctccttcgagttcgaacctcgctcatttgccattttcgtctttgagaattcgccgcgaccgctcgaacggcggcgaagcgcctctctcccacttccgacgcggagcccgacgg

SEQ ID NO: 93122 - DNA, 941 bp, Eucalyptus grandis
  Intron number 1 from transcript Egrandis_v1_0.025672m (loc us Egrandis_v1_0.025672m.g) derived from phytozome v7.0 (c hr-ID scaffold_5; pos 67165719 to 67166659 reverse strand)
gtcgccctgtctcctcctgtggaatttctgaaaaggtgagaccaagaatttcccttttcttcccgctccccgtgcttaaagattccaactttgcgccgtcccggttcgggcagattgatttcgtcgagagccctagattttgcgttggtgggtcgattcgtaaatgccgttttgatcgacattcgtggcccctcgcctcgcccggtttcgcatttcccgcctcacgattctgggcaggcgttggtttggccgtccggcgtcttccgcggcgccccatcgaacgttttcgacgtgtttagaagctgaatcgatgaatttcatttctgggtatcgtttttgtgtagtgggtatgttgcggcgatgtgagctgaatttgcaatttgtgtcatttccgtgcgtataacgtgaaggcgcctgacataccgttattgctaatattgatcgacggttgtggtggaccgcttagttgctaatatgtcgtgtgaaaaattatactttaggagcgtgctaagctaattcctggcgtaagcttcgggatttgtttttttgggttgagctttgatgatagggtctttgtggttgcctacgccagagcataccgttatttatcgatgcatttcgagggtttagtgtttttgcttatgttttctgtgactgtttctgtctatttattaccatgtcaccacatacactcttgaaggggttctggcgttatgcatctgttgtctctggaatgcatggaaggcatatattcattacaaatgcatgtaatgtgttgaaataacaaagtacaggttggtatttagggataagtaaagttttttgtcctggtaataggatattctatgctgaagtcctgtttaaccatcttttacattcatgagtagcctggggtggctggacttgttgattctatcaatgttgatacctctttcgcaggt

SEQ ID NO: 93123 - DNA, 1048 bp, Eucalyptus grandis
  Intron number 3 from transcript Egrandis_v1_0.018517m (loc us Egrandis_v1_0.013759m.g) derived from phytozome v7.0 (c hr-ID scaffold_3; pos 62517096 to 62518143 reverse strand)
caagcttattagaaaagagaaggtgagtttttgtttttccatcccggtggccacatttgcaactcgaggatgttaagaagcagacttgcataggttccctggggactccttcaaagaagttgaacccaaagtagtccaaagcacatagggcatatgcctaggtgtaaaaatgaggcgaggtgatggctttcacctctatgtctagaggaggttcccttaacaaggtgcatgcccttctcgcctaagccatcaggtgcacggggtgcaaggtgcttgcctgatgcaaattgtatggaaaccctaaggagtctttcttttgagagagatttatccttctctttccaaaagatagacaggaaaagggactccaaaaaaattaatagaataaagtaatttttaagaagttggtgtttgactttgttttcttttaagctgtatgacattataatgtccgtgttactgtttactccatctctatggctaagtgcaccatttttttgcacactatctacactttaggtatagtttgtattataatatgtaaagtttattcttgtttgacactataaagacactattactgctaaaaagttttgctttatagtgccttgctcctctcggacttgcactttgccttccccttttcattttagccattttagggtcccagcaccttaactgcacttttgcctttgactacactggttgtgcctcgatttggttctggagaattgtctggaatttgtgttatggctggtggccattgctttacttttgtatttatttattgatggagcttttcacggtttgatttgttggtagtggcccattgtattgatttttggtttaattgttgtacttttgtagtcatcatatggttttgtggactactttgatagaagatctgctgctctttccattgtgactctcaatggaaggcatttgtaagtccagaaagaaataaagcccactttgtttgttttctttttccttgtatgttgatgatttgctggcaggtttggacaaccaatcaaagtcaactgggcgt

SEQ ID NO: 93124 - DNA, 939 bp, Eucalyptus grandis
  Intron number 1 from transcript Egrandis_v1_0.026981m (loc us Egrandis_v1_0.026981m.g) derived from phytozome v7.0 (c hr-ID scaffold_3; pos 56424244 to 56425182 reverse strand)
caagaagcagcaacgcgaaagtcccaagcttgttggtaatgtgctctttccatcttgtagattctaatcttttgatagtctctgaggcagagggagaatggtttgtccatgttctttccgctgaacccaatactgaaaacttatctaccatgctgttataattgttatcggagcacagtttgttgtccgggatgttaggcgttcgttggcaatcccgggcggagttcactggaggagtttcgaaggttgcattttgggtgtttgttgaaatgcttctgtgagaagtgtgatctttggcgtctgtgaggtgagctatggtggggatgatggggggtgaggtgatggacatggtggttggatcatgaattgtggggaaaatagttggataatagtatccattttcatgccggacgatttgctgtattctaacagaatgatggaagttaccgatatggaattaataaattaccattgattttgaaaactagcgataacatccgaaacaacctgctttccgaattttcatttcatatctcttccttttttacttggattgcttggtgatggagccctctaactgtaagatcgatcctctacatcatttttatttgtacataatatcacgcatattgaattaaccaatcaatggctaccacataggacggtacctctctttaagcaattattagtgaagcggatgcgtctttttccttgttgcttggtatatgacattaaggagagacttgtgatctaaaagtttgacttttttgtctctgggaggaacttgtctagttatcatcgtatcaaactgcgtcacttctgttgcttatcatgcacttgacaaaaatgggttttttccctgtacttgctacagtttcagaatgaaagagatgctggctttctttgtttgattgaatacacttgctggtgcacaggtcc

SEQ ID NO: 93125 - DNA, 703 bp, Eucalyptus grandis
  Intron number 1 from transcript Egrandis_v1_0.039787m (loc us Egrandis_v1_0.039787m.g) derived from phytozome v7.0 (c hr-ID scaffold_5; pos 43891742 to 43892444 reverse strand)
cggtaagggagtaacaaaatcatactatattattgtccaaaggcacgttattttctcgacttgtgatttttttctttttatttcaaagcacacgaaacaatataatcctccgaggtccttaacccaatattttcttgtcttgtggctttgtttgcgtacaattttttcatatgaaccaatgaatattctctgtagccctcgcaaacaatcaacagatgtgctacctaagctcaataaaacatttttaacaataatgatgtgtaatatattacatatggtggataagagacaatggttttttcactacgttaacgcatttctctctgggtggctcgggactatgggattcattggatctattggtagaaaaattataccatttcataattggtttaatacaaaccgcataattgaatccataaaactaaatcatgttccaattcaaaataggtcatctaaagtaattcgaaccacatagttgcatgctgccaattgaattacattattgtggcactaactgtgagtagcatgtgagaaatatttcagcataactttaatcctagtgactccgaatcatacactatcaagctaattccggtgtttattccatctgcatacatacactagccataaccaccgttgcgcttctcattttaattcttgaataggatcttgctgggcattcgcagcgactgcaactgtg

SEQ ID NO: 93126 - DNA, 806 bp, Eucalyptus grandis
  Intron number 1 from transcript Egrandis_v1_0.014078m (loc us Egrandis_v1_0.010150m.g) derived from phytozome v7.0 (c hr-ID scaffold_5; pos 58496946 to 58497751 reverse strand)
gtgcgacaagctccggggctgcctcgattctctaggtgagtggtcgacgttttcgccgcgggtttcgaatttcgcttccgtttgcttgatgctgggaacgtaggaatgtggtagaaacctgtgaattgtgtttctctgatgttgctgccgagttgaccgtggtgcctcacttgaattgtgtcaatccggaaggattatgctgtgatgcaatttgatcgcgccattgcatttgcgcgtcggtgtgcttagtcaatttagaatatatccgagtcttgttgagagagcttgttgaattgttgtggcaggctcacttggagttgcaaatggatgtcttaggttgtcttgatttgcaaatgttgtttgcttttgtggctttctgtttttatccaacatggtaccgaaggaagtaaattacaacaccccattatacagtttgttggtataaactacaagaggacattaagtttgtagttcggtgcatgcccgacgaacaggagtgatttgaggaagaagtgggagtactgcagcagtagcttttactctgtgttgcttgaaaaagttttgattttgggcaatccaagaggagtagtactctgtttcagaagttgcttttgtgttgcttgaaaaagtttcgattttaggcaatcaaagaggagctgtatggtgttagggggtttaatgccagagtcatttaagacacaccctgtttcagaagttactggtactaatttttctcttgttgcttctattcacatctgctccttttgacagaccgtcccaaaaagttgttcatactattaaatcct

SEQ ID NO: 93127 - DNA, 624 bp, Eucalyptus grandis; identical to SEQ ID NO: 92660
  Intron number 1 from transcript Egrandis_v1_0.013587m (loc us Egrandis_v1_0.013587m.g) derived from phytozome v7.0 (c hr-ID scaffold_3; pos 22115057 to 22115680 reverse strand)

SEQ ID NO: 93128 - DNA, 565 bp, Eucalyptus grandis
  Intron number 1 from transcript Egrandis_v1_0.020556m (loc us Egrandis_v1_0.020556m.g) derived from phytozome v7.0 (c hr-ID scaffold_956; pos 8803 to 9367 reverse strand)
aaggtttcgagagcctcggcgtcactttagttcacgtgagtagttcttcccgtgcgtgtgccatcgtgttcgcttcgcacctttggttctgcttcgagaaaaatcgaagcgtcgcctgccgttatgtctcgttccgcatttctgagaaatgtttttagcagtagaatcggagtcgatttttcatctcgatctttcgtgagatcgcggttgatggagtcacgttacgatttggtgtttctcttacgaacgagtacatttgtagacaaatcttccgaaaatttccatatgttatgtaatgtatagatgcatttttggtaagatgccttgttatagcattttgaagatcggtaggcaatgtgtggacgagcgttatactacggatagtagcattttgaagatcggtattaagttttatctgcatcggattatgtattcctcattttcttagtcttcctgccggtcaaaataggatttttttgatgattgctaactttattgattgtttgtccatgctcttggttatttgattctcagggagacatatacgatcaagagagtctgttga

SEQ ID NO: 93129 - DNA, 1032 bp, Eucalyptus grandis
  Intron number 1 from transcript Egrandis_v1_0.030381m (loc us Egrandis_v1_0.030381m.g) derived from phytozome v7.0 (c hr-ID scaffold_1; pos 19792153 to 19793184 reverse strand)
acctcgccgccgttctcgagtacctcgctgctgaggttctctctctctctctctctctctcaatggtcggccgtgacattgtcgagttagggttctattcttgctgtgtaattgtcccgagctcgattgagatttctcctcgaattcgtgatatagcagttggggctttttctctgcgcaatttagatactaatcttctgaggtaatgaaggttgtcttgttcaaatgcttgcgaatggaagcttatggaaatgtccttgcattggttcgccatttctgtgctatagttactgtggtcaaatggtgatttagttggtagttggtaggtttctttagatggaggttcttgatcccattgctctgtttctctgtaagggagttgacttatattctggtgggtgggttgtgagattggtcgtgttctcattgtctgtctggactgtgtattatatgtggaggcattcaactttggaagtatcataatgaatatcgtgaacttatttatggaaaggtttgggcaaaggacggtggaggcctactttgacggttcgccctcggttacttgtgcttttaggtttttcaattacactttgaggctggctttggttttgaagagcctattggaaattaaatttcacttgctaaagccaaaggttttgtttttttttttttttttgatttgaacattaaattttctttgatcccaatgtgcatcttatggacttcgtttgttcggtgaaaactttatgactgaggaaaattttttctttagagattttcaaagaaaatgattggttttcgattgtttagtggtgtatttgaaagtgagatgcaaaaagttttttcttgatattttccttgactggagtttttttttttttggttaattgttcacttttagcgaaccgaacacatgtgaatttggaaagtcattccatgaaaatcttttcccatagaaatgaacgcagcctttttgtgttctaattagacatgggcatgttaaaatgttgtaggtcctggagttggctggta

SEQ ID NO: 93130 - DNA, 856 bp, Eucalyptus grandis
  Intron number 2 from transcript Egrandis_v1_0.054995m (loc us Egrandis_v1_0.054995m.g) derived from phytozome v7.0 (c hr-ID scaffold_3; pos 9034523 to 9035378)
ccttatagtcccgcgaagttcctgtacaagtctgtggatgtggaggaaattgttcttctgtgaaagtttttggataaatgtggatgcttgatggtttcttattggtttttggaagcacatggaggttggaaattgtccaagaggctctgtaaattttgtctgttgtgacctagtggctgtgaagatatggaagttgtttgatcagtgcatgttctgctatattgctagcatgatggacattacctaatttacaattgcgttttgacatccttcgtatcatagcttagctgctccatcttttttaatttttggcaagtggttccaattgttagagagtgcccctttgcacttgttatggtttgaagagtgaaaaatcacaaccatcttggttgagatgtgttgaacagctgagatcaattgcatttcaatccaatggtaaaagattgttaaggcaccatgccctgtagggactatggctttgccccttatcagatgtgctctcaaaatttcaaatttaccattggacatattgccttagttaaaatgtgtatttctttcattattttaaatgtcttgggaagcattatttctgattttgctaaatttattgagtgcccttggggcatttgttaacaaggcctttggaaattatcttctttgattaagtacttttgtctactggcttttctgaaaatggttggcgacataatggataggcatcttttccttagtctaatgatgcatgcttttgtcaagttccttgttgaacatcaatgttggacagagactttcttagagggaaatgtgttttatactctttcttttattgatttgattatctgctataggtggcaac

SEQ ID NO: 93131 - DNA, 851 bp, Eucalyptus grandis
  Intron number 3 from transcript Egrandis_v1_0.025370m (loc us Egrandis_v1_0.025370m.g) derived from phytozome v7.0 (c hr-ID scaffold_3; pos 47567175 to 47568025 reverse strand)
gcttgctcccagatcggcactggctaagggttctggtaggctgctcaaacactcatgttacttacttcatcttctagcagggtcagacagtttactatctgtagtagtttacaaattgctttctcttgagaatatgattttggtcactaacgctgtgtgtttggaagctggtaatggtgaaaaatccagttttatgtttttccttttgtttcatgtgttgtgccttcttctgcctttgcatgcattggtttctggctagtctaactagttaaagcatttgcttattctggtgctagacccttgggtgtaaacttttaaattgggatgagagaactatagagaaaataaagaacatttacaatagaaggaacagtcaattacttctttgtaaagaaaggattatctagattcgttttgaataggcctctaggatgaaaaactatccttactcattcaatcatgaactcaatatcagatgatccacatcaaatagataaatgcatgagcttcctttaaccctgcatttgatcaggttattatgaaagcatgcacttttatcaccttatccttcttttacaccttgaactatcaagagatttgattgagatgactctcactatgtaggtattctaaaatactggctcaacaataattcatataattgttcgatgcttttgccattcaaaataaaccaaatcgaaaattctattgtgtatattttctccacctttctttgacaacaccattttgggattgtgaactgattttgcattactttaagtaccatccatagctatgtggcttgaattcaccctggctcttttttatcctgtcatttttatttgaaggcg

SEQ ID NO: 93132 - DNA, 485 bp, Eucalyptus grandis
  Intron number 1 from transcript Egrandis_v1_0.044244m (loc us Egrandis_v1_0.044244m.g) derived from phytozome v7.0 (c hr-ID scaffold_3; pos 48341712 to 48342196)
attcttcttggagcaaaagtaagtccttttgatgtttagcccttgtctacttattactctatgcttacttaagaaagaagaacctttaaaaatcatttatgttttccctctttgttccttgactcaaatgtatagcgagtgacatttactgcaattggtttatagtagtcatcttgtaggcacagtttcttccatgtcaagctggattccatttctataattaatacgatgtactctaagtcactttcgttatttgttacatgaaatattatatgaaattgtttgtttacttgacatcaacttgttgacccattttcacagtaaaaactgcaagtgttaaccatttagcaggtgtaatattcaatttctgggaattgatttttagtcgatcaaagttgtttgaatgtctcagtactcgtgttagtttcaacttatgggtcagtcactttttatttacttcactcctgggcagctgggtatcttgg

SEQ ID NO: 93133 - DNA, 706 bp, Eucalyptus grandis
  Intron number 1 from transcript Egrandis_v1_0.019697m (loc us Egrandis_v1_0.016759m.g) derived from phytozome v7.0 (c hr-ID scaffold_5; pos 19423688 to 19424393 reverse strand)
gggctgacccagcggttctgccagcagtgcagcaggtaaaaactcccctctcgctctcttctaatatcgcattccgttcacgacgaaacaaatcacgagacccaaccaacgacggtcaaacgatcgaaggggagggagcagccactacgatcgggcattttaatcaagtaccccgccgccgccgcagccgtcggcgaggcgggaaaaagacgggaatgcccctcggggaggaagctttccggcggcaaatgattggagggctgagggctcgtacgagccggcggggggcgatcccgaggggcatttgcgtccggaaatgcctcgtcctggtccttttggccttgcttaatatagtagcctccccgccccgaccgtcctttaatcaataattacttcatttttttctccctgcgctacatcagttaataaaactatttatttccgttttttctcctcttcctaggaaggaaaaaaagataaaattccacctttttgtctatttttttgttaattagttctctctctctctctctcttattttttttttttagttctttaattagttcgaattgcagaaaataattctggggaaaattcgtgggttttgatttcgtcaagcctaaagaaatgcaccgcgtgctaacgagtacgaccgacgagaaatctctatcgtggtgcaggttccatctcctcgcggagttcgaca

SEQ ID NO: 93134 - DNA, 359 bp, Eucalyptus grandis
  Intron number 1 from transcript Egrandis_v1_0.027641m (loc us Egrandis_v1_0.024866m.g) derived from phytozome v7.0 (c hr-ID scaffold_3; pos 76744156 to 76744514)
tgtctttttctgtggaggtagctcgttgacacgtgcgtgatgcttgtctgagtggaaagatttgattttgcgtatgttcttctctccaatttgattgaaatttttagttctagttatggaaccagtgggaattttacggtgatgaaccgacgtatcagttctttcattcttatcttatatagagactctgaagttttttgttaatctagtgactagacttcccttttagttcttacattttctctttttgctaatgacgacttgcactgatatttctatttttctctgcctgccccgtattctctcctgttcaattctggttagactgcaaaggagaactttgagttggctctcgaggc

SEQ ID NO: 93135 - DNA, 576 bp, Eucalyptus grandis
  Intron number 1 from transcript Egrandis_v1_0.043588m (loc us Egrandis_v1_0.043588m.g) derived from phytozome v7.0 (c hr-ID scaffold_5; pos 42366130 to 42366705)
caccatcgtaatctttcaccaattccattggttggcctaggaacaggccaattggtccagttcccggttcttggatagcatcggactgggaaccaatcacctctagtgtggttcctagtgactgagtcattattatcttcaagcgtagattctttgtaattttcctctcgtaaatgctggcacaagtatgtgttattttattttcatcttattatttgctaatcttcttatgaaatgttccttatgacgttagagttgaattcttgccatggctttgaatgtttctatttcttttgagtgcttatcagagatgaagcattgcaaaagaattatcaattcatatcaggcgaagacccttatatgtcactaagtatccagttggaatagattcccaagttcaaaaattgatatggttgtcacacaaaaaagttatccggtgacgatgttttgattctaggtctatagggacttataggcatagggaagacaacgattgtgaaggccatatgtaagctatcgagacacaatttcaagggtgtagttttttggagcgagttagggaaagatcgaaccaag

SEQ ID NO: 93136 - DNA, 1016 bp, Eucalyptus grandis
  Intron number 1 from transcript Egrandis_v1_0.000671m (loc us Egrandis_v1_0.000667m.g) derived from phytozome v7.0 (c hr-ID scaffold_3; pos 54631800 to 54632815)
gggcacagtttgactcgggcctctgagagatcgaggttcgttctttgagctcgaatcggtgccttctcttctgggtcgggcggttcttgagttgggtctttccttgatgggggatctgtttctataaataaagctggccgcgagctgggttttgaatcttgatttgcggggggtgcttgaaattcgtcttttgctcgtggagtggggtttcaactgtttttctcgatctgaatctttctcgactgtcaggaatattaactcttggtggttttcttgattcagtttgatgatttttcttgctcttctagagtgggggttcgattattgctgtcacagtagcgatttagtgagtaaaataaaccctaggaatcattttatttttccgggttaatgggtataatataatggcgtgaatggtgtctttgaggtgatatcttagtgggtttatgctcataatcaataacccaaggcttgaatacaaccttttccttcttggtggggcctatgtccagttcatgggcaaaaccctaatctggcctttgtcttgtagctgatatttcatcgtcacttcctcacatcttaacttggttggttctttctgcctgagagattttgttcgttcatggggtagaatgttgcaagatacaacttcctgcgcatttgctagggtttctactatcatttcatgagtatacccgagaaaaaagttgttattttatgtgcactttccatgtaagtcgatttcttatggtttatacaatggcatgttagcaataaacttatagcatttttcttctgttttgtaatcgcctgatgttgcatatgaggttactgtgttaatctgttctcttgaatactataatttacattgatcctctaaaaatttttctaggattagttgtttagtgagtttttgtacgatcatctggttcctattgcaatttagttctatgtatgacattcaaaattcttaagaatgcacatggcttgtcctaggcagcttgctttgaagtgaa

SEQ ID NO: 93137 - DNA, 755 bp, Eucalyptus grandis
  Intron number 1 from transcript Egrandis_v1_0.029925m (loc us Egrandis_v1_0.029879m.g) derived from phytozome v7.0 (c hr-ID scaffold_84; pos 20606 to 21360 reverse strand)
cccttcgacttcaatcgtaattcgtcgaagacgaggtattctcttcgatcgcgagctttccgctctctttattgaccgcgaattgctcgttcttggttcggttcttcaatacccagaaatcgttcgattgatatttggtaaaaagcaagaagaaatttgttctctgggtatgcttaaaagattggctttgattgcttccgctgcggtggtaggcgggtctgtgctcgcggtacatttgcgtgcttgattcttgagtaatttgagcggatatgaggggggagtgattagggagtggtgagaatgcacgaattatataaccaaatgttcgctgggtatgctcgaaagattggctttgattgctttcgttatgatgtccgtgcttgtggtgcattatcatgcttgattcttgagaaatttgcccggatatgaggggagtgaattgggagtggcgaggatgcacgaattatacacccaaatgttctctgggtacgcttgaaagattggctttgattactttcgttgtggtggcaggcgagttggtgctcgcagtacattttcgcgcttgatacttgagtaatttgcccggatatgagaggggagtgatttgggagtggcgagaatgcgcaagatatatacccaaatgttagacagcatgaggcatgattttcccttttctttgagttttttgatatatcggttcactgttgttcaatttttcagttgaatttggtggaagtcagacttcctgtagcaga

SEQ ID NO: 93138 - DNA, 979 bp, Eucalyptus grandis
  Intron number 1 from transcript Egrandis_v1_0.047565m (loc us Egrandis_v1_0.047565m.g) derived from phytozome v7.0 (c hr-ID scaffold_3; pos 3561756 to 3562734)
ttcttgcgtcaggaagtggcaataagtcgtgctttgtgtgcccatatcattagttcatttccactttcatgctaaagataagaagtcaagaattatatggttgttcttccattttcttgtaatttttgttccttgatgacgcttaaatgaatccgatagttttgccatccgattaactgcgttcttaaatggataaagcaaaaggctcctctcaaacaaagctttactcatcatgtttggaatgcatcccattgtgctgcaactcctgtgataaatgcttacagagtagcatagttgaagattgcttcaaatattttacgaactcatagcacattagaataccgaattttcctattatgatctctatcttgagatttaaaagcaatattaaatcatttttcatcttgacttgattattgatgaacacatacttcgcaattgagtttgagtgagaacgtgctgggtgaaggtaatagattgagaagcagattctttccattatcatactattaaaacaattggaatgtatttacaagccaaaagaccaggaatctacccatgaatatagtatttaaagcttttgtagattgtttatgcagatgtactgcgggaatgcttctaagtttatgttggcacttaatgtttctcgtcgaacctctctttgaagtctgaataccttgcgtcattcaggagactaacaactaaatgcaggttttgtgatggtaaatctatttatatcatgcgatatgcacaccaaattatcttgcttttttctgcagggacaaactttcgtactgaacggagcccttctcagagcaactagatcaaaggaatccgaaactttgttgtgaaggcaggcaattgttacttctatctcattcctcttgttgtgcagcattttcaaatgatataatagtgaggtttcttgcggctgtatgatgcaggagtttgggctcatacctctaaaagtagctgcttg

SEQ ID NO: 93139 - DNA, 453 bp, Eucalyptus grandis
  Intron number 2 from transcript Egrandis_v1_0.021425m (loc us Egrandis_v1_0.021425m.g) derived from phytozome v7.0 (c hr-ID scaffold_3; pos 11471137 to 11471589)
caatctctacaacgaaataggaagcaggcaatttctcagcttaacttttccctgtttgtcttagattatcattggtagttcctcgctcccgaaacaaatcatcctctatttgtaagttcaagggaatcgatactcgtttcactctcttggttacagtcaaattcatgcaagcatgcttcgaatgatcaaattggagctattgagtgaagaacatctactttttgggggaaaatgggattcacttttaatcgagtaataattacatcagaagacatcataccctggttttaagacggcgtgtgcacatacaatgacgagttgggctacagtttaaccactgtttttgttttcacttgtaattattcatatatatcatattaacatacatttttttttgtttttttttttgttttgttaggtggtctgtcatagcatctcaattgcccggaagaa

SEQ ID NO: 93140 - DNA, 859 bp, Eucalyptus grandis
  Intron number 5 from transcript Egrandis_v1_0.012588m (loc us Egrandis_v1_0.012588m.g) derived from phytozome v7.0 (c hr-ID scaffold_3; pos 7976619 to 7977477)
tttatcctgtgcggtgtgtttctgctcctccataagtaagtgatgtaatttatttttcttctcttgagcattaagtttcctatccattgaaagtaattttttaggctacttggcactgcacactgcaaaatctttccaatcatatatttgacctttcatactgcactgctttgctcaataataattgttatgataggttcaagctcggatttttctacccttttgttgaaagaagctgatttgtctttacctagaagagaggattgtgtcataattgtttcacatattcatgatcacaaaggcagaacaatgaagtttcttctaaccagtttgttatgtttcgatcaattttgtcttatatggacctttttctccttcagttcgcacatctgccagtcgtatttatttccggtcaatctgttatccaacgatcatttaagcagtttcttgttgatgaactgtgtgaaacactttgtggatattttctcaaagatgtcccaactagacaaactttcaaattctattcttgtgcttttggggaatttagagctttcccttgtgaaatcataagagttctgcacatgattggattgtcctaaaactaccgttcttttgtagttataatcaccaaaaaattcatggtgctcattatgtccaaatgcggattttttttttcccgatttggagggagaggacggggtgtggaggggaagcttttacaattttctaataagcatatggattgtgcttttactctatttaaactagtcttacgttagtcatgtgattttgttgccaaaagaaatgagaagttcctgctcaattacctcctgttgtttaccagtgttgtggcagatac

SEQ ID NO: 93141 - DNA, 409 bp, Eucalyptus grandis
  Intron number 2 from transcript Egrandis_v1_0.023146m (loc us Egrandis_v1_0.023146m.g) derived from phytozome v7.0 (c hr-ID scaffold_5; pos 19344415 to 19344823 reverse strand)
aggtacaaaagatttttcatgttcgttttatgggattagactttacgacaccgaattataacgagatccacttgctaaactcttccaccttaaaatttcttgccataggactaggtcaagtaggactaatggacaaattttttgaccgtttgcatgacttggtcttcgtttcttgcttaatttatgttcgagaatttcgtattgttttctcaagcataaagacgagaagggaaaagacaaaattttatcagtgttttacctaacttgagagatccctacccctgccctacccctgtctagtaaataatgggcttctttttctttcgtggacgcatataatgaactgatttgaatttgattttttttttttatagctgccgcactggggagagtctgagccaaaggcaag

SEQ ID NO: 93142 - DNA, 385 bp, Eucalyptus grandis
  Intron number 3 from transcript Egrandis_v1_0.016095m (loc us Egrandis_v1_0.016095m.g) derived from phytozome v7.0 (c hr-ID scaffold_5; pos 46656298 to 46656682 reverse strand)
aactttggtttcaacgcacgtctttggagcttcaggtatcaatgttgccagttcctttcttctgtctttactgtcttgctccttatagacaataaagtcaacaccgactcaaaatcaatagctatcatgtagcttcacaatgaaaaataatttaattattgatgacaatttacgactaaatatttttggggaaaataaaaatatgttttattcattaatttttgtaaaaggtacaataataatatttaggtaaaaatattctctatatcattcattttccacgaaacaaacgaagcctaagattcttcagccttatcccaactcgttgaaaataattacatgattaactagttcgttttgggtgtttctgctgcagagagcatat

SEQ ID NO: 93143 - DNA, 793 bp, Eucalyptus grandis
  Intron number 1 from transcript Egrandis_v1_0.029086m (loc us Egrandis_v1_0.029086m.g) derived from phytozome v7.0 (c hr-ID scaffold_5; pos 57687439 to 57688231)
actgctattgtctctgcttctggatcatcagacaggtaaatttgttgtattgcattcgattttagtgtctgttggagtgtctttttgcttcttcttttttccctttaaggcgatcggtcgcataatttgacttttcttcaataggaaagaccttaaatctaaaagaacattttttatatttatattttttggtttaaacacacaaaaccttgaacataagaggttaaggtctacatgtgttggcaattcttccttttggtagttaagagatcacatttgtgtaatttagctagtttttgatttttaaatggtttggttctatgaattactatctgtcgagcctaaagaaatttactcctcatggggttgctggtcattgtaattgtgctctgaaactaatctgcatctagactagttgttctacatcacctatcgttggacccatagccggtgtagtgtctgttacatgcatcagttgctcatgctttgtaattattcagaggcatcgacaaactagggcaaatacctatgtatcctatatttttggtcaaaataggacttttatattactgttacttttttaatacattgacatgcatctatttgcacaatccactgaagtaacatcagaacgtttcttaatggtttctgaaaagctgtttcatggattctcataatttgactcatgcattcagggatcgctgagtcatcttaagttctgctctaaggtacttaatctgctttggcctcatgctctcactctgtttttaggaatttgtctacctcagccatt

SEQ ID NO: 93144 - DNA, 792 bp, Eucalyptus grandis
  Intron number 2 from transcript Egrandis_v1_0.029086m (loc us Egrandis_v1_0.029086m.g) derived from phytozome v7.0 (c hr-ID scaffold_5; pos 57688282 to 57689073)
gaagaactacagggtgagaattgtggcctaatttttctggcagctagaagaaagttcttgttttgtttcagtaatagttatggtgtcatgtgataattatacatttgagtttatcatacagctgtgtcttgttcatgttattgtatctgcagttatttgctcacttacttggattgttatgtgttttgttttctcctttctgtatgtgcaaggtcataagtgggcatttgggatgggtgagatctatcgcatttgatcctagcaattaatgattctgcactggctctgcagatcggacaattaaggtattaagcttttacaattgtgctttttgatgattcctggtcttcttttgtttgtaaaatttgctgataatagatgctcactttttagttctttggttgctaccatttgctaatttaaatttctatgtatagttcttttggttagttgaacgagatcatttggttagttgaatgagttgattgttagaatcattgagtcgccagaaagttgatcactcttttctatggcagcattttgttctgaaacttttttgaagtggtatccttaattctaatgttatttcgaattgcatgatctctgtgatttaattgtataaagtacaatttgagatggaaattgctattaaaagttttgaaatagatgagcgttgacgttgcagagatgaattctaaatgcccccaactgcaatgcatgagcttatgagtcataattattaagcattttgttataggtcaaagttctcaacaaacttgcttcagctcgagc

SEQ ID NO: 93145 - DNA, 991 bp, Eucalyptus grandis
  Intron number 2 from transcript Egrandis_v1_0.032668m (loc us Egrandis_v1_0.032668m.g) derived from phytozome v7.0 (c hr-ID scaffold_20; pos 184753 to 185743 reverse strand)
caaaagctacccaaaaaactataaaaaaaacacaggtattttttttttcctttttctctgtaacagctgtgtgtctagattgagttttacttttttttacaaaatcaattatttacgatgcgcatacttttgcttattgttaatcaaactttacaacatgcaaatgtttgctggtaattttgcacataacttttgcacgactttttagtatttgaatgatatatatatatatatatatatatatatatatatatatatatatttttttttttttcagtttgcttaatccaaaacaaacgggctaacgcttatatatgtaagtattaccatatataaatcctgcaaaaataaaaaagaaaaccgtgcagatttttccaagatcttttataaatgaatatcattcttatttaaaggaaaatttccgagtggctttttggaaagggctcagagcccaatctatatgacttcccaacctttgagtatcacaacaataatccagataagcacgtgaatatctcctacgtgaatatcattcttcatcgttccaccttgagtatgagtatgctaattagatatggcttcgtctacaatttttttttaaaaaaaaaattaataccacaaaaaacttcaaattaatatgactttgacaaattttcttcaaattaattttttgattatcaaaacctctaaattagtacaccaatgacaaatttaactggttagcctctattaaattttactatgaaattattgaatttgatgacacatgatgagtctacacgaaaattcatataaatttgaggtaaatttatcacatatgtattaatttaggatttttagtgatccaaaaataagttttgggctaaatttgtcacgtatatactagtttgaagtttttcgtgatggtaactttaaaaaaaaaggaattaataagtatttattttggggcattgcagttagtggttggctctctgccaaatattacgagtgt

SEQ ID NO: 93146 - DNA, 838 bp, Eucalyptus grandis
  Intron number 1 from transcript Egrandis_v1_0.032668m (loc us Egrandis_v1_0.032668m.g) derived from phytozome v7.0 (c hr-ID scaffold_20; pos 185850 to 186687 reverse strand)
aaatcacactcccggtaatgtcatcatagtttagaattgacaaccgagtttatatcaacttgtggaaatgtgtgtgcagagaaagagaagaaaccgagggtactcactaaagaagataccctatgtgggtttgctaagttccttcccttggcaactttcgaagatcctaaacatgggtaccgcaaacttgtccaaaaaaaaacaaaacgtgggtaccgcgaggacgactattgcgtatttggggctgaggttatggtcagcgaaagtaagaggaaagaggagaccctcaccatagccaaatttccgcctcaaaggaccactatccaaaacttctccgcattgagcaagcaagctcagcgttccacgccctttaaagtcggagggtgggagtggtacattcccagaacaaaaaagttggcgaggaaatggaattagctactcgccttttgcctctttttaaatttcaggaataaatacacgagaagttctaaaatttatcacaaaaatataattaagccataaaactttgaaaaaatgggatcaagtccttaaacctgctgagttggtgcaatcgtgttttctcatcaacttcgttaaacttgataaatggaaaatgctaacaagttttaaaaaatgttaataagttttaaaatttgattatactaatttaacaagttttgaatgtactttttaaatttttagaattcaattgtactttaatcataagttttaggattcatctatactcttgtgaaaagttttagaattagttataaacttatctttgttttaactataattatcgtgtgtaggcaattaaaagtgtttccccagagca

SEQ ID NO: 93147 - DNA, 409 bp, Eucalyptus grandis
  Intron number 1 from transcript Egrandis_v1_0.038892m (loc us Egrandis_v1_0.038892m.g) derived from phytozome v7.0 (c hr-ID scaffold_1918; pos 7563 to 7971 reverse strand)
aagctgaagttggatctgctgttaaagtatgtctttcttgagactatgatgtgggtctttgttttcctttcagctccttttttgtctggaaattgtaatgatacttcagattgtgatgtgatgtggatgcatctatgtcggaactgctgcttgatttaattgcaaatattaaatgtgtaatggcatacttagtaacttgtcttacgtgattagcgtgacggtttcatgctatctgtagggaagggaagaagtttactcttctcttgttatcctggacatttcgagttaaacctggccgaaagggatattgtttttgagtttctgtttatttatatcttttttcgtatttgtttataaattagctgtttgttaaatccaatacacttctttttccctgatcagagagaag

SEQ ID NO: 93148 - DNA, 786 bp, Eucalyptus grandis
  Intron number 2 from transcript Egrandis_v1_0.001701m (loc us Egrandis_v1_0.001701m.g) derived from phytozome v7.0 (c hr-ID scaffold_1; pos 34376319 to 34377104 reverse strand)
ccccgaaggcctcgacggccttgctcattttctcggtaatagttcgtgttttcgtttatttatttattgaaagcttgtgtagaaactacaatctctgtgaagcgagtattgtttgcatctttgtcgatctgtctgtgtctgtgtgtgtgggggggtggggatcatcggtggtcttcatatcatctagaccagaattcttatgttgaaggtgaagaggatcatttatttattcacagggaaattcactgctcacggatgtattagcgacaaatctgctagaaagaaacaaggcctgtaacaaatgtaggtggttccccaaacatcgtattggtgtcaagttcaaattggtgctgattgttttattgcaaaaccatgtttctacatctcacaccttggattctcgaatcacagcatgaagcaccatcgaaagaaaaacgaaccgagatgtgtagttaccttttgtttctaaagctcatcttctcatcctgattttacaacactagttcttcgggtataaaaccttcttcatctgaaagtgacatcttcagtaacgaattttgaaccacctgatcgacttataatacctttgtcattgatcaatcagctgtaattatttcctggtcgcgtaaactaataagctggctgcttggagtttcttcgctctttttgggttctaggggcccaaactgcataacacgtgttttttcacctcaaaaagtgccctttttttctatcatatgtatttgagtcctgccttcttagtttttatatgttgttgcagagcac

SEQ ID NO: 93149 - DNA, 544 bp, Eucalyptus grandis
  Intron number 1 from transcript Egrandis_v1_0.045448m (loc us Egrandis_v1_0.045448m.g) derived from phytozome v7.0 (c hr-ID scaffold_70; pos 23061 to 23604 reverse strand)
aagcctccggcaagaattgccccagtggagccacggtacatacatacaaatatttgtctttattatagtcatttgtaatttcatttgaatcacaaaataatattgagatgagtttctactagtctatattgatctccataatactcatgttgctagagttattttgtctaagcagacttttctaaacggtccaaatttgtacaagaactctcgtagaaaagaacgcatttatattcttttgcaaaaaaaaaaaaaaatcaatattttatgaattcctagaccaatcattatgtgcaaaaattgataaagtaattagcctaaagtacaataagcaagctaagtgggttttaagaaaactatcacaattagggttttttccttcttgtcaatcaaatgtgctctcttttgcgacaattatgttttgactttgtggttatttcacacacaaataatattattttattcttaattatttgttttttgggtgcatgcacacgatcgactcttagacaatactcttcagcaactcagggaacattgtggt

SEQ ID NO: 93150 - DNA, 924 bp, Eucalyptus grandis
  Intron number 1 from transcript Egrandis_v1_0.024292m (loc us Egrandis_v1_0.024292m.g) derived from phytozome v7.0 (c hr-ID scaffold_5; pos 2563753 to 2564676)
ctccctcgcaccctccaagatcttcagatccttcggtaaattctctttctgattctgctttctgtcgttgcttgcttggcgggttttgtatggaaagagctgaacttgtgaatgtgtgtaaatccgattcggtcgatccgggtcgaagtgggtttgttgtggaagttttgaatttgatgagttgtgttgcttgagaggttcgtgtgcaataatgggcagtcattgacgcgatgcctccaattttctcgggatcttttgcttgcccttacccgctttgctgcacggttttcaatttgagtgttcattctttcagaagtttgaccggtgaagatttttactcttgacctggtcaggtcactagttgttgaaagattgtgaaatgatgaagatggttctccgctgtcttcttttatccttatggtttctgaagaagttcccatcattgtgagacgtgtttgctggaatttgtggagtgttgtgtggtgtgccttcgaaatggctgtcatttcatttggttccaccaagattggagagattggtgactgggatcttgccttgatgagcctactgtatatttaggcattctaaaatgctaaacaagtcaatgccatacctgaagaatcttacttccaaccccccaagggggtctgtatccttgtgaccttgctgtgtgatacttacaatgaagctccaagttcactctttgatgactgtaatatcggtttgttttctgtcggtcattgtttattgcatactttacattgaatatttgatgctgatgacccctttgaaggaccaaataaagaggctgcaaatttttattttgaatgctccaatctgggcaattgttatttttctgcattaattttttggatgtttgattatgcagagaccatctcgagggctacacaagcgactacaccc

SEQ ID NO: 93151 - DNA, 682 bp, Eucalyptus grandis
  Intron number 2 from transcript Egrandis_v1_0.000852m (loc us Egrandis_v1_0.000852m.g) derived from phytozome v7.0 (c hr-ID scaffold_5; pos 5307022 to 5307703)
agaagtacttcgaggaatccagatatccgatcgtgagtgatgcttgtgcatggcatttaatttttcgtcttcggttgagttcatgcacgacaattgccggttccttgttatttatttatttatttagtttttcttccgtttgatggtttcctagattatcggttggagtaagtcgtttggctcactgtttgctacatcttctcggtggctgtttataagccttgtgcattacctttgttaaggctgcctcgtagttttgtttgaatgtctagggaatataagagagtaaacaaacgatgtgtgtattattgtgctcgccttccaattagtattaacgataaggtttctgtccaagttcaaagtttgctttagggtctaatgtgaaaatgcttctagaatgccaactgctgaaagccggaacttaactaactgtcgagcaggaaatggtagtgggctattgatgaggtaacatgatatagcgaaacccaaaaagattattggtgtactgtgaggcactgagtattttcaaaaacaaaattttataatttgcacattccgagtaaggcgttgggcatttagtttaattgcttgctcatctctttcttataatttttcctaaaagtttatacaagtttctgtgtaagcagattcactcaccatcacggaattcttattttctcgt

SEQ ID NO: 93152 - DNA, 858 bp, Eucalyptus grandis
  Intron number 2 from transcript Egrandis_v1_0.009609m (loc us Egrandis_v1_0.008292m.g) derived from phytozome v7.0 (c hr-ID scaffold_3; pos 8420646 to 8421503 reverse strand)
ccaggaggttggcttgcgaagatattcggtggacggttagttcttgaggccttgcttgaatcgcattgattttgatcaagttgtgttaatttcatcagcaaatcattgggcgcgttttcatctgggaaacagaggaaaagaacagataacttacaaatgaatgctaacttcctaaagacttatgctatttgaaattaatccagtctgggggtagcattgcaattcaattgtcattaaagttggctgaggcacttgattgcgcttttgctgttcccatcaagaaatagacctgactaaatcttcttttggaggagaaggatggatcgcaatggtgccatacgtgtcaactaaagttagttctgctagctctgcatgctaatacctagatcaattttaccttctgcctagtgcattttgagtggacaactgttcaattttatttcacaagctctaccatagattgacaactaatgaaactaagtgcaaacttgagcttatgtctaactgagacaaactttcaaattcttttccttataactgcggccttcccaccttttgtttttgaggctctcttcagccgacttgcctactggtttcaactttgttctcatattttgaaacatgtttcctcaaaccctatcagccataataactaacttcattgttttttctatgcacgtgacagtgaagctttgatagaggctatattgtagatccacaatgagtgggatgagggaattctattcttattggtaccaacctatgcaatgatgcaccatccttacttgctaattgtgtttaacttttttctttaattgtgcagtgaagttcttaagtttggggtattggtttggtcat

SEQ ID NO: 93153 - DNA, 314 bp, Eucalyptus grandis
  Intron number 2 from transcript Egrandis_v1_0.020669m (loc us Egrandis_v1_0.020669m.g) derived from phytozome v7.0 (c hr-ID scaffold_5; pos 25568998 to 25569311 reverse strand)
gcgaatcgaagatcgactgtttgatttcgcaacatgtaagaccctttttctcctttcctatttcaataattttattttttgatggtttgattagggttcttacacttgttctgggatttcaagaaaaaaaacccagaaaacattaacaatgtcggctctgttcccggcgaagaaatattaaattttcacgaattgcgtcaagaaattacttattgttgaaagggaaataggaaaattagaaatttcctgacaactttcctgttctggacgtgtctgcagacacaggcattcgcgagaaaactgaaggagaaaga

SEQ ID NO: 93154 - DNA, 957 bp, Eucalyptus grandis
  Intron number 1 from transcript Egrandis_v1_0.051375m (loc us Egrandis_v1_0.051375m.g) derived from phytozome v7.0 (c hr-ID scaffold_5; pos 43661863 to 43662819 reverse strand)
aggtattgatattagatacagcctcgctatatattgtttatccatctcaagagatcatatcaccgtatatgcacccgcacccatttttatcttcatttcacttaaatctatagtattttccttatatcttttatttatgcattgaagaaatcgtagtttttgtatattgtcatatgatctcttttgtatagactatatataaagatataacaaaagccctaaattagggatgattgaggatgcttaaggcaagcagagaaaatatgaaaataatatcaacaatatcttaattagatacaagggataagattgttgactaggaacgttatcatgcataaccagcgtcgaacgaaatagtgtatcttctacctctagtctatcagtcgcattttccttctttacttagaacggttcacaaaattgatttattcattggtattgaagttttttcaataggtgttgaatttaaactaattgtttacatcacttggcgtgcaaatttgaaagatcgatttggataccctttaccattgttcagaaagaagaataatgcttggacttcgatcacgcctaacggcataatctatgattaagactttgtttgtttcatggaaaatattttccagcatttacttcttttaagaaaacgagtcaatggaaaacgatgcttaaatccaaccaaaaaaaaaaaaatcaaacaagaaattcaggaaaatgatttcctctttgaaagatcagaaaacatttttcaaaatatgatttggtattggtatgggtcttcggcacacaagcttgagttcttgtttatgaaacgttcattcttataaaaatatttaaaaatttgaatttttatgtttatttttttgcttcattttggccaattatgggccacagcaacaatcatcaattggccataagctagcttgagcttcaccaaaggtcaacaagactcgagct

SEQ ID NO: 93155 - DNA, 730 bp, Eucalyptus grandis
  Intron number 1 from transcript Egrandis_v1_0.042686m (loc us Egrandis_v1_0.042686m.g) derived from phytozome v7.0 (c hr-ID scaffold_3; pos 36273913 to 36274642)
tgggatccatcgcagggttgctgagtaatcggtaagtgtaattgagtaagttcgattgagtaaccaagcatccaaataaggtggcgcttacttcaatttaagttaatctaattagactaatgccgctaggtgtatcaatacctgatgtagctcactctgatctggtactgaatatgatccgcttgtctacattcttactcccagcttgccacgttactttttttcttgttttggtcggtgcttgccacgttacttaatgtttcggttttgttgataaatttcagtgctcctagcgttacacatatctcataactcagtttttccatgttggatcactgcattaaatgggaggcagcggttatagttttgattttatgtcaatatggtccaggagaatgttcttcctcttgcaatctgcatccacaggaaatctaactcttgcaagaaaatgccagtgtagagtagtaccgatttgcttaatttctgtggatgcaactgacaacctttgcatctcatcataccgtgctttgtctgtgttgatttagcaaaaacacgtgccgctaattgcatggcctgtttgtctaaagccgatcgatgtataatatttttcaaaggaaagcgtggactttttcttgctaactacttcagagttcagacattgttggacttacattaatctttgtgcgtgtgacttgtgcccatgtgcacgcatgatacagctccggcgcag

SEQ ID NO: 93156 - DNA, 408 bp, Eucalyptus grandis
  Intron number 1 from transcript Egrandis_v1_0.011113m (loc us Egrandis_v1_0.011113m.g) derived from phytozome v7.0 (c hr-ID scaffold_3; pos 54573641 to 54574048)
aatctgaccagaccggttatcaacacgtctggccggtaaaggcatctgtttttgactcggtcatacttatgttaagcgtgatctaattatcttgtctggcttacataaaatgggtttgtctgcttcatgtcaatcactgcttcatgacttctcgtgcttcgctgggtttcgggttctgaatttgttttgtgcattcatggtttgatcccattggcattatttgtgtgggatccagatcttctttagtcttgtctccctctgtaggtatctctgaaattgtttaaataatgggttttgttcccctgaacgtgtccctttgttttctttaccgaatgaagttaaaaatgaacgactttttcatatatataaatctgaactttgtttttgttaatttttcatcaacaggaa

SEQ ID NO: 93157 - DNA, 761 bp, Eucalyptus grandis
  Intron number 1 from transcript Egrandis_v1_0.044435m (loc us Egrandis_v1_0.044435m.g) derived from phytozome v7.0 (c hr-ID scaffold_19; pos 278743 to 279503)
taagagaagtggcgaagggaggttggcttataaactcgacaaggaattgctcatatatgttgaagatattggaggtttggaaatcagtgaaaaaaaatcgaatgtccttttaatgacgtgcataacaaaatcaattgtaatgtatgaaaattacgtaaaacttgtgtttttcagttggatccaatgcgaatcacattatctctggataggtgactggcataatttatcagaggaattttaccagagtattggataattttcaagtagggcttgacaatatattgtcaattttccgttaatctaggagactttattgatattggtaagcgtgggagcctaagttgccttgccgtgcactttgaggggtgcgcctaggtcgctttcttacgcgagaacagcttttggtatccaccttctttttatgtttcttttttttcctctacttttgcttttggaatgtataaaactgataacaccctcccccagattttcaatacgaaaggatcatcttcacccatcaggcatgagctcgtgaccagtcagatcaggtaaagacacatggtgtatgtctaatagctagctaaaatccggtattatgagttttcataattggctttttgtttataattccttgattccagggaataagagcaaacggaagggtggacagatgaaacaaaatgaagttcccaggactttttccatgacttgacatgaactattgaggaagaagaaggacaagaaagagactcgagctgaga

SEQ ID NO: 93158 - DNA, 427 bp, Eucalyptus grandis
  Intron number 2 from transcript Egrandis_v1_0.019497m (loc us Egrandis_v1_0.019497m.g) derived from phytozome v7.0 (c hr-ID scaffold_3; pos 13755028 to 13755454)
gcgtgcagggccacacccagtgcatttccgaagcggtgcgtctctactcttgtgcgctctcccgaaaagatgctttttttttatgctattttgatcgcgtagttgtttgagaaacatcttcgacgatcttattagcttatgtcgaggagttggattagctcttgcagagcgttctgcttgttctgcttgcattcttgttcttaaatgtctcctcgtttcgcgtttctgcccaggtttctttgttggggttctccctgctcgggctcattgagatttctttgttaccgataaagttgcggagaaaaaagagtagctttgatgttgttagaactgtggaattcctcttgttgattttgggttaatgaattttttccttttcgaagcacatgatgtgaatgtggttggtgctttgatttataggagaaat

SEQ ID NO: 93159 - DNA, 1027 bp, Eucalyptus grandis
  Intron number 2 from transcript Egrandis_v1_0.014332m (loc us Egrandis_v1_0.014332m.g) derived from phytozome v7.0 (c hr-ID scaffold_3; pos 12190449 to 12191475 reverse strand)
ttttgcatttggctgctgccaatagacaaactaaggtatgttcatacaatcaagcctttgtactagtcaaattcagtgagctcatcaacaaaaaaggcggttctagatgagaaaacgacatagataattcataaattttagctcaatatgcaatatcattttttggtcttttaatttaatcgatgtggtccttgaactatttataaatattcaatccaatccctaaattttcaatttattcaatctagtctttcaaatttccataacaaagtcaaataagtcttttggtgctatttacaacttattacaaatacactagtacccagattttggattttttttttcattttagtcaatttcttaaataaaaaaaatacttgatctttttgttatctttttaccattttaatttttacaaatattgctttagttccatttaagtttattttaatttgtgatctctataatggtaagcatgttagagttatattggatacatacattctcaactttaaaataagtattttcataagaatgtttaaaaatgatattcatttatcaataaatttctcatatttatattaatctaaatctcattttaattttttagatagactaaaatttcaagattttgtgtttcgtgttttcttagttaaatttagttaaatttgcaaattaggaaattaagatagcaagaacatcaatccgatacaactataaatgatgtcctacttttgttaatatagagattataagttaaaatatgtttaaataaaactatcataatatttatgaaggtcaaaaaggtaaaaaaaagaagaagaggtaataatcatatttttttgttgatttatgtaatggactgaaataatttctttttatctaaaatccaaccaacagtgtaattaagaaagcttttgactttttttaaaggaaaattgagatactggatcaaacaaattaaaagttttgggactgcattgaacatttaggaatacttcaagtaccacattgaacgggttaaaaa

SEQ ID NO: 93160 - DNA, 456 bp, Eucalyptus grandis
  Intron number 3 from transcript Egrandis_v1_0.027402m (loc us Egrandis_v1_0.027402m.g) derived from phytozome v7.0 (c hr-ID scaffold_3; pos 16691732 to 16692187 reverse strand)
acctcactagcgtattaatgtctcaagtttgatacaacaattaatgcaagtgttttatacttttgtttagagggatggaagcagggttctattatttaggttttagaatgacttatattcaaggttttgctttgatattgctgaatgccatgtaattacgtgatctgcttagaggtagtttgatatctttatgttttctggtgaagataacttatcatagaataatggtgatggagcatataaacaaagtttgtggaagtcctggattgaacattatagtacttaggagatggtgctcatatatttgcttcaatgaagtacctcaagtggaaaggcttattgtagaacttattctcccctgataccttttttgttaactggtagcagtaagggatcatcttaaccaattcaagttctttttccatggcttcaggactcatttcaacgagccaaaaa

SEQ ID NO: 93161 - DNA, 637 bp, Eucalyptus grandis
  Intron number 1 from transcript Egrandis_v1_0.027402m (loc us Egrandis_v1_0.027402m.g) derived from phytozome v7.0 (c hr-ID scaffold_3; pos 16692481 to 16693117 reverse strand)
cccgagcggggaacaagaacatacaagccaagctggtgggtatgtctttcccttttcttgttttttcggtctgcgtgtgtgtcgatgattctctgtcgagttttgaatttagggagtggggattttgcatcaatcgagtgtgctgctgctgtatgttgcatagggtgtgattttatggagaaaactccctaaatatttgtgatcggttatgatgttgagcttctcgaatgattcttgattacgctcgagctgccacataatactgcatggcggattgcttaaataggaagccaattcttggagtataagttccgtggatgaaaatttgtcgactgcaaccccaaaaggaatgtgcttgctagcaatttgttatttgaaatgggtgtttatttatgcctagtagaatgcagcttttcataatatcaatgttggattactactcgttgtctggaatttcgcctggtaagaaagatgtctctgagaagagcttgcttgaatctctttctcatatatgcattgaactccttgctggaaataagcattgacttctgcttattcaatgacaatgcggaaaatgggaggaaagttctggattaatgacggtacgtaactcttgtcgtaggtacttcttggggac

SEQ ID NO: 93162 - DNA, 508 bp, Eucalyptus grandis
  Intron number 2 from transcript Egrandis_v1_0.008184m (loc us Egrandis_v1_0.008184m.g) derived from phytozome v7.0 (c hr-ID scaffold_5; pos 57805662 to 57806169 reverse strand)
aagtaagttgaatatctggttattgtatgttgatttcgatgctcatattcattttcctccaaggacgtgatcagttccttttcattttgcacgtgttgattgactggaattttcctctgtcttcttcaaatagcaatgaacaaacatcagaaatttacaatataccgtctgacaaacattgacatggattgtccaaacttttgcatttgtgtcgaggtcccggctataggaattgtgtgtgtgattatctggcaagtcaaataaactaacataaatcaacatgcattgtccacactgttggacatgtcgaaaaaatattttaggtacatactacatagtgagataaggttaaatttcatttctccaatgtgatggaaccaaagatgcactagtaatacatgtcaaataacactaggcgttgcaaatctgccacattattccctttttgtgtgtctcttttgctaaatctcgttgcctattgaccaggtgtactgtgaaacctttggca

SEQ ID NO: 93163 - DNA, 593 bp, Eucalyptus grandis
  Intron number 1 from transcript Egrandis_v1_0.009941m (loc us Egrandis_v1_0.009941m.g) derived from phytozome v7.0 (c hr-ID scaffold_3; pos 11893042 to 11893634)
cgtccaaggcggcgatcccaccggctccggcacaggtcctctctctctctctctctctctctctcggtgttgaaatcaaattgcagggttttgagcaaaacgaattggttcggtagggttttgttgatagttgttgttgctggtgatggctggtgtgttgttgctgttctattgcgtgagttcgtgtgacggtagagattggatcggagtctgaagattggggaacgcctggggcaacagcggggtgctgattgtttagctcggtcgagagcggtttttcagatgtgaagtttatttgcttgttcctgtagtggaaattgctggaaatgtatctgtttttaggtgttagcagtgtcaaattggattgctttggcggccggtctatttacttctgtgaagcaatatgcttttgtgattaatgaaatggattttggacctatacgccctggttattcagggtttatgtcgcaatgcgccagctggatcttctaggctagaagtgcgctgcatttgttggttggatgagaaattccttgtgatggattttccactgagatcggcaagtgtggtgatttcaggtggcgaaagtattt

SEQ ID NO: 93164 - DNA, 1031 bp, Eucalyptus grandis
  Intron number 1 from transcript Egrandis_v1_0.013913m (loc us Egrandis_v1_0.013913m.g) derived from phytozome v7.0 (c hr-ID scaffold_3; pos 17565110 to 17566140 reverse strand)
cagcttcaccttcagcatcggaggggaaagagaaggtcagtcaaattccacccatcttgcagttcttcaaccatatcatcttgagggttcattgccttttcgtttgatctcctggccgtgtctccgaggcttctcatcaatgtcttttttctgtctgtttccgcgttttattgcttaaagttcaatcctttgacgtgaaagttgaggatttgaggatttgaggatttgcccaaatttctttgactctggtttcgttgctgtgacagcagagggaaacaatggagctatgatcatgacttgaataatttcttcgttggcattttgattgctatacaggcccatcaagcggagcagtcatattttgctcgattgagttgtttctctttcccaacatctgcaaagtcataaattttacaaagtgggattctctctcttggattagattccaaccaaacgggggctctgagaaaatattctgctaattgaaatttctttgcttggatatgtaaaagtttctcgtccttttcacggttacatggagatgtttgttgtgagtttttccgtttagatgctctgtttgatcttcgggcaaaggaaatttttgatgggtgaagcagagacattgcctggactttgtcagtctcgattatttggtgttatatccagtctttctgtcctggtacagttttatgcattgcaagtctttgtttttcttctgatttgatcttatcttgatggtagcaaatttagcgtctgcgtcctttactcgaggggactctctggataggtcctcttaatgtcatgtgtctttaatcttgttgctcttttgatgccttctgttcttggagtttgaaacgttacattttcttgtgaatgttaatgcttttagttttatgagatgcatgcttttcttaagctctacttccctatgaattcatgtccttaagagtgcgaagctgatgttcgtcatctcttctattttgattcttatgttagtcaacactagcttcttgggagtggcatctgacgga

SEQ ID NO: 93165 - DNA, 1050 bp, Eucalyptus grandis
  Intron number 1 from transcript Egrandis_v1_0.000578m (loc us Egrandis_v1_0.000578m.g) derived from phytozome v7.0 (c hr-ID scaffold_5; pos 3011635 to 3012684)
gaaacacatccgggtcacatattgtcaatcacctggcgagtttgcttgcttctctctctctctctctctcttttcttttttcctgcggttttggatagtttacgaaatcggtaggtttttattctttggccggataagcaatagagttccagcgatgttgggttttgctggttgtcaatagctttggtcaaataggtggttgaagtgaacttgggttttaacatgctcgtgcgtgaaattcataaaaggacatacggatttgtttttttcacagataggaaatgctcaagaccgtagcttaagcaggcttctagtttttgtttttgtgtcaatcatttggaattcgttaatagatgcacttggaagtcggaaaggaacaacaggggcaagcctttacgtctctgtactgaagcattttatcgagacatcttgttctatcgaaaggagaaaatgttttgaggttcttatgagatgaagatataggtgttgaagttttgtttcattgagatttgggttataaaataaggaacttagcgttcattgccattggctgtgtacatgtatgtcttttggctgttaatcctgtcagtcagtagaattatagtggtcatgtaggatcaaagcctgggaagctgtgtggtccaatcaattaattgtagattgatgcgtgttttttaccctttttcctaagatgatctggaaacaatatttttttggctgttgggtgtcggtaagctatggagcttttttgtcctttgctatttctagttctctagacttccaaaattttgttttccatctactccatctacttcaataagctgaaccaaataggctctaggtaaagtctgaatgttgccaatgaattgaatgatataagtttcttctggttaagtttttgctgcacaatccagtaattttgctgctgacttgacggatccagataggttgcccattcagctacagtttcagcttttgtttataatttggcattgcttcattggttctcctgcaggtcagagcaaagcacaaagaagtttgccttcataa

SEQ ID NO: 93166 - DNA, 934 bp, Eucalyptus grandis
  Intron number 1 from transcript Egrandis_v1_0.042510m (loc us Egrandis_v1_0.042510m.g) derived from phytozome v7.0 (c hr-ID scaffold_3734; pos 513 to 1446)
tcctgtctttttagtgtctatagttaagagtacaagtgtgcaaagaatgtattcagccattctttcttcaactaggaagtttatcggctaccagatttaattgggagtagaaatgaagaatgaagcatgcattgggggaaaaatagcatttgaacatgtttagatatgttgtggccaaaaaacatgttaagatatcggggataattacatttagcattttctattggggtagtctcactttacatccctaatgtcaaatataacacttaacatccttgaacctgttcgagacattttactttaagtcctctaattattttcgtcaaccaactgtaagaataagttgccaagtctttacaagattgtctttataatgtatggaaacactgcagaattacctttgagatatttttcttataaatgaggcataatttagctaaattagttcaataagtcaattcttttctctctatattaggttgcactttctcttcacccaaactctctcttttggtgattttctctctcctctaaaaatgatcaaatctcagttaattagaacagttattactgtgcatgcttaataaattttccttcaaaattgaaaaatataaggtttgggtttccctttgtatattggtaaaatcttactgcataatggattagaaatgtgaaattcatctctaggggtaaaattatatatttatttgggagaaagtttgagaagtaattcagttaaaaagttctgagccatgattgaatggcaccatttagtgggtttttctattagactttcttttgtgctggctttaatttttgaaaatttttaaagaagtgacagacttgttcttttttctcaatgttgtgcatatagatcttaatcatagacaattttgcagcaaaatctggtgtcgaaccctccagttgtgtggag

SEQ ID NO: 93167 - DNA, 886 bp, Eucalyptus grandis
  Intron number 1 from transcript Egrandis_v1_0.050061m (loc us Egrandis_v1_0.050061m.g) derived from phytozome v7.0 (c hr-ID scaffold_3; pos 73882811 to 73883696 reverse strand)
cggctgtcttacacggcaaactaggtaatttctactcttcgcaattctcagcatcattcgcttacgagacctcacgcaatcaaacaagtaatgatttggcataaatgggtctatgttttcgcgttcacgacccaataaaattcgtattacttgctgaacccgttcagacacgagcccacacatctaaattaaagtgctagtgtgttggctttttaaacaagactaagttttaacaccttatactcatctccaataacatttttattattaaaagattataaaagtaagatccattttaaaaagaataaagggcgtgatgaaaacacattagggatgcagaagttatacaagatgacaaagggtaactcattaataaactctagatgtaatgtgaagtggaacaacggttatttatttaccagcgtgttaaacatgttaaattggcatatcacgtataaacatgtttagctttatgatgtacacattaacaccaaaggttaacgtatatttgtagtgtaaatacatgacataatgacatagtttgataattatgttaattgtatcatacaacttgctttattaggtttgtcgtgttcgtattgaggcaattcaatacgtttattatacttgtcatgtttggattaatcatattcttgatatactcctattttgatatgacataattaatacgacacaacatggattgcctgccttacttttttcccttgccttgttctttgattgttatattttgttccatatgaaattaaatttcccgttaccatctttttaatttacgtgttacaaataagcatatcatctatacataatttttttattttgtaacctagggcatgagcatagaggtctgattacctagaggcca

SEQ ID NO: 93168 - DNA, 393 bp, Eucalyptus grandis
  Intron number 1 from transcript Egrandis_v1_0.002322m (loc us Egrandis_v1_0.002322m.g) derived from phytozome v7.0 (c hr-ID scaffold_5; pos 55775631 to 55776023)
acaggtacgcagaaatgttatgcattgctttgcaattgttagctcgtgattgtttgttagatatcaaatcgtatgtatagcttcgaattgccgaaacgatgcatcaagttctttgaattcgcagtagacacaaaagtcaaaataccaaaatttgaagctcgcagaaattttagtcttagataagtagcgtggttcctagtaattagtgtcttcaggcgcaaattctttgtaattttccttccgcagacgttggcgcaggtgtgtgttatttcttttcattttattatttattaatcttcttatgaaattttacttgtgatgttagacgttgaattcctgccatggcttgaaatggtaaaacatgtttctatttcttttgagtgctcatcagag

SEQ ID NO: 93169 - DNA, 822 bp, Eucalyptus grandis
  Intron number 3 from transcript Egrandis_v1_0.002307m (loc us Egrandis_v1_0.002307m.g) derived from phytozome v7.0 (c hr-ID scaffold_5; pos 17633787 to 17634608 reverse strand)
gcagacgtcccaccacaacccgaaagttcgtcgtggtaacttgctgctttcccaagacatctttctttatgcagtttaatgctctcattagttgggaggatgcaaataatggctttggattaagagggaaacttttgtgctaatgtggatagcacatcctaacacactgcggagctcctttgataaaaggcagattgaaacatgtcaagattattctgtttacaattatctaagaatcaatgaagtgccatctagggagagggatacctagtgattgaatcaaactttagaacctgaatccagctgaacaagacttttgccattgtattcaagtggccactttggaatggtagaagtgaatcgcttagcatttcttcatgaaacatgtatagttattggagtactcctgttgacgttgatgtcaagtctgcttattttttggcattgtttcattgaagtttttgttgtgggtgagtactcctcatggagtgttgtactgatttgtctcacgtgtaaagaatgagataagagattgtttgagaatttggaatcttcagttttctagtcttttctgggctttggtcttcttgttctgattctagatattcttataatcttttccttttgcttggttttgctaggttgttttcctatatttttgtctttgtacatttctaacgtactacaagttttctctttattttttaatatctataaacaactgtaacatcataattagctcatgagctacttgattcttctattatctatgtttatgtattatctaatgcttatctcaatttacatttattgttggtatag

SEQ ID NO: 93170 - DNA, 506 bp, Eucalyptus grandis
  Intron number 1 from transcript Egrandis_v1_0.004573m (loc us Egrandis_v1_0.004573m.g) derived from phytozome v7.0 (c hr-ID scaffold_5; pos 5707399 to 5707904)
ggtttcgcgggtttccaaaaaccagtaagatcatgaatttttgttttggtttgggaagtttaggaattgctcctcgtgcatttgcttgatgtgacggtattgtcaatttctggacttgacagtattgtcaatttctggacttggtgtgtggtttattgattttacatgtgaatccttgtgtgtctccgttttgcattgtacttttgaggtctatatttttatcactctgatttaaatctccagttttgcttaatgagcacttattcgcctggtttgtgcccagcacaagttacagattcaatgaaaattgtctctgtgtgagcttcatatcaatgatgccgatgtagaagttcatattcaagtcctgtgaaagtattgcacgacacttttctttcgccttcctctaaattctgatcttagcactagattgcactttgctcagtggaaagtttcgggtttcttctttgaagttcacaatgtgatccttttatttgccgtgcagaagt

SEQ ID NO: 93171 - DNA, 912 bp, Eucalyptus grandis
  Intron number 1 from transcript Egrandis_v1_0.020010m (loc us Egrandis_v1_0.013990m.g) derived from phytozome v7.0 (c hr-ID scaffold_3; pos 76199986 to 76200897)
ttagctcacctgtgacgttttcctatctctcgaaggtacggggaatgcctgcattttctctctccaagtttccattttttttccgttgttctgtccgctggccgaggtgggagaaacccatttgagctgaaggtgggaggaggacgttcttggcgtcatcatctgttctgggttcgggtttttggcccttgtctagctttcttgattgttgggtatcgattagaatgcggcatttcgatggattgagatgattttcacttgatctgttctctctttctgtctctttctttttccttccctttgtttggaggttagatctgctgagttttttgggttttgtcccgcgttggtgttgtgaatcatttccgcaatttccggcgtccggttgattggtcatcttctatataccgtgtcgttggtagatttgcgccttttttgtggacactgatctctgtgagttcttatgataggagagaaatgggataacagagggaatatgttccatgtggtcgaatttaaatttgaaagcaaaactaaaaacgataatagaaaatttgagagggagccgaagccaaaggtcgtgtggatctcaaaaggtccgttctcggtgggtgcttgagttttttttcggtgatggtgtttatgaaattttgaaatttggtttactagtttgagagtttttcctacaattgttttgttttgagttatatttactcacgagatgctttgattggattagcagcataattattggtatcttgttctagaagaagttggcatcttgatatatgttctcccactgattattttgaaaaaattcgagttggaatatctaacgtattcttgttccaattgttgattgttgactttcttgcagagggattgtgccggtatatacttagtctgctgagg

SEQ ID NO: 93172 - DNA, 987 bp, Eucalyptus grandis
  Intron number 3 from transcript Egrandis_v1_0.020010m (loc us Egrandis_v1_0.013990m.g) derived from phytozome v7.0 (c hr-ID scaffold_3; pos 76201780 to 76202766)
gaggttttggtaaatcgctaccctgcctggtaagcagccactgtatttgattaattgggctgttggactctcactgcatttgtggctttcgatttcttggaacagccttccctatcaatctggttttgttgtttgaggttctagtgggttgtttctagtttgtatcttcttgttgtggagtgcgctatgtccttattgtggagggcaatagtgctagcactgagatgctgctgcatttacactgaaccggttgccttgatgctatttaatgctttaaccataccagtaggatacaacgctttagaatgaagtgggattctaatgcacatgttgaaaggttaacactgaccattttagcaccaagaagactttagaacaaagtgaggctctaatgcacatgttggaaggttaacgctgaccattttagcacccataggtggcagtgtcctgatagagttaaaatttatttgaaatgtggaattaaattttgaaaattacgcaacccatattttgctgttcttgtggtttttcacattttaattcctaaagaaagaaaaatgaaagagacgagtcttcaacctctcatgacaactttattttagatttagcagcaatgatattctgcagtgaagtatgtcaaattaagttagcttattgatgtttttattttgtcatttcatgctgatgcttgctcgaggaagttatgaagttgctggccaattctcaatatttacttgttgacctttaatagtgcaacaagatcatgtaatagtattgaaaccagtggtagctttatactattttagcagtttatgctcttatattagcaagtttccggccaattctcaagatttacttgttgacctttaaaagtgcgacaagatcatataatagtattgaaaccagtggtagctttatactattttaggagtttatgctcttatattagcaactgatggggctatgtgcatctcaattgcagggggg

SEQ ID NO: 93173 - DNA, 460 bp, Eucalyptus grandis
  Intron number 1 from transcript Egrandis_v1_0.044751m (loc us Egrandis_v1_0.044751m.g) derived from phytozome v7.0 (c hr-ID scaffold_17; pos 242985 to 243444 reverse strand)
gtagacattggaagtggagaaggaaaaattggtaggttccaaagttggttccaaggcaaatgagtagatttaagtttcaaaaatcagggactgatcactcctaactcatatgatcatttctaaaaaataatcactggtggcagattgcagattagtaaattaggtaccatcacacgggcaattgcagaagttgcccctcaattttccccaaaacttattcccagccaatagaaaaacgaaaaatgaagtcacatatcgccaattagtcttcaacctcaaatgctcgttcgctcgttcgctcaactcttgaccaattctcaagatttgttccaccgagaaaaaaaaacaccagactcgcaatacaagaatggtccgacggatcgatatcttcttaaaataccaggacgaatcaaaagagcaaacagcgacggtgccggcgcgggggacagggacttgccga

SEQ ID NO: 93174 - DNA, 872 bp, Eucalyptus grandis
  Intron number 1 from transcript Egrandis_v1_0.009045m (loc us Egrandis_v1_0.009045m.g) derived from phytozome v7.0 (c hr-ID scaffold_3; pos 6302445 to 6303316 reverse strand)
ccttatagtccggcgaagttcttgtacaggtctgtggatgtggaggaaattgctcttctatgaaattttttggataaatgtggatgcttgatggtttcttgttggtttttagaagcacatggaggttggaaattgtcgaagaggctctgtaaattttgctgttgtgatctagtggctgtgaagatatggaagttgtttgatcagtgcatgttctgctatattgttagtatgatggacattacctaatttgcaattgtgctttgacctcctttgtatcacagcttagctgctccatctttttttatttttggcaaatggaaattggaaaatgtcagagagtgccctttgcacttgttatggtttgaagagtaaaaaatcacaaccatcttggttgagatgtgttgaacagctgagatcaattgcctttcaatccaacgataaaagattgctgaggcaccatgccctgtcgggactatggctttgccccatatcagacgtgtttctcaaattcaaatttgcatggatgtattgccttagtaaaatgtgtattctctcatattttaagtgccttggaaagcattatttctgatttgctaaaaattaacgagtgcccttgggacattcgttaacaaggcctttggaaattatcttctttcatgaagtactttgtctactggcttttctgaaaatggctgtggacataatggataggcatcttttccttattctaatgatgcatgcttttgtcaagttccttgttgaccatcagtgttggactgagactttcttagctgttctatctaattgacttagagggaaatgtgctttatacttttttatattgatttggttatcccacagttggtggcaac

SEQ ID NO: 93175 - DNA, 952 bp, Eucalyptus grandis
  Intron number 2 from transcript Egrandis_v1_0.048108m (loc us Egrandis_v1_0.048108m.g) derived from phytozome v7.0 (c hr-ID scaffold_3; pos 64735869 to 64736820 reverse strand)
acgtctccagcttcatcaggcagctcaacacttacgtgggtactccttcgaacgggattgttgtttttgaccttgtttttgcttgaagctttccccatacgtgagagcaaactattcgtatgaatgcgtataatgtctgcatatttattttggtttgactctgtttcagctctgtttttttggtttgactctgtttcggctctgcttctttttatgtcgtccagagtgtgatcctcttggaccaacggatagtccccagggcaaagaggctaggatccaagggactccactcttgacgttttgctcgtggtacatacaatggcccatcatcatattcaagtgatgatgcttttgatggtagtttgcagaaactaccatgtcaaccatgacgtcagaatacccattaaagatttatctcttcaccggatttgtatttgagtgctttctccaatggtaaattttaatttggattagaaatacactacagcatcttcttgttaatgtttttctttttactgttttgatgctcaattttgcactttctagctgaaaatgagattccttggccatcgctttgtttctatccgatattttggtaaagccttctgacacttctcttctttttgggcaagaccaaaagcataattctgcactcatgtcttcgtatttatgaagttgacggattgatattgagtcattagattgtccatacattcttagtaccggtgtttgaatcattgcaaacgatctgtccttgagatgctttgtaacctgggttttctatatgggactaaataaactcctcgacccagcttcctcctatcttccattcttcatgcatcacgatccaagataagtcgcagggttttaggaagatcgatacagatcgatgggagtttgtgaaccaaggtttttaggaagggaagaagcacttgccgaagaacataaggag

SEQ ID NO: 93176 - DNA, 821 bp, Eucalyptus grandis
  Intron number 1 from transcript Egrandis_v1_0.009982m (loc us Egrandis_v1_0.009982m.g) derived from phytozome v7.0 (c hr-ID scaffold_3; pos 49375766 to 49376586)
tattgcgtctttaccaccagcgtttcaacccccaggtagtgccgtttttaaatattaaacaatgtccttcatttattagattttaacttttttgagtaaattaattgtggtctatgactctatctacaacttcttgtcttgtccaccgatccaaaagaattttccattagaagggcgtgataaccattctagccagaaattaatttatgaaagagaaataattttttctatttttatttctagatgagtttctaagcaaaaatacatgattgataatggtacaaaatttatactctaaaaatagaaattcgtttaataatgacataaaatttctctattttggacgatggcgaccgatagctggcgaccgatggtggtgatggtggccaacaaccagggtggcaacgatcgacggaaggtggttggcaactagcagtggccagcggcgaacaatagacggtggtcgatggcaacgaatggatgaccggttcataataggacgaatgatgagaataaactttatttcatatttttgtttcaaaaatagaaaattaaattttttacttctgatttctattccaaacctatttctgaaacaaaaatatattttagaaatagaaaaagagaaataattttatcaaacggatttctatttcagaaacaaattagagtagaaaaattatttctgaaacagaaattttgatttgtcgtacacaagccaagttaggcatcaatctaacttccgttacccttttagcttacatcattggtcgtttttgcttgcagtcacctggggtggcaactgagtacgatccgatttt

SEQ ID NO: 93177 - DNA, 627 bp, Eucalyptus grandis
  Intron number 2 from transcript Egrandis_v1_0.027850m (loc us Egrandis_v1_0.027850m.g) derived from phytozome v7.0 (c hr-ID scaffold_4231; pos 1964 to 2590 reverse strand)
gcctaatccccattgctggatttcttaaccattcggtatgtcgtttgagtattctcattttattttcatgatttctcaggtctcttgagcatttctctgtgtttgtttaccattttgatgtggctatcttccaattggctttggtttagtctgactgatactctttttcttggatctgacctcatcgcagtagcagaattaccattgagtaaacagaactgcacaaaaaagttatcattacgcctaactgctcaaagattgcaagaatacgagttcaactggattttctttttgaaatgtgttaaatctcctccttgtctttgattttgcatctatcaatgatttgcatttgcatgtgcttccgtgtctctggatgggttgctcatgggggatcatggatctttggcacgtattttgttcatatacctctcccacttttccacttcacggagaataagttggggaactagtcatttgttgttcatatttgtggattcggtttaatggccttctgtttcactctgtttgggttcctcctcatcaattatttactctattttgacagctgtatccacatatcacgcagtatggcaaagttgattctgcaacaaacacttgaagtttcgc

SEQ ID NO: 93178 - DNA, 495 bp, Eucalyptus grandis
  Intron number 1 from transcript Egrandis_v1_0.027850m (loc us Egrandis_v1_0.027850m.g) derived from phytozome v7.0 (c hr-ID scaffold_4231; pos 2738 to 3232 reverse strand)
cactgttgttagaagaactaatccaagcaaaagaggttataagttttctggatcatgttttctgtgttgaaggaaaataggaatcacattcgctgctttgacttccttctttttaccttttgataggggttgtgttgattccttgacaactttgcattctgcttctttgagctgtttatggtttgatgcttggcaattttttgtttcctaaagaggaaaaaaaattatttccatcaatttggtggtgaaagaactctaaaatggaaggaaaaagaatatccttcttgcgctggaaaaaggtctagataaagcatctattgaggaatcaacctcttcttgctcaacatagcccaagaaagcaaacagtcccgaaatcgcttatagaaaatttgcttatatatgtctctttccttctacttcagatattaaattgagtttatagaagataaattttaaggctttctattttaaatttgcagcatttgaggaatcaat

SEQ ID NO: 93179 - DNA, 649 bp, Eucalyptus grandis
  Intron number 1 from transcript Egrandis_v1_0.007815m (loc us Egrandis_v1_0.007815m.g) derived from phytozome v7.0 (c hr-ID scaffold_5; pos 70653262 to 70653910)
gataacctctgtgttatcttaccctgcttccacaggtaagaacatgcaatctatttgaagttacggttagtaggagaagaaagctatagttcctgccattaacttaacttctatgcttatacaatttgagctatggtccgaacaaaatagaaaattgtggagaaagttaatctgcataatgggtgttcttagacttttatagttaaagttctctttcaaaatgacagaggagatatctacaaggatcaagatcttagaaatttgtgtacaccattatttcattcacctccaatgaagaattcaacttttagcaaaggcatttttctagtctggccccgttttctcggaaatactgttagttgcctacatcacttttattcagtcagggatagcctatagcgaaacttgtaacatagagaatctaaagagacttagcttacatatccttgattttggaaatagccaaatatgcagaaaaattactaaggtaatcagctcaagctgaacatttctaataaacctctttattattatgggatgcagttcaccattagtgtagacattacatctctcttcatagcctattgatattccagaatattccattaatcaagatgtttatttgactcataaaaggaacggaggataa

SEQ ID NO: 93180 - DNA, 835 bp, Eucalyptus grandis
  Intron number 1 from transcript Egrandis_v1_0.041640m (loc us Egrandis_v1_0.041640m.g) derived from phytozome v7.0 (c hr-ID scaffold_5; pos 8905242 to 8906076)
cggagaaggtcgaattagtgactaaagcaggtgaacttttatccgaagcatcagttctcttggcattataattttgagtctcaaaaacactaatgggaacaagagaataatgtgtatcttatagtcatgtatacaagagctgacaacttatgatgtccagtgactaatgtgattttcttgacattttcaaatttgagaaagagagaagattttcagttcacctattaaccaaactaagaactcttctcttttccatttcgctgagtgttggtttgagatgtgtactatgaatttcctgcttatcttcatttgactatgttaccatccttttattcttgtcgatcatttggctaaatcacacttttagattctcttctttccttccttttaaagttccagtgcttgtgagtaccttctgtaagattgcattgatcatgctaaaatcctcttttaatgtctaaacaaatggagcgttttatctgattgcacttgataatggcttttcttgcatagtctaatggataaaagcagttacattttttatcacttagttctccttttgtaactttcaaagatgttggtgggtaatgcaatattgagttaaaagtcattcaccttttccttgcatggacttcagaattagacatattcttctgtaaggaatcaccgatggtttgtttagacgctagaataaagaaatcactcaatttcatttttctgaattggttatgttaagattctgaggtactcagaatgtttttttgggtaaagctgaggtactcagaatgttggtactgcagatactgaaaaaaaggttgcaagaatcttggagctc

SEQ ID NO: 93181 - DNA, 916 bp, Eucalyptus grandis
  Intron number 1 from transcript Egrandis_v1_0.043349m (loc us Egrandis_v1_0.043349m.g) derived from phytozome v7.0 (c hr-ID scaffold_5; pos 15979732 to 15980647 reverse strand)
agagggtaattggcggagctccggtcaccaggcaatgatctcaagaggttcttccctctgtgctttcgctcaacgaatgtgtgtgtgtacatacgtatgtttccatgtgttctcatgtcgcgagtgagcgcacataagaacatgaactgtttctggttctagggataaagtgtagtagtaaatcggttcgatgaacagttcatgggtgaatctcaaagaaacatgaaacaccctttggcctcgagttaattactcgcaatcgattgcttgtagaaaggttgaattgttcataatgattgttccctcagcagctctaaagaaatcctcttttgagaaccggcgagctcaggatgaattttttcgacctttacttgcatcggaaataagatttggtttatgttgcctgaacaagaaagctagagttgtcaactgttcttgcaacttctcttccatctgtctcaacttctttatatatttctttgttctccaatttttttcgtgtgtgcttgctactgattttggaacagaaggaatgcgaattggtggccttgaaaggtgactatagtccctaatctctgcctcccagagcgaagcaatgaaatccgaaatggtgatccatataaaatgagtgcacaaccagacttattgggaaatcctacttatagatgttacataggtcactgtgaatgcctgtaaaggtcgcgaagttacttttcagcttgggttccaataaagttctgctctatcttaaaaattctatcatgtctaagatggttttcaattttgtttccatgcattgcccattgcctgctgctccacgcggtgaatatgcactcatcaagcagttggccgtgcgacgatttgtcactttgctaatccaggactccggttgaggatatcagatcgctccggctga

SEQ ID NO: 93182 - DNA, 751 bp, Eucalyptus grandis
  Intron number 3 from transcript Egrandis_v1_0.038551m (loc us Egrandis_v1_0.038551m.g) derived from phytozome v7.0 (c hr-ID scaffold_3; pos 49389334 to 49390084)
atacagagaaggtaaatggatttcaaaataactcccaaacagattcttacatggttgctctcaaagttttttattttattattattttttttttaatgaaggcgatcatgatttgtcttttaaattccccaaggtaaattttggatgtggtttttacactattagtgtttggttttgttttgcttgtctattatcctttcttctgcaaggaggttaatattagtctctgttttcattttggggatcgggtcgcatgagaattattttccagtttgttgtgcttccctttctggttttttttttttttttggtttggagggggggttgggtttgaaaatttcgcatacatgtggttggctgtatgaagaatgattccactgctctactacttttctgtaaatttagcaatgcttatgctttcaggtgtttttgttctatcaagaaatcaaagaatatacctacaacatgtcacaatcccatgtttcatgctgtattggctgtctctgatttgattgataattttaaatcctgaattaaacgtggggttctcagttagtttttggcttcaataaatgacattgtcattggctttttatgccccaaacaccatgtggattttgaagtaaaaagccatatttcggaagcaggaaatttagctaggtagaggagtatttgttccttatgacggaatctctctatagttattttgagtcacccttttaaatatatgaattctcctgttattttaggc

SEQ ID NO: 93183 - DNA, 942 bp, Eucalyptus grandis
  Intron number 2 from transcript Egrandis_v1_0.015385m (loc us Egrandis_v1_0.015385m.g) derived from phytozome v7.0 (c hr-ID scaffold_3; pos 64972072 to 64973013 reverse strand)
acttctccagcttcatcaggcagctcaacacttatgtgggtactcccttcgaacgggattgtgtttttttgtcctttttttcgcttgaaattttccccattggtaacaacaaactattcgtataaatttgtacaatgtctgtgtatgtttattttggtttttatttaggtttgactctgtttcagctctgtttttttggtttgactctgttttggctctgtttttttggtttgactctctttcggctctgtttctttttacgtcgtccagagtgtgatcctcttggaccaacggatagtccccggggcaaagaggctgggatccaagggactccactcgcgacgttttgaccagttattaattgtactttaccctagattaggggacgaggaacggagaagtctggaatggtgggcgagatgtatggattccatgtgaatcatcacgaatcgtattcaagtgacgatgcttttgatggtaatttgcagaaactaccacgtcaaccatgacgtcagaatacccattaaagattcatcttttcaccggatttgtacttgagtgcttttctccaatggtaaattttaatttggattagaatagcactacagcagttcctttatagctgttaatattttactgttttgatgctcaattttgtactttctagctgaagatgagattcctcgagccatcgctttgtttctatcggatgttttggtgaagccttctgacacttaactcttctttttgggcaagaccaaaagcataattctgcacttttgttttcgtatatgaagttgacggattgatattgagtcattaaattgtccatacactctttgggacttctgtttcaatataaactcctcaacccagcttcctcctattcttcatgcgtcatgatccaagatatgtcgcagggctttaggaagattgatacag

SEQ ID NO: 93184 - DNA, 623 bp, Eucalyptus grandis
  Intron number 1 from transcript Egrandis_v1_0.001711m (loc us Egrandis_v1_0.001711m.g) derived from phytozome v7.0 (c hr-ID scaffold_3; pos 71232362 to 71232984 reverse strand)
ttaggcgtgctttgctgagggtcgctgccggacaggtgcgaatgctatgtttccctgaagcatgtgttcttcgcagggtttgaattcaaaattttggtgtgtaattgagttgatattgttgaaatgcgtgaaattttagttactagtgagccatttttagggcatgatgaagcaaagagaagttacttgaaagagttcactggttttacatgatttcggcaattaggaatgattggaaaaaaaaatgtttggagaataatggtggttctctctcttcagttataatttgcaatcttagctcttcttgttaatcttcattgtaagtaattaagtgccaaatggaagtttagcataattagctctttccccctttgctctatgtttccagcttaatttttgcactgttttattgttagtttattgatgggataaggggtagctgctccatcattcatcacattgaactgaggattatattctcaattttgtcgagttttcttggccacttctctatttgggattaagtatatccttttaatgctcattaatctgttcatagtctttcctgatgcaacttcaatgagaaaactctgtttatccaattgtttcagcttggaagaagg

SEQ ID NO: 93185 - DNA, 822 bp, Eucalyptus grandis
  Intron number 2 from transcript Egrandis_v1_0.048102m (loc us Egrandis_v1_0.048102m.g) derived from phytozome v7.0 (c hr-ID scaffold_3; pos 36891403 to 36892224)
ttttcgcatttactaagccaagatcccaaatcaaggtgagtgtatcgtcattgttaatttgcattactgccattttcattctgccattttatagattttacaacctttgttagttgaccgatttccactttcctgcatcacttaatctcatgagcataaaaggtgccctgaaactcgtcgaccatggcttagatatgagcaaaaaatgtgtagatcccacttatttcttttggaaattgacaatagaagccgaagaaaaggttgactacgtgatagcctaaatgcatttgacaattgtgatattccaatgaaagatgatcattgtcggaagcctagttattagggttataagtttgttacccacccacgaacaaataaattccaatcattcctagcgcagtattagatttgctatacatgcacttaagaggattttctatgaagattccgagggtttagcatatgatgctcactacaaaataagaatcctagggactggatgattagattgctaatttaaagtacttaaagtaaataattctgaggttcttgttggagtccaacaactgccttcattccaaactcatgaattgtgaagtgcaagttgtcagatattttggttactctttgattgagctaatgcaatcttaattgttttagagatcgcacgaatgccaaacttgtgatgctttcaaactcgagaactgagtccatcttattattgttcgtgcaattgatttatttaagcatgttggatcaatagtaaattacttttaatgactagcaggccaaaggcatcggtggtgcttcaccatccatttt

SEQ ID NO: 93186 - DNA, 421 bp, Eucalyptus grandis
  Intron number 2 from transcript Egrandis_v1_0.023158m (loc us Egrandis_v1_0.023158m.g) derived from phytozome v7.0 (c hr-ID scaffold_886; pos 14714 to 15134 reverse strand)
aggtacaaaagatttttcatgttcattttatgggattagactttacgacaccgaattataatgagatccacttgctaaactcttccaccttaaaatttcttgccataggactaggtcaagcaggactaatggacaaattgtttgaccgttcgcattgcttttgttcttcgtttcttgcttaatttatgttcgagaatttcgtcttgttttctcaagcataaagacgagaaggaaaaagacaaaattttatcagtgttttacctaacttgagagatccctacccctgccctacccctgtctagtaaataatgggcttctttttctttcgtggacgcatataatgaactgatttgaatttgattttattttaaaatttttttttatagctgccgcactggggagagtctgagccaaaggcaag

SEQ ID NO: 93187 - DNA, 748 bp, Eucalyptus grandis
  Intron number 1 from transcript Egrandis_v1_0.025490m (loc us Egrandis_v1_0.025429m.g) derived from phytozome v7.0 (c hr-ID scaffold_3; pos 6937750 to 6938497)
atcctataacgtgctagatttgcaggtcattctcttttcctcttcttctttttcttctcggtgttgacttcttgtactctgcgaaagctttcgtttttcttcgttgaattacaacttgtttcctcgggagcaaaatattagttaaagggtctctacgaggacaccttttctcagacctagtgctcccgggatgagttttgcgaattatgcgcaccagctgtttgtgagtttgtcagagccagagtaggacatgaaggtcccttttttgagcaattgggtatcatttgtatggctctttggtttttacttttttgtcttttacgtcttcatagttgcccgagacaaggttaacgtggtgttgtgtgtcggtggtacattttggaagctcaggagcatgtgttgcattgcatgtgatatgacagccaataaattttgtcgatttcaaattcatgcgcaaagggcatattgctgcttcttcaattccacatttgtaactcatgggtaaattttttttatttcactctgattgttcatcattcgagaatattgattgttatttaaagtcgacaaagataatttctcctttgatctgtatattggacgatgcttttttgtacctcatcggtagctgaaccccttttctttaaatgtgaaggtttggacccggaattctaaattgtagtatgtccttggagatcgttatgcatttgtttacttggttactaatttctttggcggatgtttccag

SEQ ID NO: 93188 - DNA, 849 bp, Eucalyptus grandis
  Intron number 2 from transcript Egrandis_v1_0.006967m (loc us Egrandis_v1_0.006967m.g) derived from phytozome v7.0 (c hr-ID scaffold_2996; pos 1992 to 2840)
gaagaagtttcctttcaagctggttcttgcgataggtagtcatcaactctctgctaattctgttcagcacacttcatgcctgttgcatcgggtgctatttctggctctgatcatggcagtacgaaagtctgtgactatagcaacgagagttacatttgattatgcaaaattatgcatccaatacccaaaaaaaacacccgagggtgaaattattccaatttcttacccgccattttgcgtactacagtttggaccatagcacttaatttacacttatgcaaactacgccttcttgctctcagcatcttatctactaggcaccttcctccatttgacgcacttgatctctctgatgattcgtccttgcttatagattgaaatacaatgcataaatctcatttgcagtctattggtatttttcacacaaatattcatcattcccttctttatttgcaacacgatcatttaagtccacgatttattctctcctaagctatggtttatgattgaatgtcgtcacaactagggatgttgcagtgatcgtgacggtacaccattaggattggcaaagtaaccaagaaattgcaggcagcagcaaattttatggcttctttgcaaatttgcttcctgagagaagtaatgtagaagagagttctattatctactgcaatagcaatacataggctgacttaggagagcatgcaagttagtattccaacatattccacacttgggaattgtaaaatcggattggtcatataaggcgatatactaggagaattttgactagatgaaacaagaatttgttatctcacagtttccttgtttgctttaggtgccggcataggt

SEQ ID NO: 93189 - DNA, 839 bp, Eucalyptus grandis
  Intron number 1 from transcript Egrandis_v1_0.025488m (loc us Egrandis_v1_0.025488m.g) derived from phytozome v7.0 (c hr-ID scaffold_3; pos 77549668 to 77550506 reverse strand)
gcaagggatcatcaattcatccaaaactgaaaagggtttggtcttctcactttcaaactctgctgttttctcaagaaaaagtgatggccgtgctttgattgggatagacccagtgatggtctcggggttttagtgcatgttggattggatattctgcgacccattttctttaatggtctcatgatagtttaattttcaaaatggaaatggagaaatcatatgctcgtcaggtataagatcatgttttgaattggagcggagcagaaagtttcaactggatagaatcatgcggtcctagccttaagctgaatctgtttccgcttaaaatgtaacgcgtcctggtttgtcatgaaaacttgtgcactgttgcacaactgactgcattttattgaagccgtgatatacttatacttgaatccaatggctcgtgatttggctgagatatgggaagtcttacgttcggaagttgtgcttattctttgttttatataagtagctatcgatccaagatggtggtcgctgcatctctgctatggaaatttaaggaactgggaataatttgatattttcttccgctgacaactgtacaataccatccaaaactagtgcgcttcttcatatgttgctggttatttgctttgtattatgattacattatgtcaaacattagtttttggggcaacatgtcagaaaaaatatagtaattaacgtgtttccaattcttttagcaacactttccttgcatttggtgattcctttgttgtattgcacgcaaaaataatccgaggatgaaaagtcttgcaggatatttgcaagatctcgtgtacaaactgagtgaa

SEQ ID NO: 93190 - DNA, 644 bp, Eucalyptus grandis
  Intron number 1 from transcript Egrandis_v1_0.015029m (loc us Egrandis_v1_0.015029m.g) derived from phytozome v7.0 (c hr-ID scaffold_3; pos 3736482 to 3737125 reverse strand)
acgtctctgtacgttctctaatccctctcgcctgcaaaaaatgctttctttttttcacttaagacaggctcgattagttggcaaatccagtgttcttcgcgctagagctaactgcccagttgccgtcagttcattaaccggttgcgtttcataaagattacattttttctaaaaccctgattctaatttataaagtgtaattattaattgctaacaagttaattgctaacgagggaatgtttcgtacatgcttccaagtacaactagaaagtttcagggctttcgcttaagggggaccagccctgcatgaatctagtccgtgggacccggcttcactgttaccaggccgactctagtttttgttttgtagctgccaatcatgcgctcattagactccctaaaagacagatttttgggaaaagtttcccctgttagatggctgatttgaataaatcaaatgtctgatggaatatgctatttggttctgagctgtgaattcctttcgttcgaatccttttcatagaaaccttatttagatttgtcctgtttacaaatttgtattgaccactttgtctattttgggctcaatgtcttccatgtcattgacaggcgaggttggcccagattgatttgtttttggagag

SEQ ID NO: 93191 - DNA, 862 bp, Eucalyptus grandis
  Intron number 2 from transcript Egrandis_v1_0.024974m (loc us Egrandis_v1_0.024974m.g) derived from phytozome v7.0 (c hr-ID scaffold_5; pos 9353636 to 9354497)
tatcgcaaaactgtcaaagacggagggacaaccaggtacttcattgctcaacttgccattttggaagcttaagcaatttatgaagagatagttgcatcagaattcaaatgaccgaaatatcgagtattaagcaccataatttcaatattttgggaatcatatgcctcttttgtttcttaatagctaacaattataccactaaaccaacatccaaaattatgttccttctttcctctgatgaggttaaatgtcgaagcggctttaagaagaccaacataataagcaattttgataggatttatgaaataatgtgaagcctagctatgttacttcttccatgggcttcatctcatgtcctcattttttgcatatatgaatagttggcttaacaacaaaagtagggatcgataaggaaaatcatgaaccattatgcggcaaatgaagatttcattagaatttatgctagaggttagtagcacattcaagttacgagagatcacactcgaattgtccctgtgttgctttcatttttcttcctcaggtaggattattgttgttatacatttacttgagtcacttaattcaagtcacatatgacaaggatgatacattccatttgttaatttagacttcttgatctttgaggcgtagatggaggcatataaaagagctttgttgtggtccctatttttcccttacaaaagcataaatgaaccacaaattataaagaactatagcatcttacttatacatctaaaaccatataatcgtccttgaagtaatcttcttattacagttgcatcttcctatgattgttgagttgcaatttgttgcctgatattgtgtagtaatcactcaagac

SEQ ID NO: 93192 - DNA, 583 bp, Eucalyptus grandis
  Intron number 1 from transcript Egrandis_v1_0.010809m (loc us Egrandis_v1_0.010809m.g) derived from phytozome v7.0 (c hr-ID scaffold_5; pos 37847510 to 37848092 reverse strand)
cagcccaacaagcgcttctctctcgccgccgcaaggtaaccaccacgcattccctgtcctctcctttttttgtccatttcgacaagacggttttctctctggttcagtcgttattcttcctcagtttttctcaaacggtgtccatggagttggaccctttttccagtgttttttgttcttacatgtgatggtgcttcgcttctctgcatggtgcgattctccatgttttgttctcatctgcttctttcttcccctctgagaggttaccatcttgtctgctgctgctgctgcagctgctgcaattagcgaccttccatggatcctttttctttttaatcaggtctttttttaatgaaaatcaaaatgggcaagagaggaaaaaaaaaaaaaaaacttaaaaggagaatcgcttcaatgtttccctttttccgctctgcaagctgagattttccaggattatttatctgacaatagccgcaaatttcctctttcgaaagaataatgtaattcatttttatcgtaagtaaaattaatataagactaatttttattttgttcctttttggttttttttccaggtttt

SEQ ID NO: 93193 - DNA, 401 bp, Eucalyptus grandis
  Intron number 1 from transcript Egrandis_v1_0.054843m (loc us Egrandis_v1_0.054843m.g) derived from phytozome v7.0 (c hr-ID scaffold_5; pos 52038651 to 52039051)
acaggtacgcacaaatgtgatgcagtgctttgcgattgttggctcatgattgtttgttagatatcaaatcatatgtgtagcttcgagttgcccaaacgatgcatcaagttctttgaattcgcagtagacacaaaagtcgaaagaccaaaatttgaagctagcagaaatttctgtcttagataagtagtgtgcttccaaggacccgagtaattagtgtcttcaggcgcacattctttgtaattttccttccgcagacgttggcgcaggtgtgtgttatttcttttcattttattatttgttaatcttcttatgaaattttccttatgacgttagacgttgaattcctgccatggcttgaaatggtaaaacatgtttctatttcttttgagagctcatcagag

SEQ ID NO: 93194 - DNA, 395 bp, Eucalyptus grandis
  Intron number 2 from transcript Egrandis_v1_0.053844m (loc us Egrandis_v1_0.053844m.g) derived from phytozome v7.0 (c hr-ID scaffold_133; pos 48413 to 48807)
gtccaagaggttttactctctacaatctccgtgtgcttccgcgctagtgcgtgcctgcgtgcgtgcccgtcgaatgcattgtgtgaattatttcgcataagactctgtttgattggtgtggcccaaatgactctgcttcaaacaattgccggtaaaaggaagctcataagattttcattacttagttatgaatggcaactccccacgtggtttggtaaattgacactccaatttccacaggataacggtagtctagtaaaaatagtttttttagttctgtctactgttctggaataattgttttatgtgcagtgctccgatttatcatcgctttcttctcaccaccaattttttggtcttgtgcttaaagggaataatcgaagaggaaaaactag

SEQ ID NO: 93195 - DNA, 854 bp, Eucalyptus grandis
  Intron number 1 from transcript Egrandis_v1_0.031538m (loc us Egrandis_v1_0.031538m.g) derived from phytozome v7.0 (c hr-ID scaffold_3; pos 32979229 to 32980082 reverse strand)
tctggcatcaccgtgagttttctctacattttttctagctaaacatgtctacataatcaaatggaaacgttttggatttattttttctagctaattatgatcctataatctgatagaaacattttgtatttattcgtggagacgtatctgattgacgattgcttgcttgcatatatttcttctctttttctgcaatatatgtgaaggctattgatgtaaatattcaatccaaagagcttggcaatcaccacctaggaacaaatatatgcggacgctattgctaagtcataggcttattttgcaatcaccccctcagaacagagaaacatgcgtcataatctgtgtattccacccgccaattaatagttgagtggatcaagtcctgtgattatttatctagagaagctccaactttgatgtgcggtgctatcttcagtgctttttcttttggcaatctatatcaattcctatctataacaaattgccaaatgcataacatggcacttccgtggagaacatggcttgttttccatcatcttctatggctatcaggaccctcaggctctttgtgtggctgaacgttggcccaacttctttttccctggaaagaaggaaaaattagctttgtcctgtaagagcaagcactgcggcagttgcataagcttggcttttgcttgttgtcagcttcttttgtttatttgtgagagacaaagcccatgatttctttcattctcttctcctcacggtttctattcgattgaaatgtgatgttaaggactctattcttgccggacctcaactaatcggttatcgttctatgtttgtttatggaaacagttaaaactagccatagc

SEQ ID NO: 93196 - DNA, 1038 bp, Eucalyptus grandis
  Intron number 2 from transcript Egrandis_v1_0.037918m (loc us Egrandis_v1_0.037918m.g) derived from phytozome v7.0 (c hr-ID scaffold_1; pos 2334767 to 2335804 reverse strand)
tcgctcgtagagtctggcgggactactacactaaggtaaagttctgctctcttcttctctcctatgaaagctcctgattcgggacatctctttaatcgcatgccatatggccgattcattcaagaattctgtaacagtttttgaactttatgcaacgtgatgcatgtggggcagatcatcctactgagtattctgatgcttttgattaatcatgttaaaattatcacttcgaatgcttcattcttgtctgtggatgtgtttcttgacttttgagttgacatagtcagatgcggggctcttaactttcagttcactgattttatttactgcattaagttttcaataggtaaccctgaaattgaacctttagtttactttgagatcaggtttgaccttgttggattgaagtgagggaatgcttatgcaatcgccgcaacttggccatcgtccagttgtacttacgttgcttctaaacagaggctttatattagcccaaaaaaaaaaaaaaattggatttacggtgactgattttcactttcagtagtctgggtcagcaagtgacatgttttcatgttatctggtggtcggtactatggttttcttgcacactgttgattttgttttctcccccttttagttctcttcagataatattgtcctttgctaatccattttcaagatactgtatatagccggtgtggctgacttgcggtgtttataagcagatgttactatttaatctaatcaactagaagtgttggccagtgtattatttggtactggtttttccttgctgagaaaatttccttttttctgggatatgctatgatgacggggtgccgtgacaggggaaccaagttttgctgaaaaaatttccttcagggattggttggcactcgttcacactcggcattgtaaaacttcaaacgatcatgccatatgattgttgtttcatattgtttttgcacatgtatgggagcatgtgaagcaatcactctgtcgaagatgatgaatgctttggaacttttatataggtcg

SEQ ID NO: 93197 - DNA, 617 bp, Eucalyptus grandis
  Intron number 3 from transcript Egrandis_v1_0.040439m (loc us Egrandis_v1_0.040439m.g) derived from phytozome v7.0 (c hr-ID scaffold_2761; pos 709 to 1325)
gaaaaatttcgttgtcaagcattgtgaatttttactatagatgatgtagagccatggacattaatttttcttgctagttccaggatgtaaatttcattccatccaagtaaaagataatacagagatcttctgtttctctgatggggtattttgggcattttcagtacccaatagtcaccatcttccccttctatatgcatcagatattgccaagttcttgtaattttgaaggtggccagtgggagttaaattgccttggatgaatgaactgattatgctgtcttgggctcttatcctatgttgtccaaagtaaaactcttctggtcatttgtagcggctgattagacaattttctggggtattgttccaaaggtactatgctgcaatatgaacaagttatttttagctgtcgagatttaccattaatcacactgaccatgagcctcaatgcaagtgtctaattgcttacagtgggatggctgatattacagtcaatagcgtctccaactctaaatcatttgacttttggatccaagagtaacgcctagatgatctataaacagagcgatggtagtcaatttggtaatgttttgatttgtaaatgtgcacacccagaa

SEQ ID NO: 93198 - DNA, 880 bp, Eucalyptus grandis
  Intron number 1 from transcript Egrandis_v1_0.018555m (loc us Egrandis_v1_0.018555m.g) derived from phytozome v7.0 (c hr-ID scaffold_5; pos 3143680 to 3144559 reverse strand)
cgacctcctctctcgcgacgtcgccgttttcttaggtctctctctctctctctccctctgtgcaagcaatcgcgtcgatttattcattttttttaatgggtgatttcgtaaggtctgattgtatgttcctattccagcggaatcagttcaatatggaaggtgaaggaaagatatgttcacatttgtatgtgattgtgaacagagaattggaagtgtcgctgttgctagcgactgatagatgaattagttccggcgatgttgggcggcgtgtcctgaagtgagtttgtgtgataataaaatgaataatctggggcgggtttagtgttttttttttttttttttttttttttgggggggggggggggggtggggatggggggatgtgttttggatgctttccattgaattttgtggacctcaagaagaacaaggtggatgttttgattgagcacttgcgatgtagttttggtagaatcacggaattttttctatccgtcagtgcacccattctccatggtcatagtgattaattcgttgaatctaccatcctcaattagattcctgttcttcctttgtgagttgattgcttttatctttagtgttctcgcaatgatgaatagttggatttgatataattctctataagcttgtttcagatgacattgatttcccttgttttgagatcctcatatgatgaggatcgcactcaatgtaatgttcttatggcttttgtatgactctgtgtttgttctagcatgagagtttctaacctaggcggtcagattcctacattataggcctttctagagctagatggtaaatgagaaatttagtgatcttaataaccgccgttccctcttttgttgatatacagaacgtt

SEQ ID NO: 93199 - DNA, 961 bp, Eucalyptus grandis
  Intron number 1 from transcript Egrandis_v1_0.047659m (loc us Egrandis_v1_0.047659m.g) derived from phytozome v7.0 (c hr-ID scaffold_815; pos 10190 to 11150)
ttccgagagtgaagcttggaagccaaggactgaaggtaaaaatcaacgcaatcccatatcttttttggtgcccattaccatgtatgtccaagaaatgattggttgtttttattgttgtgcttcttcatgacgatgtgtcagtgtgtagatctattggttttcacaaaaattttaggtggcttggggaagtgggcattggatttatacatgaaagtttcgaatttgagccatgggtaatgagtagaattgtcgactacacatccactaatgcaaaaagggggctttgcgatgctgcaaatgttgaaattggatatggtttcttatttgtgtctacagtggaagcacagaggtcttgtccagccaagtcaattcgacacagttcgggtgtgcttgagtttggctctactcgatagagtgttcaaggttggagtctggacactcgacttgagctcgatgtagcttgatttttcaaagagactgagctcaattcgtggggaatttggtattctcaactactcttgacttattttggtctaagatcaaattaaaagttattgtgctcaagaataaattcgcgttctcaaagtccaaaaggaaaaagaattaacatggtacatgtttttcttttatccataaccgaaaaactcatatatcaaactactctagcaacctcgcaagctgctcacactaagaattttaaacttgagctcaatgctctttggtaattgggcacacatatgccaaaggattttagtgaagcaggactaatctgctagttgagattgagcagatcgccagtaccgacacatctgtctccccaccttacaacggagtttttgaactttaatagcaatgttcagcttggaaatatgaacagcatttgacctgatatgcccgttctgaaatggtaagcggcaaactcacctctttttttaccacagttatccaagttggggtttgg

SEQ ID NO: 93200 - DNA, 926 bp, Eucalyptus grandis
  Intron number 1 from transcript Egrandis_v1_0.002753m (loc us Egrandis_v1_0.002753m.g) derived from phytozome v7.0 (c hr-ID scaffold_3; pos 22611357 to 22612282)
aagtacttgtttcatcttgctttttctttatcattctttattacttataggatggttctatctataaagagaagtatcttattgggtgatcgattttttattatgtatgggacgtttttctcaacattcgtaactagatttgtcagacttgttacatttacttcttgctattttaagttttctcttcatggaagtagggattttcaattttcctgaattataaacttaagttggaatatattgcccattattatgcgattctctttcttaattatctttctttgcatgccattgaatgaaaccttttgaaagcactcaccctttaagctagcttttggggtgagataagcccaagaccatccaacaatgataaacttttagttttgacgtttccagatacccttaactttcatgatgcacttaaagaaataattgaggatttgaaggattacaagaaagtctgatggagagaaaaaggagcaaaagggctaaggttgtcaatttatgtttgcttgtcttaattgtgtttgttaactatgtaattcatcatgacttctattagacatgtcaaaccattgaattagacgagagcatgtaaatatctctcaaccaactggttaaacgtatggtgaggtgtcatattttggttgtgtctatgtttttgtgtttggtattgtcatgtaaacaatcggtgtcaatattggtagcattaaggaggagtgtggactaggaaggtgttgattgcatcttctcccattacgcaggcattgttctcgcgtatgctagtaaaatagtggctctcatacgagttttgcatcttttgagtgccatggtttttatcaattttctaaaggactaactagttttgtaatctttatgatgtcctattaggtgaataatttgtcggtaaacattctgccgatctc

SEQ ID NO: 93201 - DNA, 770 bp, Eucalyptus grandis
  Intron number 1 from transcript Egrandis_v1_0.040231m (loc us Egrandis_v1_0.040231m.g) derived from phytozome v7.0 (c hr-ID scaffold_3; pos 4624618 to 4625387 reverse strand)
aactggttagcttggaatattcgaagatacctgccaatacgcctctcattacagaaaaccttccctaggttttggacgatggaattcatccatatctatccttttctggtgcatgttgagcatgtaggttgtttgattaagcagcttgtctttgtccatctttcctcggtttttctttgcccccttggggctttggacattggagtataataaggcaaaatccagtgcttgctctgtaaattatatcaagcttcgaaaagaaatgttatcttgagagcgctttgaaaatcaatgttgccaagcatggaacgagtttataattcgccttgatctctttttttcttgatgggtcatagattaaaaggaacagcaccatctctatttcggatgacttgtctctatatacgtagttacttgtcccatcagaaagtgttaataaagtacttcatttgctcaatctgatattaaagtactacaagaaaccgatacatatgtgagtttgtgaatccaagaatacagaggatgaacaaacctagcttaccgattacacattccatctactgacaatagtagctcaccgatatacagaaaccaacagaagtcaatagtctcggtttgctcatgaaaaattcatcatgggaaaactgaattgcactgcgattgtcacagtagagagaagcagcaccatcatcggtagcggtcgttatcctctaacagccatggtaatcgcaaaagctcggaagtggtatccgcaacggctctacagtctg

SEQ ID NO: 93202 - DNA, 508 bp, Eucalyptus grandis
  Intron number 1 from transcript Egrandis_v1_0.018691m (loc us Egrandis_v1_0.018691m.g) derived from phytozome v7.0 (c hr-ID scaffold_1; pos 37941554 to 37942061)
gcgagtttcctcacgatccccaagccttcactcaggtgatcatactgatttctcgctggattcttttaccgcattttcttcgtcatcgaattctccattggctgccttttcattacgtgaatttttcagtgttcgcttgtcgttctgattttcttgacataaataaactgcaatttatttattttatcgcgatttagttgacgactgcggctcattgcttaatttcgttatgcaattttagttctttgcgcaatgaagaagtccttgttactgatgacaagtttgtgcacatcttcttacgttgcatgttgcggatttgggggttgttttgtttttacctccttttcgatggtatattgcgtgctgtttgtttatgtgaaagcggaaagtgggtaggatagaagtcctgatgcgaatttaatgttgcaatttgaatgaatttgcttccttttgcaaattgtgattatgcttctgatttgggaaattcaggggcttctttacgggggaa

SEQ ID NO: 93203 - DNA, 787 bp, Eucalyptus grandis
  Intron number 1 from transcript Egrandis_v1_0.039665m (loc us Egrandis_v1_0.039665m.g) derived from phytozome v7.0 (c hr-ID scaffold_5; pos 43852831 to 43853617 reverse strand)
ctcgaattcatccacggtcaccactttcaagtacagtacgactcaagtcccagatagtttaaactgggtcgagaaaggagttgttggcagcataaaagatcagggagaatgcgataagagagtaacaaaatcatactatattattgtccaaaggcacgttattttctggtcatgtgattttttctttttatttcaaagcaagcgaaacaatataatcctccgaggtccttaacccaatattttcttgtcttgtggctttgtttgcgtacaattttttcatatgaaacaatgaatattctctgtagccctcgaaaacaatcaacagatgtgctacctaagctcaataaaacaattttaacaacaatgatgtgtaatatattatatatagtggataagagacaatggttttttcactacgttaacgcatttctctctcggtggctcgggactacgggattcaatggatctattggtagacaaattatactatttcataataccgcataattggatccataaaactaaatcatgttccaattcaaaataggtcatctaaagtaattcgaaccacatagttgcatgctgccaatttaattacattattgcggcactaactgcgagtagcatgtgagaaactttaatcctagtgactccaaatcatacactattaagctaattccggtgtttattccatctgcatacatacactagccataaccaccgttgcgcttctcattttaattcttgaataggatcttgctgggcatttgcagcgactgcagctgtg

SEQ ID NO: 93204 - DNA, 683 bp, Eucalyptus grandis
  Intron number 1 from transcript Egrandis_v1_0.001954m (loc us Egrandis_v1_0.001954m.g) derived from phytozome v7.0 (c hr-ID scaffold_5; pos 30891009 to 30891691 reverse strand)
aggggtaagatgagttgagttcatattttgtgtaagaaactaaacttttacatgcaagtataaagactgcttgttaaaaaaagaagaaaaagaacaagtaaatcaacacacgcatgattgtaagtacaaagtgttaaaacttgatctatcaatgaacaaatcgacaaaatgttaagtggcgttattgcatttaccccatttcttttgcaatgagtaggaaagtttgcaacgccacatattggataattagtgtgtacaggccaagtaaggcaataccatggtgcttcatgtatttaatagtttttgaatcgaaatcttaaccactattcacagtcttaaatagctctttttgattaaagcgtgtagataaatcacatagaacaatcaaaaggaaaaaaaagtaaatcgtcatgtataaatcaaaagaacatgaaacgcttgggtgactaaaagttgaacctaaacttgttttgattgatgtaaagaacacttggagtcctaatttgacttagtgaaaatacattttcttttggctatgatcatctgaaaatgagacgcaatgctttgtcattgttggttggtgattgctcattaattgctaattcaaatcgctaaaacaatgctgcactctttttccgtttttgtcagagacgagtcaaagcttatacaagaaattgtgaagg

SEQ ID NO: 93205 - DNA, 763 bp, Eucalyptus grandis
  Intron number 1 from transcript Egrandis_v1_0.040261m (loc us Egrandis_v1_0.040261m.g) derived from phytozome v7.0 (c hr-ID scaffold_3; pos 54006254 to 54007016 reverse strand)
ggtatcgcaagttttggtgagtggtaacttccatgcatggtcagttcatgcacgtggagaaggtgatgagtgggtagatggtttatttaggcatgactaggaagaaccagggtttggctggagaaatctttcattaaattttggtgataatttaaaagtctttataaatcaataagtagataattactctttcagtgcgaggaatatggtgttctacttcactcctgaacctagttcaataccattctagcaccaaaggcaaattaaaaagattagctacctatttttccctatgtacttacttgcatgatgactaaattgaatagtcttctttccttctttctagagattcagatactcctccagaaagtagtcgactttgtgattctagtgaacctgaaaatcaaagagctaaaagaggggagggagctgcatatttatcaaagattacagaacttgttattcaagcttactacggagtgatgcggaaaaattcttaggtttttatcgcttttgcagatctaataagccacttccagcgaaagcttgtaatatgctcaacactaatttcttattttagtgaaggagtgatttccactatgaataatgctataaatacaaaaatgtatttacaaaacttggttttatgcagatctaatagacttgtcttggtatcgttagcattattgatcttacttgtactgggcatcattatgtttttgtcctctcgtgttttcttggggtcacgtacaacagtgaagta

SEQ ID NO: 93206 - DNA, 653 bp, Eucalyptus grandis
  Intron number 1 from transcript Egrandis_v1_0.006538m (loc us Egrandis_v1_0.005539m.g) derived from phytozome v7.0 (c hr-ID scaffold_118; pos 53493 to 54145)
cgcgaggaagagcggcggcggcggttctagtggaggtgatgcttcgctgcgaattgagtctttggtcatgtggacgattgggtagtatttggttttaagagcgtggcagataaaggggatttgtgtcttactttcgctatctttttgggacgatggtttgatgttactagcgcactctcttttgggttgctgagctgaaagttaggttaggttattattattattattattatttattatttatttattatttatttatttatttttttttttttgggtgtatgcattgttgataattggtacctgagccgttggaacaactcaagcaatttgttatattcatttcatgctgtgcaaatgccaaagctgaactattgtgttcagatgcataactaagtccaacactagttcttcttttggagcttatttgaatcatgcagtcttgggcagaagattttggttttcttagtttggctcgaaaacaaatatatgcaaacaagatagaaatttctctcccatttcaatccgtgttggactttctcacagcatacttaatccctctgtgtaacgtgtaaagtcggagcttggagatgaatttgtttttacatcgataaaatgaaatctgacagtcatttcttttgcaggcaatcatc

SEQ ID NO: 93207 - DNA, 829 bp, Eucalyptus grandis
  Intron number 1 from transcript Egrandis_v1_0.015493m (loc us Egrandis_v1_0.015493m.g) derived from phytozome v7.0 (c hr-ID scaffold_5; pos 57091775 to 57092603)
cgttcttgcattcggtggatcccaggatcaaattggtgaggcactttccatgccgtgaactgacgtggtcgcaatagattttcgccggtgccgaattttctcgtgtttcgacttcgtgccgtgcaaacactctggaaagagaaggggaacttccaagtgttgatttgcattgagtttttggcaatggggatctgcacacgtcttttgggccatgtcaactagagtaaatccatacactaagtctgctgtttcccctgtttttaagttctgtagccacggcttggaggggcactgcttgtcatttctctggtcttatgtgaattgacagcttttagtcatgatccttgacattgtagaagtgttttaccttttgaccagctgcttccttaccatcaagtgatttctggcagttgctatctccagctgctctgcactgccattcattctagtaagcagaactaagctctgaaagattgtggcatttggagtcacagtatttatcaagaattttttcttctccactaaacgcaccaaagattcaaaagctgtttgcgtgacttcttttgattattaaaaggactcgtgacaaatccttcttttaattcaaaatatttcatgttatgcgagctctttttcatatgcaagattgatgctcaggtgcccttatccacttgctcctatgatgtatactctaatacaacagatggctgcctgtacaaatagtttaagcaattacttcaccctccacaagagctagacaggttattaatttctcaattgtctttggtttgcaggtttggcttctggttcttgttgttttaccagccag

SEQ ID NO: 93208 - DNA, 198 bp, Eucalyptus grandis
  Intron number 2 from transcript Egrandis_v1_0.039360m (loc us Egrandis_v1_0.039360m.g) derived from phytozome v7.0 (c hr-ID scaffold_1008; pos 4059 to 4256)
gattccggtgaatttgaagttgggaaccacaagtgagtttttgatttccttttttttttccttccaaacttattttcatctcactaaatgctctttattggaacaacaattttaatgcttaatcaattaatagctaattaaacgtttatttttttcttgtcaggaggttatctctttaccctaaaggaaacaaggatt

SEQ ID NO: 93209 - DNA, 501 bp, Eucalyptus grandis
  Intron number 1 from transcript Egrandis_v1_0.052791m (loc us Egrandis_v1_0.052791m.g) derived from phytozome v7.0 (c hr-ID scaffold_5; pos 29303442 to 29303942 reverse strand)
ccttggtaataattatcatcttcttttcgattcttgaaattcttttcccattttataatttagataaaaaaatttgcatctttaccttattaacttgaatcatcaaattactcacgagaattggatgcaaaagatctcgattaaactgacatatttcaactcgacatgataatggcataccatgcaagattggatcatccttataaatgaacaatagtttgaatttaacttatttccttcacccatcagctagaggaataagatttccctacaattggcttaaacaaaagacatagttgtaatccatagcactatttacatgatcaaatacttcttttcaaagtgactaaattaatttttttttctcgaacttatcccatgctcagagcttgtataaaaaaaaagtatacataatagagaacttgtttttcctttcctctttaccttaactcattttgtttcgtgcacgcaattcctgattaatgatgtgcaaattgcagc

SEQ ID NO: 93210 - DNA, 490 bp, Eucalyptus grandis
  Intron number 1 from transcript Egrandis_v1_0.044951m (loc us Egrandis_v1_0.044951m.g) derived from phytozome v7.0 (c hr-ID scaffold_5; pos 29253881 to 29254370 reverse strand)
ccttggtaataattatcatcttcttttcaattcttgaaattcttttcccatttataatttagataaactttgagtcttcaccttattgacctaaatcatcaggttattcacgagcattggatgcaaaagatctcgattaaactcacatatttcaactcgacatgataatggcatgccatgcgagaatggatcatccttataaatgaacaatagtttgaatttaattgattttcttcacccatcagctagaggaataagatttccctacaattggcttaaacaaaaaacatagttgtaatccatagcactatttacatgatcaaatacttcttttcaaagtgaataaattaaattttttttctggaaattatcccatgctcagagcttgtataaaaaaaagtagacataatagagaactcttttttttcttttccttaactcattttgtttcgtgcacgcaattcctgattaatgatgtacaaattgcagc

SEQ ID NO: 93211 - DNA, 671 bp, Eucalyptus grandis
  Intron number 2 from transcript Egrandis_v1_0.002283m (loc us Egrandis_v1_0.002274m.g) derived from phytozome v7.0 (c hr-ID scaffold_5; pos 1473858 to 1474528)
cgagctttacccgttcgagagattgaacaatccgagtgagtctctattgcattctctctcgagaatcagcttcttgctctgtttgatttcgtcctattaattaaggcaatctgagttgggaggcaagtcatttaatgcttttttcttcttttttttgcttctagttcgtcctcatgtttatctgcatgtatggtgatgacggttatcagaacagaggagtgattctcctgtggtagtaatttcctggaagcccatctcttttgttgattaaactgttagtcgattcgcctgtattgaggcgtagcttcgttcgtgcgacacggtgttgctgcataaattagagaattatttcgaaagggttgctggaagttttaagtttctgtgctgataattcctgcgttgccagtcgattaattcagaatgtttatatatttaaagcgtgttgtatcaaagattcagaaagtcctgtagacatgtattttgctgcgactgaatttgatgagattgtgatcaagtcaccgggctgttcttgtgattttgctacggtgtggtttgacacgtatgttctttgctttagctcatagacattgattgtcttgcacaaatttcccttaagcgctgcatcttccttgtacagcagtcaatatcccgcacaattctaacactttgcg

SEQ ID NO: 93212 - DNA, 949 bp, Eucalyptus grandis
  Intron number 1 from transcript Egrandis_v1_0.018012m (loc us Egrandis_v1_0.018012m.g) derived from phytozome v7.0 (c hr-ID scaffold_3; pos 57060397 to 57061345)
gagacgtactccccgcgaggaaaggtagcccgcatttcctccgtctctgctgttgcgcattgcgcgtcggatgcggtttctgggtttgggtttgctccgataatgcaggatggttttcgcgatttgctttggacgaggatgatgtggggagtcgtgggctggtctcggttttccaacgtttgcttcgcgtgtttttgttgttgtgttttttttttggccctctgcttttctgggtggcattttctggttttccaccggttttgttaactgtgaattgtgttttatggagtcctccgagagcgttgaagatcgttatgtgagtttccggattggtttctgagagggaatgatcaaagaatgcgcatttttccttcctgggattgaccctcatgggattaggagccatttgggtctagaattagtttcgacttttatgggctttggggatttactttgatggaagcaaggaatatagttgttgcccatggtggcctcttcctcgggtctttgattgaagcatgcccttcaagcgatgacttgcggctttgttcgcgttgttgtgtgattgtcagtggctctgcccttttttaggggtgtaattcctctataggaaggagctagtgtggctttatgccgtttcggtgttgatagaataaatgatcgagatcagtatgagctatgtatttacagtttcttcgaatggaacatgtttcgcatgcaattgcaaacaaaagttgctagctttaggaataggttactagttttccagacaagggcctggtgtctctttctttcatcactgggatctctttatatcatgctgaatttcgttctctcttctattataattctttttatgcatcgttgcgagatggttatttcattgacatcatttcttgggtattcatgttcaggagcacctcataagaaccagtcaaggtctagtgtc

SEQ ID NO: 93213 - DNA, 1015 bp, Eucalyptus grandis
  Intron number 2 from transcript Egrandis_v1_0.015665m (loc us Egrandis_v1_0.015665m.g) derived from phytozome v7.0 (c hr-ID scaffold_5; pos 16453294 to 16454308 reverse strand)
ccaaggttgttacggaatcttggaaactgttggattttttttttgtttcttaaggcttggaaacttcggtgtccgaacgattattccgtgtcttgatatgatctatcggtaaattagtttttagcagagagcgaaagaaaaagagagaactgagaaatttgaatttgataatatctatattctggcgaatatattgtggagttaattttagcacagtagtgcaatagtgtttgcttcttctttggtagtcataaacagtgtattgaaagtaattttgctgtattactctgaatcgtctcttgggatcggctattcatgtaaacaagcatgacatggctggatgtggataaatgtgtttaatttgtagaatactaaaccgttgtgtgataaaacatgaaggacaataacaagaaaaacgaagcgggatgatttgttgtctcaaaaaaccatgaagtcatttatgcacatgttgcattctaagagaaaaagtaacatttcgcgctttacacatccaagtcctaatatactagtttatttatggttgtatgccaattccatgttttacatggctagatatatagaagggtcgaacaccaagacatttacctgcaatcacacctgtatccaagtttgcacagtgtagcttcctagagataacttacaagtacctgttagttaccaacattcaggactgcttcattgttaagggttccataaagggaagagaaggaacgaatgtgacaagccttttagtgtttggcaatctgtttgcagtggctgtcacttaacttctgaatgaccatgtatatataaaaatatgtagcaccggatcaaccgatctatgtcatggtcatcttctgatctcttttgatgtggaacctgatgatattccaactgtcattgtagattccactgtgaatcatgaggtatctatatgctaatgctgtctgccttttcttccctgttatgtggctttctaggtgtcaaagctctcaacaagacacatttttctgcc

SEQ ID NO: 93214 - DNA, 939 bp, Eucalyptus grandis
  Intron number 1 from transcript Egrandis_v1_0.049452m (loc us Egrandis_v1_0.049452m.g) derived from phytozome v7.0 (c hr-ID scaffold_3; pos 70722237 to 70723175)
caaaggtcatctaattttttatactatgttttgtcccccgctgaatataacagaatataattaaagaagtctgggatagacttcatgtcacctatgagggaacatatcatgtaaaggagacaaaaataaatatcttgcttggctaatatgaatccttcaagatgaaacctagagagtctattggagatatgttcaatcgatttacagaaattgtaaatgggttggcatattaaggtcaaccaatgtctgctctaataaaggtcaacaaacttttgcgatgactttcaaaggatcggaaccatgtgaaaacatcaattcaggagacaaagaattatgcctctctctgttgatgagttgataggcactattcaatcgtatgaagtgaaatacatcaatgacgaagaggcaaagatccaatgtgattaagtactcaatccatgcgataattaaaaagatcataaaatagcaatattcaaaagtaagagttacttctttgcttgcaggggttgctgttcctgggcgaggtattaattttaggcttcatttttcacctaactactaattgtgtattccacgtggacatgcctaaagaggatggcaaccgcatgattgcttgagttaaagtcaagtcactaactgcaaaacctatataccaaagaaaaaagagaaacttgcatggactggttaactcttgtttaaaccacaaaatgaggggaaaacaaggaaaataatcaattcttcatggaaagattgtaactttcaaattgctacagtagctactacgaggaccctaagcccccaagccctataaactcagcagagaaccccccccccccccccagggaaagaacagcaaaaaacctttagaaaaagtacccagaatgaaagactaattgatcataagctctttttcaactctaaagcttccccagatagatc

SEQ ID NO: 93215 - DNA, 334 bp, Eucalyptus grandis
  Intron number 2 from transcript Egrandis_v1_0.015960m (loc us Egrandis_v1_0.015960m.g) derived from phytozome v7.0 (c hr-ID scaffold_3; pos 45245933 to 45246266 reverse strand)
gtctggtaattctctagcttttatgcttctcctagttcacttttggcataaactatattataaaagataaaaaacttgcgggacagtatacgaaacaaatgatggtcataattctttttcagaatcatcaatgggctgccaacctttttattctagttaatgttcaggatgtgatttttccgatttcgaagggatacattttcttattaattgacgctgacactactccgtgtacaatatcgacatggatcttcatgattctgtagctcgaagcaatcatgatgtttttgtttgattctttgcctgcaacagcttcgagatttggtcctttgaa

SEQ ID NO: 93216 - DNA, 884 bp, Eucalyptus grandis
  Intron number 2 from transcript Egrandis_v1_0.022143m (loc us Egrandis_v1_0.022143m.g) derived from phytozome v7.0 (c hr-ID scaffold_1; pos 25693535 to 25694418 reverse strand)
cgaccctcaagaacagaggccacgacatttctgtaagttttattttgcatctaattcatactactttaacgtccacaggggaaaatacatgaaacataatttattaggaaaagtgagattatgtgtgtggctaatgtcctgcctcttcctccctctctctctctctctctctctctctctctctctctctctctgtgtttacattggtgcccatgtctatacaaatgggagatttttttggttgaaatcatgtttggcttggttttaacccaaacaaattagccctttatatatatatatatatatatatatatatatatatatatatatatatttacacccagagcagatatatcgaattcaattaaaaaccaaagtctgatttcaattttaaatgttaaaataaatttatgtccaattccattgaattagaatttgctttaagtagtgtgtggctcttgtgaatttcatattggtatttgaaattgaaagaacaatttcgtcaccacatttattaggtaaaaaaactttgccaattgtccatagacattattatatttcactctatgttattctaacacatgacatcactttgaatacctaacatcgcttaagtcatgatgtaggtctattttaaataacactgtagaacttagtaatttttaacgtcgggttgtgccttttggagtgccttttcaatggctttaagccatccaatgaggcacatccaagttccatgctaaaacaaaaaagctaatatttaattacaaagacttttgatgatcttaaaagcaattgtttatgtctttgggtcttctgatgtttgatacaaaaaaggttagacagctaattacacgttgtttatgcgatcgagtgcagcttca

SEQ ID NO: 93217 - DNA, 448 bp, Eucalyptus grandis
  Intron number 1 from transcript Egrandis_v1_0.003113m (loc us Egrandis_v1_0.003113m.g) derived from phytozome v7.0 (c hr-ID scaffold_3; pos 33282223 to 33282670 reverse strand)
ttcatctgcagaagatcctcattaggtgcttatccttcgagtttaggggatcatttcattagtttaattggcaggtcttttgatatatcattcaccctacacctctatggaaatgatctgcagtagatgggtttcctaaccttttctagtcactatttccccgaagtttacgaatgcgtttttgtggtttagtttctaaacaacttttgacagcatagcaagtcatcatccacaatttggaagcttccttgcacgagtacttcatttgacctcaatcatttcatggtctctcaagtttatactgagcccaaaggaagaacacacttgataatagatgtcttctgttagctttatctatttttgtacaccaatattatgcacataatgatttatgtatgtggatgtggatgcagtgtttgattactgtcttactcgctattggtctttt

SEQ ID NO: 93218 - DNA, 917 bp, Eucalyptus grandis
  Intron number 3 from transcript Egrandis_v1_0.050870m (loc us Egrandis_v1_0.050870m.g) derived from phytozome v7.0 (c hr-ID scaffold_5; pos 38439101 to 38440017 reverse strand)
aactggtacagataactttgagcatgtagaatttgccatcatttgggttctatgacaatggtgtacaacggattgtgtggtctttcctctttcaagaaacaagactgttttatgttacttacttactaggttggacatagatagtcctatttgggcatgcttttatcagcagtatgagatatttgatggcctaaagggctatcatatatggtgtaacctttggaccttctaaaatcaaccagtcgactgcatacaggagttccacaattatgtcctttctgtagttaaatttggaatccttggaattttttaatagatggatatgcttgttcttgctatcatatggttagtgcattcacatattttctctggaggagatccaataatgctaaattggatgatttgtctagaggataatgatgtcacccatgtcagtttgaagtttgaacatacagcaattctaaatatgtcatttcttttttcttattttaggaaaaatactaagttgagccactgcaattctccttttgatttacttatgcatgttgattcgaaaggcaaacctggacggtggacttaccaagaatatgatcttccagtgcatatggcattggttggttgttataaggctgttggactattatttgttgatttatttaagttcatagagtactattgggaatcaagaattctcggagctgttttcccatcacaaacacgctctccttttattgaaaaattggtggccctctttacttcagctgcaatgtagtttatgtagatacttttcttaacagcctctggtgtgacttccagaaggagcgccaatgtgtgcacagagacatgcgtttgacattctgacatctgtttttgttgctacagtgtgaccagaaactactttgacaacctcgtgagag

SEQ ID NO: 93219 - DNA, 807 bp, Eucalyptus grandis
  Intron number 2 from transcript Egrandis_v1_0.019297m (loc us Egrandis_v1_0.019297m.g) derived from phytozome v7.0 (c hr-ID scaffold_1884; pos 7176 to 7982 reverse strand)
acagtgacactctggatcccggtgtgtcctattaacttacatgtttctttcattgaattttggtgtatctagcaatcattgtgcatctgggctggcttcttagatgcttgttttgatttgaaaggactgttgagctggagcagttttatcttgtaagactgctgcctataaggccagtgaacttcttgtggcagcacgccatgtaaaagtacagaatcttcggaaagctttggaagtgctttaccctgaagcttttgttgagatctcttgctaactttcaagtatttcttcttggagtaaataactagatatagaagcttgtcaaacaaagaaacatctaatcgctaaacagaatacaagcttttgactaatgctcgtgtttgtctttcatctataagtgacaaggatggcaaatatctctccaccaagcaggaaagttagagctatagttatttttttttatagttaagagtcctcatactgaattgaaaagacctataccacttttcaaaagcggatcagtgggattcactggctatttacctagcaaaggtagagcttcagtagcagagactctaacttcccaacgagctctaaatagttagtgggtcacatatttgggctaatgaatgtcagactgagactttaagattggtggtctcatttggactcttgttactctattcctcgtagagactatgtgattacaaatttctaactgccttgagtttgttttctttctcctgaattttagttgccatatggtttatgacttgaagattttgaagtgcagcagctactggtaca

SEQ ID NO: 93220 - DNA, 1030 bp, Eucalyptus grandis
  Intron number 1 from transcript Egrandis_v1_0.028584m (loc us Egrandis_v1_0.028584m.g) derived from phytozome v7.0 (c hr-ID scaffold_3; pos 2791309 to 2792338 reverse strand)
ctttattctactcaattgggtaatcaactctatcatttcaattatgatcatatctgtatttaaatcctcacatgcactttcaatggttgcaaaggagtttcacagttaacagctattgaaacttgcttgacgaattgtcatactgttaagtgcaatttgttatttcaaattaatctgattcttcttatcatgttggtctactctgaatctccatgtagattctttttttttttcttttttttggaatgaagaaaattctattccttgaaatttggggaagttgaccccataatttagggtggatctcgaaagttcagttttagtctttatgtttttatgcttgacattcatactccctgtagtttcatcagtgccaaacaagtccttcaactactattgaattttggcaattactgttaaatttaaaagttttcaagaccatgtcttgaccagattatccatacactttcgattaaggtataacttttttcacattcatataattgagtccttaagttagcttttgttttgctttgagtaagcaatcgttagagcaaacaatcattattagtcctcgttaaatctgattgtcgcctgagttgcataatcaagaacattgaaagacgagtctaccgtttcatgtaatgacactgacaaataatttgtgctgataactcgacaatagctagcaattttcaagcggtgtaggtgatttcttggcaagcggttaaccattagtaagtgatgttgtagtctagtatcttttatttaaaatcggtaaaaaaaagatcatgtttgatttgtattgactcattcgattcttattatccatttataccctaaatctagcaggtgcttatcaactgcatttgccacgtaattatcaagggagataatatacttcttcctgtttcagtatttagggcatattttgcaactgatcaatacctgaagcttgaaagggaattaccttcactttacatttctgtatctaggcacactttctgaaggagagagaaactttgataga

SEQ ID NO: 93221 - DNA, 433 bp, Eucalyptus grandis
  Intron number 1 from transcript Egrandis_v1_0.018547m (loc us Egrandis_v1_0.018547m.g) derived from phytozome v7.0 (c hr-ID scaffold_5; pos 27012964 to 27013396)
catctcccgatccatccgaagctgtcggcgcacaggtaaatccgcactaacccatgatgatgtttcgatgtatcatcgattgtttcgaatttcgatgtttctcgggggcgggtcggatgtaagaatcttgatgtgggtgtcagcgaaagccgatcgaattcttcgcatttcttcccccgccttcacgttcgatgttaacggaccttaatcgagaaagctctcgcccgggttgtctccaagttagggtttttgcatgttctgcagctggtttcttggttagggtataatttggttgtttttgaaatcccgttttcttgtttgttcgggtgtattggttggatgcgggagaaattggatgatgggtattgataaagttttgatttttttgtctgtttaggttctctctttttgtagggcttgacctactttaaag

SEQ ID NO: 93222 - DNA, 422 bp, Eucalyptus grandis
  Intron number 2 from transcript Egrandis_v1_0.049666m (loc us Egrandis_v1_0.049666m.g) derived from phytozome v7.0 (c hr-ID scaffold_5; pos 66212586 to 66213007)
tgtgccaaataaaagccttgattacttcttatttggtatgttgcacttaaccttcttatttgcaaaatgtaccatttgcttgaaatcaaatggtcaagctttcactagctatggaaactttgaaaattttgagttttgttctttcaattaattataggtttttcttgaactatctttgatgaatgaaagtaaatatactttggtattgtgtgatgagcttcgtcttagttttttgagtaggtgtcacatcctagcacattaatgaattttggtgcagtgatgcaaatctcgaaaaacggggataattggattataaaatagtctctaggatcactctagggatgctctatttacatgaagattctcgtctctaaatcattcatcgtgacctaaaatgtaacaatatcttattagatagtgaa

SEQ ID NO: 93223 - DNA, 551 bp, Eucalyptus grandis
  Intron number 3 from transcript Egrandis_v1_0.017457m (loc us Egrandis_v1_0.017457m.g) derived from phytozome v7.0 (c hr-ID scaffold_5; pos 2134781 to 2135331)
ttcaaatcaacaaaggtagccatttctggcaaaattttgcatttgactagtctgatagatactaagtgtgcattgttctgtcatgtattacgacttcctaacaagacaagtgcatacatgggacatgaagttcctaatgattattgagggatttgagtttagctgcaaggtttaggcttgattaatttgaaagatttcaataatccagtagcttgtcataggatgattgtgtgaattgaattccaccaatttacataatgggatagtattacagtccattgaagaccaggtcaactcttgaaattcttgtcctaggtcttcggccaattcaaacttttccgagtctttcatgtcagagaaattgcgtctgagatatcataaggttctgtcatagattgtgtttttatgcatcattgtgttagtagagcttcaaagatatagaactcctgcttgatgtgtctatctggacatcacatcatcgagtggtaagcctatttggtcctttggtgttctagccctgacagagactggaatttcaggttctgccagtg

SEQ ID NO: 93224 - DNA, 937 bp, Eucalyptus grandis
  Intron number 1 from transcript Egrandis_v1_0.022826m (loc us Egrandis_v1_0.022826m.g) derived from phytozome v7.0 (c hr-ID scaffold_3; pos 4817622 to 4818558 reverse strand)
agaagttttacaccgagcacttgtctgctcttcaggtgagttcagatctgctcgtccttgtttctggatctttgttattcgttcttaccgttgcgttctatcgtgaagatgtgaaagatgaatgtgttatcgtgctgtggttttcttcttgtcggcggttttgattgagatctgacctcgtggacttgaccccttttgaatcattgattgtgattatccgtgtttgatgattatgagttggggccaaaagattagacctttttgggcttattcctgtttcttttcccctctttcatagatgatgaatatttcatcaaatgtttctgtgggtagtttcctcgtgtattcttttttttttcgctggtcctcagagatctctttccacagaaagatggagctgctctgaccatgaacttttgacactttgcacttttcaaatttctctgggcattactttgtgaacttcaatgatacatcttcagaaatgccagcaccttttttctataagaatgtcaggtagtcgctttttgcaatggctattaaacgttttaatccgggggcattattcatgccctctgccatgacaggtttacagatgtttcctttgcaatcctatgtacacattcattgtgtcgttctgattacgatatggtggttcgatatgtatgagtccaatgaggccatggctaactgcaatatggcaacacatctgcctccaatcttctaatcaaaagtacctactgaaaatttcagcactgggtttgccaatttcgtagtgtgattctgattgattgcatctctcttttagagtctgagcttgcacacacatgatttttttggttctgccatttagctacacttgtttttatctatcagaatatgacattccaatgatatttatttcttgatgtgcagtctggttgctgcaagccgtcaa

SEQ ID NO: 93225 - DNA, 841 bp, Eucalyptus grandis
  Intron number 4 from transcript Egrandis_v1_0.053424m (loc us Egrandis_v1_0.053424m.g) derived from phytozome v7.0 (c hr-ID scaffold_5; pos 5974041 to 5974881)
gttcctgctgaggtatcaagaactttttctacaacttggctgtttggcatctcttggtctacttctaactttttatcctccaatctgtttcctctcgatcttcaatatatgtgctctcagtatttgacatatcttatcatggcttgggttctgatgcataattgttgtgatggaacttacttgatgtgtgatttggaggagaatgactatgggtgctctctagaagtttgatctttttttggcaaagatttgttctgaggctatcaattgcaaatttctgatatgtgtacaattgtttaatttcattgatgtttggctttggcccaaatccagcttcctctttgtatgagatgaatagaggaagtgagattttgaggaccgtaaaatatgctggtccaattgtttgatatgtaccgtggaggagaatgattgtcagtgctcagtagaagtttgatcttttctggcaaacattttttactgaggtggttgattggaatcatccgatatgtatacaattgtttaatttcgttgatgtttggctttggcccaaatccagcttcctctcggtacaagatgagcagaggaagtgagcttttgaagactgtaagagatgcttccccttggtcgattcctttaggaagtgggtcaataatgtggtgtgatagacaagtaactctgaatgactgtaatgacgattttgatgcctgagggtgctttgtttaagatccagaaggcagaacttggctcaagatatgcttgagtaacataaatcttgagttctttatacatttcctttttagctgcaggttcttacagagctgaaaccatttgttgtacttgc

SEQ ID NO: 93226 - DNA, 285 bp, Eucalyptus grandis
  Intron number 4 from transcript Egrandis_v1_0.029283m (loc us Egrandis_v1_0.029194m.g) derived from phytozome v7.0 (c hr-ID scaffold_3; pos 74513464 to 74513748)
gagactgggactttgaggtacctcagtttcacttttctttaaacggttaatctcttcttccgtgcatatgattgtcatatagggttaaactacaaagtcttgcataatttgaagctgcgggaccttcttctcggcaaccaatattttgctgttttctaccaactgaagcttctctctcctttgctgttttttctttttgcgttatctactgttattgtaacctttactgtatttttcttctgttcgtttgatataagactcttttcttcatgctcttcttaagga

SEQ ID NO: 93227 - DNA, 961 bp, Eucalyptus grandis
  Intron number 2 from transcript Egrandis_v1_0.031435m (loc us Egrandis_v1_0.030803m.g) derived from phytozome v7.0 (c hr-ID scaffold_3; pos 27502737 to 27503697)
atattcaaagcctagaggtattctcatcctgcaaaagtttgtgtattcaaggatgcaagttgttagagttcctagatgcttggaaatttgaagatttaaggaacttgatagtgacagcttgttgggaaccatctgacatctcagggctcaaaggattgagatacctataaagtatatagatttcatgatgctagtcaattgtcgcacgagactgtgacaaactaatgagcctggagggcttggagactaggagctccagaagctttagacatttttagatgcaagccaatatgtgaattgtctcgagctttcctcatatggaatatgagagcaattgttatgtcaggtattcatgagatcacattctagtgatagtttgatatttgagatgacccctgtcctctaataaggcaaaatcttagatgacaaaatcatgaatgaagctggcagtcctggtgaatcatctgtgagtgattattttttgtacattgctgagtgattcgtgtttttagttggaatgaaatctttctcttgatcatgaaaggaatgtaactgtcagcccttgttggaggactagatcataagagtgccttttgagaaaataattggtcatttattatccaatataatcgcaggtcatctataacttgttttgtttacatggcgagctaaacttttatcttctgttgatacttatgatggcaggcacactggcttatatgtgatattaatacggttgaaattacagaatgttgaaagaacaagcagatctttaagaaaatccctttgacctagtcatctcagtttcttaaggtggagactgaaatcccacacttaggaatgacgttaatttgcttgcttttcatgattgcttgaattggtttttttgttctacaatattgtcacttaattttcttttgtttgttctcatatgattgctcaaggtaatttggtgattgac

SEQ ID NO: 93228 - DNA, 951 bp, Eucalyptus grandis
  Intron number 1 from transcript Egrandis_v1_0.047627m (loc us Egrandis_v1_0.047627m.g) derived from phytozome v7.0 (c hr-ID scaffold_5; pos 40147888 to 40148838)
gttgcttgagagagagagagagagagaagcaaagggtgattggtcatggaggggagagaacgagtaaagtgatggagtctctctctctctggccatgggaatgccagtacgaaacacaaagccaaaaaaaaaaactgaaaatcgaaaatccgagttgatccaaactagggttttgattcagtttgtatttagtttgggtcacatttggttcgttcagccatttatcctaatggtttagttcggttcgatttttctcgattcggttatcaagaaaaccaaaccaaaccaaaccgaaccattgacacccctaatcgacaagatgttttttccaattatcagaaattgatactaggacgtcatcggccgaaatgttcactgactcatttgaataagatcaaatgtcaaaacttgatcaaccaatggaaaaaatgttaagtagatttaatgcacttatcccatttctttgctagaaataagaaagttcggaacacctgaggcagaatttttggtgtgtacaggccatggtgggcgatgacatcgtgttacaaggaatttaagagtttttaaatcgaaatctcaaccaccgttaaaagttataaatagctctttttgagtaagcgtacatataaatcacatatatccataagtacatcgtcatgtataaatccgaagaacatgaattctttgaatgactaaattttgaagccttaacttgtgtataaatccgaagaacatgaattctttgaatgactaaattttgaagccttaacttgtttccattggtgtggagctcttggagttctaattcaacttggtgggaatacatgttggttttggttgtgatcatcataaaatgtgatgcaccactttatcattattgacttgtaaattgcttgttatttgcttattcaaatagaaagaattgtgaaggagatatccactcttctaaac

SEQ ID NO: 93229 - DNA, 845 bp, Eucalyptus grandis
  Intron number 3 from transcript Egrandis_v1_0.041852m (loc us Egrandis_v1_0.041852m.g) derived from phytozome v7.0 (c hr-ID scaffold_5; pos 62698009 to 62698853)
gaaccccacaagattcttgaaacaggtattgatataaaattattattgataagaacctctgtccccagttatgttgctaactcctatctcaaatctaaatgagcatcacttaatttgagattcacagcactgaactaaaactcaacgttcatcgtatcctcgtccctttgtcaactctgtctcaccaccctccaatattgtggtcatcattttgaagtttgtgttcacttcttcaaattaaagccacaaaaaccaattttcgtcttcagcaagggaggagtattgggctggcaagggaggttgtgctggctggtgactaggacctaaaagtgggcgaggttaagtgcatgtcttttctctcacattgccaaggggaggagtattgggctggttgataaggcttgagtttttcgctttgtgtaacacattttaaagccatgagagccattggtccaaagcggacaatgtaatatagtggtagccctcggatccttacaatcatcgttgagttcttacctctgatagggttaagctgcaacgctctctctaccccaacccccaacccaccctccaccaccacccccccacccccccatacacacaaatcttggcgagatcgaggtgtttctgtcaggatcttgtagccgtggcctggcttcttagaaagctcagtgcagcattaagctccctaactggcagagagggacagagagaactcctagtgattcgtcatttacgactactaggaaagctcaataagcacacgattttgatttatgattacttttagatatatcctttatcagtcggataacatttgatgttgcagtgggcgaacttgtgca

SEQ ID NO: 93230 - DNA, 878 bp, Eucalyptus grandis
  Intron number 1 from transcript Egrandis_v1_0.052698m (loc us Egrandis_v1_0.052698m.g) derived from phytozome v7.0 (c hr-ID scaffold_5; pos 46503100 to 46503977)
agagtttctttgctcattctgggtaggttctaattttgcttcaattgtcactgctttaatcgcagtcttgcgcgcaggggatttaggacctctcagagtttcacgtgtcgatttctagaccaatgatagtcgagaggttcctgcaccatgtttgtctcactattccctttttgtctgatttgaacatctcctaaaggtacgctagcaatgacatactatccttagggaggaccgagtagctcctcgtatttgagcatccccaagcatttatacgagtcgtgtcgttgcaactttctttgttccttctgttccaacagctcttcattaaatccccacgtgaggcttcacttgttctttccttttgtcggctacgacagaagaaaatagcaaaggaaagaaacaaaagaagttaacgaaagaggacaaacaaagcccacaattttctacttagacaaatcctctctctctctctctctctctctcttttcatgatggccttccctccatttcgacttcgtctccttctactatctttactttcacgttcacatggctgcagagatgagttcaagacaacaaaagaaaccgcttcacgcttgttgaacccacatgtaatcttattcgtctgacaatttcggctgatcaattcacatatgccaatatttgattcgcacatggttgaattcacatatagattcgctggtccgattttatttaacggctcaaactcaagatatattttaaagattttttatgaaggaatttgaattggctaagtatcataatgatctaaagcaatattgactctttttttattatctcattttggcttaaaaatgccaattccgcagcagcatttggttttgagaacttggcga

SEQ ID NO: 93231 - DNA, 1033 bp, Eucalyptus grandis
  Intron number 1 from transcript Egrandis_v1_0.048842m (loc us Egrandis_v1_0.048842m.g) derived from phytozome v7.0 (c hr-ID scaffold_124; pos 6475 to 7507 reverse strand)
gcagcgtgttcggcggaggcacgcttcacatcaaggtctgtcctttagcttcaatgcgtcgctttggcttgatctctgtttggttttgagtgccattctggattttttttttttttgggtggtttgagcttgtggtcactgatgccgagaggttttctgttggactattatgtcgggtttggtacgttggaatggaatggaatcaggaaatgatggggaaagcaatggaatggaatgatgattccaagtcttggtttttggttcagtgattgtggaggacagaatggaaatccttgtgtttgagtgcgattctggaagattttgggaggtttgagcttttggcggtttggtaatgtggagagatggtcactctgttcacaagcttttgagcttttctggtccactgtcgctgcttaattcaattcgctgctgttcgattttgtgataattagggcagacgtgaggttgtagcgtttttgttggtggggtctaatggccatcgtttgccagcttttggcagtttctgattaattcttggtaacttaggtacttagtttgagcttgagtttgaatttttctaatggattcaaagtaccgaactggattaagtttctatctacttatggtccatttcttatcaactgaagtgccttgcttcaatatgtttctagcggatttcgccacttgctgtggtttcttttcttctcctttcatctgcttgtttgtacttgattaagcgccacgaattggtggtaccatggttggtcatttgagttttttgtgtctagggtttaagtgttggaagaaggacttagtgatttggttgctcatacaagttaggttgtttcgtttgatgtaaaatcaatttatcttatggaggcaattccagtctaggtgggtactgcctcatgttgatagttcttgtttttgcatatgctctgctaaaaatggaaactaacaactagctctaggtatccggctgtaaccatgagtttggattgctcatccaggtcagcaaagcccatagctggac

SEQ ID NO: 93232 - DNA, 661 bp, Eucalyptus grandis
  Intron number 2 from transcript Egrandis_v1_0.023548m (loc us Egrandis_v1_0.023548m.g) derived from phytozome v7.0 (c hr-ID scaffold_282; pos 48207 to 48867)
tggctttagctgctagagactcggtctctttccaagtaagacttttcggggtgatgaaaaactctagggccattcattggcattctcttgggtttgttttgaaaacttttcttcatgagttagtagaattttaataacctcatcaacactccatgacacgtgctcttgaaaaaaactattgtggaaaaagcttttttaaccatacgatggcgacactagattatcaagtaaaagctcatccgtcttctactgatactattctcgaccctacacatacatcggccctaattatcttttgatttgtgatcaatccaaagaaaaatattcaccggtcctaatcattatccaattgaacgatattgcttctacaaaagtgtcccgacactttactatgaaaaagttcaataaggtcgatcgatttgagaaacaaacgtacctctttttctttttgttttttcccaaattaaagttttctcttgtttctggttgttgaaaattcccactaataatgtgcaaatctctcacaacaaaggtgatcccgatattggtcggcagcttctatatatatcgtgtatttatattatgatttacattaatttgaagttttagtggatctcacatgattgcaacaattaattgtgatttgcagttcaaaaagtcg

SEQ ID NO: 93233 - DNA, 941 bp, Eucalyptus grandis
  Intron number 1 from transcript Egrandis_v1_0.020850m (loc us Egrandis_v1_0.020850m.g) derived from phytozome v7.0 (c hr-ID scaffold_5; pos 4408988 to 4409928 reverse strand)
ctgttctgcgccaaccgtcgcttgcgacgatccgggtaagatccgaaattcgcgtttgcgtcagtttattttggattcgaccgttggaaattgcgttgggggtcacctgtttgacgaaatgcctctgtgagcgtgtgcttcagcaagatcatatttggaaacgcattataaaatttctgcttctctatctatttatctgtttctttgttctcggaacatgacagaaattcgtttggtaacacaatttgatttttctatttttggaatagaaatctgttccagaaataaatttgaagaataaatcagaagttaaataattcttctcaatttctaaccaaaaatcaatttctaatcaaaaatcaatttcctttcagaaattttgtcatatgcacccagtccgaacagttggtgttgtgtcccgtcgtgaattcacgcgtactaaaatggactggcattggtgaaaataatttggtagaacgtatagcagcgtgcggtgatcaatacttgtgtgctaaaaggtctgcaacaattgggccaatttatgtatgcgctcccgggccatatgacgcgtcgtggggcgggaaaaaccgcaactctaccagaaaagagcggaatatctagcttaattttgagtaaggagtatcaaagaagttctagtgatgcgcaatggttagtatgacgttccttatccatctcactcaatgacctggccctacgtttatagcaacacgttggggctatcaatttgcatagataggatagaggtttgcattggcaaagagaataagcagcatagatgcatgtgtgaaagccaaaattttcagttgaaagactacctggaaacttgaacgagctgaaatttcttcctttcttttacagagatctcctgttctcattcgagttctgtgtatctgcagggtggttttcctgacgttgaactg

SEQ ID NO: 93234 - DNA, 1020 bp, Eucalyptus grandis
  Intron number 2 from transcript Egrandis_v1_0.048366m (loc us Egrandis_v1_0.048366m.g) derived from phytozome v7.0 (c hr-ID scaffold_3; pos 72171674 to 72172693)
tcttcctcgcttttctgcttttcactcgatacttggtgagactctctctctcaccctctctctcaccaacccactttgcattcctcgagacttgataaaagaataatcataatttccagaaccctcgataggaaattctagatatatttagattggacttatttccgtatgtttttttctcaagggcctatagataatgcataataaagaaaatgtttgagcatcatttgacgtcacttaactacgtgatcaaaaaatattttgcatggcctccctccacccaacagtttaattttgacattttggattgtattttctaaagaaaagctaacttttttctattgaatttgttagttagtaataaatcaagttttatattacgaagtttgttctcaattatcatcgtctctttgttgcccgagcaattcgaatctgatttgaactcaatggtcaagttttaattgaatagtatcaattagtcaagtaatattaactttaggtgccgcccttacaactgtaagggcaaagctctacctgatacacatgaacgggatgatttttgtgtaattaaagagatggtcaagtcataaaattcaaataccctatgttttcaaaaacaaaaagacaaaaaaaaaaaaaaaaaagggacgatttcgacaatctgctcataaattctgtgtcgccgattgctccatattggagtaagaacatgtgggtttggcgttaagatgacaaaggagggaacctaggcactttgagctgcatataagatttgacgttgatggtaagaccaataaacgaaaataaacgaaacatataacatgataaagcatgaataaacacgcaatcattaaaaaaacatatatcatcatgtggcatttgagtgttagcttttatataactcgaataagttccacatgtccatgattttccacctctaatatcgaattcccctttttcccgtgatcaccaaattttcttccagaagaaaaggaatccgaaacttttttgggtatcggc

SEQ ID NO: 93235 - DNA, 460 bp, Eucalyptus grandis
  Intron number 1 from transcript Egrandis_v1_0.031424m (loc us Egrandis_v1_0.031424m.g) derived from phytozome v7.0 (c hr-ID scaffold_3; pos 57539918 to 57540377 reverse strand)
gttggtggtgagaaatttgatgttggggggttttgttgagtccttttttggtctgcaaatttggttctttgtaatatgtttatgatgagtctttgattttccaaaaggaggtctctttcactctggaaggatgtaatcatgagtctacggtgtgttgattggaaaactggcatgaattgtaaattagtggcacgggtagttgttaatcaaatcgtttgcaatcttctcccagggcctaaaatctattggcgtgtcttgtttcagttgactcggtataagcaatttcattcaccccttttgattcaacctgtagtttctgcagaatgagttattacgactaggtgatgtctttggtttcttgctagacttgcactgtggaatcgttgttaggaagtccctcatctgttctccattttcctgttcaggttctcattctcgttgaagtagtttaacaactgcc

SEQ ID NO: 93236 - DNA, 347 bp, Eucalyptus grandis
  Intron number 2 from transcript Egrandis_v1_0.012050m (loc us Egrandis_v1_0.012050m.g) derived from phytozome v7.0 (c hr-ID scaffold_5; pos 36232092 to 36232438)
gacggtgagtcttggccagaaattataggaaatttttcttttcttcttctttttttctttttgtgttgtttggtcctctgttatggtactccgttccatatcgattccgtttctcaagacgttggccaagacgcacaaaatgaggaaaacgggttcagaaaattcagtgaattctgttttgttgtgttgttggtttcaggttcttgaccattgatatcggtcggcatcctttcatttagaattttaatatcgagactttcctgaatgctgcagcaataatcgaaatttatcgggtttgaattgatcccttcctcttcgtttcgcgtggaaattcagatagggaggcc

SEQ ID NO: 93237 - DNA, 727 bp, Eucalyptus grandis
  Intron number 3 from transcript Egrandis_v1_0.005956m (loc us Egrandis_v1_0.005956m.g) derived from phytozome v7.0 (c hr-ID scaffold_3; pos 11136987 to 11137713 reverse strand)
atcgggttcggttccatcgccagtctcctggtaatggattcatcatgtcagtcaatgctattagaatgaaattctgttacacagcatctggtttttccagaaaaaaaggagtcgcaacgataactaatctatgtgttcgatttaccgatgttgactaaatcgccctacgaagaccattcgctatttcttgaagttcaatctctcccactgattgaaccataatctaaccctctaatcgcccttagaaagaggagataatcaaagattgatgctttaggacacatgaactgattcatgaaagtgatatacaagataaaagtcaacgatgtcaatttaacaaatataattttgtaaatcaaaaagtttctacgatggaaaacctacaattaacataatcaataagtggatttcacggtactatagattacctctttcatttcgtgaaattattgcttgggtcttatcttttttttttattttttttatttttggggttttttgccaatgccgtcaccgttgcttctggattccttttcatccgcgaatcacccactgtcaatgaggatgatcacgataggcttgcacgtcttctttttgggtgggtggaaagtgacatgcgaaacaatgaaacagcacgggtccttatcaaggattcatatgatgccgtgccttttctgggcatttgtctgattcgtctgttgttggaattcacgttaaccagggttta

SEQ ID NO: 93238 - DNA, 1023 bp, Eucalyptus grandis
  Intron number 1 from transcript Egrandis_v1_0.043283m (loc us Egrandis_v1_0.043283m.g) derived from phytozome v7.0 (c hr-ID scaffold_2; pos 44538600 to 44539622 reverse strand)
ttcggcaacgccgtccacagatccgtcaacgggtacttcctcgcgtcttgctccatccttccgttctccctcgcctcgcgatgctggtgtgcgcggccgttttttccccgagctgcgatcagctcccttctcttcccgttctcgcgcccttcgccgcctctgcttgtccgagtcgcgtgaataattcgacgcgttcggtgcttgatctagtgattccaggcctccgcgtgtcgattccggtgcgactcgagttttccggaaagtagttctgctgctcgttcgcgttttgcttctgctgttttggattcgacactgcgagctcgattcgcgtttttctgctgtcgtttgcctgtggttagccggtggtttctaattaagtagggagattaagattgatggaaggatgcagctcatgagttcggtttgtacgtccatcatcatggatccgaggaagttggacttcgatgcaaacggttatgatctgatgatcagtttgcttttggtgccacatgcacgtaaattgaattgacttaattcaagctcttaattaaaagaggcaagacttcatgaactggcttgatggagcatctggctttaaataagttctttttcgtaatttttacttttgcttgatggtttgcttcggtccttttatgctgcagtgacgattattcattgtgatgcatatttccaatatatatgcatgtcgtatatgttctgggacctgcttttgagccttcttttttattttgaaactctcaaagccatattgtgggagaaaatctacgtcctaaagcaccttcttaagttccccttgattatgtgttaacatgctgaaaagtatagtggactcatggccataagatcgaaaaatgattaaattgctgattattgatggtgtaccttgttggcaatttgttattcttgtaatccctatgatgaatacaattgtttgatataagtattggagatgtggtattgggttgtgtataatccttcttatttcatccagattgcttggct

SEQ ID NO: 93239 - DNA, 1057 bp, Eucalyptus grandis
  Intron number 3 from transcript Egrandis_v1_0.025911m (loc us Egrandis_v1_0.025911m.g) derived from phytozome v7.0 (c hr-ID scaffold_5; pos 3410628 to 3411684 reverse strand)
ggcctctaggttctgtaacttctgatttaattttggtaatcgtttaattagctttgatgagggggctcattatagtagctctattgtagttccgcttggagtgaacgaaaaagcaataaatgtttcttctctcttgttgctttttgttccctttgtgcaacttcatgtattccataggtgaaagacatgcataaacaattgtattggcttggtccttttctgtagtcttgtgtagtttatggtgacatatcatgtgaaatctctgttctgggttcacttccatcaaatcgaattgaagtcccatggtgcttttatcaccttccttccgtgttttttcggctgagtgtgattgtcgtataggttgtcttggcttgaatcaagtagaacccaataggatctatcagaatggtccggatagaatactggttgtaagttagtatcacaattgacaatgttgatgcatgagattcagcttgtgatgaattatatacttctagcagtttctattatctgatttttgcttgcactgctttgtcagggtcctattcttaaataatactgtaacctttgaatcttggattgtttaactgtggcccatcttagtagtggatgtattagttaagtcatatacacgctggctgtttccataaatgactcatattggcatatcagttttttcatatgctaatttaagccaactcatgaattttaatcttttttttttgaattattcatactcttcttttatgcctttattatatgcattgcaattttaggtataatttatggtctgcagtttaaggattgacagaggcttgattgcagaataatcttgatggttatgatctgtctggattgaattgccaggcaccgagagaattgattccttaggcccgctttctatcataatagttggatcactctggatcatgctgattttaacttgttgacttatctctagcttatgtagtaactctacatgtcaacctttttgtttagcttaatttgtcctattctatcagtctttgagcttccctgcgatttactctgagacttt

SEQ ID NO: 93240 - DNA, 403 bp, Eucalyptus grandis
  Intron number 2 from transcript Egrandis_v1_0.044890m (loc us Egrandis_v1_0.044890m.g) derived from phytozome v7.0 (c hr-ID scaffold_5; pos 27753058 to 27753460 reverse strand)
ttcttgttgctgatctacaattcttaagggagcaagtaacaatcactcggataagtgagaattatttggaactcggaggtccttgtttatttcaagccgtttactatgtcagttttggcgaggtctattggggtcgaactaccgttgttctgaattttctaactggcgtgaggctataaattgggaagacatgttaattggtgataagttggagcgtggtaggtttgcacgaatgtgaacttgaaaaaattcaaagctgaaccatatcctttagtttatcatggcaattagattggtgaccctgggaaacttttctcactttttttttttttggtgtgggggtggggtgtggtttgaaacagccctttttggcaggttacgattgctcgtgtgtataattggg

SEQ ID NO: 93241 - DNA, 506 bp, Eucalyptus grandis
  Intron number 1 from transcript Egrandis_v1_0.004176m (loc us Egrandis_v1_0.004176m.g) derived from phytozome v7.0 (c hr-ID scaffold_5; pos 38288518 to 38289023)
aagcacaccaacgaggacatcaaggagtgtaacatgtaggtagtctctctctgccttgcgatcctgtcggggtttggatttggtttgcatcctctgtgatgtttgtttggtgggttggaggtaatttgtttgaattggttttggtatgactggtgctagtgttgtggtaggtttcggttttaagttttggcgtgcgaggtgaggataactggtcatggtccttagttgacattttgctgaagtttttatccagagtgaactggtggaagggttttggggctcgagatgattataatatgtgcaaagcttgttagagaatattgtgatgcaagagcattagtttgttgtttttgggtttccttgttcttttcttgtcaggagcgtgctgtgagatgtttgtttaggatgaggaagggtgtttaaagttgggtgggtgtatagattaaatgtctctgtgtgagttctttggttatgtgactgcaggtacaagttgggtttttgtccaa

SEQ ID NO: 93242 - DNA, 593 bp, Eucalyptus grandis
  Intron number 1 from transcript Egrandis_v1_0.041760m (loc us Egrandis_v1_0.041760m.g) derived from phytozome v7.0 (c hr-ID scaffold_3; pos 7601720 to 7602312 reverse strand)
tgtgttgccaatttcatcagcgtttcgtaaatttggtaagacgatttttctcgatagcccactgttgtacttttgtcttttaattagttcaaggaatggagaagctggcctggatgttttttattttttaggtggtcgatctggcctggaacttgacgcgatgcctcagggagaaaatcggaaaatttcagttttcctttacattgaaaacaaacactaataattttcgtgaaccgaacggacccttacaacttaaatttgggttttgtagttcttttcattaatttgtatttttcatattgggccaaaacacttaatatccaaattttttaattttctgatgaaagaggagaggaaaaggtcgataattttcttctttttgtctcctttccctttcgcaaaataattaggtcgaatttaatcattttccactcaaaatagtttcacttaatatgtcatcaatttccacctgaatttttcattttctatatcctatattgtacttaggttgttttgattggtgttgaccactattaattgttccaattttcatctcagtcaaacattatcttcagctcgcaccagaatcactg

SEQ ID NO: 93243 - DNA, 1044 bp, Eucalyptus grandis
  Intron number 1 from transcript Egrandis_v1_0.014944m (loc us Egrandis_v1_0.014944m.g) derived from phytozome v7.0 (c hr-ID scaffold_3; pos 61776659 to 61777702)
ccataaggctacccaatatcttaacagctacaagggtacaaatcattgccaacttaggatgttcttatgcggcatttcttttcacattaatctgtcatgtttatactagataagtacatatttaatataggtcacatttaatgcactcgctttattagtttcattcacttgtggtccaattatttatctcttaaacgtcaacacttggaggcctttgtcatctcttcatttggccttttattgttaactgatcgtttcaactatacacataggaaaggataagatcaacattgacaattctgtgattatggtgtggcaattgtgctcgagtttcgttggccatggaggtcataaattttatgataacgatgaatagtgagacatatgatgcctgatttagaatgcagtggtatatttgcataaggagactttttagccttcgcttgaaatctaatgagatggattcttttgtggaatctcatgcagttacgtgtggtagaaggcacagattcttcacgagatgaatttggctttatacatggcaggcaaagtatatcattgtgcaccactttcatgcttgttaagaatgctaagcttataaattgagctattttgagcttgtcaattcccggaaactttgagtagaaatctacttgttgaatctaaatatacgaactctagaggcacaatgataggtattcccagaaaaaagtagcatgggtgaaggcactgtatttttgcacagagacagcatagatttctattaattctatagatacacaggtagacagtttaagtcaacgttctacgtttcttttgatcattgtttcaactgggttttggtgtcatgtgtatcatatgctctgttcatagcgttaccgcgtctctttgcatgaatttctaaatctatcatttggtgcccggttctttgggctctttcttttgcattttctattaactttgggtattacatttaactgtcaccactgaagctgataaaatgaagcaggtatcgagattagtctatttaaactcaggtcgtgc

SEQ ID NO: 93244 - DNA, 798 bp, Eucalyptus grandis
  Intron number 1 from transcript Egrandis_v1_0.029618m (loc us Egrandis_v1_0.029618m.g) derived from phytozome v7.0 (c hr-ID scaffold_3; pos 55556601 to 55557398)
gatagctgagttcctcatccggtctcctttcaaggtatttgtttctctcgattctcctcttcagattgccatgatctctcggtctccattgtcgttgctatttctattcagttgtttcttcttctagatatagacgtatacgatgtttttcctgttgatttgagcgctgatctggtttttcccatgatgaatttacggcgatgagattatatctgaagattacgccaaattaagtcatatatctgcttttctcttctacatgttcagttttctgatttgggatttcttaagcttcttattcgcatgaatcgaactaaagtatgacaattaggttgccaaccagcgcaagaaagcagtgttttgaaatgaaattttaggtcatggaaaagggaaggtagttgtgaaattgggttgccaagaagcgaaataacgcagtattttatttaggcgaagtgaggtaagaatttgtgcatagattaaaccatcttctaggaaggtgagtagagcagctgcgaatgtcgttctgcttctattcacttcaccatatccctggactttgacttcctcctcgcagccattccttcttttgctctgcctatgttgatgaattaatctcttgttgcggtgtctcatttggaggattattaccggcaagatttacgagttgagactgctttagatcagtgaaaatttggagctttcttttatcctaacttttcctgcgtcctccatgtaacttagattactggtaaattgttgtcaggcctaacttaagccgggaaggaagcgtgacgtgag

SEQ ID NO: 93245 - DNA, 999 bp, Eucalyptus grandis
  Intron number 3 from transcript Egrandis_v1_0.003094m (loc us Egrandis_v1_0.003094m.g) derived from phytozome v7.0 (c hr-ID scaffold_5; pos 60167671 to 60168669)
ggaggatttggaacctggcgcggcagaagaagcaggtctttgctcgtgttgtgtgatttcgtgctctgttcgtcgggggggaatcgattccggttcgatgtggattttcagagtttccgtcgtcgtcgtcgtcgtccgagtatcttgtttactttcactttgattgaaagtagatggtggtcgatgttatcgcttgtgattacgtgctgcggatttttttggttcatctgcaggagaaaggacttggtttggggaatttggcggttgttttgaatggctctacttgtcggctaaagttagcttaactagttctattcttgttgttttgggaattgctggggccggaaactcagtctagcttgggattttatccgaatagttttgttctgtgcgagtatgtggagttcattgtgtgagttaaaagagcaaggcttggaaacttttcgtttcctgaattcttctggcaagaggatggaagcgaaccgtatcccataagtattggttttgatatttttccccctcaattaagatgggggacgaggaacaattgagaattatgattttctctgttttctttatggtccctcttgaatactgattcttttcatttcactgggccggggtataagctcccatgaagttgataactgtgaaatagctgtagatattaattcaaggtgagtagcttatagaaggatgcttcatttttgtggccttaaggctattttctcactagaagactgatttctactggaattaattcatttaacttgcatttggcatctatgatttctatgcaataggctgttttcttttatagttcatatggttttgttttggaggcgggattcataactgatactgtgatattactttctgcaaattgagagaacataaatgtatttctgttcaggctttaagtagactatactgatttcaatttgttgtgtccatcctggactagcttgaaggtgaagaagcccagagaaaagctaagcg

SEQ ID NO: 93246 - DNA, 650 bp, Eucalyptus grandis
  Intron number 1 from transcript Egrandis_v1_0.046659m (loc us Egrandis_v1_0.046659m.g) derived from phytozome v7.0 (c hr-ID scaffold_5; pos 43866847 to 43867496 reverse strand)
cggtaagagagtaacaaaatcatattatattattgtccaaaggcacgttattttctggtcttgtgattttttttttctctttatttcaaagcaagcgaaacaatataatcctccgaggtccttaacccaattttttcttgtcttgtggttttgtttgcgtacaattttttcatatgaaccaatgaatattctctgtagccctcgaaaacaatcaacagacgtgctatctaagctcaataaaacatttttcactacgtcaacacatttctctctgggtggctcgggactgtgggattcaatggatctattggtagaagaattataccatttcataattggtttaattcaaaccacataattggatccataaaactaaatcatgttccaattcaaaataggtcatctaaagtaatacgaccacatagttgcatgctgccaattgaattacattattgcggcactaaccgcaagtagcatgtgagaaatatttcggcataactttaatcctagtgactccgaatcatacactatcaagctaattccggtgtttattccatctgcatacatacactagccataaccaccgttgcgcttctcatttcaattcttgaataggatcttgctgggcattcgcagcgactgcaactgtg

SEQ ID NO: 93247 - DNA, 615 bp, Eucalyptus grandis
  Intron number 2 from transcript Egrandis_v1_0.023087m (loc us Egrandis_v1_0.023087m.g) derived from phytozome v7.0 (c hr-ID scaffold_5; pos 18803889 to 18804503)
cacattgtaaatcacctcccgatcagttcgattccgagttccatcgttttttgatttcgcttcgtgttgaccttggcgggattgaatcggtgacgccttgattaagtgattgatcggttcctttcacttctaattatggaaaattccggattggtttgcgttcttcaattggaacaaagctactgcgcacgtcgtggggagttcgattgtcgaaactccgatcgcatctcatggttgcttcgtccttagatagctgtacaagtcgcttcaagttcaaatttttacctgaaaagattagccatttatcactttggattggcttctctgtcgtgtgatgttgtgcacctgctctggttgttctttcttcgagtacggcgatgtctctcttcctatggaatagtgggttgtatgcaatgtcacatgtatggaggattttgtcttaacctgattctagcctccgaaaatttttgacaaacccagatcgagacgagttaccattaccctatatcttgaagttgctgcaatatgttggttaggtatgataatttaataggttgtggcagtgtcctcatggtgatggtctgtggtaggtgaggcctattgtggagaccggat

SEQ ID NO: 93248 - DNA, 772 bp, Eucalyptus grandis
  Intron number 1 from transcript Egrandis_v1_0.024710m (loc us Egrandis_v1_0.024320m.g) derived from phytozome v7.0 (c hr-ID scaffold_5; pos 1034646 to 1035417)
gaatctaattgggcggaaggggggagattgcggaggtcacgcaaggggtggattgattaaagagcggtgttggtggaagattcttatagtataaaatcggaaaaagacaacataatataagattatcgagtagattccctttgtcatatccacatcacttatgcatgccttgtgaggtgaaatttttcctcacgcgtgcgaaatcgcaaaacccatttcaccaatatcttttcttatacttccactatcaaattttttaagttataacctgaaagttaaattttttttttcaataattcatgatctcatgtgataacactctcttttcttgtttctgtatttatttttttggacggccgtttcttttaatttcacattactttatgctcgataatgatgaaaaaattcgttcttagaaagtgtactatagaaaaaaagatttaaattaacttttttttatcaatgaataatctctcatctgccaacgctaggaaagtcaagcaagtcacaaaaccattttagaaacaaataatcaaattccgtaatgttgcaatttacaaaaaaaaaagagcctaggatgataatccgaacaagacaagtgggggaagcaagcaatgtataaactgtagagtagacgagcggtttctgaaagagagagaagagtaaactactaaggaggagcgcgtactccgcgcgaaagtggcgaccacaaaactaaacaaaagcaaccaccccaggagacaaaaacctcctcctcctcctcctcgtcttc

SEQ ID NO: 93249 - DNA, 861 bp, Eucalyptus grandis
  Intron number 2 from transcript Egrandis_v1_0.024710m (loc us Egrandis_v1_0.024320m.g) derived from phytozome v7.0 (c hr-ID scaffold_5; pos 1035437 to 1036297)
agcgcgacccccctctccctctttctctcgtaaaggtgactgcttttctctcgaatcttggttgatggtgattctcgcgtgcaattcgtgcgcatcgggtgtgtcagagggtcgtcagattgattgaattttgtgggtggagttcggcttgacatttagctcgactgatcggatgaactgggctctgatttcgttttgtaaaatttgctttttggtcccctgggcggggagttgattttggaattatggggtttgagtaagctggctatgcttgtggtttcatccggtgtccatgatctcttgcttggtcgattcgagtgtgggaagcgaaaagggttggtttttcccgttattgatttcagggtagtggatgatgtctgtaaattgagttgctgagcgaaacttcagttgggttttgcgtgttttattcattacggccgtcgacatgttgccttgattctttcatctcagctgaaatggctgattgagatgctatattatctatatagcagcttttagtgttgtgattgtttttcccctattggaaagagccataattgagctttaagttctagatattgcggagtaggttgtgaatcaagaatatgtttttctggtcatgctagtctttagtgatttctaggacaatcatattagtttactctgttaaacaaagaaccagagacattgacttttctctgaatatatccatgatgtttgtgcagctacactttgacttctaatagactatggtattgttaaatttctactctagttcattggacgccggattgtttttgtaaccaataacttttctttcttccaggacaattcagattcttcttttacgacgacgcttct

SEQ ID NO: 93250 - DNA, 843 bp, Eucalyptus grandis
  Intron number 2 from transcript Egrandis_v1_0.020924m (loc us Egrandis_v1_0.020924m.g) derived from phytozome v7.0 (c hr-ID scaffold_3; pos 33015673 to 33016515 reverse strand)
tctggaatcaccgtgagttttctctacattttttctagctaaacatgtctacataatcaaatggaaacgttttggatttattttttctagctaattatgatcctataatctgatagaaacattttggatttattcgtggagacgtatctgattgatgattgcttgcttgcaaatatttcttctctttttctgcaatatatgtgaaggctattgaagagcttggtaattaccacctaggaacaaatatatgtggacgctattgataagtcataggcttattttgcaatcaccccctcagaacagagatatacgcgtcataatctgtttattcgacccgccaattaatagttgagtggatcaagtcctgtgattatttatctagagaagctccaactttgatgtgcggtgctatcttcagtgcttattcttttggcgatctatgtcaattcctatctataacaaattgccaaatgcataatatggcacttccgtggagaacatggcttgttttccatcattttctatggctatcaggaccctgaggctctttgcgtggctgaacgttggcccaatttctttttccctggaaagaataaaaaattagctttgtcctgtaagagcaagcactgcagcagttgcataagcttggcttttgcttgttgtcagcttcttttgtttatttgtgagagacaaagcccatgatttctttcattctcttctcctcacggtttctattcgattgaaatgtgatgttaaggactctattcttgccggacctcaacaaatcggttatcattctatgtctgtttttcgaaacagttaaaactagccatagcatcacag

SEQ ID NO: 93251 - DNA, 684 bp, Eucalyptus grandis
  Intron number 1 from transcript Egrandis_v1_0.019235m (loc us Egrandis_v1_0.019235m.g) derived from phytozome v7.0 (c hr-ID scaffold_5; pos 16209522 to 16210205 reverse strand)
ttactcggtccggaccactgtcagacccgacccgggtaagtctttcttcttttttcctgcctgaacatggaaaattggcttgagttctggtcaagtgtaaagttcttttgactgatgttctgtgctgtccatacattctctgatctgtttgtgcatgcacaatacgtatgcgtttcaaatggtctgtgtttgtggagaaataaacgcagaaagggtttgggcgttagctattgcagaaattatttatactctgtcccgcacgggcgtcgaggaaccattttgtttggaattacagtcggacatagatcatatgccgcttttcatgcgtgagaaagcataagattgactaaatatgggttaaattaatggtgataggcttggttaatgatgattaaatttctcttatatgatcagatatgaacatgttccatatgcccaggtgactaatacaaaatctcttgctcttgttctatttatgaactctctctcacgctctcttgaatcagcttttcttgcagtccatattgctaagttttatggtgtattcagattatttcctgaatgagccatgctgtatcagttaattttctctggatcggtttctcttattaacacgacaaatccatatcctattaaatatttgaacttttatttgggacacgattgacggattgtactgatcag

SEQ ID NO: 93252 - DNA, 730 bp, Eucalyptus grandis
  Intron number 1 from transcript Egrandis_v1_0.046469m (loc us Egrandis_v1_0.046469m.g) derived from phytozome v7.0 (c hr-ID scaffold_3; pos 16574333 to 16575062 reverse strand)
cctgtccatctcttgctgttagagattcggtaagcactaatcgggctctcttcctgtgaaaaacctagcaaatttgtatacccttaatatatacaatgagaaaaagagttttcccttttctgggtattttggatttgcatcatttctaccaaattttattccaaccaattatttgcatcacataacttcttcaagttcaaaacaactctctctttctttagtaaagcttgtgtttactccccaatgactagggtgaacaattcgataagaaacgaagttcattgtcaccgctgtaaaagaggcatcacttcagccattgctgtttgaccccgcaatccataagcataaaaagaaactgattacgaagtgccttctttcagctatattgggttttcaaagtagtattcttttaatcactgacaaacaatcaaactgttatttagtgtggtatgatcttccattaaaaaagtgtgttaaatacagactttcttgaagtttgcttcgcatgcgcaaggtggaccgcatcgccaggaaaaaaagggttcagctttcagaggttgcagtaaagttacgggtgaataaatgtaatatgcgagcgtcgtgccctggatcttttacaagctcatcataatatatatgtgatctcatccttttggaccattggttttttatgcttttaagcgactttttctttctggagtgtttgcaggtgcacgtcttacctcaagag

SEQ ID NO: 93253 - DNA, 350 bp, Eucalyptus grandis
  Intron number 2 from transcript Egrandis_v1_0.029945m (loc us Egrandis_v1_0.029945m.g) derived from phytozome v7.0 (c hr-ID scaffold_3; pos 24721681 to 24722030 reverse strand)
aagtctaaagaaggtgaaaacatcgtggagcaagcgtcagctgatattccatctcttctggagttgaaacggataggcgatgactcatgatatggtaaattggtgttttgcttttcgaatgttgtgtccactatctttgactaatttgtttttgctgatcaaatgccacctggtatcgggttgtggttcaccatgaacttgtatggctttatatatctggcacacactcttttttctttctagttgtatcccaaactctgatgttccaaatgtacttgatggatttgaactcccatctcaggttacctcacatttatgtggataacaatgtaggtattactcacataaca

SEQ ID NO: 93254 - DNA, 559 bp, Eucalyptus grandis
  Intron number 4 from transcript Egrandis_v1_0.020839m (loc us Egrandis_v1_0.020839m.g) derived from phytozome v7.0 (c hr-ID scaffold_3; pos 67634498 to 67635056)
tatcttgaaggagaagcccaaaattgagagaaaaggtacagcatttgttagcatttcattaaattgaaattttgttatggttcctgatgatgaagctgttagctgagaaattatgctatggttgtttgtgtgagacttgtgattagggatggcatgttattgttagttgtcacgaccttggcctttcagatagataacagaggaaaagaacattggaagaacttgcatgttagctaatgacacggtgtccaaaaatcctgtaaatacttgcttgtgttttgtacctcatagatgtgaatggtagtgaactcggtgtgttagcatgacctagacatttgctctggattgctaattcttgccttctaatgcaattttagatttttgccatatgtcctccaatgaaggaagaaatttgacagttacccatcagaagtactagtgtatggttttgtcttcattagaaaacgaaagtatttggttatggaggttcgtggatttggttacattggattttgacttgtggattttacagtggctccgtcgcaaattgcatttggtt

SEQ ID NO: 93255 - DNA, 900 bp, Eucalyptus grandis
  Intron number 1 from transcript Egrandis_v1_0.026222m (loc us Egrandis_v1_0.026222m.g) derived from phytozome v7.0 (c hr-ID scaffold_3; pos 54560266 to 54561165 reverse strand)
actccacggccaagaagaggcaccatcatcttcaggtgaatcatcgctggccgtgaaaaatgacgactttttagttatggatcgcttgcaattgtggtcgtggtcgtttgttttgatcttgtgttttggaaaatttgcgagaaatggcctttgcacgcatgggttccgacatgtttcatcccggcgtcgtgggtaaaagcttaaacttcattccattaatctcttgcaatgagctacttgggcatgtcaaataccgttccagggtgctatttatttggtcattgtttgatcattgtgctaatttatttggattcatcgctactttcgttggaaatgtaattggatgtaaccatgtgcataaatgaattaattccttgcacaagcatgtattacctctccctgcatttggttccatgatactacggccttcttgggagttaaccggggccatacacacagtatattgctgttggtgaagttggtgtttgttccatgtcatgttgacgtgttgggctttgtggtatcttgatcgacatacgagtcggcatgtgcgaatggaaaatatgcctgagccatccgtgtctcctggagaaagcgcatgtcagaaaaggctgttgagtgttgtgttgatgtagtgtttaagggaggattgagatgaccagcaactagcaaagttgctgcggtgctgtttctattatcactggagctatgtgtgacttctccattgcgatatgctagggtttggcaaattggagtcatccgtgaagaacacagtgatgtaacaagaatcatattggcctggggcgcaatgctagatatatgaatttattgggatagacaacatcttgtgactgttagacaaaggatcgctaaatgtcggggttttctttttctatcagg

SEQ ID NO: 93256 - DNA, 977 bp, Eucalyptus grandis
  Intron number 1 from transcript Egrandis_v1_0.049429m (loc us Egrandis_v1_0.049429m.g) derived from phytozome v7.0 (c hr-ID scaffold_3; pos 9502340 to 9503316)
atcaaaatctgaagttaatacctgtcataatcgatgtacatattttgagggccttttactagatccaattaatgtagtatacatatattatagatgatatatatgatcacaaaaagttatgcattttttttaataagtgaaacaacaaccaaaaaaaataaaaatttgaaatttgtaaaagcaaacataggttgaaaattagttaattttacttgtaactcactagtttcactcataacttttattttattttattttgaatgatgaaacctgcattgtacttaaatctagaacattccttactccgctggctatcataaaattggatttcactggaatgatgaaacctgcattgtacgtaaatctagaacataccttactccgcttggtaaatcatcgatctcactggaaactcgctatctttaccactagtttcttgtttgagtggcaaatttcgaaagatgttgataacttactattgcatttgctggctttgtttgcaaattaccatcagggtacccaaccaattacacgattctaccatataataggactaagttatgttttttgcccaacttgctagaagtaataggtaaattactcaatttctcactttcagcattatgtaaaattttcctgtatttcgatcccccatgaattcaggtgttccctaaatgcttgtacataagttaaaatcaatcaaccattccaacttcccaatagaattagaaatctgatagagacggtaatcacttttgcagtctatggccctatccattcatctttttcttaaaaaaaaaagagttccgcatctttccggggcccggggaacaaataggcgcggggaagagggagaggggggctacgagccctctcccgttgctgttcccggaccacccatcccttccttccccttcgcccggcccggtgaggtccgatcagatcagatctatcgaacgaagtgaagtgataggaag

SEQ ID NO: 93257 - DNA, 525 bp, Eucalyptus grandis
  Intron number 4 from transcript Egrandis_v1_0.014668m (loc us Egrandis_v1_0.014668m.g) derived from phytozome v7.0 (c hr-ID scaffold_3; pos 48266667 to 48267191)
tcgttaccctttatcatttgctcgctgaaggtcagtcagtgatgaatcctttcatttatttggctttcaacatttttttctctgatagtttttatgtccttagtctttgctatatatttaatttaattattagaagtagaagtaaaggattggttcaagggctagaatatcataaacgcgacaatgttggggtgttaaatatcaacatgcgaaggtaatttttataactggagacccattggtggatttgtagctgtagaagaaaggtcggattaggaactagtgtgtttgagtgaaactaaatattgaatcaggtggatatgatagataaattaaggtggaaggtgtacaataatggccctcaagtgctcttcaaagagcacgcaactttgctatcaatctgcttttgttcccttgattatgatcttttggttcttttacttttctttcctaattgttgtttctaatcaaatggtcaacatatctgcagggaacattgaggactgcaaatttttttttgatact

SEQ ID NO: 93258 - DNA, 560 bp, Eucalyptus grandis
  Intron number 1 from transcript Egrandis_v1_0.050764m (loc us Egrandis_v1_0.050764m.g) derived from phytozome v7.0 (c hr-ID scaffold_3; pos 52691000 to 52691559)
gaggaaactttgtagccaaggcatatctccatgggatcaacatgcatcctgtgctgttcttatctgaactcctcttctcgatttggatcacagtgcttgtgttatttgttgcttgagttgcttgtgcagattaatatgttctttttctgaccattatcaggggacactgaattcctttatcttcatcctctgggggcatgctaacatatgcatacctcatccaattgtggacgcttgagtttagtattcggtcgacagattcactaaaagtggcacatcaattcctaatgttttgagtgatgtgttcagtttgtgtcggtagtaaataatacagctgcaaacgtgccattctaaacctcatgtttcactgtaaaaataactgctttactagttttactgaatataatctctgcttcacctcctaacaatcacaaccttttgagcttgagcatgttttctcagcctgacttgatgcactcatgtttgcttatcaaagttgtctatcccaagatgaaaatgacatgccatggttggttgttcagctagctcaccttgttgag

SEQ ID NO: 93259 - DNA, 562 bp, Eucalyptus grandis
  Intron number 1 from transcript Egrandis_v1_0.002354m (loc us Egrandis_v1_0.002354m.g) derived from phytozome v7.0 (c hr-ID scaffold_3; pos 65299044 to 65299605 reverse strand)
tgggaagagaaattgttcggagggaatctcccaaagtgccagggaagcgcagcagattgtgattctataaggatgtgcttcatgtcctaacagaaggcagggtactaaattgaatcatgatcttctgtttttgacgatatgtttgcttatttggtagggttaaatctgcttaagaagtacttttggccttcttctaaaaaggggtgcgaatatttttttgctaagcaatataatggctaagggtcccataagaatcacctttttcacatatgtaaggtttgtactattgacctctccctagaaagtatattgaaaaaatctgtaggagcataattactgtgttttttttttttttttcatgatttgaggtgttaatagaacccatgagtcaaatgctaaagtaaaagcaaatctgaaagctaagaaaaaaaggcgctcaaagcacaccaaatcttttttttttattattactagttaggtccttacataacctaggcacctttgtacttaaattgtctattcatgtgtgtgccgccagggaactaataaagtagaagcaatt

SEQ ID NO: 93260 - DNA, 797 bp, Eucalyptus grandis
  Intron number 1 from transcript Egrandis_v1_0.044359m (loc us Egrandis_v1_0.044359m.g) derived from phytozome v7.0 (c hr-ID scaffold_3; pos 38196539 to 38197335 reverse strand)
aggtaatttttatgttttgatttgccaaaagggtataaatagagagataactgtagtatcttacttattgcggcactcctaaaatcaactgccccatatttgtatttgtagtgagcctgcttacatatgttttacatgactcagaagcatctcatagagatcactagcttcatgtactcttctttgctggcttatgtggatgtcaggtgctagttgaaggacttaatagctctcctgcaaaaacttccaagtgatgcatgatacaggcaattattagatcactaccttgactgtggtgagcccaatgcaatcaccatcatgggctaagttttgaaccttgcagcttcctttctagagtctgttaagttcaacctcaccatcaaggctaaattctcagttttctttccatggaaatcaattaggtattatcaattacctagtaataattccattgattttctcatcttggtaaaaacagtatgccttctttccttttgatttgcaaatgccgtagaatcctcacacactcaaatcggtaaatgttgatgtgattgatatggtgattggattctataccaggtttttcatcatagagtttacataaagaacctgtaacagtttttttcctctagtgtactctgacatctattggtctagtgtgtagagaaattcattattgtcaaataagatatggcttagtatatgtatatgatcccttcaagtgaccctgatgctattcggttccagatacattgttgatttaagtcatgatgtcttctctatattatgatacagaa

SEQ ID NO: 93261 - DNA, 804 bp, Eucalyptus grandis
  Intron number 1 from transcript Egrandis_v1_0.032666m (loc us Egrandis_v1_0.032666m.g) derived from phytozome v7.0 (c hr-ID scaffold_2; pos 8641237 to 8642040 reverse strand)
gcaggaagatcacaagcatccacttttgtctttaggtgagcttcattctgcaattgtgaaatctggaaagtcaagcgaaagaaaagagaacagttaaaaaagaagtgtaataagatcctaaggaatgtcgagaaaaagaaaaaataaataaaatttgatggatattcatctttaagattttcatccatttgcttttaacatctttgaaactaaatctcttttctgggctcttagtatgaggaagtgctgtctacattttagagttaatgcgtcttacacctttttagctttctacatcgtttgttgatttctacatgcgtcttgctaattgctgctaaagtatcaactatctggaactacccaggaaatatggaaaggcgcagaatcaaagataacatacgaacgcctaaccaaaaaaaaaaagataacatacgaacagctttgaggtgaagaggaaagtacatgagaaatctcaaacaaaaagatatcgagtattagcagtattatcttctttcctccattccctgaattgctttcgtgttttggttagttcttgactcagccttagtcatctgagatacgtggtaacatggaatgaaaagaatcaaccgcacttttccttaaatatcttcaaattaagtgatagtggcagaaatgacaagaatattgaggagtacttgtagaccctgtttccgtttcccctgatttgctcttagtgtgtatatcccaactgtcgaaccgtcaataaaacgaaatgtttcagtaagatgtttagatctaatgagtatgttattcatgtagaca

SEQ ID NO: 93262 - DNA, 813 bp, Eucalyptus grandis
  Intron number 1 from transcript Egrandis_v1_0.034090m (loc us Egrandis_v1_0.034090m.g) derived from phytozome v7.0 (c hr-ID scaffold_3; pos 17923174 to 17923986)
taaattctgtggtaagttcatgaccacaatatagtccacattcctcatcttacttttaaagtatggacggtagcttataggcaaattaccttaatcaagtggtgaattagatatttggtctcgaagtatcatatcgtgcggttggattgagaatcgtgagatccttcataacagcaaacatagagctaaagtcatcttgaggagtcattcttatcaaatatttgatgatggcttgaaactattatacagtagggcagttaaataataggattcctttgatcctaagcaggcaaattggcttttgatttccttcagttagtgctttcaatgacgcattaagttggtgctgcattatgttaattgggctgttcttgcatccatttgctaatggcagatcgttgaaagaatgatattattgtctttggttcttgaatgatggaaattttgctgaagacttgtgatgttcgatgctccatttaaatgttgttggatggttgacctgaatccatttggtttgtatgttaggatgaatggctatatgctaattgtttactctagttaggctacaaacctatcaatgcgacatttttattgctgtattgtccccaaaatctccctttctggctctaaaccattgctcttattcattttcatttttccccttaatacattcctgttggattttttgcttagcaattagtatattttcaatacttcatactaatatattataggttatgaagtgatacttattagaatgttgattatgacctgtaattattactaacgaggcgaggtggccttattaaggtt

SEQ ID NO: 93263 - DNA, 900 bp, Eucalyptus grandis
  Intron number 1 from transcript Egrandis_v1_0.016266m (loc us Egrandis_v1_0.016266m.g) derived from phytozome v7.0 (c hr-ID scaffold_5; pos 12569911 to 12570810)
gcgtcttgccagatcgtggacacctccagaagagagtacgcgatcctcttcgtgagcggagacccttcttttactatcgattttcttgtggaattaggttgaggcatgttatgcgttttgctttggagggtgagatgagttattaacattatagagctcaaactatgacaccgcggattaacaataaataaataatcggcgaaccttctctctctctctctctctctctctctctctcgaatttctagcgtaacgaaattcgatcgctctgacaggaagaatttttgattttcggactcgttaactaaagaatttgagatgttctgatgttgaggcagagggatgttggcttttagttttaccatcgccccacggatggccctgaaagaagttcaagccttagtctatggaatttgttcatgaactttgttttgagaagctttcttggaattaagcgtagcctgagtttatgcacttattcaggttatatatgtatattatatcagaatgtttaagtgggtcctcttaactgagtattttaggcacttgcaaggcatgaaaggttttcttcattaccaaggaaaacgaatagttttattcttacattattgattctatataacaggagcattagtataattgaaactgcaatctgggtttgcttatttgtgtagcaaatatcctggatgcactcgtgaacaagctcctattattaagtatccgcgattctgttgcttttattttgttgatttttcaagctacccttgtttattttgctctctgaaagttgcaatttgaatttggttgctgccttgtggccatcgattttgtcttagctaatttgcttccttcatgttctgttcagcgtgcaagtactgattttgtcacctacgagggatt

SEQ ID NO: 93264 - DNA, 687 bp, Eucalyptus grandis
  Intron number 1 from transcript Egrandis_v1_0.008320m (loc us Egrandis_v1_0.006352m.g) derived from phytozome v7.0 (c hr-ID scaffold_3; pos 13947630 to 13948316)
ctttccagatttctgagctggtgggtctgtaccaggtgagtgaatggtttcaagaatctgctgcagttatttggtttcatttgttaattgtcgtctaatcttagaattagatccatataccgaatgatggcagctaattttagcggtatttgattgggccttctctgagtgagtggattttcgcggtgagagagctaaagatttacattttggagaaataattcgaggaaatgatagtattattcttgatttatgttgggggggaaacataacgaactggaaagtcttctataagtagaagaaatttttctgctgtcacattcttatccagcgaagatttgcccaaaagggtaaaaagtctggaaaaactctctcacttgctctgcatttccatctcgatgtacattttaggtttaagagcttgggcattctagaaatcttttcttctccgttattagctatgtccaaagtggcaccatgtaggctctttgttacttcatgatcctgaagagtaaagagttgatcatgcttgtaagtcttgactgcagtataatgcatctgatattgttacttgtcatggtaatataattaatctcatcctttatccacattgagcattcttgttcttgtgttttgactggagaatggtattgttgagccacttctgattgtgtttttaaattgcag

SEQ ID NO: 93265 - DNA, 841 bp, Eucalyptus grandis
  Intron number 1 from transcript Egrandis_v1_0.021455m (loc us Egrandis_v1_0.021455m.g) derived from phytozome v7.0 (c hr-ID scaffold_5; pos 57948307 to 57949147 reverse strand)
cgcgctcgatttcgattctaatttccgtgatctccgtgagtttccatcgctccctcgagtggctttgcgctagcttcttttccttcttccgtagattaatcctagaaaccatcgagctcgaattcatggagatcgaacgtaccgtgcggcgcagttcaaatttttgctttttttgttatcattcgatgcgattgaagaaactccaaactgggttggatttgattcgggcctgtggcgggttgatcatgcccccgaaatgctcggtcgactgatcccgttcttgaattcgtatgtgtaatcgtttcttggggaggaagtagaagacgtgttaatgcttggtattgggtgttctagcattacccaatttgaagtttaagaggcttggagtgatgttaaagaggaggggctgttgtcggccgtgtggaatgtctgttcttttcggtttctctgtaattgtggatgggactcggtgtttatcttgtggtaacatgacatgaagagagggtgcttacaaagggtcatgttgggctgccctgcttttattgagatgagatgagaagcagaaggcagttctggttacgctcgatttggcagggtgctctgttcacgtgcatcccattcctgtgattattgtccgcttagaacttctgcacagattgattcgatttgtaatgcttctgtctatccccaagtctcctgcgtgtgttttgcgttttgggatgtgcccgtctataggcttgaccatttgtactttacccataatctgcaaatatgggatcggaggacttatgagattgtttttgcaggtcctgattttagcacccgatactgctgctgaata

SEQ ID NO: 93266 - DNA, 589 bp, Eucalyptus grandis
  Intron number 1 from transcript Egrandis_v1_0.007719m (loc us Egrandis_v1_0.007719m.g) derived from phytozome v7.0 (c hr-ID scaffold_3; pos 61710050 to 61710638)
ggggattgcaaacaatactaggtatggacacgagcttatccagcagtcgaagactactaaatatccttccgtatgtagcacacaaagcattgacaacagtgaaatgctatttacacggtgctattgctttgggggggggatggtggtaacccatatcttatggaaggatgcagaggtaacacactccatgctatcacgttccgtttttattttattttgatagataatacagaatgtgctatcacattccgtatttaggggcatcatgcagtgaagtgacttggtcatttccagatttttctctgagaagaacgcattcactctgtataatgatggtatgcatgcttttctaccttctttttgtttgtttttctgcccaagattacacaaagtgaatgctctttcaaacaaaattgatcaaattatattgataataatttactggaattactggggaacaggacagtcctttagttacaagtacaatattttagccatggaattaacaatttatgaggaaatgcaatctatcagttttggtaattttactcaaggagttcggtttcgctgttaatatatttgcttctgg

SEQ ID NO: 93267 - DNA, 1026 bp, Eucalyptus grandis
  Intron number 1 from transcript Egrandis_v1_0.050984m (loc us Egrandis_v1_0.050984m.g) derived from phytozome v7.0 (c hr-ID scaffold_5; pos 14439307 to 14440332 reverse strand)
gacgaggaggtaggcatagtcgtagacaaacttttgctgcggtgcacccagcgaagtgataggaaagctctttcctgggtttttttttacagttttatatctttcctttttttttcgtgcctttagtttctagaaccttgtttgggcttcattgtgcagccctagacagtgatgatctgctatatctcaaggaacaaatggaagctgagaaggatgcagaacgccttctacgccacactgaaaaatgagcatttgctgcttttaaaatatccttcaatgtttgggttatcttttgtttttgggtgaaagtttgatgcatttatgttggagcattgagattggtgaggtcaataatgtgaagatgatgttttttttaaggttttcattgcatttgaaggagtgtacttcactgtcgattttggctaacaagattagtctaggttttatgcaaatatggtaatagtgcaatgaaaatttccatacttgtgctctttgggattggactttgcatgaggctttcatgggatattgtccatgattctacctaggcgttctggggtttctatgtttttgggtcttctttgctggccggtcattgtagcttaatatcgaggcaatgtagtggtgcgatctcagtttcttgttatagttacaaagacgtatctgctggaacaaagtacacatattgggttaattgtttcttctggcatgcgcattgaaatttttgtttaggatctctttattgtattattatgattaagttgccacttatcttgattgggagaacagagaactgatggtcaactctgttgatgtttgaagccttgattgggatagttttttgacattgatgcacgaattcttggctttaaaatgtgtcaaaatgtttctctgtcattgttctgataacttatagatgtagaggtcattaaaagaggtagaatggaagccctgtcatagtgctttcatcgagttttttacttaattgaaggacacagagctgcgagtttagcagattcatctctt

SEQ ID NO: 93268 - DNA, 871 bp, Eucalyptus grandis
  Intron number 1 from transcript Egrandis_v1_0.001120m (loc us Egrandis_v1_0.001120m.g) derived from phytozome v7.0 (c hr-ID scaffold_3; pos 60332053 to 60332923 reverse strand)
gagaacccttctttgcgatttgcagaaacagagaggtaccgttcggagatccgcgtttcttgcgaggttttcttgtgatgtcacgagcctgtccgtggctttgtcgtgaggatttattatttttcgttcgattggttccgacctttctctagatggtctctgtttatattgatgggagtgattgtgattgtatatcaggttgcgttgttgagggctctgattggtttgaatgaattcaaagcccttaattttttcggctcgtctgcggtgttatttttttgtcgaattgtcttgggttgatggtgcaatgttttccaggttttgactgatcgagggtctgctatttttcaatgtgtaaaaatgtagtgcaggcgggcggattaatgacgaggatctataccacgtcaccttcacttctgttggattatattgtatcaattagcggagaagttactctgatttggtcatatatctaagacatagcatggagttagatatgtcagagctgcctcgattacaacctatttgctgacatctctaataataaagtgttttgtgtgtgtgaaatccttacaccgagtggtatgatttgcattggtggttctgcatacttccgagacttcagtatcatatatcatatgactgttcactataagaaaggccagagctgagagttgtagaattctgagtggacttgtgcttatcttttgtcagatgttctcgagtcagctggtcatatatgattgctatcgcgttgctattcttattaaagatttaaacatgaagatgtccttgtaggaattctattttgttccaacagacatcctaagtattacataaaactcattacaatgacagataaaaggacaca

SEQ ID NO: 93269 - DNA, 745 bp, Eucalyptus grandis
  Intron number 1 from transcript Egrandis_v1_0.004723m (loc us Egrandis_v1_0.004723m.g) derived from phytozome v7.0 (c hr-ID scaffold_3; pos 54400168 to 54400912)
aagggccgcgaggctaaggtactttgcttacggtttcggctcttgctcgggtgtgttcgtgcggatcgaatcgttcgttttgagctgatgggccgtgaagaaagcgctgttgatttagttggggagtcttgctttctcgcggttgccatcgtttaaatgatgggtttgatttgtaatggagaactgtttgctgctgccgctgccgcgattagggtgggaaagaattgaaatgaaaatcttcttgtctcgcatttgcgaaaaaaaaatgattggtgtagaaatgggtcctagcccaatggcgggtgtagttggtttcttctcgtcattttcgacgtgggagatttcgactcattttgctttcgctttccttgttgggatccttgaagtttgtgtcgcgtttctctttacgtggttttcttgtctgctggttggtctgcgcggcattctgttaattggcttgttgaagtgtgggtttgcaaggaaagaaaatatgctttctaggtttttcttgtgtgtccataacagaaggtccatttattaactaccgaacgttggggattgaaaccccgcgtgattgagagttgagagatttgtgtcatgataccgtgttgcccttgctcaggtgtcccaaaagaattgttaaattggttctggcattcttaaactatttcttgatatcttgctcattaccctttttattattaatcttatagagtttatgtgctttatatggtaggcagctaga

SEQ ID NO: 93270 - DNA, 896 bp, Eucalyptus grandis
  Intron number 1 from transcript Egrandis_v1_0.005735m (loc us Egrandis_v1_0.005735m.g) derived from phytozome v7.0 (c hr-ID scaffold_2; pos 53219950 to 53220845)
gcctatcctcttgtgaggtgggtgtatccttttagtattttacatctcgattttcctgatgtcaggattggaccaagatgaaatttattaaaaacttgctccggtttaatattcttttatgacgttcaccgagcatcatccatcgcgaagccagagagcttcactttgtcgaagacaagacaagagcatcacaatattaatgaaatagaaagggagaaattttgaaatcttaaaagtcctgccgtcgagaagaagtaaagaatatatctaaaaagaatcttaaaagttattgaagtcatcttgtaaataacttccttttttgaggaaaaaggagttgtacatttaaattgaaatagaaatggcaccaaatagattaatagagagtggcccagattctaaattaattgtcattctaaaattaagttaggccgtcgccataactccaatactaaaactttcaaaacctaaattggtttatattaggaggcagtaattatatagaagacaaacatttggcctattttccgagcacaaaaatcagttgcgtttgtattttaattttacaaataagtcgatcaatatttgccgtgcacaaatcgaatatctttcgtaaaggagaaaaaggaggataaaaaaaggtaaaaaagggatattcccttgggatatatatttatatatattcatcttattttattttgctttatttatccatgtgccaacggatccctcccctccgctcgtggtttggcctctccttcagatctgccgtgggaatcgttccgtagctaaaagaaaaaacaaataaataaacgaaaaagaaatagaaaatatatatatatatatataaataaaaggaaatagaatttgcagacaagatttgaaaaaactgtcatctc

SEQ ID NO: 93271 - DNA, 652 bp, Eucalyptus grandis
  Intron number 1 from transcript Egrandis_v1_0.050814m (loc us Egrandis_v1_0.050814m.g) derived from phytozome v7.0 (c hr-ID scaffold_456; pos 16481 to 17132 reverse strand)
aacagtttgaagaggtgcttgctgctaagtccgaggtaagaaagcccattgcttttaatctatgcataagtatgccttctgaaaaatctgaggtcgttccagatgctacactattcgaaaagctgatggtgctagacatgcttagcaaatggaagactagtcttgaaaagataaatttctttcatttaagctgctacttaccgaggaataagtagcatagtcccatctctccattatccaacatgaaagcccaacgtgcttgactctgattgccatttaaagacaagataagactgggctaagttttccgatcagatgcaattatccttaacacttcgtttttttggggctagtgcgaatgttgttattaaacctgtcagtttccgagaacatcgtgaagtatcttgtctgttaatgagctttatgccgttgttcaccatataaccttttgccctcttcaattgatgcaataccatcaatcattgtgatttgtggggtttcaatggctcttccataccaggattttcagattctcaaatcaaacccaactttcttctgtattgtagtctctcgcaagacacgtttggaaatgattctcttttgttcttgtcattcaggtggacggattcgtgaagatctatcctaaaacttc

SEQ ID NO: 93272 - DNA, 747 bp, Eucalyptus grandis
  Intron number 2 from transcript Egrandis_v1_0.052735m (loc us Egrandis_v1_0.052735m.g) derived from phytozome v7.0 (c hr-ID scaffold_4144; pos 235 to 981)
tgcagcatatcaaggcaataatcactgccgaagaggttagtgcgtagcggcttgtgtctttcttagcggttaatgtctgtttattgagcagagcggtacttgcgtgatgtctggaagccccgtgtatcgtcacttacgtttttgaagaacttactttggtttagcgtgggatgttttcctgtttctttgactaattcagttgagattttccttcttgcatttgatgaagtattttttttttttttaaattatttttttattgcaatgagttctagtaccattgacaggaattcttaggttgctaaatgtttagtcgccgggccttaattagctgagcactgattttctccctggttcagcataacttgtctttcagttgcaagctctaatggtaactgcccaacacagtgaaagccttcaattctgaaattatcatatgccttttccttttatttatagccaattacgactgagcacagctttctcgttatcctcaagtccttagatatttcctctttcctgttaagctacgcagaccttttgcatgatattacaacctttcttatgaaatacttaaatggttgtgcaagaatggaatttgatgtattctagtgggaaattactttatcccttacgtaagaactaagttagttccggatctgtttattttcatgttttacatcgtaagtagtgatggcacttgcactgttggcttgtaggtgttgcttcgagacccatcagatataa

SEQ ID NO: 93273 - DNA, 789 bp, Eucalyptus grandis
  Intron number 3 from transcript Egrandis_v1_0.005993m (loc us Egrandis_v1_0.005993m.g) derived from phytozome v7.0 (c hr-ID scaffold_1; pos 21100231 to 21101019 reverse strand)
gagaattagtgactgtcaccctgggtgagttacctgctaagtatcttggagtctcttgcttgttgttggccatgaatgacccttatgttgtggttttctcggaaagttgtttctaaaagattttctaatcttaatttattgcagtttgttgcttcttcgccgactgcattcttttgacattgttggtagagtagcataaatccaaaaactgtacgttagattagatattagcttgccaatgtagtgctcagttttatgctgaatttggattgtcattttagtcactaatgcggtgaatattgcatattctgcccatcattgggggtatagaatgagaatgtttgaaaaaggattggcattgcctgctccaggatttacagctgaaaaagctttttcttgtgactttgaagttgtcgaaaacttccttttcttttggcaaattgataacttgtggaatggtatgggcttaatagtttttgaggaatttgagtttcttatatggaagattgagacatttctgaagtctcgtgtgcagggtttagctgccctcttttccaatcatgaacagatatgaggattttaggatgatcatgaatattctgttgggagtgatgatgaatggttcatttttcttcatgaggtttagcagcactcttttttcattgtttctttaagtgttagaggggatgatcattaatattctgtcggcattaacactctagaaagtttcctatattctacttcttatgtgcaggggtgttgctgccatctcgttttctgaaaaggggt

SEQ ID NO: 93274 - DNA, 559 bp, Eucalyptus grandis
  Intron number 1 from transcript Egrandis_v1_0.017537m (loc us Egrandis_v1_0.017537m.g) derived from phytozome v7.0 (c hr-ID scaffold_3; pos 56459747 to 56460305)
tcctgatttccgcaaaggtaagggaaacagtaacatgcgatgcagaagcgaaagatggaaaaaaaaaaaaactgcattttctcttgcggttttgtttggatctgtaaatttatctggatttagggggtgcccaggttctccatttttggtattcggcgatttgtttaaaagaagattaagttttttacccattttggattattttaaggattctcggttggattaaggaagatgggcggtttcgcctttttattttatttcatttttatattatcgatgcaaaatatttagtgaatatttgcaacattccgagatttaccaaacgaataaaaatggtatctttgggtaaatttccgatcggttttgatccgggtaaaatgagagattttcggccaaaatgtcgattctgattgtttacatcattttagaaactttcgtcgtgaataggaattttgggtttctgcgcgacgaaatttgatttgagttcctcttgatacgagtgagattttcttgattttgtgcaggcgcgtgcaagaagggtgactcgtgcgagttcgct

SEQ ID NO: 93275 - DNA, 521 bp, Eucalyptus grandis
  Intron number 4 from transcript Egrandis_v1_0.013518m (loc us Egrandis_v1_0.013518m.g) derived from phytozome v7.0 (c hr-ID scaffold_5; pos 60028505 to 60029025 reverse strand)
tttttctctcagacaaaaggtacagcatcttcccttttatccttgtttctgctgatggtaggataattgctagttcacggatcttttaaaacttcacctatccatctgcagagttagagattaaattggttgagatgtattttgccagaccaagataatctagttttcgttgtccagtaagataaccgcttctattttttttttcttttttttttcctggccaatgataatctagtccagtctataatctagttcatctggactttttgctatgttttgttttcttttgataattggtcaagcatattctattgaatactgctttggatgtgtgccagttagttacacaacttcctgctactactaaatctctctgtctctctcatatgcaagcacaaatttaactgtgccactcacatgctggacattttccccgtataaagggtaatgtgcatgatcccactcattctaatcctcaaattgcagaaaaagctggatttaacattaaaagtcgtgggcgg

SEQ ID NO: 93276 - DNA, 473 bp, Eucalyptus grandis
  Intron number 3 from transcript Egrandis_v1_0.013518m (loc us Egrandis_v1_0.013518m.g) derived from phytozome v7.0 (c hr-ID scaffold_5; pos 60029074 to 60029546 reverse strand)
taaacactagacttggagtagcactgcctgtgcaggtaattttcatgtgcttgctgaaagctgtttttcaataggatcgctttttaaattttttgctgatcaagcgtattggttacatccctaccatcctacataattgtaaggcttaccctttaggtccgtttccttagaaatttctgtttggaagtgctacatctgctgcatttaacaattgcaagaaaataggcaactcataacaagttgctacttactattacaaatggttatacaaatgattcaatgtaaaatttggttaatgattttgacttcttttctcatcacattaaatatgacatgatttatgaatgtcaagaagttgcatattgtcttttagtttaggagattgagattcgtgatttgagtgttttagaaaataatcaaattttttcttttgagtaggtaaagaacattggatttactggggttttcaggtt

SEQ ID NO: 93277 - DNA, 757 bp, Eucalyptus grandis
  Intron number 2 from transcript Egrandis_v1_0.013518m (loc us Egrandis_v1_0.013518m.g) derived from phytozome v7.0 (c hr-ID scaffold_5; pos 60029607 to 60030363 reverse strand)
gtttactctgggtaccgtggctccacagtttacaggtgggttgatccgactttctctttagaacttggtgttgcatactctgttttttgttgtgccttatccaatcagtgtgacctgtttacctttaagatggcatgcgatgaagcaagaattagtcttaattgaaatgaatgcattcgtcttccagaagccagttgctgggtatttacaaatttggaccttgccgtcctatgactttattccgaactcatgatgcttaacttcgtcttagtcatccgaaagcaccttaatcaagagatacataaatctttcttgattactcagcaacaacattcttttggacagtctcggagttggaccataattttacatgcatttgattatgaggcctgatgatgaaatagagaaagatgtctgtttgaaacaagtgctacatcattttcaatgcttggcttttgttattttcacttacatctacattggctcctgcaatgatggggatatcgctcagcttgttggtgatgctattcataacaagggatggagaatactatctcatcctgccgctactttttctccaatagaaagggggctgcttttatggtttatgtcaataaggaaataaaataaagaacaggggtgatgcgtggaacatagagagtgaaatattattttgaatctgtcagtaagagttgcagatgccatatctaatcatggatgctgcttccaggagtttcaattattgaagaggggggcg

SEQ ID NO: 93278 - DNA, 766 bp, Eucalyptus grandis
  Intron number 1 from transcript Egrandis_v1_0.024073m (loc us Egrandis_v1_0.019598m.g) derived from phytozome v7.0 (c hr-ID scaffold_5; pos 471017 to 471782)
agcttggtgagattttggtagatttggctttaaatacaatggtgtgctcttgggggatttgactgttgctgggtcataagtaacttcttgaaattaaaaatggtcctttcatatctctagtgacttgtcaaagttgcttctctgtaatatgaacttggttttgtctaaggtcgatttgcttgtcactcttgctgctcagtattccagacatgagagactcaatattatagttcatgaaatagaaagaattccacatatatccactgccctttcagctataatgaggaaattccatcggatatactttttctgtttctcagaaatcagggtagtagagggtgttacttttcttgttgtatcccatgctgagctggagcattgtaggtaatcatccctttttatgtctttcaaagcaaaggcattcaaacaaactttttttcttagtcgtttatttttcgtctttgtttgtcaacttgattatatctagcttgctgcccttaaaagatgatattctaccatttagttgttttataaagcaatacttcaagagtactgaaatttgttatgtttattggaagaggccagttttcatcctatctaaactcatgtattttctaggacggttacaatgtaactttcgctgtgctttctagtcacatttctgagtatttcccctgggatgttgtgaacttagagaagcaactccttcatgaattgagtttgtttggctaagcaatctatacaactttctccttgcagtgccaca

SEQ ID NO: 93279 - DNA, 889 bp, Eucalyptus grandis
  Intron number 2 from transcript Egrandis_v1_0.052802m (loc us Egrandis_v1_0.052802m.g) derived from phytozome v7.0 (c hr-ID scaffold_2780; pos 677 to 1565 reverse strand)
ccaacgctctcacgacgttggacaagctgaacgaggtaccgatcgcctttgctgctcctcatcttttgattcgcggtccgtcgcggtcggttgatagcgccgccggcgttcggtcacggggattcgatccgcgcttcgagtgttttgtttttttggcttctttcacttcgatttcctcttaataatcaagctatcggcgatctatctcttctcccagagttgaagaaatggttcttcgattttgttttgtgggaaaactagcgagtagatatacgcccttgagctcccctatggggactctgcttggggctcttacccttctgatgatagtttcgccttcgatcattgagtctgtcttcagtattagctacttgcacttatatgtaatcgtgtctcgtattggtacacaactgcatactaataatatctcataagctcccagacttattttactcctgaaagtgaaagctgtttgtaagctcttgctttttttttgtggggaagttatctgtgggcatgttgtgctagttcagccaaggcacacgatcacacatttattcagtgcattgaaaatttgaatctgattatgtaacgggtaaaagactcatctgtatctgtaaaatttcccaaggggtccattcttttatgtggagagagtctctttcatttcgatttccctcaagttgttggtaatcaagaaatacttactttaagtatgtataatagtagaatacgtgcttctgcatttgtctatattaagatatggatttgtttaattagattgtaggctttcaaaatgattgaactttattctatacgagtgattatggtaggttatcatttgtatatttagctagttcattttctcctttctgtacagacacttgaa

SEQ ID NO: 93280 - DNA, 966 bp, Eucalyptus grandis
  Intron number 1 from transcript Egrandis_v1_0.032180m (loc us Egrandis_v1_0.032180m.g) derived from phytozome v7.0 (c hr-ID scaffold_3; pos 41928871 to 41929836 reverse strand)
tctcgctcgtcaccccttcgtccgccgttttccaggtctcccgctgcgcttgcactcgattggttcatacgtcgtgtcgaatctgctgcgtttttctcgtaggaagtgtgcgatctgtatttgaagtggtggcgcaagtgtcgagatagtatttgttagagactcgcggattttctctttggggggaatttgtgttttgattctcttttcgtgagtaaggtctcggattgttttgcttcttgttgttgtttctcgattgttcttgagggtattgttagatcctcgttgatgctctagtaattatcaaagtgattactcgtgtgtatatgcatactaaactgttgttaaggaatttcttgagcttatgttacggttgggtcagtagttaattgtttggagcatggtttgacataaggagattgtgaggatttgcttggtcgaaattggtcggaagagggagtgatcttggacagaatgttaatgtactgacatgttttgtgatgaagtttgttgatgtgaagacggttcactgtggcgtcgagttggatattttacgcttcctttcttgatttggaaagaatgtgaaatgcattggagatattagatgcaacatggaagtaatcattgaagaacacgggttattgagtttattgtgttttacatgtttattggggctatgagatgtctctgtgaaacgtatatgcaataattggctcatgaatgaaattgaatgatttatgttgggaatgctttgtcaccatggggggtgcatttctgtttctctgtttcctttgcaggggacttcttatgcagtagaactttttaagtatatgttggttagaataccacgacattcatacagacatgtgatggctcatcttgtgctgaatgcatcattttccggactgattcaaacttgttctcgcctcaggtgatcattggaggcggtggcggcggcggattcat

SEQ ID NO: 93281 - DNA, 661 bp, Eucalyptus grandis
  Intron number 1 from transcript Egrandis_v1_0.003736m (loc us Egrandis_v1_0.003736m.g) derived from phytozome v7.0 (c hr-ID scaffold_1; pos 36511629 to 36512289 reverse strand)
gtgtggacgtaggtgctgaatgtggatgatattgcttcgtccttctctgtcctttgtgcctgtcccgcacatgctttccgcataagagtttcgtcttttgatttggcttagaaatcgaaaatgccgcttcttagtgatttgatgtagagcgagtctgatgaatcgaaccgagtcacgaaacaagggaggctcggtgatgatgcttgtgaattgatggcgtggacgtaggtgctgaatgtggatgatgtcacttgattgttctttatcctttgtcccgcacatgctttcggcatgtgagtttcttcttttagtttggtttggaaattttggtgcttaatcgggcatggatgtaatcttgaaaatgccgcttcttagcaaattggggtgttgtcgagccagtcgacgaattgaactgagtcacgaaacaagggggggcttagtgatgatgcttgttacgatcgatggtttggacataggtgctgaatgtggatgatatcacttcattcttctttatccattgtcctgcacatgctttccacgcaaagtttcttctcttagtttggcatatgttcaccgaggacgtgttgttgctgtttaatgctatttggtccttttcagcttattggtttgttgatgtcatttgcatttttgcaatgcagat

SEQ ID NO: 93282 - DNA, 1027 bp, Eucalyptus grandis
  Intron number 1 from transcript Egrandis_v1_0.016905m (loc us Egrandis_v1_0.016905m.g) derived from phytozome v7.0 (c hr-ID scaffold_5; pos 74586223 to 74587249 reverse strand)
aaagcttcacgaacgaatcttactctgtttcccctgtaaagctcctttccttttctctttgaatatatgcaagctaaatcatatttgttttttttttacttagaatggacattgcaacgtttttcttacttgctctgttttggtgtcgagtcaaactggtttcgttcaaacagtgcctggcaaatttatgacctgtttatgattcttcagtggctgaatatggtctgttgttttctgggatttctagtgaatagttgggttggatgcttccttttcctcttgttaaacttgagtttgattggtcattgcatttttccttacaatttgattactgtctatgaagtgctcgttctaatgttctaaatgtcaaagaaggagttttgggtggccaaaacgacaagttaatgactccggagttgccagtcataagtaatccacaatgctcttcagaacccaggatgtatgatcactggatgtgctagacagataatgatatagcataatttgttagcggtgacaagtagagtaatgatcacattcattatccatgataaaattagatagtaattgatgttcaaagttgtatttttaggagaaattggagtgttgacacatgaatttggatggccggtactttagtcgtttgtgctctagtttttggatagcagactaatacaggtgtattgcatagttattgcttgagattactcctctttaaagatggtagtgtctgttgtatcctgttttattccatcgttcaaacaaactaaagaaatttcttgaaactgcttttttattacactgacaagtttaaaagcagttacttcaccaatgcagtatttgctttcgtttttgtcaggtttttttatatatttgaatcagagaccatggcctgattagcagggtggatttttgtagtggtgatgattgttttttcaaagtctcattccatttgaactgttcaaataaggctaactgatcagcttgtgtagttgggcaagtctggggcttctggtgggcaaaacaa

SEQ ID NO: 93283 - DNA, 922 bp, Eucalyptus grandis
  Intron number 2 from transcript Egrandis_v1_0.055113m (loc us Egrandis_v1_0.055113m.g) derived from phytozome v7.0 (c hr-ID scaffold_3; pos 54409719 to 54410640)
attgccgtcattgtcataacgaggcaaaagtgagccttctcttatatatgtttttatgattttcaaattatgcttgacgtttttacagcttctagttgcttgtgggatggggaatttgcatgatttattttgaagtatcaagacctgataaaggctaatttcttttgtttctttttccatatagaattccaaaataaatgacacagattatatataactagatggaagaattggcgaaatgaatgatgatttacttgtgagatacaattttttaggcagtgaagaatttggtttctctttgcagttactttcaattcagttttggtcttcaggctactttattctttgaatctttgtatagctaatgggcatctaggataagtgttcatccgtggtcatctttggagttaactcttgattatattttgatgtcttgattctattaatatagtttgtatctgatagttactttgtcattttcagatgaggagcctttttcctttgcttagatttctgggattgactttttgatttgtttaagcattggtttttgtcattgtgtctacatctgacctagagatcatctgaactgttaatgtatgcaatcgtggaagtttctccagagtaggtgactgctgtactggaaagatacagaactatttgcattggggagaatcaaatggttcaaaagcttaagctttatgctttttcctgttttctttgttggagattagaacctctgtctctggtcttggtgtgatgagtgctacttgctatcctaagaaagagtcaccattatgcagctttgaagtgaccatctggttttatattgaatgcgggcttgtctgtgtattcaatttttcttttcgtcacaactgtatatctgactttaaattgcatattgattttcaggatagtatcg

SEQ ID NO: 93284 - DNA, 580 bp, Eucalyptus grandis
  Intron number 1 from transcript Egrandis_v1_0.009468m (loc us Egrandis_v1_0.009468m.g) derived from phytozome v7.0 (c hr-ID scaffold_5; pos 21709352 to 21709931)
ctgctgctggaaacccggttagttttctctgcatctttgggatctgtaatgtttcttgaaactgctattccactaatccggtggaattagtcctctgcttgcgattcgacccagtaaatgctaaaaatcgtctggaaagttacaaatcttcttcgacatgaacgattttgaaaatcacgagatcctatccaaactcccagcactatagatactgtatgctgggcctgtttagcacttttactttctcctaagatctaagaatattatttaaattttggaagtattacgaaaaattattgcgtgtgcattcatgtatcgacatttgagtattatgaatgttttgagtatttttgattatttaaaaaggtcaaaatgtccaagtcgcaagatccaggtgcagatcacttgctgaggttcgcctccatcagaaccacaactatgttttttttttccttcttcttcttgtatttggctagaagcataagactttgtctgaactactatgtctgccatgtgaagcggttttagtttcctcaattggacaggaatcatcttcaacctcatcgtcatcgcctagatt

SEQ ID NO: 93285 - DNA, 680 bp, Eucalyptus grandis
  Intron number 1 from transcript Egrandis_v1_0.038073m (loc us Egrandis_v1_0.038073m.g) derived from phytozome v7.0 (c hr-ID scaffold_5; pos 43936630 to 43937309 reverse strand)
cggtaagagagtaacaaaatcatattatattattgtccaacggcacgttattttctggtattgtgatttttttctttttatttcaaagcaagcgaaacaatataatcctccgaggtccttaacccaatattttcttgtcttgtggttttgtttgcgtacaatttttttcatatgaaccaatgaatattctttgtagccctcgaaaacaatcaacagatgttctacctaagctcaataaaacatttttaacaataatgatgtgtaatatattatatatggtggataagagacaatggttttttttttttttttcactacgtcaacacatttctctctgggtggctcgggactgtgggattcaatggatctattggtagacaaattataccatttcataatcggtttaattcagaccacaaattcaaaataggtcatctaaaatagttcgaaccacatagttgcatgctgccaattgaattacattattgcggcactactgccaattgaattacattattgcggcactaactttaatcctagtgactccgaatcatacactatcaagctaactccggtgtttattccatctgcatacatacactagccataaccaccgttgcgcttctcattttaactcttgaataggatcttgctgggcattcgcagcaactgcaactgtg

SEQ ID NO: 93286 - DNA, 537 bp, Eucalyptus grandis
  Intron number 1 from transcript Egrandis_v1_0.025790m (loc us Egrandis_v1_0.025790m.g) derived from phytozome v7.0 (c hr-ID scaffold_5; pos 64326473 to 64327009)
ttcgaggaccgtcgtgttgcccttcaatcttcgttagttctagttgttttcttttcttttaaggatcttgttgttgtttagtttctgttcgagagaagatagcatgaagtattgcgaattgatgttgcgattttcggtctgcgctaacgaaaagatggatcttttcgttgtttccggggtttcgggcttgaattcagctcatgcaaagaggagctcttctattagggaagcagttctttcttgggtttgcctgatgaatgatttttgccgtgaaaggacactttttcttttttaatttgtggaatactttttcttttctgggttgaaagaatttgtttacagaaaatttaactcttgttggaccgagtcctctatcttggttcagcacattttttctgtgttttgacttggggagtgggacggctttcgctattttgacctttttgaattggactagtcctgtctgtttttttgtattatgaactaataatattgtatctttgtcagtaatttctgtaattggttgtgcagttgtcc

SEQ ID NO: 93287 - DNA, 705 bp, Eucalyptus grandis
  Intron number 1 from transcript Egrandis_v1_0.041773m (loc us Egrandis_v1_0.041773m.g) derived from phytozome v7.0 (c hr-ID scaffold_5; pos 11731685 to 11732389)
gcccacaaaagagccagagggcatgtttgctacaaaaaaatgcagcctctatttttttgaatatttactaatttgttgaggcatggatgatgatgtccttgtaaacatgtcattaatcccttagaaacccttatcatggaagttcgtcaatgaaaacttaagataatggcaaggttaattattaccgacaaggctctgaaacaccatattttatatcagtacaacctattattaagctagctgagctctccacggttctctgaaatggcttataggagtggaaaaaaaaagttggtggttttctcggatgtatagaaaagtgtgttttcatgctctgttggtattcttttccagctttaagcttaaaacttttcaatcaatttcggttttcagaacatatattgaaggttcactcgacaataaattgctacagtcagttcaatctagattgatgccttctgtgaagtgttttttgctttagttctctgactttcttgttaaattcttcctatcatatttcatcgattcgatggtaaagaagctgtgcataaggacgatgtccaagaatactcatatgtttacccttttttcatacatagttagccacaacatgtacgtttcaagagcttgaaagggttggtcatgttactcttgctcaatctgagtgtaggttgccactttcttgctgtacttatctgacgttga

SEQ ID NO: 93288 - DNA, 754 bp, Eucalyptus grandis
  Intron number 1 from transcript Egrandis_v1_0.035463m (loc us Egrandis_v1_0.035463m.g) derived from phytozome v7.0 (c hr-ID scaffold_3; pos 8478284 to 8479037 reverse strand)
aaacttcccaagggactcagaggtattaggcctgggaaatgccagaaaggtaataacccacaagcatgatcctacatcagttcaaaagttcatttacatgattatacaaaaaaacaagcccgcttgatccactgacccaagagaaaatgttaataacacttgatatctgtcctcagcaccagcagactccagataatgcctgtaaaatttaccttggctctgcagccggcgtcgatccttgtccactttctcatggatcccatcaagcatcgaaatgaaaaactcatgagcgtcctgctgctcataacttgccaagttagctgcatgttgccaccaactgtgggacaaccaaatcaatataaaaaagtataaagcacatttccctctaagtcaattagatagaacagttaagaaagtctcagtccaacattgatggtcaacaaggaacttgacaaaagcatgcatcattagaataaggaaaggatgcctatccattatgtccacagccattttcagaaaagccagtagacaaaagtacttcatgaaagaagataatttccaaaggccttgttaccgtatgtcccaagggcactctttaattttagcaaaaacagaaataatgctttccaaggcacttaaaataatgagagaaatacacattttaactaaggcaatacatccaatggtaaatttgaaattttgagagaacatctgataaggggcaaagccatagtcccgacagggcacggtgcct

SEQ ID NO: 93289 - DNA, 813 bp, Eucalyptus grandis
  Intron number 1 from transcript Egrandis_v1_0.015463m (loc us Egrandis_v1_0.015470m.g) derived from phytozome v7.0 (c hr-ID scaffold_5; pos 3116429 to 3117241 reverse strand)
ttgccatcaaaaagcttaatcaggctggattgcaggtgatgatggcttttgtagttcaatcatttttatcactgttgagtgcttgtagacttttttcacatctttgtagcattggccttctttcggaagttgggtcgttctgtgttgttgcttgtgattgcattggttctgtaatctacagtttgatttaatgaatcatttgcagtagatgaggaattaggattgacagatacatacgaaattgtagcagatggaggatattgaacaggtgtttcatgtggtgaagatgcatttgattatttatttatttattttggctaattgtatttggattatgcataatctcatctacttgtcttagttattgacgcggagttcatgatctgatatggctaacagcaattaattcacatttaatcaagtcggtgtcctattcggtgtctatagtgtaaaaattttcgaaatattgctgcaaatgaacacagatgaggaagctggtgcgagtgcttatgcctaggaataattaggaaaaaatccgataactgagagaagatgcgaaaagcggtacaacgttttgcacttgagaggatcatcagccccggcattgtttctggcattaaattctggagataatggtggctacctctttctagggcactgtttttggtttcctaatgttgaattcgatggcaaaatagtatcctcacaatttcattttatcaatttagctgtatctgttgtccaccctccagacctgaggattgatttcattttccaatgggtgttttctttcaatgtgcagggtcgtaaaga

SEQ ID NO: 93290 - DNA, 1023 bp, Eucalyptus grandis
  Intron number 3 from transcript Egrandis_v1_0.028355m (loc us Egrandis_v1_0.028355m.g) derived from phytozome v7.0 (c hr-ID scaffold_20; pos 63070 to 64092)
gaacaaaaaccgtacaaacgataaggaaaaaacaggtattttttttcttttctttttctctgtaacaactgtgtctagattgagttttactttcctttttctttttctttttacaaaatcaattttttacgatgcacacacttttacttatttgttaatcaaactttacaacatgcaaatgtttgcgggtaattttgcacataacttttgcacgactttttagaatttgaatatatatatatatatatatatatatatatatatatatatatatatatattcagtttgcttaatccaaaacaaacgggctaacgcatatatatgtaagtattaccatatataaatcctgcaaaaataaaaaagaaaaccatgcagatttttttccaagatcttttataaatgaatgtcattcttatttaaaggaaaatttccgagtggcttcctggaaagggctcaaagcccagtctatttgacttcccaaactttgagtatcataacaacaatccagataagcacatgaatatctccttttgaaagaataatgctgtctcttcatcgttccacattgagtatgagtatgctaattatacatggctaagtctatattttgacccaaaaaaaaaaggttaacaccttgaaaaacttcaaactgatatatctgtgataaattttctttaaactacaattttttattattaaaacctctaaactggtacattatcaaaaaaaaaaaaccccaaaattggtcacttgttaacctctgttaaattttactatgaaaccattgagttggatgacacatgacaacttcaaacaaaaattcatataaatttgcagtaaattagccacatatgtattaatttgggatttttggtgatccaaaaataagttttgggctaaatttgtcacttgtgtatgaatttgaagttttttgtgatgttaattttttttaaaaaaattaataagtatttcttttggggcatggcagttagtggttggctctctgacgaaaattacaactgc

SEQ ID NO: 93291 - DNA, 691 bp, Eucalyptus grandis
  Intron number 3 from transcript Egrandis_v1_0.016749m (loc us Egrandis_v1_0.016749m.g) derived from phytozome v7.0 (c hr-ID scaffold_73; pos 60915 to 61605 reverse strand)
gtggttggcaacattagtactgtccttgaggtacgccatatccataatttcccttcaattgcggagcagtacagcactattaaatccatataaacaagtcaatagggttgcaattatagggaggattttttttttgttttttgttttttgttttgttttgtttttttttttttttttgtggtcggtttgaggattttgttgaccaacgcattttcttctttatggttctgtcgctccctgactttttgtttgatgctaaccaataattccttattaaaatatatatctatgatcttttgagatattaaagcgattttcatgttggttctatagtcaaaatattttcttattatttgagttatattaagcaaacatgctttcacactcaagacacttaataaaagttttcattttctatgatgagttcattataataaacaagtaatttgttaaagggtatttaaaggtcggttgaacttcattatttgttttttgcccatgtatttttcacgttctactccgaagctcttataaattcgactttttctttagtctgatattaaattaaatgttatcacacatctttatcaattgttgcaattgatctttataaaagaattgtaacacatggatcgatcttcgatttttttttccagggtatatataaagttggagcaagaaaatttgggtt

SEQ ID NO: 93292 - DNA, 933 bp, Eucalyptus grandis
  Intron number 1 from transcript Egrandis_v1_0.020792m (loc us Egrandis_v1_0.020792m.g) derived from phytozome v7.0 (c hr-ID scaffold_17; pos 327043 to 327975)
ccgaagatcgacaggtttggcactccgttgtgatttgttcttgtaaagtttggatctttttctttgtgggtgtgttccatcctttagctcttttgggcgacagcagtgtgcagaattgtaatttgagtagatagaaagtgaatgaccttttgctttgtgtagatgtggacgaataggagtgttcttggtgctgagttgggctgctagttcaagtgtcggagtgagtccagcgtgaaaaggaacggtctttatgtcgcatgttagatgtttcggacgctccggaatagttaatcctgtgtcttcgtgaattatgtgtcggaattctacgttgaagcgagtgtaaagttcttggctggatgaagcttccgttttggctggtcaaataataatttgagtggatagaaagtgaatgaccttttgttttgtgtagatgtggacgattaggagtgttcttggtgctgagtttggctgctagtttaagtgtcggagtgagtccagagtgaaaagaaacgatctttatgttgcattagatgttccggacgctcaagaatagttaatcctgtgttttcatgaattatccgttggaattctacaatgaagcaagtgtaaagttcttggcttgatgaagcttccgtttggctggcattgtgggtctggggcggatgagaatgtagcttagtggttttgtactttgtgcacattgattaatgatacctggttggttgatagagttggtcgaagaggcattattcatcttcttcattgaaactatgcaaatatatgagagaattgaaaatgagagaagaaatctagggaagctagtatgtgtgttgtttgtgaggcataaattccacaatcctgtctcacagtgaaaatagtttgttttttcttactgacacatggaaaatggtacagcagaaagcacaatcacag

SEQ ID NO: 93293 - DNA, 757 bp, Eucalyptus grandis
  Intron number 2 from transcript Egrandis_v1_0.032732m (loc us Egrandis_v1_0.032732m.g) derived from phytozome v7.0 (c hr-ID scaffold_5; pos 58207641 to 58208397)
gcggtctgtctttctttcccttttatttcctgagttctttctgcaccttccttggcttgaataagctaatggataggaaataaattaggcctataaatcactaaagattcatagctgatgaagagtgttttcttgtaatcttatgaaaagttatttttcttaaagcagctcaaaagttaagtaaataagaaagcaagggcggcagtctctctcttttgatagtggtgatgaagcaataaaactacaaagacaaatctatagtatgtgttatccttgtaggatctccctgtgttctaactgccaatggttgtacgtgccacaaccaaagaataaaaatagcaataagaaaacaacattgagaaactgggttcaactgtgcaaatccatgttttcatctttgttgagatgaagaaaagcacatactgctgttgtctagtttgccgattgtttttggagttggtgtcctgatatattcaggtactttatttctataccttgagagatgttgttaaagttatcagatgttatgcttcatatttggttgacctgagagttgagatttttggcattgtataattctaaaagctataggtatcatagtatagctgtcgtgttgctgtttaagttggccttaagcgcaatcataactacgtcgtcacttgttcttatttgtctgatatacattgatatttgtttgatcatggtgcattatgtttggagtggtggggttgttgattcgttttccatttgcagtgac

SEQ ID NO: 93294 - DNA, 721 bp, Eucalyptus grandis
  Intron number 1 from transcript Egrandis_v1_0.047425m (loc us Egrandis_v1_0.047425m.g) derived from phytozome v7.0 (c hr-ID scaffold_5; pos 1684540 to 1685260)
atattgctgcagtctcgttcctcgtcgcagcgtcggttagtgcactcctggactcgtattggacttcccatttccgctgctgcatcagccgcttcgccgagcatcatcgagcgatctgtcgataagacgttggcgtttccccttcggtggctcagtggctccgcgagtcgctcgcgaaaaagtcggtgatggaggattggcacctccggttgtcgcctcccgaggtacagggtctacgttgctaatgtgaacttttctgctgaattctgctagtttgcggttctttgtcattcactgatggtttaatgtagtaatctttacgcagtatctacacaaatggaacgagtgtgttgtgctgttgcatctcacattggttgtgacaatttctgtgtctttttgtttttcttttgaagttggttatttgaagatatttcagattcggtttccattgcaagctgtgaatttatattaatcctttactacccgtgcgtgttttgtttctcgtcatgtggctttgacttcgagtgattatttttcccctgaaaacacacacgtaatgtagcttatctggcagatgaagtctcagtaatctacggtcttctgtgttgcttgtccactgaccaattttagtattctctttggggtcattgagcaattctaatgtcgtacttgttctaataatagagatcaactaaccaggaatttttatcttatccctgtt

SEQ ID NO: 93295 - DNA, 969 bp, Eucalyptus grandis
  Intron number 1 from transcript Egrandis_v1_0.038336m (loc us Egrandis_v1_0.038336m.g) derived from phytozome v7.0 (c hr-ID scaffold_5; pos 13549628 to 13550596)
gctaacaaagctatttctctcacatcattgtcacggtacgtgcatctctctctccaagtttcttttttgagttttggtaatgtaccatgacattggcatcattttgaagaatgccgtgaatgaaatactaatgatattttgaaggttttcttttttaacatctgagagtagttcttgctgtcgaagtttggaataggggtgttcaaagaaaccgggaatcgcttggaccactcaaaaccggaccgaaccaaaccggaactaatgattcttaaatgaactgatttggttctcgattttaatttatgggaatttgtgcatataccggtttggttctcggttccattgacggatccgcccacccatccatctggactagatcggtattataataatatattaatttttaattttaaaaatggctaacgagtagcaattgtggcttcaaatttgaagccccttaattacgcgcttctatagctctttataagtcacaaaaaacaactttcaaagagaatggcccgaaaattagttttctttctcgcggtgaaggcacttaatatcgaaagtcaaaagttgcttaatggcccctcgagctcttcttcaccattagcgacagacttcatggttcaggttcgggttcgggtaaataaagttagcatgtgttatgttcaaaccaaaaactttctgattgcgtagactttaaagtaaaaagaacggcaatatttggttgatgtttggtgaaaccagttccatggatccactcggaaactggaatagaccgtagtgtggttcctaggtggatccatgcaaccaaccggcggttcccagttttaatttttcaaaaccaatctttagtgagcggtttctggttctaggatgggaaccgcctgctcgaccatgcatatccttagtttggaatggacctaacccacatgggtcatgcaatttaaccaggaagggtcatatttg

SEQ ID NO: 93296 - DNA, 886 bp, Eucalyptus grandis
  Intron number 2 from transcript Egrandis_v1_0.010647m (loc us Egrandis_v1_0.010647m.g) derived from phytozome v7.0 (c hr-ID scaffold_3; pos 14867663 to 14868548)
cagtgcgaaaaggttagagggtgattttgctggaaccgatcaaattttccctatttctgtcatacgtttttctcactaaaataatatcttactgcatatgtttgaatagtgaaatgaaaaaagaaaaaattcatgtgttactgtgcttttgaagggctgtttcttgccttttgctttagcagtcaaggttagcttggaacaaaggtatgcaataagaaggccctgggctttagaaaaaataacttaaaaaaaggaagagaactgtgatttcatctctctcttctctctccccagcctattctctctctctctctctctctctcttgcacgcataaaccgcctccaagctctgcttaaattagcaaagggctttaaaggtgatacgtataggttctgaagcattgcttttcctttccctccgctctctctctctctctctctctctctctctctctcttctctctctctctaactggcttcggttaaagtagagagcgaattcaggttctctttccatgttaaagcaggttttctagctcaaataagctgcgacagtttcctctctctctttctctctctccctctctctcctagagactgtttttcacgctttggcacatgtaagacttgcgccttatttgattttcttcattttctttgccagagaaacttgggagtcttttcccctctatgattcttgaaaaagactgatctttcgtgtgatagtcttcttattcataggcttctatcttatgaggtttctggtctatatttggactagagctaccgccgccgatcttattcagtttccgttcatcttattctgaataaaacaacgatttttcgaacagggacctgattattcttgaaggtgagggatttttca

SEQ ID NO: 93297 - DNA, 674 bp, Eucalyptus grandis
  Intron number 1 from transcript Egrandis_v1_0.054799m (loc us Egrandis_v1_0.054799m.g) derived from phytozome v7.0 (c hr-ID scaffold_128; pos 29891 to 30564)
tcttacatattgctgcatccaaagagcaccccgaggtatagttaattggttttgttcatgcttttattgctcggtgcttgaatctgacacaatcttatcaagcaacatatataatggtgataagtacatggtttgagaaaacattcagaatgaagagaattgaacggaccaccttgttttgtttctttcgtcgaagagaggaaaaggagataggagggagacttccctccaatcttctacttccaattctctttctgacaattttccgtgcaccttttacggaggataggttctaccctagtattgaatgcagtttttacacggcatctattcttttatcttcatttgttttcttagtgattattctaatcgtttcatctctctttttgcaattattccaaacataatagactgtaacaaagcaccgattgaaattgaagagatacagacttaattttgctctctttgcaattattccagatcatcaagctgttgactaggtacactaatgtaaatgcgaagaacttttggggtaggacggctttggacatctaccaagtgaatcctcattttgatcaagatgttacgaagagattaggccctagaaaacatttgactcgtaccctctctctatcacagttttttagcagggaactaacttccttcgagaatta

SEQ ID NO: 93298 - DNA, 537 bp, Eucalyptus grandis
  Intron number 1 from transcript Egrandis_v1_0.046903m (loc us Egrandis_v1_0.046903m.g) derived from phytozome v7.0 (c hr-ID scaffold_1; pos 38942736 to 38943272 reverse strand)
ccaaattgggtggttctgctgcttttataggaaaggttcaatcagttcttattaaacttctcatcaactgtcaaaacgtcaaaacattaacgcttcctctaagagcattggttatgatataattaatatcttccgaaaacatgaaaagataagttctgatgtctgattttctcatgatttgcaccgagtagagataaaaaaaatttccaatcccttgaaagtattagtttactctgtgcagttggcttaaccagtgtcatgtcacttgttaactagaactcttaagaataccacttgttactggagttaaattttgtttggggattatttgcttctttcatgggtgccttatatttggcaactgcatttacaccatcttattgatggggatcgccaattagagatgcactgcagcaaatgtctcatcctataaatctgtagcccagaatttcggttcctgctggacatttgccagctcattgttgcttcctaacaccaccaaaactcattatacgtttgtgtcacaggtgggtgaag

SEQ ID NO: 93299 - DNA, 422 bp, Eucalyptus grandis; identical to SEQ ID NO: 92332
  Intron number 1 from transcript Egrandis_v1_0.023572m (loc us Egrandis_v1_0.023572m.g) derived from phytozome v7.0 (c hr-ID scaffold_1686; pos 1870 to 2291)

SEQ ID NO: 93300 - DNA, 1041 bp, Eucalyptus grandis
  Intron number 3 from transcript Egrandis_v1_0.019892m (loc us Egrandis_v1_0.019892m.g) derived from phytozome v7.0 (c hr-ID scaffold_5; pos 35156251 to 35157291)
actctttgcacatattcacaggccacagtaagtttttcgttcttgttcgattgtgagcacaattttctatgcttaaaatcctgctgtacacggttgtcatgctagtcgaggttgtagcaggagtgttagattctatctttggggccattgtttgtctttcagttgattatgccattacggctatttatgaatcggtttaagaacgcaaccagcagtctagataatgaatatctgctctttatgtgaaaaagaagctgcagtttttgttccaccaacatacagactgatcagggttgcagaataggacaatcaaattaagaggagggaataaagtaccagtgcttcttgtgtttcctaaaggtgttcatgagcgagagtgcaacctctcagtgaaacaattgatccctctgttgttcatgagcgagagaaactctcagtgaaacaattgatccctctgttaagtagtcatgcactgtgatcacgattgagagttttattgtaattataatgacaatgatgcaggttcaagtcaacattggtctggagtcttcattgggtgtgccataactaaatcagaatttaagtgtgtggttattcaaagtctttgggtaaagctttttgcttcggagagttgacatagagactggtgtgataaaactgtcctgctgtgtaggtgtgaaactcttgattgatcaattgggtttcaaatagtgtccagttgtttattaactgctaaaggggtgctgaagcctctgcagtgagttgttctttgaccgtttagttcttactggaatcacagaataacttgaaaaagtggaatgacaactgtttagtctttgttattgtggttgtgatagatattagttggaccttttgactgatgtgtaatctggaatttcagctttttgtgaaaatatgtttgcattttattgagcaatgttcatgggaatactcggatcaagaagtatgccatgccttatagaagtattttttgacttatctattctcttccttgtatgcaggggaagtgtacagccttgc

SEQ ID NO: 93301 - DNA, 1002 bp, Eucalyptus grandis
  Intron number 2 from transcript Egrandis_v1_0.040714m (loc us Egrandis_v1_0.040714m.g) derived from phytozome v7.0 (c hr-ID scaffold_5; pos 14810531 to 14811532 reverse strand)
gtcggaaatataaaggtggcgctgtttcgaatgattttgtcctcgtaatcattgtttgtttagcatttgactgatgatacaggttgtgttagcttaattctttccttccggtataagtggatcaccttctccttgcgagcttcgttttgatgaaataggatgcattgacttacatatctgtagacttcacatcttttggtcatgactttgtgtagaagtcttcgatgaaatttgagaataactatttcacatccaagtgtagcccagtgttcatattgcgctacccacgtactccaggaggcttcatatgtatatttatccagaacctgtgtttgggtttcctgtaggtcggcgaaaaaaacacatgtttcgtgcactcaatatggactatggacgtgtatccgagctgttcgatcatgaattcgcagggaacatgaactagtttaaccttgaaatggtctttttcaggagtattatttttgcatatatgttccccagccctacttactgggatagtacttagtagtaattgttgttgcttcgggtggtaaacggtcaccgatgagtggaactcagcatgctcccaaaaggcaatacacttacctgatatcttatcacttgtgaaagtgccatccacgcaagcagcatatttgcatattttatactcgacagagttatctggctgttgccttacattggaattttcactttctatttcttctatttttctaatagcacttggggtagaatttgcttaatcgctggatctgttttctcacttatggtcatgttttactttgttatagcaacatattgacccaaaaaaaaaaaaaagtacttcattctcatataagtttgttttgttttattttgccagaactcgtataattttgttggataaggggaatgtgctctaaattttcgttgctttccaatagaaatgtttcttttgatttggttatttttctttttagagattcttgccttcagtgtttggaagtc

SEQ ID NO: 93302 - DNA, 634 bp, Eucalyptus grandis
  Intron number 1 from transcript Egrandis_v1_0.040714m (loc us Egrandis_v1_0.040714m.g) derived from phytozome v7.0 (c hr-ID scaffold_5; pos 14811626 to 14812259 reverse strand)
aaggtttcaagagcttaggcgtccgtgtggttcaggtgagaagctatgcccttgcgatcgcgttcgtacccgacatctggtcctgcttcgaggaatcaaagcctcgcctgccgttgaatcttgctcgtcgtcctgagaaatgtcttcagcagtagaatcggagctgattttcgtctcgatctctcactcgatcgagttgataggagtcacgttgcgatttggcgttgttcattactgttctgatattttgtctttgttcgtgaaaaaggtgaaattttttgtgacgaatcatctcagctttccatgtcgattcgaacgagcgcattttcaggcaaatcttacagaaacttccttatgtcttagctgtttatgagacagctatagctacgtagtagctgctctgacctgttgttcagatgccatggacgagaattctgtggatagtggcttgtttttttttttttatttgtcgtcgtatttttttcttgtctgataaaggtatcgaagtcttatcttcatcggttatgaatcccactgccaaaccaggatttgttgatgattgctgacttcatcgattgttggttcatgctcttggtcctttgattctcagggagatatagacgatccggatact

SEQ ID NO: 93303 - DNA, 637 bp, Eucalyptus grandis
  Intron number 3 from transcript Egrandis_v1_0.012043m (loc us Egrandis_v1_0.012043m.g) derived from phytozome v7.0 (c hr-ID scaffold_1; pos 32758858 to 32759494 reverse strand)
aagccaatcagacgcctttctcagactcttatcatgtaagatccttgtagaaaaacagcatgaattgaaatcttttgacagaactgaaattttttttccctaccttgcaatgcattcattgcattttgatttagctcttgacgagtctggtaactgactcatgttttcacaatttgcacgagtgctaacagttgctttgtctttaagtgctacatatcggtggctcctgtttagataagtttggttttggcaatagctttgtccattttatgttgatcatgtctttgagacattagttaggtgacaaatagtcattactagccgtagctcttgcagatgtcactgaacttcagtcagtatactgtcatctttatttggtccaaagaagaataacttttgtagtcttatgaaatccaaattctagtgactcggtaatgtaagaaccgagcatgtatggctggtaagtggtgactagctgcggaccaatagttttctgaaatgacggccttcagttttattggcatcaatatcagttcttttctgtattcttatcggattgtatcaaagtggtatcaattctcatttgcaagatcaatttattgattgtttatttttttgttgcagggcgtggaagact

SEQ ID NO: 93304 - DNA, 480 bp, Eucalyptus grandis
  Intron number 3 from transcript Egrandis_v1_0.009199m (loc us Egrandis_v1_0.009080m.g) derived from phytozome v7.0 (c hr-ID scaffold_3; pos 13956677 to 13957156)
ctcgtattcccagttttctaacttttcatccaaaggttagcttcacgaacctcttcacatggtttggtttgagtactaaatgctggtcctttggtatgacttggtgagatgtgttcagggaagatggatactctgacaatcctttacaatctagggtgatttcaagtaatttttgctagcagtgtgaacaagctgaggaatagcttgtttataagggatatggtttttactttggttgagaggctattgctttgttgctgtctctacatcaccttccgacaagtgcaaatgcgaatgcaagcatgcccgtttcgatcagttgtgcatattctatacaggactgattttgaacgaaaacgttttggtttttggagtgtgtgatatttatttgaattagttctataaagaatataaagaaatataagtttctttatctgttgtgaaggtaggagaaaatcgaaatccgacggtagtgactct

SEQ ID NO: 93305 - DNA, 599 bp, Eucalyptus grandis
  Intron number 2 from transcript Egrandis_v1_0.016086m (loc us Egrandis_v1_0.016086m.g) derived from phytozome v7.0 (c hr-ID scaffold_179; pos 63779 to 64377)
gtctcagaagagtacaagatcgagaagatttccgggtaaactttgtatatgcattaatctaacttaactctctctccctccccgccccgccccgtcccatcccgtcctgtcccgtgggggaatgagaaagtcgtgctcaatagaaaactagtttagtggtataaattgggattggaaagtaaatccaaatatcaatcaattaataatgaatcttggctttttattttgatccatgaactagtagttaagtctcaagtattaaatacttaaatggagaattaaggagatcggtgtgtttggatgacatgattggaggggtctctatgtttttgatctcctgagaaagaaacacgttcgaggcacacaagaacctcgctttctgaagtttactgtttacttttcaatttatggagctccccttctgtgtcttgggaaaaaatgagcaattattgtctcttacctggggaatgaagaacaatttagattgtctgaaggcccctcataggataatgtttctttagttttttgctcttttggtaaaattcaaatgcaattgatgcacaggtgaaaagaagaaacatcgcaaagaattgattgct

SEQ ID NO: 93306 - DNA, 605 bp, Eucalyptus grandis
  Intron number 2 from transcript Egrandis_v1_0.017053m (loc us Egrandis_v1_0.017053m.g) derived from phytozome v7.0 (c hr-ID scaffold_1; pos 16427937 to 16428541)
ctgcagtttgagaagcccgacgtggaggagattaggtaacgatcgacatgcctgcaacgtgtttgattaaaaacctcactgcttactctctctctctctctctctctctctctctctctctctaatgtaaacgccattgtctgagttccactcatttgctcttaggtagtcaccgtacttaggttgtatctgaatttcctcttaaatgacttatgttcgtaggatgagtaatgcttggtattgaaagtcttcgcagaaactggtgtacgaaaattctatgttcccacaatcaccgattatgcgacgctgtaaacacagccattgatcgtgagattatgcgaaatttcatgcactagcttttgtacttatttagtttatgtaaccttgttcaaaagcaaaagaaagatcctaatgtggatatctattgcctacgtttgctggtgttggatattatcaaaactgaacctttccgctttctttctgctgtggagtttgctggtgttatctgtttctaaaattgatggatgcgaatgctcctagatacaaaacaatctacttggggagttcctaattattgtctggattccattctttgatatcaggta

SEQ ID NO: 93307 - DNA, 684 bp, Eucalyptus grandis
  Intron number 2 from transcript Egrandis_v1_0.043859m (loc us Egrandis_v1_0.043859m.g) derived from phytozome v7.0 (c hr-ID scaffold_2; pos 34661027 to 34661710 reverse strand)
ctgctaatcaaagggcgatacagactctggagaaggtatggccttgttcttcgccgtcttttttttttttttttgtggggggggtggggggggggggggtggggggtttatcgacccggttctctccccacttggacggcatatttgcgtatcaattgcgatggtttttgctcgtgcgatttcacatcactagctttggattttcattggtcattgctcgatcctagcagagcgccccatgttaagtatgcaggaaattggccaatgttggatttatggctgctttttttttgctcatgagaaattattcagaaatcttctgcatcgcacttctagggaagcaaaaaggagttattttcttcttgggtttgtataaaagaagggaatgcttgattggggaccttctttgttacctggccttcagttcagaaacttgcccatgtacttttgagttaagctcatcaaacaattggaggcttaaaccttgattgattatgctgaactacagtgagattcttcttgttcttgagtgggttattatggtaattggatgccatagaggtctcatctttcttgtgttttctcctgcttttttcaatttttccgagtcccttcaaatatgaaggctatgaaacctcgaattgtatggtttactaatgggaatttgttgatgtgatttgaagt

SEQ ID NO: 93308 - DNA, 737 bp, Eucalyptus grandis
  Intron number 1 from transcript Egrandis_v1_0.044331m (loc us Egrandis_v1_0.044331m.g) derived from phytozome v7.0 (c hr-ID scaffold_5; pos 31687219 to 31687955 reverse strand)
ggtaagtagagtagagtccatcttttgtgcaagaagctaatctttacaagtataaagactatttaaaaaaaaaaaattctacacacacaattgatagtacacatgtagatgcttccttttatgattcccgaaaattctcaagttcttgctcaattatcaagtgatatcatttctatggaatcagctgcatcgaatcgttttatttctttggctcggacgattctagttccattcccaaaaaatgaatatctatttgtattgatagattttttatagagttgatatacgtcaaatatctaatagttaaaaaattaccaatcatataaattttgaataaactactgataatttaacaatagttttgtgaaactactagctttttgatacttcataaattaccactttttttgtcctttactgaatttatttgtcttttttaccgaccacttaaatttgccaactctcacaatagttttggaaaaagtaccaaaacagtcataaatccgaagaacatgaattctttggatgactaaattttgaagccttaacttgtttccattggtgtgtagctctcggagttctaattcaacttggtgggaatacatgttggttttggttgtgatcatcataaaatgtgatgcactactttatcattattggcttgtaattgcttgttatttgcttattcaaattgctaaaaatgatcccacaacttctttttcttgtctttgtcagag

SEQ ID NO: 93309 - DNA, 645 bp, Eucalyptus grandis
  Intron number 1 from transcript Egrandis_v1_0.012193m (loc us Egrandis_v1_0.012193m.g) derived from phytozome v7.0 (c hr-ID scaffold_5; pos 12477243 to 12477887)
ttcacattcaacccgacttcccggttcaagttcaggtcgtttcttcgatgtgtttagagcagccgtggctttaactttcacttctttgaaatacgaaatctcgactgtacttcatagcggtaaattaagacttctaacggtaaaaacaactctctctctctcgtgatccatgagttaattttatggaccacttctaataatgcatctgaatcatcgaatttgatgaattaaggaattcgacatatgtaattaggtgcaaacaaccacttagtgtctttcaaaattgagaaggcactaaaccaaaggaaacaccttagtcattattaaacctatggagtaaaccatgtaagtgtcttgttagaaagtcaattctgcttttctgattgtcaacatttagcattgaatgtccatttaattttgctatactattctattctagcctgagtttataaaaatgattatctacatgaaccgatgctctatattttcctccatgcttaattggaggaaactttctccaatcgtgtctttgagttaagaacatcatccccatctacgctcttatttctttcaattctttgcgactgattcgggcttggaaacgtggcaggtgacaaagtacacttgcggaggcatctcgttgac

SEQ ID NO: 93310 - DNA, 1010 bp, Eucalyptus grandis
  Intron number 1 from transcript Egrandis_v1_0.032424m (loc us Egrandis_v1_0.032424m.g) derived from phytozome v7.0 (c hr-ID scaffold_35; pos 56694 to 57703)
agtcgcttcctcgcccgttgttgcggcccatcgtacgtatcgcgtcgatcgtcttcttcggtggttccggcggatgtccgtttcgaccgtccccagcctgggtggttctcccctgtaattgcatctttatgctcattgggggggagccgcaatatccccgcaaagttcgcatttttcgttttgcccgacccgcttcgtgccctttgcattcgcccgatggcattggccctgccagaattcattcgctccttgcgtggttagggtttcgcgatgtgtttgttaggattgtgccccgtctgttttaatcggagttcgggtggatttggagatttgtcgattatccgagtgtgaattttaagggcgcgtttggttcttatgacctacccgattgggtgggacgtgaaccggcgacgaatgagacttgcagagtttttactgggtttcgagggaggatattgccgggcgggtttgcgctcgtgttatttctatgttgtactctcggtggtaatttattttttgtcggttatatgacgacgtattatttttctaatggatgctcggttaatgcatccattttgaagttgggtccaagaggaaaacctttttttttgccagcttttctttgaggagaaattagctgcatccaattttcttttctttcaaaaagatgaagcatggcgactagcttggtcagttggcaatgtttgagagaactgataatttggcggtatggagccaaataggcaagtggtgtggctattgtatgagtagatgctagctgtagtaaattgtccttcagcacagaagagcatgcgcatgaatgagggagagagagcagggaacacgcagaaggcggggaatgctgagtacttaaaggctgatgtgaatgggcaattgacgtttggctgattgcttgctctttaattggacataacttctacataccctttgctattattgatcggtagttgtttctgcaggcagcgaagattcttgccaacttggttgtg

SEQ ID NO: 93311 - DNA, 963 bp, Eucalyptus grandis
  Intron number 1 from transcript Egrandis_v1_0.034274m (loc us Egrandis_v1_0.034274m.g) derived from phytozome v7.0 (c hr-ID scaffold_3; pos 9110944 to 9111906)
gattttgtgtggtaagttttgaaaatttttaattgactgaaatatgaaaagtggtatgtgcaagtctgataccagtggatgccttaaggcttttacttcattttcaacgactgagaaaatggcactagcaatcacggtattttcacttttgcctcggttagttctctgtaattgggatatgcttcgagctttccctttgttcaatacttttctttctgcttggatgctttttcgtgtttgatttatcgaggagactaaggtgatttgtgtagttcccatccttttctttcagatgtaagttgatgactgtgtgagttgactatgagaagttgaattagcttgtgaaaatcattagcgtactgtttgtttgcacctttcagctagatcgagaatttgaattctataactatgacaggccaacaaaaattggttctttcttgtcacatagatcaccaaccaccaacaagataactcgcgttggttctgtgagatgaggtattgaatgttaaagctactactagattgtgtttcctgagtataaaatgcaggtgcctgtgtagtctgccttcttgtttttggagtgcttttggcatggactttattcgggaacattcaccatggtttggatccctgacctacataatgcagtacaagggggaaaatgattttttgttgttatctaaacatctctaaactctcgtcatcatattgaaagctaatttatcaattacctatgctcggtcaccattgctcatttttttaaaagatttttaatccttgtactgatcttctgtacatcttactctaatatttggttcatgtccattcatcagtgatttttctaatgtatcttgcctgatgctgtcaaaatattctaaatctccttctctttcatacctgtcttttttcttttgatgttttatctttgactttattcggcaggaattcgtttttacatagaag

SEQ ID NO: 93312 - DNA, 740 bp, Eucalyptus grandis
  Intron number 1 from transcript Egrandis_v1_0.052688m (loc us Egrandis_v1_0.052688m.g) derived from phytozome v7.0 (c hr-ID scaffold_5; pos 7433804 to 7434543)
ggtccgcgtgtccgattgctctcggtttgttgcatgtcagtcttgagttcgtttgaattcgttcgcttttggtttcgagtcgggtttgtgcggatcgcattgattgagctggatttgggtcgttgaaaagccctgtttttcgaccatctaagacttgagaattgagggttgactatttctccacccgcgtttacttgcttggttttcgtcttctatggttttacgatttttggaaagtcgaaatttttcctcgtttggagctaatctgaatttgttgcatgttaatttgactgttttttcctctttgactaatcgaaaaatttggtctgatgatacggttctgttttctatcgcttcaaaaagcttgggaatcaaagcaaggagtttaaattaattgttgggattgctctttcttccacctcccatttcacctgatttcctaatcaaacttcaagaaagaggcaacttcatagttcactccttgctttgattcccaagctttttgaagcgatagaattatgaattctgagagtcctgaactatgaagttgcctctttcttgaagtttgatttgttccaactgtctgcaatggcctgtgaagccgcggctactgagttttgactgagaagttgtttccgaatatatagatcgtcacaagaaaccaaagcccccgctgaggatagtgatcgtaaaaagctgccatagccatatttggggctgacggcatttgaaaatcttga

SEQ ID NO: 93313 - DNA, 942 bp, Eucalyptus grandis
  Intron number 1 from transcript Egrandis_v1_0.021001m (loc us Egrandis_v1_0.014239m.g) derived from phytozome v7.0 (c hr-ID scaffold_5; pos 5907093 to 5908034 reverse strand)
gatctactcctgccattcaaattctctctaaggtactctctctattcttgtccccttgaatcactcagactcttgttttcttagcctcttttgactcctgcttgtgcactttatatatttatacttaaaaatcgatggacttgaacaaggtcgacaagggcccttagtttaggggtaattggcatgtctagaaagtcgaggttgctctgttgtggtctttatgacaccaatagtcataaggtaatctatatgattgcagccaatgaagcgaggtctcgccatggaagttgtcggttctttttagaggatcaaactttttgagagaagctgataacggacacttaatcctaccattactacatggactaccgacaccaaatttttagagtgtctaaaccatttggcctctctatgtgtgatttggtcatcgagtttccatactttcacacgtttctgaagctaacatttgaccttgtgggtgataatagacaattaaacatggatgaagtttctctctgtggtgccatcaatgccatttaaactttcctcttgtttgagacaatatatttggtttctcacgagacattctactgagggtagcattagaattcgttgctgactgttgatgtattcatgtttgccagagtcgtttcggctgctgcagcactagctgtcgttgcagttgcattcgtgaattaccattacacctctcatcttcctccttatgaggatatctctgggcctctgtccttcttggaattgatttccgaattcaaatatattgccccaggattgctagtgatctgtttcgcttcagatcttcgtgacttgatagttttccttctttaccggagaggtggagaagtaggcgattttggcttgaaattaaccgaagagtttgcaaagatcagtggactaaaggaatactccaatgaagagttg

SEQ ID NO: 93314 - DNA, 793 bp, Eucalyptus grandis
  Intron number 1 from transcript Egrandis_v1_0.026720m (loc us Egrandis_v1_0.026720m.g) derived from phytozome v7.0 (c hr-ID scaffold_3; pos 36483564 to 36484356)
atttcgcgtttactagaccaagatcccgatttgaggtgagttttttggcatccttaatttgcatcactaccatttacattcagccatttaatagattttagcaccattgttggttgactaaatctcattttactggatcatttaatctcatgagtattaaaggtggcctcaaattcgtcgaacatggcttatatctgtcctgctgtggggctccacttgatgagcaaaaaatgtgtagaaaccactcatttcttttgtcaattgacaatagaagccgaagaaaaggttgaccatgtgaaaacctaaatgcctttgacaactgtgatattccaatgaaggatgatcattgtcggaagcccagttattagggttataagtttgtcacccacccatgaacaaataaattccagtcattcctagtgcagtattagatttgctatacgtgcaccgaagagaatttcgtatgaagattccgggggttttagcatatggcacgaatcctagggacaggatgattagattgctagtttaaggtacttttgagtaaataattcgtaggttcttgttgtagtgaaacaactactgccttcatcctggacttgtgagttgtgaagtgcatgcaaattttcagacattttgattactctttattgagctaatgcaatttttattgttttaaagattgtgcgaatcccaaacttgcgatgcttttaaagtcaagtagtcggtcttttcagtattgttcatgtaattgatttcttggaaatgttgggccaatagtaaattacttttt

SEQ ID NO: 93315 - DNA, 346 bp, Eucalyptus grandis
  Intron number 1 from transcript Egrandis_v1_0.043838m (loc us Egrandis_v1_0.043838m.g) derived from phytozome v7.0 (c hr-ID scaffold_5; pos 73363409 to 73363754)
aagacccttgacttgtccgacaactatttaggagggtagattgcaccagaaggtataaattcaccgttcgttcatttcctataaaagaagagatactcattatctaatgaactcaaaacttaaccatgtctgggtccttactcacttcctgcattagagatgattatgtccacgtcatcattaatccacaagtctacaacatatttctcctcgaaatggcaataccggtttatgcatgtactcgaatagatttccacgaattttactgcttttcattgtttgtttgcaaaaccaaacctattaccttcaaggctgagcaaactagaggaacttgacttgagttata

SEQ ID NO: 93316 - DNA, 300 bp, Eucalyptus grandis
  Intron number 1 from transcript Egrandis_v1_0.036424m (loc us Egrandis_v1_0.036424m.g) derived from phytozome v7.0 (c hr-ID scaffold_3; pos 8411762 to 8412061 reverse strand)
cgcctccgattccctccgccatcgcctctgccggagtatgttcttttttagctatttcttcgagcctctgccggagaattattactggctgggttcaaaaggaacgagttcgggtttcctgtctaaccgtggccaagttttgatttttcttttctttttttacgctcgctgactttcgtgaacatgggatttcttctgtctctctctttttgttttgttttgttttttgttttttctgggtttttagattttgagttgtctatggttgttaatgtcgtttgttttgcaatgcagagtaag

SEQ ID NO: 93317 - DNA, 1010 bp, Eucalyptus grandis
  Intron number 1 from transcript Egrandis_v1_0.009706m (loc us Egrandis_v1_0.009706m.g) derived from phytozome v7.0 (c hr-ID scaffold_3; pos 9884102 to 9885111 reverse strand)
ctcatcagctacgtcgatagcctccccacggggtaaccacgtttccttcttctttccatctctgcccatcatttggttttagcggcagagccgacgatttacttcaagagcgacagcaaatttttcccgggtctagttgttcaacgaacattaaatttcaaaaaataataataaaaaataatcgtgcatgtcacgaattatgattaaaattgttgaaaattattatattaccttgtgcctagaaattttgaatgagctagtaagatagttttggtgagtttcggtcgtgtctttgcttctaactgtttttattaaatgtgactgtttgtagaaagtcccatgtagtgtgttcttcgtttgacttgttgggatttgattgactaaaggtgtttgattgacgaagagattatatataagtggtggagaggccttgcttttgcgatcatttagacacaaaaaattcggaagggacgaacttgaattacggtttgctgtctctatagtctctggttccatttgaatttgcagtggtgatggagccaaaagcataggcaagagttgctgcattcagtcagtatgattttctttcttttggttcagatgattcttagtccttacatgggatgagaagattagttgtcaaggcagttttgtgcatttgtcgactgaaacccagtttgtgcttgattctgagaagaaacagggcattctgggctgtctagactcattttggtttactgatgatacttgatgaaagcagctattatctgcttcaagtgtttgatgcttcccctgcaaaattatgtaaaacatttatggtattggaaacagcattcagggttgagggccattttgtatattttggaataaaggttgggtcttcaagcgcgattgccaagaacctagagacagtccatactatttagcttgctgtttttttcttatttttcccatgatgatgaatccaaaaccaatccttgtctttctaagggacgagaaagggttatatt

SEQ ID NO: 93318 - DNA, 785 bp, Eucalyptus grandis
  Intron number 3 from transcript Egrandis_v1_0.014105m (loc us Egrandis_v1_0.014105m.g) derived from phytozome v7.0 (c hr-ID scaffold_5; pos 22645136 to 22645920 reverse strand)
tcaaactaatcacgggtgttgctttttgcgaagttggtggaatttatttattgagttttcctacatagagcacccgtaatcctgcactttcgagaaagctctttccacaatccaaaaactactcattagtttcatcatacaggataaactaacatctgatagcattatctagttgatcattttaaaattttacgttcctgctcttgtcttgcgtttgattaataccttggagactgcatgtggttttgctaagagcagtagtagtgctctgcttaactttttgagtttttattcttttcttaagaaaagatgaatgttccctttttatgcaaatttggaagcacgcattactaaaggtcatagttaaagaaggttattatatgagatcaagaaccaaatctggcgatgcgcacatactcttcaaagatgttgttagttcctgcataaaatacgtgagtctgtttttagcacacttcagcctgaatagcatcttttcttgcatccagcaaaatatatctgtggaattgtcatgcagtaataccattgtttgttgctttttgaatgcctttttctgccttttgtggtagtcgccttgttggcagttggggtctgttgtcattttatattatttaaatatgtgtaggtgacatattcaacttttacttgttgtctcaaacctcaatagctcacatcgttaattaagctttgtttgctacatggttattgtattactaattgttactcttgttcgcagatagctcggttattggaacttttccttgttt

SEQ ID NO: 93319 - DNA, 268 bp, Eucalyptus grandis
  Intron number 2 from transcript Egrandis_v1_0.027127m (loc us Egrandis_v1_0.027127m.g) derived from phytozome v7.0 (c hr-ID scaffold_5; pos 2086305 to 2086572)
gtgcaggtaatctttgctatgaccgttacctttgatttgtaattattgacttatcatatatatcagatgtgaatgtcctcatatatattggtttattgccagctcatgctactattgctggcccttttccaaagccttttcttctgaagaaataacatgatgaggtatcttttcttttttccttaagccaagtaatttatttatttgatttttggattctgctcatatttattgatacattttgcagaggcactgaggcaattcttac

SEQ ID NO: 93320 - DNA, 351 bp, Eucalyptus grandis
  Intron number 3 from transcript Egrandis_v1_0.017070m (loc us Egrandis_v1_0.017070m.g) derived from phytozome v7.0 (c hr-ID scaffold_3; pos 4783325 to 4783675)
cctgcaaccacgtttctgttggcaactgctcttgggtacatacacacaactttgttcccattattctgagaatataaaataaaaagaccatcagaaataatttccctccacagcccacataattaaagtcaaaactaattaaacaccaattacctgatttaagctaatgaagaacaaacaaacatgtttttgagctcgaagtgatcgaaatcaatgactaatgtccaaagaaaaatcacttgctcaaagaagtattttgaaactcagatgtggctattattaacataagttctgatgtgggtaatctaaacactgaccttccgcaattctttgttgcttaaaaacttaaga

SEQ ID NO: 93321 - DNA, 768 bp, Eucalyptus grandis
  Intron number 1 from transcript Egrandis_v1_0.028807m (loc us Egrandis_v1_0.028807m.g) derived from phytozome v7.0 (c hr-ID scaffold_3; pos 69202871 to 69203638 reverse strand)
gtaatgtaagtaagtattggggtatgcccttgacttgcgattaatgaatgtaactttgagtgatttcatcaagttcacagctaattatatctctgacttgtcaagatctcagagttcttgaatatgagtactaagctggcctccccatcttgccaaataaaaaaacaaaagaatttctcttatacatggcaatcatttctttctgagcgttatactgctttgacattttgtgagacaatttggcatgctctaaggccttccttcggtgctactttttattttcctttgaatcagtattatgtacatgttcgacgagtatcatttctaactgctccagtgtttgcactttcaacaattttcccttcaagccatagaggactcaccatagctcgcattagttttcaagaatcattttgggtttggtaacaagaagtgagatttacttgttgcaattaacttgacaggaatgtgaagtttttatgtgtcacatttattgactttggaaccaaaaaatgagaagaaaactgttttatagtagtggagaacaatccaatcattttgaaggctgggtcctttagacatttatcccttgaaatgttcatgcatagatgtagtaaaatagaggtttcaggaaggaaatgtagtgcttcatcttgctccctaattgtgcgtccaattttgttttatgctggtgcgggaacctcttatattgtggaaattgcacaaattttgcttttgttacacccttctctcgtctacaggtggtcc

SEQ ID NO: 93322 - DNA, 691 bp, Eucalyptus grandis
  Intron number 2 from transcript Egrandis_v1_0.033041m (loc us Egrandis_v1_0.032077m.g) derived from phytozome v7.0 (c hr-ID scaffold_5; pos 69616585 to 69617275 reverse strand)
ggacagtagtgctttcaagcttcagcgctcctttggtctgttctcaacccccccctgcttagttgttctctgtctctctctatctgtttttcctttggcttgaaactgaggttggtggatactcttggatttcttgaagtgctgcttactgctacttactgaagctgaattgtgggttttggggatcggtagttattaatttagctttctcatgcgtaatcggtggtgcacgttgtcctttttttccctccttttgtggccgatttcacgtgatcacaattagaatggataaactgtggttgaaacctcacttgctcagattatacctggtggggtttcccgtgctggcatgtgcttggtatttcatgcccagatgtagtaattaagggttggacgttactgatttcgaagtttttccttggaatgattttcttctgatgaatttgagtaggtgggtatggataggtggatggtttttatggagagatttcttagttaagtgaaggaacctgagttttgatgtgggcagtgcatttcttcatatgatgtgtcaaagtaaagcagtagatattcttttttgtgtccttttgatcatggattgtcggcttcattagccattccacctgtgtaaagctattgacccattagaagacacatcgatgagtccttgttcttgattgtgtagcattct

SEQ ID NO: 93323 - DNA, 975 bp, Eucalyptus grandis
  Intron number 4 from transcript Egrandis_v1_0.029189m (loc us Egrandis_v1_0.029189m.g) derived from phytozome v7.0 (c hr-ID scaffold_5; pos 52117631 to 52118605 reverse strand)
catcgttagcccttttgaagcaacatcctccagaggttgtttcttctcccccgccttgtttctacaaatcgatgttggtgtggggagtgattatccttttctatgacctctctggaagtgaatgctggaatgcttgaaggtggatgagtggaaattggttccctttccccatgaaatgataactaagatccatttcattggcattgtctgctgccatgttgaccttagaatgattggctagtttgcttgtcctgtttgagatggagaagtggcgtagtttgttttgctgtataaagcaacagagggagtgcaaccttggttcacgtgtttgctcaaggctgtcctaggggaagatacttgtgtaatatttggatgcatcgaacttggcattatcatataccgatgcactttagtatgaacagatgatctgtgaaattttataggtaattttgctttctaagaactatgagtatgtacgtgtttccctgtgtattgtgattctactaatagtatactggctgtttttatttctactgatgtagtctgtggttgctgacttacaaggtttgatttcggtattctttgaatttataaacgaaccagcagttttctactgtataaagcaacagactgagtgcaaccttggttcatgtgtttcctcaaggctgtccagggggaagaaactttttttataccgatgcactttagcataaatagatgatatatagaatgttataagtaatatgctttgattagttaggtattaagttatgtatgtgttcctctgtgcattgtgattcaatggtattgtactagctgtttttatctctactgatttagttggtggtttccaacttgcaaggtttgattctggtgttcttttcacattactgaattttttggcttattatatacatacatttggctttcttttttccagggaaagaagcttctcgtgatagggacaacaagtca

SEQ ID NO: 93324 - DNA, 522 bp, Eucalyptus grandis
  Intron number 2 from transcript Egrandis_v1_0.001826m (loc us Egrandis_v1_0.001826m.g) derived from phytozome v7.0 (c hr-ID scaffold_5; pos 57141441 to 57141962 reverse strand)
gatctctcccggttcaccaaatccaccttcgagaggtaatgattttctcttttcttgattttgcctactcactggtctgttgcgagttcacttgtagtttcagttgtttttttgtgttctgaatttgatttcttgttcttttgataattggatgctgtagagagtaagccatttgctttttatcttttgggaaataggtttttttttttttttttggtgaaaatcttttgggaaatagtttctgcgtgattatatgcaaagatttctttcttgttccgtatgaactgagaatttgtccttaatttgttttccgactacctgtttggactgcgaaagcgtaattcctactgtagccttattctttacaagctccggtaaaagatcactgagattgaagatttgttaaatgctgtgttgctacgactcgtgacagggtcgaaacaaaggggtaaagggattatttaatactgattcacttttgtcacagatttgtgcgctttgttagcacaccggaaattcttg

SEQ ID NO: 93325 - DNA, 251 bp, Eucalyptus grandis
  Intron number 1 from transcript Egrandis_v1_0.034096m (loc us Egrandis_v1_0.034096m.g) derived from phytozome v7.0 (c hr-ID scaffold_3; pos 2222435 to 2222685 reverse strand)
cttcgtttgcagttaagtgttattttagtgtggtgttcttaaatacctctttttcaaacttagaatcttatttcatagtccaatagctttagtatgggtttatggaagattttggaagtatatgtttggtgtcatctgtaacttgttgatttgtttgactcttcagctttgatctcatattttttcatctttttattttcaaactggaaagtaattattcatttgttttatagaacgcttctggtaactct

SEQ ID NO: 93326 - DNA, 842 bp, Eucalyptus grandis
  Intron number 1 from transcript Egrandis_v1_0.050890m (loc us Egrandis_v1_0.050890m.g) derived from phytozome v7.0 (c hr-ID scaffold_3; pos 78014392 to 78015233)
agaaaaagccggtcagtttcgcttccccgtgtctgcgtgaggactgttgatttagctggtccatgcccagaatgcatctttagtgcaaatattttctttggactgcaataaaaggatttacggaaacatttctggatcttgattttcagaacatcctcaaagggtctttttctttcctttagtttttgtttatgttttcttcttccttccaaagcaactttattgtttcagatcagaacgtcctagtgaaggccttatgcctccgcattttgcttttgctactctgcggaaattatctaaaacgaagtggtaacttgtgatagagttagcctttttcattttacaggggctagtctctccaccccctccaccatcgcctccaccaccccctccaccgtcgcctttgtcatcattgcggtcgtcgtcatatttatcatccatctctacctcatcatcaaggaccaattatgaagttttcttgagttttagaggtcccgatacacgcaagggatttgcagattacctctacaccagcttgactaatgcaaacatcattgtctttagagacaatagtgatcttgatcctggagaaaaaatccctgatgcattggttcaatccataaagcaatccaaggtatcaatacctattatctccaaggattatgcatccagtcaaagttgtctcatggaattagcacaaatggtggaatgcaaagaaacagacgctcaactgatcgtgcccattttctatgatattgaccccgctgatttgaaataccaacgtggatgtgttggggaatccttcagtaagcacgagcgccgtagaattgaccgcaaggtca

SEQ ID NO: 93327 - DNA, 907 bp, Eucalyptus grandis
  Intron number 1 from transcript Egrandis_v1_0.009243m (loc us Egrandis_v1_0.009243m.g) derived from phytozome v7.0 (c hr-ID scaffold_5; pos 59719403 to 59720309 reverse strand)
tcaagggaacccctatctccaaaacggttgtcaaggtaccttttcccgtcttttcattagacccacctcacatccgaacgagtgcttctgtatagaatcgtggatattatttccataagggcgaccatgttaaatggatccaattgcataaaaaacccagagaaagaaattcttagaaacttcaagtcagaggaccaaattttgacttgatgaatggtacatgtttcaaacgattctcctagtaatcacgtaacatttataatcttaaaaatcatatcaatctaggctgttaaaaatattttttttcctttcaaatgcacggaatttcattgcttgaaatttaatatgacctatgaagcgtttagtaataatctgtaaattttcacagctatcattccagatatagctagacattcttctctcttaagtttaatctgtacaatttttttacaaactgaatcagtcgagcgcaattgattttataaacagatggtccataccgaaccctcaatatgaatcggtaaagttagcttgtaaatcaatttcatctaccgatgttaatacatccagcattattctgtacttatagacaattatttttgaattattttctatgtaatgtgttattctaattagtaatggcacaattttgttggataattcttaaatcttctattctaaacaaagatcaaatgcttggttacgcttaggctcttgagatagtgacctatcacttaaaaagtgtggtgaggtatcacgatctcaggaaaagtaaattaacttgatatgtcctctcatattgaaagtgttgccaaatcatggaattctatatactttttcaactttcttccaattgaaatggtgtcggattgcttattccatttggaatatattcctccagatatcg

SEQ ID NO: 93328 - DNA, 901 bp, Eucalyptus grandis
  Intron number 1 from transcript Egrandis_v1_0.025498m (loc us Egrandis_v1_0.025429m.g) derived from phytozome v7.0 (c hr-ID scaffold_3; pos 6937597 to 6938497)
ttcagatagcttcaccaccggtaaatttctctctcttgaagatttctgcgcttgttaatggcgacatcgggttaaagctaggacctttgaccccattcttcttctcttttctctttccaccgtagaggagaggatacaattctatgcaagatgatcctataacgtgctagatttgcaggtcattctcttttcctcttcttctttttcttctcggtgttgacttcttgtactctgcgaaagctttcgtttttcttcgttgaattacaacttgtttcctcgggagcaaaatattagttaaagggtctctacgaggacaccttttctcagacctagtgctcccgggatgagttttgcgaattatgcgcaccagctgtttgtgagtttgtcagagccagagtaggacatgaaggtcccttttttgagcaattgggtatcatttgtatggctctttggtttttacttttttgtcttttacgtcttcatagttgcccgagacaaggttaacgtggtgttgtgtgtcggtggtacattttggaagctcaggagcatgtgttgcattgcatgtgatatgacagccaataaattttgtcgatttcaaattcatgcgcaaagggcatattgctgcttcttcaattccacatttgtaactcatgggtaaattttttttatttcactctgattgttcatcattcgagaatattgattgttatttaaagtcgacaaagataatttctcctttgatctgtatattggacgatgcttttttgtacctcatcggtagctgaaccccttttctttaaatgtgaaggtttggacccggaattctaaattgtagtatgtccttggagatcgttatgcatttgtttacttggttactaatttctttggcggatgtttccag

SEQ ID NO: 93329 - DNA, 339 bp, Eucalyptus grandis
  Intron number 1 from transcript Egrandis_v1_0.015056m (loc us Egrandis_v1_0.015056m.g) derived from phytozome v7.0 (c hr-ID scaffold_3; pos 45105840 to 45106178 reverse strand)
atctggtaattctctagcttttatgcttctcctagttcacttttggcataaactatattataaaagataaaaaaaaaacttgcgggacagtatacgaaacaaatgatggtcataattctttttcagaatcatcaatgggctgtcaaacctttttattctagtttatgttcaggatgtgatttttccgacttcgaaaggatacattttcttattaattgacgctgacactattccttgtacaatatcgacatgggtcttcatgattctgtagctcgaagcaatcatgatgtttttgtttgattctttgcctgcaacagcttcgagatttggtcctttgaa

SEQ ID NO: 93330 - DNA, 847 bp, Eucalyptus grandis
  Intron number 1 from transcript Egrandis_v1_0.009571m (loc us Egrandis_v1_0.009571m.g) derived from phytozome v7.0 (c hr-ID scaffold_3; pos 56411296 to 56412142)
tgcctcacttgtcggattacatcgccgacctccccgtacgccttctctctctctctctctctctctctccgtctctgtgtccgtctgtgtgacatgcgtatgttttgatgttcgtcgggggtgcttgtgtcctgtgcgatggtggggcttctgggtattcgttgattctgttgatcgatcaaatgggagcttctgtctgtgtctgtggagcgagattttgaggtcttacctatccaagttacgtgctttgctggtgatcttgaagttcttgtgttttgacgattctgggttttggtgaaatgtgggtgtctctgactgtgagagtgatagcggtcttggtgcgatgacggcttgtgaatgcgagcaggtacgtgtgttgtgtgctgtctgcaggaagtatctagttgttggagttgtcgcgctatagtttgatggaggggatgttgcactgttcattgtggttttgctgcaagatcagttgataatcaatcaaagtttctgtgctatgagaaaaatgaaaaagctcgatttgaagaacatagaatcaccagatgtgattaatcatgtgcggaatttcttttctgtcttgtttgattaaactactttggctatcagtaaatgcccgtataatataggaatgtgaactttatgatgtgagcatatataaaacatcttactagcaggtggaagcgcactctgacttctatatgtggtctaccagtttgcattttatgatcatttaaatatggaagtacttgctatcgttgttaacattactgatttcatttccctgctatgtttttgtgcaacagacatacccaaatccattgcggtctaatcctgcata

SEQ ID NO: 93331 - DNA, 691 bp, Eucalyptus grandis
  Intron number 1 from transcript Egrandis_v1_0.014590m (loc us Egrandis_v1_0.007597m.g) derived from phytozome v7.0 (c hr-ID scaffold_1; pos 31180446 to 31181136)
ctgttgggaacaagtcaaaggttggctctggtcaggttcgtttgatttcgtttcacagttttccattttgggtgtttgacaaaactcctcctttctgaagtctagtctgttccctcgaatatctctctgtttttatctggtttgaagctttccactggttaatgggtgtctcacgtcttgttatggatcatatcatttggaattatttaattaatttcttaattgcagcacagtgcgttcgatagcttcagctcctgtgttccacggctctttctctctctcgctagaaattttgtttctttaatggttcttttctctgttcaaagagatgggtagattgtgggtgtttgattatttttgtctttcgttgtcaaatgaacaattaagtaaaagggactgttgccgaattaagaataatatctctgccttaaagttcagttaagtgggttgccgattaagttattgttcccatcctgcttttctcatgcgttgattgctgtgcttccaaaaatggcggtgatctttttttgctgtttcggtttcctgtccaagtcaaccaattaagtatcagtaaattaaattaaataaggtccctaaacggcatattctataaattaactgctttgctgcgttttggttaaagctccttttttgtgtttctgtgcagaaactttttgtccggtgcgcagcc

SEQ ID NO: 93332 - DNA, 767 bp, Eucalyptus grandis
  Intron number 2 from transcript Egrandis_v1_0.003836m (loc us Egrandis_v1_0.003836m.g) derived from phytozome v7.0 (c hr-ID scaffold_3; pos 12801980 to 12802746)
cgcattattcgggtctactttgccttccgcggtgagtcattgattattctgtgcttgtctctgcctcagcacctcattgttctttagtttgttggatgtgtgttcagatatgatgcgtagcactgtgataatggggtgctcgaaagatgggtaatggtgcgtgtgcttgggcctcttattaaagattttactttgcagcatcatgcatttgttatcttcctatttttcttcttttttgacatgggaaaggctctactctgcatttgacttttaattttctgactctataagttaaaaaataggtgcatgagttgaaacatgaattaaattcacagtacttcatgaggacattgaacttatcttgcctattctgtcatatggagctaggatcgtctagatgctccagctagaagctttctcatctagttacattgaggtgatggatacctacgttctctacaagttaaaaacaggactgcttcttattactgatgaaataatcttaccataaatactcgtgttggtgaatttcaaggttaaagaagaattctttgttattgatataactttaaagtactttgtgaatgcaatagttgactcttgacagtattgtcatgtatcactagtgatttatccatgctaaatggattgtagtaaacttgctgccatgaatgtaaccatgcttatggagccacttaaatctttttctttccattttccgtttttgtccaggtttatctagagattcctagtggagaaaatttggc

SEQ ID NO: 93333 - DNA, 933 bp, Eucalyptus grandis
  Intron number 2 from transcript Egrandis_v1_0.025252m (loc us Egrandis_v1_0.019518m.g) derived from phytozome v7.0 (c hr-ID scaffold_5; pos 16177056 to 16177988)
ggtatgacttagaaacttcatttacttgttctcttcattatatcaatttcatcaagagttcattacttatgatataaaacttgtcacaagttgagcaccgttcggataatttgctgatactcattgcaatctaaggttttgggaccttgaattcagatcttctggttgtgattaggtctaggttttatactcaatttcacatccttgttttctcaagttccaatgagagatgtctgtctgactaacttctttttcaggatgatctattcaagtttttatccactgattctattcctaatttctagtaaatccaatctgagatggaatgctcttgtaaccactttgttgaaggaaaaatggcatctttctttctgttttcttccttaatatattctcctgactgaactatcttagacatcaatgtgtttgattgaacttgctggtaatgctcttgtaaccatcttttttctattttcttctatttaatgtcacatggaccttcaacttgaaatgcatgtttgcatctcatagaaatgtttctcgtgccacatcaggtggcaaagtgtaaaataatgtagttggagacttatatgcccaatgatattctttggaagctgtctgggtaatctgaatgtttgctttaactttggacacccccttttaatttgaaacttaagggctgaagctatagttccaaatgttgtttctttagttagtttgtgaaccttgtgataattaagtaagaatgctttgtttagtctgttgcgaaacttgcgctactctggtaatgcgtgtatatatgagttgtttgagtttttctctaacccatggaattttaggtttttatagattcttgtgtgattgtgtattctaaacagttatgcttctgcacctcaagaactgaggacagattggaccaaatttaccaaagac

SEQ ID NO: 93334 - DNA, 770 bp, Eucalyptus grandis
  Intron number 3 from transcript Egrandis_v1_0.018854m (loc us Egrandis_v1_0.018854m.g) derived from phytozome v7.0 (c hr-ID scaffold_5; pos 36842966 to 36843735 reverse strand)
cgccaccaacaacaaaattgcctagagaaaagcatgtaagtacttgagctcagtcctcgtttgaatctttttcttcattagtaaagaacttcagtagatcactcttacctaagtagagaggctgctatgatagatgatcagagtaattcttctttacacatgtttttccattaataaggaatttaagaatgacgtcttcattgtactttgaattttacatattatctcttgatacctatacatatcatctgtgagaatttattaagtttcttaatacatactgtggaagaagtgtgtgagtatagcatagacaaaaactggagggagggggtatctgaggagaagtacaacaattcgggataggaatccattctaatacacgcatataatgtacataaacacattctttggcacgttatgcctccagcctctagatcatctatgtttggcaaatgactcttcttctgaagatcagtgagttgtttatctgttattatgacttggcagaggaatttttggagtacatgtttgatctgataacattagaatatggcaattacaggcattgtatcctttatgatatgaatgttgctgttaagaaatttgcctattttgtttcgctgatgctactttatgttaaccttttgcttacaaaaataaaaggtttgcctttgcctgcattactgaataagagttgattttgctgtttatttgcttatcgttagatatttattgttttttcagttgccaaagcccaaacctcctacaaa

SEQ ID NO: 93335 - DNA, 1051 bp, Eucalyptus grandis
  Intron number 1 from transcript Egrandis_v1_0.038119m (loc us Egrandis_v1_0.038119m.g) derived from phytozome v7.0 (c hr-ID scaffold_3; pos 15062530 to 15063580 reverse strand)
tgactttttttttagtcttctcttctttttcgcaagtcgagtttcatatcgtttcccgtactttttgtccttttgttggaccggggataatctctttccacatgggcaagaaacacgtgtgttacggatgggacatatggttcgccccatgtttttgaagcatttaaactccggtaatttagactattatgtcaatgcaaaattctcaataatcaaatggtgataatctaagaaactggttcaagatgcttaaaaagtgtctttcgttagacactattaagtcatcattactacttgattgtatgcacaatgaaaaatcttgccatatcatataatgtgatcacggataaattaactatatttggatacacctacttacgtgctgttgtcttaattttctaatttacaccaccataaataattagtaaaagtactcaatacctactcgtgactctatagatgaataaaatttaacaagcttgacgaatagttctcatttttcgcccatactaccattcaataatggattggtttgtaaaattcttgataaaaattatttcatcttattgtggacttattatattttataattctgaatcgcatatcctaaatttaaaattagaatttaatcctgatttattgatggcatgggaagacgaagagcacaaaatagaaatcatggttgttagccaatccacaaagttgtggagggaaatgtaaaagaacaaaaaggaacaaatgcatccacgcccatcatcttaggacccatttagcactttcaaacgaggttataaacccgggagatctgccgatcaatacacaagcaaaccaacacgttttgcttcatgttttgagctgatagatatctagatccaacaccggagagtctctctaaccagaaaaagactctgaaccacctccaattatgccgagactaacttcatcacctcctcatattcacttcttcttctacatcccgtgtctcgtcttcctctgctccctctcccatgttgcagagtctcaaatccaagatcaagaacagcaagtcctc

SEQ ID NO: 93336 - DNA, 997 bp, Eucalyptus grandis
  Intron number 4 from transcript Egrandis_v1_0.008557m (loc us Egrandis_v1_0.004267m.g) derived from phytozome v7.0 (c hr-ID scaffold_5; pos 13487498 to 13488494)
ttatatcaccggcttcagctggactggtacccaatgtaatcttcttttctttggttcaatctcctctttgtacttctgataatgtaagtaaatgcaatagcttttttttttttttttcgatgttggggttgttacatcattgtttttcttcaatgaaactcaactctatgtatgcacgacactctgatgtaatggcaaatttatgtgtgaccgtgggttatgaggatacaattttgtaactattattttgatgagatggctggaattgcatagctcaagtagatttgaagagtgcatgaaatttttggaaaaatgacaattcacaaaaccaaaatgccaaggaaaccaagagagagttgttgacaacctagctttagtttcgtttttagtttggagtttgcagtttgaagtcgtaaggccctcgaaaatgtgaactttcatgtctcgctcttgttgtatgatcctgtgaaaactctgtgtagttatcctggtctgtttggactttgtagtgacctttatttactactttttgtcttgtcttttcttgtaccttgtgaaatttgaattttttttttgagcacttgaaaccttttggaatgtacattgtgaggcctaatctcatggattttctttgatttggcgaattttcacatgttgttttccctaactttgtaaggccttacattcattcaagtctgtcatgaaatgaattctggtgcaaacttacattagaagccttgaccttagagaactagttatgggccacatatgtcttatgcaatttctttggatgagtcatgcgattagtgattcgattggtcatttaatgcttgctattacatattaggaaatcaatgggcttctttggcatttaattttctggtttgtttactgtttctaccttggtatatttctcatttatgagtagttcactcacaatagaccggatgttgtcaataactctattgcaggttggtttggccacgtgatctttgtt

SEQ ID NO: 93337 - DNA, 1035 bp, Eucalyptus grandis
  Intron number 1 from transcript Egrandis_v1_0.029778m (loc us Egrandis_v1_0.029778m.g) derived from phytozome v7.0 (c hr-ID scaffold_5; pos 51906225 to 51907259)
cagggtaaagctcatcatgtttaacaaagaagagaaggcggtcttaactatggtgagactatgagttccaatgtctttgcttttcccttttctgggcctccactagagatttgcaagtgcctgctccttcaattagaattcaagatcattataaaacaggggtttcccaccatgctactgacatgattgaggaacctttttttttttttttttttttttttttttttttgcgttgcttctctatgatttgtgatgcagagtgcattaaaccaaaaattaagaggatgcttgttaaaatggccatagtcttccaagttgctccgtgtaatttatcacacgggcctctgttgcctctcttaatccaattaatgatgccaatattttgtactttaaaattttaagatagaaagttttgctcaatagtaagttttgctcaatttagtatagtctgtattatagtaagttttgctcaatctagtataatctatatctttaggaaagtgtcgtttgaattgtctaaaagatcaagaggtctacagagggaaaattagttgattcctttgttgttggttggcagattgcattggataggtataaagggatagagctggcttctaagaaactttccattttggcaaaggaggttgacttcaaggattttcatgaaaagcaaatagtatgtggcaaacaccttctaaaataagtattgcagagcaatttttagaatgagaaaaaagattaaaaagggagaacgaaggaacttgcaggtacacgtgaataagggtgtcagtaaccgaaccgaaccgaaaaattcgattttttcggttcggatttcattcagttcggttttcattaaaaaccgaaatttttcggttcggttcggtttttattggttaaccgaaccgaaccgaaccaataaaccgaaaaataaaaccattaaccaaaccggcagagggccaatcctatttctaattctctcccgtttcctctcgtcttgaaggtgtgacggcgccgtcgcgacgactgtggctgcga

SEQ ID NO: 93338 - DNA, 968 bp, Eucalyptus grandis
  Intron number 1 from transcript Egrandis_v1_0.016156m (loc us Egrandis_v1_0.016156m.g) derived from phytozome v7.0 (c hr-ID scaffold_3; pos 57467335 to 57468302 reverse strand)
ggcttttgaggtacttgatcttgggttcatgtaaagttttcatctttcgtcgattgtgtgctcagggcaggtttcaaaatcagattagggggatcgcattgttggtttttagttctatagctttgagcttggtttttttgggattttagctagtgtgttcagatggttgattctgttgttatgtggtgatccagagtactttacggtaaatcagtgttcagaaatagccaagacaatgctacatgtaaacaagatcagattatggggatcgcattgtcagttttttatactatagctttgagcttggcttttgggattttagctagtatttgaagatggttgattctgttgtgatgtgatgacccagagtgctttacagaaaatcaatgttcagcaatagccaatacgatgctacattacttttaaacaagtagactgaggtttagagtgcaactggtctcccagttcatagaggaagcaaatatgctctgcaaaatgtgttctttccctgggttttaggaagtgaaaggcttaacaaatggaaatgtgggacattctttttaggaagttaaaggcgtaataattgtaaatgtgggacattcttgtacattatctgctcatggtcaaatgttcgcaggtaagatttatgtgtagaatttgatagtttaatatggaactctgcaattggggagatcacgttggaggctctaagctatactcagctagcagataacttggtgcaaactgcaaataatatttattttacttagctcttcagatggcactctgttctctgttcgtactttctagacagaatcactcaataagtattgctttacattaggaatttcttgttccctaccggcttttactcttttcctttgcatgttcccatatgtggcatagactccttcattgatcttatccttttaggttggagcaagctactggtttatcttttagatttg

SEQ ID NO: 93339 - DNA, 793 bp, Eucalyptus grandis
  Intron number 1 from transcript Egrandis_v1_0.024846m (loc us Egrandis_v1_0.024846m.g) derived from phytozome v7.0 (c hr-ID scaffold_3; pos 30377064 to 30377856)
gaaaattagggctttgggctgcattcgtttcgaaggtaagtttcaatttttttcgcagttttttttcgatttttattgcgatttattggaattcatggctgccgtattgctctgttttttgtatgtgaattttttaacaatgatttttgaatttgaagattttgggctcttcatcgcacgatgaatcgattttggtttttttttttttttaaatcaaccttttggatttttttccccttccctggaggcgcattcctgttgacgatttttgcctagtttttgtgtatctgtgccttactatgtaatggtctgatgccatgttttgggtactttgattagatttctgggtctttttttttttttttttttttcagttgagggttagaaatttggttttgatatatgatgaggacgttagaaattattgattttgcgcactgattgtgactaaaaggcatctttttggatgtttgattcattaatttttctttcattaaaggaagatgggttgttgtctctggatcggtggcttttgatcgtgctttctgtatttggttcgtctgattcagatgccttaggacttgtacttaggatggtttgacaatgatattaatttttgcatatgagaaaaattttatcttgaaaagatcctgttgatttacatttgggatatcggcattacttttcaatgtttgtccttcacattctatgttgcttttatggcctatgagaatgatcatatgtttcgcttgttggctgttcaggtttccctttgtagcgcgcttcattgatc

SEQ ID NO: 93340 - DNA, 365 bp, Eucalyptus grandis
  Intron number 1 from transcript Egrandis_v1_0.021349m (loc us Egrandis_v1_0.021349m.g) derived from phytozome v7.0 (c hr-ID scaffold_3; pos 49540734 to 49541098 reverse strand)
acccgggtccgaccggtctcaattccaaaccggctattcctttttttccgtgattttctcattttcgttagagaaaatctcttgattttaaccaatttatttgctgctgcaataaacacgataaaaacgcaaaaaaaaaaggccaaaaaatgaagaaaatcaaacactgagggttgaaaaagggtttccttttcattttcctaaccgaaaaaacccgttttttcagagggaaacgcaagagaaatcatcatcaaattgggaaaaccagaactcagaaccaaagaaagggagaaaaaaaaaccagggcaagaatcgtggaagagagagagagagagggaggctcagattcgcctttgatcaggcaa

SEQ ID NO: 93341 - DNA, 517 bp, Eucalyptus grandis
  Intron number 1 from transcript Egrandis_v1_0.030344m (loc us Egrandis_v1_0.030344m.g) derived from phytozome v7.0 (c hr-ID scaffold_3; pos 4064379 to 4064895)
ctgtcgacagagtgcaaggtatggttacacttgagtcacttgagatgagcgtgtttagtgttgttgaatttgaaagagtgagaccctcttgcttgcttggtgcgaaaatggagccgattcagtggaatgctgcgaaagtttaagactttggctttggtgatctagtggtcgatggtttagtttctttgagttttggttctaaagatggaatctttcgtgcagtggagtgaatttccttctagaatgcagataggatctttctgatatctgagaagctttgaaatatcttgttttggtttctaaaagtgtggattaggattgagtaacataaagctgagaatttctcacttttctggcttgatgtatgaaacctggcatagcatgatagagaagactgatatttttgcttgattaactttcagttcgagaagtttttatccgtagcggaatatatattcaacatttaaatagtttttaaagattcctcgggttatttttgtagctcactcgagcttgg

SEQ ID NO: 93342 - DNA, 392 bp, Eucalyptus grandis
  Intron number 3 from transcript Egrandis_v1_0.050509m (loc us Egrandis_v1_0.050509m.g) derived from phytozome v7.0 (c hr-ID scaffold_3; pos 57557702 to 57558093 reverse strand)
ccaccggtgatcttgctcaggttgctctttcagatgacattttattatttagaaaatatatctgccgacgaatttttaagtgctggttctcaatcttttattactatatcttacacatcttcctgtgtctccttgttttgctgaaggaaaggtgtactttttttatttttaggaaaggtgtacttgcaagcatcaaataattagctagaactttcgagtcagaggtgatggcactgcctgctcctgttatccgtttgtggatgcaatcttctcctttttcctctcaatgagccaatccggacgccctttacttttcttctttttcttttttctttcaaaacagcgttcatcctatctctctaatgaattctaaccaagtccattcgaggaca

SEQ ID NO: 93343 - DNA, 601 bp, Eucalyptus grandis
  Intron number 1 from transcript Egrandis_v1_0.048334m (loc us Egrandis_v1_0.048334m.g) derived from phytozome v7.0 (c hr-ID scaffold_5; pos 5673110 to 5673710 reverse strand)
acgacgtcgtgctcgctttccccaacactgtagaggtatgtttggatcatctcgagtctgtttgcgagcctggataatgctgtttaaattcgagaatgcaatatctggaagatcgtggtgactatgaatttctggtgatgacattgatcacttgagaaagatcgactgggaaatagcttgaaaagaaaaagaagaagatgtttcttggagttttacagtacttccagaacagagcaacggaaatggtgtcgatttctactgaaaaaattgcatctaaggcatgaaatttctgtgagcgcgtggtgtgaattgaacaggaagaaattgacttgggaagagcataagagcgttttctatcgcgtccaaaggctgttttttgggatgtacaagcatcgattcatcgtcaaacaaagtcaaagcttatcaaaaggagatggatggtattaatgaaatcaaacggcgacgaactagttgtctgcatattctgcaaatacgtgtgtggcatctccattccaccgggatagcgtgatacttcgctgattggaaaatctgcgtttgttttgcagtttgtgatcctgtttctggcagtaatccgttgccg

SEQ ID NO: 93344 - DNA, 544 bp, Eucalyptus grandis
  Intron number 1 from transcript Egrandis_v1_0.014089m (loc us Egrandis_v1_0.014131m.g) derived from phytozome v7.0 (c hr-ID scaffold_3; pos 3187827 to 3188370 reverse strand)
ttcccccacaaaggtcaaaggcgctctccgtcgaggtaaagctaaagctctctcttttaatcagcctgctccgagggccgattgcgcagctccctccttcgtctcttcatctcttccctcgtttgcctactctccccaaatggtggggccccatcttctcctttttcacttccccttcgttctcgcttctggataagtcttctccttcttctacttcttatttcgggctaggaataaaggtagagggtcggaatttgtcgggggcgtgctgcttcttttgggcgcttcccttgggatcttcgcgcggattttcatttttttcggtctaggtttagctgtttagaggaccgatttctagcgattgtaaatttcatttttcgtttatgccccagtagccgcgccagcgttctggcgtattgcccagatttctctcggatgattatttgattgatgagcttcgcggcaagaatgatgcttaaagaaaaaggggggttttgctactcttgcagggtctaatcgccgcagtggactggcatctgctgtt

SEQ ID NO: 93345 - DNA, 773 bp, Eucalyptus grandis
  Intron number 1 from transcript Egrandis_v1_0.000818m (loc us Egrandis_v1_0.000818m.g) derived from phytozome v7.0 (c hr-ID scaffold_3; pos 5019053 to 5019825 reverse strand)
cagtctttgaggtttgaatttctttacatcaacagcctttgtagcatcgtctttgttttttctaatcattttggtttaccggctgttttcgttggtttctgattgacgacttcctccacaacctccccctttcctccctcttctttcccctgtttgctcttctaatgatgtccttattagtatactacggcaaattaattttgttatccgtagattgcagtgccgaggttttctatgcttttggtcattcctgccaaagtaattttccgaatgtattggaataaagttcctagactcgtggtactatctacaatgagcatcattttctgttataattgattacattgatttgattggaaaaggtagctatatgtatggtctttaacgtatatgcttgcgatgcttgaacatggtttcttcgaaagatttcaaggagtagattggaaggatgtcactgttctcaccattctttactgattctgttgtgatgaacctttttgttagggctggcgtcatgttgataggcactgtgtttaagttttctggtgatgatgatgtttgtatttctgcactatcgtatcacatctatatgatgaagatacttgaatatatttcattcttattttctagttatcttttatattaaaaagaaaaagggttgtctatcataatgtaggcacttttgtgccctgactatgccattttcattgcattctttatatatttttaatggcgctaacctatgaaaaaacatgaaaatttgtgcagcaaag

SEQ ID NO: 93346 - DNA, 516 bp, Eucalyptus grandis
  Intron number 2 from transcript Egrandis_v1_0.045844m (loc us Egrandis_v1_0.045844m.g) derived from phytozome v7.0 (c hr-ID scaffold_2; pos 1565478 to 1565993 reverse strand)
acaaacccataaaagctatttcgagtttcactgtgataatgacgacaaccgacacactattgctcctcttttgattgttttttttttgtaaaagtcttctcttttgattcttacgagaacaaggttacaatgtttcacatgatatataatgtttcaatgtcattgatccaagagttggcgaaattatattgcaaacgcgacctcgaccatttgattgattagaggaaacaaataatatcactagcatgtttagtttactttgatgttgattcgtttatttgttaacctatttctatatataattctcatattttgagttcttcaaattttcttgttttaaaagctgagtaggcctctcgtctaattcttttgtttagtatgtcatcttttcattgtttccgaatgatctagatattgaacatggtgctttacatagcatctcctgatagcatcttctcccatatttcatttggccacatagaaatctttaataggttcaaggacagcaaaggaaat

SEQ ID NO: 93347 - DNA, 500 bp, Eucalyptus grandis
  Intron number 1 from transcript Egrandis_v1_0.042741m (loc us Egrandis_v1_0.042741m.g) derived from phytozome v7.0 (c hr-ID scaffold_3; pos 76844957 to 76845456)
agggcatcaacaagcctcccctcaaaacaattcaggcaaacccacttttagaatatttaaattataaaccacgcattcatataataatttaagcttttagaacagttaatagtggtctcacaaaatctcgcatgatattagagctggagatctttggttcgaatcttactaggctttatttgtctccccaattaactttccacgcttagtctcatacctacatttctctttttgattttgctttagagaaaagagaatgttgcttatttattcccctgaatttgctctgttttagagaccttggacaccaaactgtcgacatcatcataagaaaagaaaaataacttggaccagcgctcctgaatgcatcaatcgcatgctgcactaatcatagaactaatttcatctgctaaactacattttctttgccaactgaccctgatttcgcctcattcttgtctctctgttcctgttttttttttcttatttgcagagtcctg

SEQ ID NO: 93348 - DNA, 672 bp, Eucalyptus grandis
  Intron number 2 from transcript Egrandis_v1_0.050881m (loc us Egrandis_v1_0.050881m.g) derived from phytozome v7.0 (c hr-ID scaffold_1; pos 22393808 to 22394479)
cttagcatcattgtttattggtaggttgtttgtaaaataaacgaagacgtgcctcgtcctacgtcaaaaagatgtgaatgtgcatgcggatgagatttggcactgaccaacaatcattattttttatttattggaagatttggatggatttttatgaaaattaacaaaagcatcccattgaaacaatgcaactgttcaagtaggagttacgcttatttttctatttattatttatttaattccgaattttattatttcttccaatgactatcttagagtccgtatctgtttagacataatttcttaatcttggaaggttgtatctgtttgaatataacttcttgttattgctataaattactaaacatgtctgttcaatcgtaatcttcttcttccatttttttttcgttttcaatacatccattattttcaattgtctcccataagaaatcttggagaaatactataattgctgttagtattttcatttgagactttttgtatcctaaaggaaatttgctggtgaccattagtaatattatggggcaaacaaaaccttaaagaaaatgatatcacgcatcaaactccaatttgatttttctatgctattcgaagatcccacttcattgttctatccaattcgaagttatatttttccaacattgttgtcaa

SEQ ID NO: 93349 - DNA, 947 bp, Eucalyptus grandis
  Intron number 2 from transcript Egrandis_v1_0.051093m (loc us Egrandis_v1_0.051093m.g) derived from phytozome v7.0 (c hr-ID scaffold_3; pos 68407181 to 68408127)
gatcaaggagaagcgtgattccctggtaatgctttaactagatgtcttggagtagcatttgctgataagttagatcagattagtcgtgctattgcaattaacatcatagctcatagctgtttaatttaaactctctatttgtttcataaaacatggatgattcaaaaaatgtttttttcctaaaaatgatcacttatatcgcttaaaataaaagattatactttctcaaaaatgttttctgtacatgtagtacgtgtgcccacaattaaatagttatgtatagaaagaaggtgaacggttatattaatagatggcttattattaaaaaaaaaataactgagggtaatataagaaatctaatattgagaagagatgaaatgagtggatgattatttaagaaattaatggtaatttagaaatctaaatgtgaagtagttgggtgattttctttaaatatctgtgttaatacataaagtaaagaggatttttatgcgactcaatcttttctcttctccagatattctcaactacttatttgatatattttgtatcaatggacaaatacatatacaagtaagagtgttttattttccccacgtttagttattagattttgattttctttcaacgacaatagcaacctttataaaaagatgttgaaatttcgaaatatcttcattttttttctcatatatgtgtatattcatacacttattttttcataatttaatccatgacctctatttctgtagagagctcgccacaattttcttgtgtttcgataaatataggaaaagccatcaattgaacttgtgtatttgttgaaatggctaactttgactcgacgatcttcatattttcaagtataggtgaaacactattcttcattcacaattttaaaactttcttgcacgtcacgacagatagctgctaccgtgatcgcagtc

SEQ ID NO: 93350 - DNA, 960 bp, Eucalyptus grandis
  Intron number 1 from transcript Egrandis_v1_0.050544m (loc us Egrandis_v1_0.050544m.g) derived from phytozome v7.0 (c hr-ID scaffold_5; pos 4003356 to 4004315)
tcattgccaagtgatgatattttcatataggtaactgttgagtggttatgcttagtgcccttagtttgggaatttttaaactttttatgaataaagttgttgtaacttcttgttaccacaaatagtattaggatgttattagttttgaatttaataaccatttctaatcatccgttgtaggcttttattattctttgtaaagttcttcaatcaatcacagaattcaacattttttgcaaatttatctttatctttcttttctgctagccgccattgcctccaatcttcatggttttaaatttattgccatttattttcctaaccaaaatcaaaatagcatccttcgcaaccatagccgattcacacattgatccatatatattcgagtttcacttcattatgatccaattcaagtgaaacgtctttttggataaattgaaaggtatttcgtcgccgattcaattcttgtgaaacaaccaccaaccaaataggcaactctaattgtaagtcagaaacaatatactttgtacactttatgattagattcagcttgctacaaagagataatcatcagtgctgcataaatgaacagatgcaaatttcctaaaagaggaccccttggtctagtttggaagaaatataaaattcattgatccctaagtaacatactttcaaacgtgatgaacaagatcatttatattataaggagaatatcttcttttagtatgaaaaaatctcacttgtgtaacattcatccaaatgtgattgtttttgtcttaaaactagtccaactagcaaggtggttatgaacacaattgtctataaatacccatcaagtggtgatcttctgcaatgcaaacagccgctccttggtcttcaactcacgaacgaaacatacagaaaaagggagatatgttggtttcagtttcggcaattccatctccttctccgaacaaagga

SEQ ID NO: 93351 - DNA, 934 bp, Eucalyptus grandis; identical to SEQ ID NO: 93075
  Intron number 2 from transcript Egrandis_v1_0.017414m (loc us Egrandis_v1_0.017263m.g) derived from phytozome v7.0 (c hr-ID scaffold_2; pos 63510583 to 63511516 reverse strand)

SEQ ID NO: 93352 - DNA, 1010 bp, Eucalyptus grandis
  Intron number 4 from transcript Egrandis_v1_0.024093m (loc us Egrandis_v1_0.024062m.g) derived from phytozome v7.0 (c hr-ID scaffold_5; pos 17599436 to 17600445 reverse strand)
agttttcacggcctcttcctcaggttcaagaatcggtatgcactactgctcatgttgatgcaccttttcttaaaccaaagcctgtgatatgttatttattttgggctgtgccttgagtatggtactttaagctatctctatgttaatatgttgtaccaaatatatcgtgttcatttgttcatatgttttgcccatgtcattcttgatgtcctaaggtgaaatctgcaaaagtagctacctcggatatttgctctttgcaatttgccaatgtgagttaccaatcactttccagaagcaggaaggcataaaaattaagacgaaacaacttgctggagctgtactttagtgtaatggaaattatattctataaattgcaagaattttatcagccaatttgtggagctaggagtcaaggcaaaggaaaaaattctgaaatccataattacttgcaggctagatgcaagctggctattccctttgacatcgatggccaactcatgataaattaggcacttttactttgtagtatcaattgctctgatattgttcttttcttttcatttttggatgcaccggttttgtattactcagctctgtttgatttgaaagacgtcccttagtgcatctgcttaaagtgcacaatatcgattgaggttacttggttggaactggattgaatgaggatttcccttgaacacttcttttgcaagcttagccattcaattgactggatactttcttaaatagtacatttcatattgtctctccattgtttgattctatgacatcctgtgctatgtgttcttgtattctgatacatctaggcagaggtatttttgttaagtatcattaatttgaacagttgttttttccaagttcagtactcagattgggatggatgttctctcaaccagcattgttgagtttggctggtctgcaatcggttgtagttgactttgcttatatttttgacagttgggaagatttcaagaagagtctccctcgtccac

SEQ ID NO: 93353 - DNA, 658 bp, Eucalyptus grandis
  Intron number 1 from transcript Egrandis_v1_0.000551m (loc us Egrandis_v1_0.000551m.g) derived from phytozome v7.0 (c hr-ID scaffold_5; pos 8631988 to 8632645 reverse strand)
agctgactagagcttgggagtgagtgtttcttcttctccttcttcttctccttcttcctgtttgaagtcttgatctgggttgcgtccgtggagactttgtccgttcttttcgagtgctgccgttgctgaagatttgcatgagaaggcgtgtttttgtgggcgggggatctggataacttcttgattttttgcttttcgtgggtgtttcttctgacaattcctttttctggtcagatagttcatttggcggtttcttgtccatgtatgtatgggtgttttcgcaacgatatgattcatttattgtcttagtttcttgattgataatcttggcaaatttctattcgcctaattatgaggaaatcaatgaagagtttcgttggcgcacttttcaagcctcattaagtatgttctggaaatgcattacttatggaatataccatttgagctttcgatgtgtctcgataatgttcttacttttttcagtaaccctagttagtgccgtcgggggcatttgttgacaagacactgtccaccgctcgtgccttcatatggcaattcaaaattcaaggcgacttgctaactgtgacatgataatagtcttgaagtatgttcctgaattgcagtctttcaggaaagaggcacaatcaggggagaattc

SEQ ID NO: 93354 - DNA, 312 bp, Eucalyptus grandis
  Intron number 3 from transcript Egrandis_v1_0.033476m (loc us Egrandis_v1_0.033476m.g) derived from phytozome v7.0 (c hr-ID scaffold_5; pos 30882366 to 30882677 reverse strand)
gaggtttgtggaactgattttccatcttttctgtcctttgccttgtctaaatggaagaaattggagtttccagaagtgtcgagtttatattaattctttttttccccattttgtttcctttttcttaaattctttgtgacttgtttgaaatttctgtattctttttattttccctatacagttatgggaagtcctactttttgagtgcagtgagattctttgatgtctttattgatatcgagatatagtatcttcaaggaaatatgatattttaactctgaggaaattatgctttctgatatgccctaggca

SEQ ID NO: 93355 - DNA, 992 bp, Eucalyptus grandis
  Intron number 2 from transcript Egrandis_v1_0.027697m (loc us Egrandis_v1_0.027697m.g) derived from phytozome v7.0 (c hr-ID scaffold_3; pos 19791916 to 19792907 reverse strand)
gttcactcccatcactgaggtgagttccgaatctctgtcggcttatcggcatgatggacttgctcggtacttttctcatcttatctcagaattggcatgaatggaaacgcctggatggtccctccctcattgcccaaaagcacatgactatatatgtttttacttgtttagctttccaaaaattattgcctgaatatagtattgttttccccccgttggattggaaatctttttggtaaattaaaaaatatggcaaacgaaaattcatagctcaatacaaaaatatgttagaacaaaacgattaaatgttggtgagttactcatatgagagtcagcatttgaatattagttggtaattttatataacaaacgtttttttgttttttttttttttgtcagaataatttgacaaaagttgcgagaagttgggaagtcactctaacgaggattggcaattttacacaagagttagtaacccaaacgattggtagcttatgtaaatgaaaattagaaagttttacaaactattaaaaaacttttagtaatttcataaaagtatgtagattacttatgtgggaaaaaaaatgtttctggtcattttttgacttaaagtttcttggcgcatattgagtaatcaatatggaaaaaaatatccatattttctggcacacaataaatttatgctgcttggaaagtcttctttccctttttttcagtaattaagcaacggcggcaagaagatcggctagctcacatgagattaggctgtttaagtgtattggtggattccagcctctttgagcgcggaatatacgcatcgttcttcaattttctgagtcgtttatcgatttgattgggatcgaaacaactggatagctccctttactcgtcaatattgagttgaattttcgcaattttcatgcaaatcattggatgatggcacgtggataccatataaatacgaatctcctttcagcttaacctctgtggtc

SEQ ID NO: 93356 - DNA, 999 bp, Eucalyptus grandis
  Intron number 2 from transcript Egrandis_v1_0.032680m (loc us Egrandis_v1_0.032680m.g) derived from phytozome v7.0 (c hr-ID scaffold_3; pos 11391213 to 11392211 reverse strand)
ctgcgatcgcgtgcgtcgccagcgccgtgcctacggtaatggatgcaattatcttgactatgattttacgcgtgaactgtggaggtcttttctgctatatggttgctaggaaaaaaaaaaaatttggggggggggggggggttgttttgattggttaattgccggttataagcactgatatgtttcttgaatgttgaatgtctggatgtttgtgtatgatgcgctcttcagttgccgattgaccaacttctttgtggaaatatatgtcagaaaagctgaagtacttctcaattttaagctcaacttgcatccaagaatgaagatttggcatgtattgacttggtgatttaggattgcttaacttgtttgtgatgtattgcataaactcgggtgaaaaggaaagtcattgtccaagttttgtagcttgtgttaacataaagttggagcaaaatggttgcgaggaacagcgggattcacttcgctatcgctattgcttattttttataatctgttgtggagcctatttatttcaaatgcctgatatattggtgcttttacaagccaagtttgaggttgttcattttgatttttgaacctgaaacttgggtttctaaagatacttactctaatcaatgatatatgcgctatcaattcaactactttgttgataggaaatttcatttggctgaattcttgtccttttattttgaagattttgtgctagcttaaactttcctttcatctctatgatgattctatttgtgccaaaaaaaaaaaaaaaactgtttttaacaataaaagcatgtgttactaacgcttatttcatccctcgagtgttgatgttccttctcaatttatgttgagaatgtgccgatggcctagaactactttaagctccttttgtgtattccttccttcagctcctgttaggcttaatcattgttactagtgttgatatatgtgcgacttacttcaaattttcagttggctgcttgccga

SEQ ID NO: 93357 - DNA, 969 bp, Eucalyptus grandis
  Intron number 3 from transcript Egrandis_v1_0.044292m (loc us Egrandis_v1_0.044292m.g) derived from phytozome v7.0 (c hr-ID scaffold_3; pos 13245468 to 13246436)
ccagaagggcttgccttacactctcgctgttaatcgtacgtggcagttcttgacattttctccttttctattggtcatggtcgttttggcttgttttataacctgaagccgaagagatggtatatttaagctgcaagaaaattatccaaaaagtcctaaacctattctacttttgtcaattcagttttaagcctttcaattttgccaattgagtcttaaatctttcaacattttgccaattgaattcattcagtcaattttgatcggaatttactgacgtggatgtcgaccatcctacatggcactgccggcattggcgtggacaaaaatttatttatttctttttttcaatttatttatttttaattctttttttctccttttttttttccttttcttcctctagtcggttgcctagtctctagcgaccgcccagaggccatgactggcgagagttagcctccccggccttgagcaaggtcaccctcgctgggatctggcaaggggcgaccttgttgtcctcgagtggggctcacccttgctagaggctagcaagggtcggcctcgcggggccctggcaaggctcgacctcgccagacttggcgagggcaagcctcgctcaaggccaatgaggtcgcccaaaaaaagagagaaagagagagaaaagaaaaagaaaaaagagagagagagagaaaagaaaaaagataaattaaatacataaaaataattttaaaattcgaaaaaaaattaaaaaattaaaaagaaattgtccacgtcagcaaattataatcaaaattgatcgaataaactcaattggcaaaaagtgaaaaaatttatgactcaattagtaaaattgaaaagtttaagactaaattcacaaaagtactcaggaatttttggataatttttccttttagttgttgacactgtcatcgctgagttgatttgtgcttaatgggttgacagagt

SEQ ID NO: 93358 - DNA, 737 bp, Eucalyptus grandis
  Intron number 1 from transcript Egrandis_v1_0.012090m (loc us Egrandis_v1_0.012090m.g) derived from phytozome v7.0 (c hr-ID scaffold_5; pos 647230 to 647966)
gagccagaaaacactaccttgttcattcttgacaagtaagattacgttaactgatcagaatgccattatctgtagcatatagctgatctctttgtacacttggttggaatattctcagttcaatcatgggaccgcatgacctccgcacctagcaacttagtataactgctggagtaatcatataattaaatatatccgctaaggcatatttgcagccttaatacccttacttgaatttgatcctgggagcaacccaggattttctggaaagcagcatggcttgcgtaattggctagagggacatgtacatggcaatatcgagttaaaacatgacctctaagtttgtaagttagcattcagctattcacttgaccgaagactttcttgactggagcatagcaaatgccaagcataactacgatccagcaaattctgagattaagaaatatcctgaaattagactagaatttgccattgcagaagaaaaggtgcatagaagaaatttattgaatgccttttgtgctaaccagtcaaatgtggctcgattcagtaaaccaattggtttcatagtatactttttactattttcaccttagaactgttgtggaaaacgcatctgtgcatgtttaatcagttaattcaggagagtaaaatcgataaatctgctttaaatattctatttttgcagcaaagctatggaagctcacattattttgttttgctggaagccagattcg

SEQ ID NO: 93359 - DNA, 500 bp, Eucalyptus grandis
  Intron number 1 from transcript Egrandis_v1_0.013240m (loc us Egrandis_v1_0.007400m.g) derived from phytozome v7.0 (c hr-ID scaffold_1; pos 31074480 to 31074979 reverse strand)
cttgttcaggtattccatgcgtctagattgatttttttttccttttgctgccttgattgattactgttgcaaatatatcttaccaatctgaacacaggctgctcttctgtagcttctgtacgaaagttaatttcatgtcgaggtcttctgataatttatgtagggccaaattgcaaattaataagatgatcttgggtaggtggctagattgttggatgcacatcaggacaaactagatgggaaactgacagaaggaacgttctgtgaatgtgaattttattcacaaaaactttgcctaaaactatatgttaatctctggtttcaagtggcaggctagaatacgaaagtaagggcaaatgctgaaggtggttcaggattcaaagaataatttcgtttttgaaaatgtgtttgccagtagtttggtagtagatctaatcaaagcttggtcgacccatattcttgcagcgtcgtcttttacactttattgggaaggccgcggt

SEQ ID NO: 93360 - DNA, 491 bp, Eucalyptus grandis
  Intron number 3 from transcript Egrandis_v1_0.042328m (loc us Egrandis_v1_0.042328m.g) derived from phytozome v7.0 (c hr-ID scaffold_5; pos 52626754 to 52627244 reverse strand)
gttttgaaccagctgcgttttttttttttgtaacgtgcgcgtacgttatagttcaaatctggaaaaaaaaaaaaaaaacatgttggaacctggaaccgaccctggaacctgtgacagggtaggtttcaggttctcagttttgacgggtaggttccaggttcctcaaatgaggaacctgtacccaagggtagattctaggttccagacggaaccgaaccggaacctggaaccgctcacccctactcacagcatatccttgaggatttgatcacttggctaatatttatggatgttctgctttccaatcaacttattcaattcttccacaaattgtttcacggaaaataggagaatattattcgactcaaagaatattattttattactagagtctaaacaagaagatcccatagggcttatataatgcttttattaaaaaaaaaacaaaacaaaaagaaaagagagggcaagaccaaatttttccaacttaa

SEQ ID NO: 93361 - DNA, 443 bp, Eucalyptus grandis
  Intron number 1 from transcript Egrandis_v1_0.003962m (loc us Egrandis_v1_0.003962m.g) derived from phytozome v7.0 (c hr-ID scaffold_3; pos 5208395 to 5208837)
ggtggctagaaaggtgagttgcttaagtcctttaatgtttgagagctgatctaaatctaaatgccaccttttcttgatctacagctcaaatccaaatgttttgctacagctgtcgctgaacagaattgtaaagtcactcccacaatgattgtggtttcagctagaaatatgcactatttttggcttggctgatggcagggacaaaacatctgttgagaacggagaaccaaatttgcatacttctattttatcataattaaactgtaaatttagcctgttgtttttcagaggacctcatgcttttgcaattaacaagcttgaaatgttatttgcctcttagcattttgattttatacacatcatctgctccccagtttctgttgcagcacatgatcttaggtgaatctctttctttgctttttaggccttcaggaaatttccag

SEQ ID NO: 93362 - DNA, 899 bp, Eucalyptus grandis
  Intron number 2 from transcript Egrandis_v1_0.003097m (loc us Egrandis_v1_0.003097m.g) derived from phytozome v7.0 (c hr-ID scaffold_5; pos 73452315 to 73453213)
atataatacagtagaaggaataattacaactcaaggttagtcaaacccgtgagtgaatgtatattcacaataacgctccattcatttcacagaaaacaactttcaagaaaatgttttttagatttttcagcgttcgagtcaaggaaaatatataagtaaaggaaaatattttccttcaatggaaaaagcattttcaaaagtcaggataatgaggaaatcattttccattctctttcattcacctagacctgttttcctctgtgcactctttttatttattttattttttatattttatttttttttaaatcaaaattttattttttaatttctttctttctttctttccttcttcctcagttgattgttggttacgacaaccgacggcaaccaaccacaggtgaggaacaagctcaccgaaggctgaggcctcgccaatctgatgaggtctaagctcatcggcctcgagcaatcttgacctcacctgtaactagtcatcggacgaacaagaaagaaaaaaaaaagaaaaagaaaaaataattaaaaatctatttttttaaataaaaataaaatattattgaaaggagcgcacatatgcaaatcaaattaaatttttcatattaaacggtgtaaaatattttctagtttattttcaggttccagccgagcactagaaaatattgtcattttcctaaaagtgacttctcgaaaaacattttctagaaaagtgatattttccgtgaaacgaatgaagcgtaaatttttattaaagaagttccattcactcatgatatctttgtaccatttcttgattatgcttgtgtaaggaaatctgatgttcactaatctttgatttctaagaagatttccgtaacttcagtaagttggaacaactcatc

SEQ ID NO: 93363 - DNA, 993 bp, Eucalyptus grandis
  Intron number 1 from transcript Egrandis_v1_0.040349m (loc us Egrandis_v1_0.040349m.g) derived from phytozome v7.0 (c hr-ID scaffold_3; pos 34411547 to 34412539)
gggggttcgaatccccatcttctcaggggagttggcatggggacgatatagtttcaggagtgggtttcaactcccacgccctgcaaggaggcagtgtaaaagtctgagagtgagagttaaagtaggattagagtaggacagataaaaaaaaaaaaatttatacttcctcctcttctttctttttttaaggccaatatggcttttttttttacaaaataaatctacaaatatttgctctttcctcaaacctatttccttttccactttcagatctgatttagttcccatttgtttcaatttaaactactggacggtttttgtttttcagatttgaaccgaagcttgaatagacccattcaagtaatgtgttttgactagtccgaacgtaaggcttcataacacagacagaacgatttggatcgggtttcaggctgggcctctccaagtttttctttcccacctacatggtgctcgagaatcaaaccgacttggtggcttcttggatagaatcctctcaaacaaattttaaaatacaagttcatttaaataaggaattacaaaaaatacaaaacaaaaaataggggtctggttcggtttcaaaccggttataggatggactagttcggtttctaattccaaagaacgtggaacagttccctggttcagttactgacttcaagttttgaattggaccagttgaaccatgctcatttctaatagactgtgtgataaatattgggaggaatcatcttgcacttcatgatcttgatcatcaccttcattaaaaacatccattgtatcctattagtatgattgaatcaattcggaaagtcatgcatatttttccctcatacgtccagcattttgtagctaactcatattactgaatcatctcgtatatgcatgtttaatttcaatcagatggtaacttcattatactctttttactaacatacagccagggagaactcacacggctaatagctcgcaaag

SEQ ID NO: 93364 - DNA, 664 bp, Eucalyptus grandis
  Intron number 1 from transcript Egrandis_v1_0.025727m (loc us Egrandis_v1_0.025727m.g) derived from phytozome v7.0 (c hr-ID scaffold_5; pos 67605423 to 67606086)
caagaagatcaagaaaattctgtgtgagatccctcgtgagtccctcgccttcacctcaattaattaatctttatacttctcttattgtgtcgatgaataacagaggtatgcatcaattcttcttccctttcctctttctccatagtacatgtgtcaattctattgtgtactgtagggatgtgcaaaacagaccgctcaaattaagaatcatccgaatcatactcaattggccagtttggttcggttaccaggagtgttggtctggttccccattctaaggggaaactagaccggattggaccgactaaatatgcattttttttatttctttaaaaaaaatagtgggtttagtttattgtttatacggaaataagagcctataattgaacaataagatatctggatggaagtataggatttttgagctcttaatccatttctggtcattgtttggataataagatatctgaatagaaacatggaaaagaaaaagaaaatagtgaccggttccactggattagatcggaaccgatcatccgtattgtatagcatctttacctgctgctatctatgatgaatagcaccgagtgtttgtaatacttggagctaataatactgtgtgaacgcagaagtaaaagatacaacctttgacgagaaacaaaac

SEQ ID NO: 93365 - DNA, 827 bp, Eucalyptus grandis
  Intron number 1 from transcript Egrandis_v1_0.050462m (loc us Egrandis_v1_0.050462m.g) derived from phytozome v7.0 (c hr-ID scaffold_4643; pos 307 to 1133)
ggcagcctcagggtcttccctgttggaaagcttctgtatgtatgcaatctccttttgttgttacttctttaatggatgattttcctctccaatttcaaatatttccatgaaaatgtgtggtttttgtgagctcggcagtaattcagcatatgcgatattcttggctactatattggaatatagactagtagtccacgttgttgctagtaatctcatcatggcaatagcagttgaaaattagactgtacaacaacggaatgaacccagataggcagtcgcaaagttagctcttttcaggtttctctttgttggtatacgtgcttgatttatatatagacttcgggcagccaataagtttacttgggttggatgaattgtttgatggaaagaagattccgcacggtagagcttacactttcatggtacagaaaatgagtgatttattagaaacaaggggacaactttgaagaccttccttggctagaattcagtaactacttattgcttagtgccatcagctgctgaatgagtggttttctccaagtttggagcactcaaagcaaaagatttgcctcaagcaagctgaaaatcagcattggtccatctaggtgcaaattcctctttactgagatttagattttaatgtcactattttggtttcaatgctgcaaaagcatctcttgactcctgtatgtagcaaatggtttggttgctaatttagtatgtgacaatctggttccgttcttcgtcctgtgcaagtgcttgtggttctgtgtaactgattactcaaatggttaaattttctgatttgcaggggtttacgtttc

SEQ ID NO: 93366 - DNA, 451 bp, Eucalyptus grandis
  Intron number 1 from transcript Egrandis_v1_0.026951m (loc us Egrandis_v1_0.026951m.g) derived from phytozome v7.0 (c hr-ID scaffold_3; pos 14616904 to 14617354 reverse strand)
gacatccaaggtctctctgccttctcaagtttacttttttgttgcgttttcctcgtttagggaccacaaatgagcacaggagaggaggaatatccaagaaccttagcgtagattcgtgttttgtcgcttaatcccttcggggcaactgaaatttcgcttttttagcgtattagaatggaacccatctcgggaaagttaattttactccagttcggtttgtatgtgggtaggattatgctagttctttttttgtttgttgggtctgggaatttgattcgtgatcagtaattgtgggtagcatttgttgagttcggctctgggatggctttgttttcccagctgagatttgttctttaggaccatttttgctctgcattgtgtttcactcgtatggttcttctttcctccttgtgcagagcaagaggagttggttcgatcattcgaaaagaat

SEQ ID NO: 93367 - DNA, 871 bp, Eucalyptus grandis
  Intron number 1 from transcript Egrandis_v1_0.046127m (loc us Egrandis_v1_0.046127m.g) derived from phytozome v7.0 (c hr-ID scaffold_1; pos 34878657 to 34879527)
actagggatcacatcaagcacttcatctttgtaagttcttctttggattttaatatgcgaagactccaccgaacaaattatttcggagattatataactgcactttggtaattaagagaagcatatatatgataatacgtttttttttttttttttttttggcttagttggttttaattggtagatgcacgtacccacaatctatgttggacctgtcattgatatatatatatatatatgtcgaagacctgtcattggtatttgatacagggaaatttctatttatgatggtcactattcattgcatgatcaatgtggagtaaattaatttcgaaatcaaatttctacagtgagaaaaatggtatttacgtaaacgattaatttcttttacaatgatcttgcatgcacataagtttttttgctatgaatttgattgaaaatatcttatataagtttgagtatgataaggggagactagaggtaagcatggttcaaagatagaatctggtatatgaggaccgaactggtgaggatctataggttcttctaagatatgcagggtaggttccaggttctaaaaaatgaggaacctgttttgacaggtaggtttcagattcttaattagagaaatttggaacttgaaatctataatctataactaagcaatttcaatttccatgcaagttccacctggaactgaaaactgaaattgcttagccctagtgtaggccctttggcaatcattagataagaatgactgcatctcgtctctctcgaaatttgaccaaatttgtatgctctcaacttacaaaaaacgaatcgattttgtctctctcctcgtactcttttttcccacctaatgaaataggaa

SEQ ID NO: 93368 - DNA, 766 bp, Eucalyptus grandis
  Intron number 1 from transcript Egrandis_v1_0.044929m (loc us Egrandis_v1_0.044929m.g) derived from phytozome v7.0 (c hr-ID scaffold_5; pos 4013408 to 4014173)
gcagcttccctctcgtgcaggtggttttgttgcgaccaagcggcaacgtgtttgaaggttgccgccgccgccgcccagtcacacgtcgccagctcctaccggtcctcccgcaggcaatggtttcttttcttttagttttgttcgtgaatatgggttggagaagagaacatcaattttgggattttaacttttaaagttttggctatttttttattcaaaattttttgggacaaaaatgcccatgtttcagttcatggaaatatcacatgctcaccggccggcaaacatttgatgggcaggcaaacttaaaatcttatttgaaattgacttggacactttagccattatttaaaataagatctactttgaactctcttttgaaaaaataatgatattcaagatccttatttgtaattttcccaaaacaatatgatcggaatttctagtaaactaaatgatcattggttaggctacttttgttttcacttcttttttctgtttttaaacacttttttttgttttttttgttcctgggaacaaaaaaggaacagaaaccgtgtttttgaaggtcttttacaagagaagaaaaaggagtttaaactatgtgattttgtcgagcaaagtagtttcaattttgctcctatttgtccaatcgtaggtggtgaaaggatatagatgttgtgaggaagttcccattcactagagataggattgtggaattgttcttctagatctcggtagtttattttgagccggagtttgccgt

SEQ ID NO: 93369 - DNA, 511 bp, Eucalyptus grandis
  Intron number 1 from transcript Egrandis_v1_0.037917m (loc us Egrandis_v1_0.037917m.g) derived from phytozome v7.0 (c hr-ID scaffold_2; pos 49508138 to 49508648 reverse strand)
acaggaaaacaagaggctgaaccccaaaaaactagcctgagatagatttactaatgcacgtcgattgtgatactaatccgccggtacaagttgtctttcttgatgattccacgtcttttttagcttttgattctgagtactcacatgcatcttggtacattttctttacaagtactagttgtcgagtatctgttgctcacttattttcgtcctctatacttcaaattccttcaatttcttggtaatgattttcgaaattgcgagtcttttcattgactaaactaatttcacgtaggttcttttcatgctcattgacatcttcatgatagaattctggagaactcatcaagcacatccgtcaactttttcttttcatgtcacaaaccttgcatatcatactttctagctgttaatagctacatctctttatcatatctgagttgattttgtttgtgcggtatcaattagatacataggagcaaccggattgggtgagtaatcttctgcggtg

SEQ ID NO: 93370 - DNA, 799 bp, Eucalyptus grandis
  Intron number 2 from transcript Egrandis_v1_0.017810m (loc us Egrandis_v1_0.017810m.g) derived from phytozome v7.0 (c hr-ID scaffold_5; pos 53805140 to 53805938)
ttcttgccatcgctgccagagactttgtccacttggtacttccatcaacctctcgtccttatttatttatttattcgtttaatagagggattaacggtgtgaaaatgtgatgattttgtccaatctaaaaggacaatcaacttctccataataattttatttttaaatattaatttattatattagacattgtccaatttaaaaggacaatcaacttctccataataattttatttttaaatattaatttattaaattagacataacttaggatttgagaaaaatatagttggcaatgtttgttgataacgcaaagctcaaggttcacaatagaacgtagtcaaagtgatatttgattaatatgaacctaacttttgtcgttattaacgtaaaattagctttaacagccaagactttggtactaggttgtcgtcttattaacttggcttttctggccaagttgggggggatccaaaagcttggcagcaaggcatcattataaagacaaaaggttttttattactttttaatttttttaaaagcatcataaggacaagaccaatcaacttaatggctttttgacaagacccatcagaatcttcttttttttccgatttcttgtttataataatttaagcttttagaaataaaaaaatagaattgcccattcaactttgatatagaagattaatagttagagacgatgagcatttagtataatgtgcacgcatagaagatgatttttgatgttgcttggattgcagtccggcggtccgtattaccaagtgaagaaagggag

SEQ ID NO: 93371 - DNA, 914 bp, Eucalyptus grandis
  Intron number 1 from transcript Egrandis_v1_0.004627m (loc us Egrandis_v1_0.004627m.g) derived from phytozome v7.0 (c hr-ID scaffold_5; pos 59816997 to 59817910 reverse strand)
tcaagggaacccctatctccaaaacggttgtcaaggtaccttttcccttcttttcattagacccacctcacatccgaacgagtgctcctgtatagaatcgtggatcattatttccataagggcgaccatgttaaatggatccaattgcataaaaaacccagagaaagaaattcttagaaacttcaagtcagaggaccaaattttgacttgatgaatggtacatgtttcaaacgattctcctattagtcacgtaacatttataatcttaaaaatcataacaatctaggccgttaaacacaatcatacctttttttttcctttcagatgcacgaattttcattgcttgaaatttaatatgacctatgaagcgcttagtaataatctgttaactttcacagctatcattccagatatagctagacattcttctctcttaagtttagtccgtacaattgttttataaactgaatcagtcgagtgaaattgagtttataaacggtccatactgaaccctcaatatgaatcggtaaagttagcttgtaaatcagtttcacctaccgatgttaatacatccagcattattctgtatttatagacaattatttttgaatttttttctatgtaatgtattattctaattagtaatggcacaattttgttggataattcttaaatcttctattctaaacaaagatcaaatgctcggttacgcttaggctcttgagataatgacctatcacttaaaaagtgtggtgaggtatcacaatctcagaaaaagcaaattaacttgacgtgtcctctcaaaattgaaagtgttgccaaatcatggaattctatttactttttcaagtttcttccaattgaaatggtgttggattgcttcttccatttggaatatattcctccagatatca

SEQ ID NO: 93372 - DNA, 450 bp, Eucalyptus grandis
  Intron number 2 from transcript Egrandis_v1_0.044885m (loc us Egrandis_v1_0.044885m.g) derived from phytozome v7.0 (c hr-ID scaffold_913; pos 8471 to 8920 reverse strand)
tggcaacaatttgagcgggactttacttgaaaaaggtaaatttctctggcttattctctactcataattccgtacgaaatcgccaccctacaacatatttcccctttgaaatggcaatacctatttacgcatgtacttgaatagatttctgcggatttttatgttttttcgttgtttgtttgcaaaaccaaacctgctatcttcaaggctaagcaaactagaggtgcttgatttgagtggtaactctttggataattctattctatccattctcgatacaattccaactctctggtatctgttcctctatggcagcaatttgagcaggacttttacatgtgaatgataaatttctccatcttattatatgctcataattcagtacaaaatggccatcattgacttgagttaacactatttgtggataaattaggtggtttcagtaatttg

SEQ ID NO: 93373 - DNA, 307 bp, Eucalyptus grandis
  Intron number 1 from transcript Egrandis_v1_0.044885m (loc us Egrandis_v1_0.044885m.g) derived from phytozome v7.0 (c hr-ID scaffold_913; pos 9010 to 9316 reverse strand)
caacaactgtttaggagggtggattgcaccagaaggtataaattcgccgctcgatcatttcctataaaagaagagatactcattatctaatgaactcaaaacttaaccatgtctaggcccttactcacttcttgcattatagatgattatgtccatgtcatcattaatccacaagtctacgacatatttccccttgaaatggcaataccagtttacacgtgtactcgaatagatttccacggattttactgcttttcaatgtttgtttgcagaaccaaatctgctatcttcaaggctgagcaaacta

SEQ ID NO: 93374 - DNA, 366 bp, Eucalyptus grandis
  Intron number 1 from transcript Egrandis_v1_0.042122m (loc us Egrandis_v1_0.042122m.g) derived from phytozome v7.0 (c hr-ID scaffold_5; pos 29697450 to 29697815 reverse strand)
aaaggtaaggtctttttctgttccattggtattcttctttttgagcgtgagattaatgtgtgatctcagcctcgatttaatcctttgatcagctgttttacttctcattcaaaacaatttatcataagaagcacatcaaaagtggtgacatattttagtattcatcactttgttgtgaaaagctgttgttaaagttatttataggcatatgctgtcaatttgctgtgtaactgttacaatgacacttgttttgcttagccttctcccttgtcccaaaaataagtttttgtgtagctgcaacatggcattatgcaatgccatctcaatattaaagttttgtttgatgaattccttactggaacaggt

SEQ ID NO: 93375 - DNA, 765 bp, Eucalyptus grandis
  Intron number 1 from transcript Egrandis_v1_0.047526m (loc us Egrandis_v1_0.047526m.g) derived from phytozome v7.0 (c hr-ID scaffold_3; pos 74122746 to 74123510 reverse strand)
gctggaatcaaaggattgaacttaaaagatcaccggtaattaacaatttctatactttcatttcttaatttagatcattgtttcttaatcatgaaaactcaaaatatagatgaaaaaatatggtcatttggtctgttttcaccctacttagtgtgccatttggtctttttttcaccctttgtcatgctagaagggtggcacgagccaaaaaaaattgcctggttcacgcgcttggctgtggatctaattttggtggccaaatcgcacgttagaaccttcgctgatttgaccatctgaaaactcttcaaaactgcaccccacatcaaattccgaatattgttatctgtaactgagatcaatcttctcagtttgggtaggattgaatttgaaatgaactgctcatctatgcttgattttaacaatcaaagcttttggtttcacatatttatacttatgcgcatgtttgtggtttctcaaactgagaccgttacattatttatatggcagccgagataaacttatagcccttgctctggaagaagttttcagtaagttgacacctatgcagagaaactagtgtgatgatttggtgggaattcacaataagatggaagccattatcaagttgttaggcctaggcacgattgatgtacgatttgtggtgactcacggtatggggtattgggaaaacaactcttgctaaggctatctttgaacatatctcttcccaattccaaagttgcagctttttagatatccgtgaaa

SEQ ID NO: 93376 - DNA, 731 bp, Eucalyptus grandis
  Intron number 2 from transcript Egrandis_v1_0.025286m (loc us Egrandis_v1_0.025286m.g) derived from phytozome v7.0 (c hr-ID scaffold_3; pos 573408 to 574138 reverse strand)
ctgcattggacagggcagtgggcatttttctcaaggtaagatagttcaaattcaatgtacttatcccacacggaatgtgtcctccttttcaatgaagttcagaaggcatggaaggtgtgcaacttcatagtggcattcctccaagttttgcgtggaacttgtatgatgatcaattacttcggttgatggttatgtcatttgcactcctgattaatgctggcttctctgaggaaaaatgtgtcccggatttatttgagcaacctctttgaacaaatgtctttctttagggcaagatttccatgtagttgtcctccaaatgaccgccttttcccaagggaatgagatactattctccaaagaaaactttttcttgtaacgttagttcaatggatgctaatggttgatagacatattgctctctatctacatcttttatcctctgtgaaatacatttttgatgatggattcccatgcagtgttgcatttggtttttaataagtgttgtagtgtgaaatttttatcaaatttgtagttataatgaagtttctgggaaatatttaatgatgttaacacccataattaacttcttccttgtctgtagtaatgcataagcatttcaatataaatccaggaaaatgttgtgttttaatttcgaaatgatttccatctgtggttttcattaggattatttactgaaatcataactttttctgatgcagtctgagaacata

SEQ ID NO: 93377 - DNA, 810 bp, Eucalyptus grandis
  Intron number 2 from transcript Egrandis_v1_0.019104m (loc us Egrandis_v1_0.019104m.g) derived from phytozome v7.0 (c hr-ID scaffold_3; pos 4248047 to 4248856)
ctccgccgccggccgccgccgctccgaagaaacaggttaggtcgaagcggccgcgtgggtcggattcgtcttttgttttcatcgtcgggttttgtcgttcacctagaaatgagaatgcattggagcgcacgaatgaagtcaatggttgctgttagcgttgctccgtctgatgaagggggcttgtccttgcttttccgatgatgggtttttggtttttctacttctcttgtcaattggcgttggtgtcgtcggtcttggccaaatgggtcttgcggacatcagatgcaaggtgtggtcttttgattggttttggctgaaagttagtgagcgagcggaagttggttttgtcgactcctcttcatctgatttagttgataaccggtcgtagactaattgatgatgaatgggttcctcatgtacttcaatgaaatcggtgttttgatgtccggaaagaaaaggaagctatagtgaaatcgggtgtcgaggtcaatttcgtgcccatttggtattgttagggagtgaaggaaaaagttgtcagagtggataagtatcaaagcatgtgaagtaatagatatttcagattgcagggtaaaatttctacatttctgtttggtggagcagtcatcacaattgtgacttttgatatgggatatcttttttcgtgcatgttatcattcaatcctaacgataatctaacggttgctactcataatccaatgcctttattgaggttttttgatgttttgtgactggcatatgtttcttatcatggtttttttggagcaggttgtgctttcttgcttaataaag

SEQ ID NO: 93378 - DNA, 270 bp, Eucalyptus grandis
  Intron number 2 from transcript Egrandis_v1_0.024786m (loc us Egrandis_v1_0.024786m.g) derived from phytozome v7.0 (c hr-ID scaffold_3; pos 57088974 to 57089243)
ccagacggaacaagcgtcgtcccagcctcttcgatgtaactcatctcgacccccctcaagctctttccaagttagaagaaaagctaaattggccacaagtcaagtccttttgatataattaatcgtgattagcgatttctcatgctcaaagtcttgcgatttccgccactaattaattattttatccgccacttttgtttattcattgttttggaatatagtaatccgcttgttggcgcactaatccatgtgttttttgccccagtgggg

SEQ ID NO: 93379 - DNA, 842 bp, Eucalyptus grandis
  Intron number 1 from transcript Egrandis_v1_0.006043m (loc us Egrandis_v1_0.006043m.g) derived from phytozome v7.0 (c hr-ID scaffold_3; pos 47606228 to 47607069 reverse strand)
tttcagaggtacattccatgacatgatgtttacctgatgtttccttgctatgttcctacctatgatttttttttttttttttgtgagcttctttattcattctttcgaggatttcgtcatggaaagagattgctgagtcaaaaggttgaaaccatgaaactgtttgtattctcgtttggcattttcaaccacttttccatgggatatctgtttgcttactgcgctttcttttcctgaaattatctgtctggatacatgatactatcacactttgcaaaactctctgaggacagttgatttgaacacatgtcatcatgattactgtttgttgtttgtattggctggttaatacaatcaaaagtttaacatttggatgctccttagaccttgcattccagtacggaacatgttgaaattgactataagccacttcccaagtagatcagttctaattaatcaagccattcatcagtctggttgtttttttaagctcctagttcctccctacaattaatcaatctgtctaccgaaatattcatttttcctttttgccctacctttattatttttaggatttacatttcataagtgttattttgcctactttatgccttctaggttttatagtccttcccagaataccacagaattcttgttttgaaactttgttttggtggcataatgccgatcatcgagggtggagtgagactttcttctgaatctgttttgagacttatttctatcatgcttctttctattttgacaagttagacgttaccgtcattgatcatgggtattctactccagtattgcaggaaaggctaatctggaaaaggctgatc

SEQ ID NO: 93380 - DNA, 874 bp, Eucalyptus grandis
  Intron number 3 from transcript Egrandis_v1_0.034058m (loc us Egrandis_v1_0.034058m.g) derived from phytozome v7.0 (c hr-ID scaffold_2; pos 52866888 to 52867761)
ctgtgactgattttccaaatgttgatatacttgtttggtttttgcattcctcttgtttaagattactcctgtcatcatgaatgtgctgccatcgatggagaggataattcaaaagtgctttgttcttttatggaccacgttgaaaccacaatggttgactgttgcaattgaaagtcggaatttattttctttcccctttcgtattgttgtgtaggcatgaatcagaaaaatccaagcttttggagacggaggaaacaataatattccctttctatgctaatttaaaacgaatggttttcatttctcagcttaatcgtccttaccatgcaggccttcgttttgtggcccaatggcttgactgacgttgaagggaaaaaaaaaaaaaaagttttccctcagggaaatgctttgacattactgcaattattgaactgagtcatataaaattctcttatcctaatggtgcagcgaaactcttagcaaccgtcatgaaaggcttaaaactgaaacttgacattacacaattaagctgccggtgcatggcagggttgtgcagatcaggatccttagttggctctgattctttcatcttcaaagataggattctagtacgaatcaaggatctcagatcctgaaaaatcgtctaactgaagcatgtgatgccaattaactttttatacataattacctgcatataaaccattaaaagaagaaatgaagatcgaagagggagttctcatttgagaggtcaaggttttaatcttagtattcgcaaatttcaacttaagcatgctctcgcatctgaagtgtcaacttcgcactgcaacattcgttgctcctcatatttggtctctgttttctttgctgcagcaat

SEQ ID NO: 93381 - DNA, 656 bp, Eucalyptus grandis
  Intron number 1 from transcript Egrandis_v1_0.046049m (loc us Egrandis_v1_0.046049m.g) derived from phytozome v7.0 (c hr-ID scaffold_3; pos 23354552 to 23355207 reverse strand)
tagcagcaatacctttgaagtcggagacattttaggtaggccgagaaatgacaatttagtataaaattgaatgacatttactacaccgaatagcgtcctatgttcaagagactcataaaatgttcggctttattgttgtagttgcaaatgacacgtcagaaggccaatcccacttgctaagaacttgaagatagaagaagcaatttccaatgctcattacaaaaaaaaagttgaatttcgaaagtttcatctcttttcaatgtcttaaataaaatacatagctttcaaaaaatagtcaatattacttatatggatattcttttgacgtttttcttttaaaatgatcttttttttgggccgtcgtactcaaactctcaacgtattgactttgtttttcctgaagtaaataataaaaaataaagcttatttgtcactataactaaatattttgcataaataatgttgtctataattgattttagtattatatctattcactctctaaaattaatagtgggataaggtcattttgtgtgagattttctttgtattttacggcataggctcttctttttgtttagttccaccgccaaaaacttgttcaatcttaatcaatagcttgttctctgatcttcatgcagtcttcaacttcaaca

SEQ ID NO: 93382 - DNA, 785 bp, Eucalyptus grandis
  Intron number 1 from transcript Egrandis_v1_0.026609m (loc us Egrandis_v1_0.024627m.g) derived from phytozome v7.0 (c hr-ID scaffold_1; pos 1099675 to 1100459 reverse strand)
ttgtccgacttcgctactaggtcgttatagtgtttggtaaatgaagaaatgattatgatgctgtctaaagatgccgcggtcagtttttcgattgcaacttaggtcgaagtctgcggtcgattctctgggaagttggctcgagcagcgcggtgcctctccgcgttcgagctcggttttgaagtcgtcggttcgagcttgattattttgtagattaagttatccaactgctggggtcttcgcttgtagcatcgacgaacttttttcatcgggagtgagacgtaataacttgtcaatgcccggggtcgttattgtgttgtgtaaatatagagtggattatgctgctgtctaaagatggacctcattcctaagagcattttttattacattaatctgtgtaaggttgtgaatttcggtgtaaattttttgatatctctagtttaaatgcaaccatgggatattaaatatttgaggaaattgatctgctgtttgaggggcgcgaatctgttgcagaatgaattcttttggctaatgttgtgttgcttgctggtgtgctgttttcttaagcagcaacgacgttcttttttgtatgcattgattgtaccctgtcttgattagttaacgttttgttctaccagaaatgggatggcagagaatgagataatcaaactggaaattgctttggtttggaaaaaaaaaaaatttctatattttgagtgacatgcttcttttgagcatttgtagtcttatgaaagtcaggtcttttcaaacttgtgcagtacacttct

SEQ ID NO: 93383 - DNA, 1015 bp, Eucalyptus grandis
  Intron number 1 from transcript Egrandis_v1_0.032928m (loc us Egrandis_v1_0.032928m.g) derived from phytozome v7.0 (c hr-ID scaffold_3; pos 67696575 to 67697589)
caatctcccagaagacgttcaaggtacgagcttctcttttttaatcacataccctgttgcagtacgattgcctgtaacgtaacagagacctccagaggaaaagaagaagaagaagaagaagaagaggaaatcgggtcttttctcttttgtctggtctttgtgctttgctctcctcctcgtcctcctttttgtcggcacatcactgtccatctgcatctttcatctgcagcttcggatgggagtttccttttccccaagtagattgtggaatttccctcctcgttgaaattcttgtccgtcccctgttttctgttttccttgcttgagcatgctctttgatttatttggaaaaatgggctggctttgaaatgctcttggtcgtcgctgggagccaatgtttgcaggttcttttggggtaatgagctttccttttgggggggcaaagtcttcgtcttttgtctttgctttttggaacctcatgcttctgcattcgccgatcgcaagcttttgaaatttgaacgtctctggatagtatgagctgggtctttcctgttcctctctcttatctttcttttcgaatcgcaagcaaagtcggccgcataatttagtgcgctttctctgttctttattttgttgaactttcttatcatcgtttttggcctctttacattcgtttgaacctggttcgtggttttccttacccattactataatgaataaataagtacataaaaaatcggtagtgctgtctctgaaaatgccttatcttttctgcatcattgactgagactcagagctccgtcctttttgagattcttgttttttacgctgctgatttttaaggcgggtatttctccgattacgataaaaaggcttcctttatatggaaaaggaatctgctttctcctcatattcttgtcatcaatagcaattaatatactcatcaactgtaataatgtactatatatactgcacaaattctctccacagaaaactaaaagtgcccgcggcggtc

SEQ ID NO: 93384 - DNA, 984 bp, Eucalyptus grandis; identical to SEQ ID NO: 92751
  Intron number 2 from transcript Egrandis_v1_0.031005m (loc us Egrandis_v1_0.031005m.g) derived from phytozome v7.0 (c hr-ID scaffold_3; pos 78469107 to 78470090)

SEQ ID NO: 93385 - DNA, 510 bp, Eucalyptus grandis
  Intron number 3 from transcript Egrandis_v1_0.041572m (loc us Egrandis_v1_0.041572m.g) derived from phytozome v7.0 (c hr-ID scaffold_3; pos 18121363 to 18121872)
agagtgaggtaattgcaaaacactgaattgcatctgtttggacaacaccagagaattcatcattttctgcttgagtattttctcattcgtgcactgtgaatgccagtaccattgctggaatactcctagtaagcagtgtatgattgttgcactaatgattttaccaaaccgctatgtttgcacacaatgtgcttgttttgtgtggaccactttgccttagttatttctggtttttggaccttgttaattgttggtataaccaagctttagctttagatttgctcatgtagaattgctgttaacatcccatggttctgtcattttgattatgttttgtattagcatcatatatattttcttaatcgcacttcgtttttgtcattctgtttcttaagatagcaattgtattgcaggggcaatttcctcaatttgtgtcatttctgccagttgtgctgcgtgttgaagttgttttcttcatttgtgcagaaagagttcttcaggccttggagt

SEQ ID NO: 93386 - DNA, 888 bp, Eucalyptus grandis
  Intron number 1 from transcript Egrandis_v1_0.004545m (loc us Egrandis_v1_0.004545m.g) derived from phytozome v7.0 (c hr-ID scaffold_5; pos 59949033 to 59949920 reverse strand)
gttgtcaaggtaccttttcacgtcttttcattagacccacctcacatccgaacgagtgcgcctgtatagaatcgtggatcattatttccataagggcgaccatgttaaatggatccatttgcataaaaaacccagagaaagaaattcttagaaacttcaagtcagaggaccaaattttgacttgatgaatgaaacatgtttcaaacgattctcctagtaatcacgtaacatttataatcttaaaaatcataacaatctaggccgttaaacacaatcatatttttttttcctttcagaagcacgaattttcattgcttgaaatttaatatgacctatgaagcgcttagtaataatctgttaattttcacagctatcattccggatatagctagacattcttctctcttaagtttaatccgtacaattgttttacaaactgaatcaatcgagtgcaattgagtttataaacatatggtccatactgagctctcaatatgaattggtaaagttagcttgtaaatcaatttcatctactgatgttaatacatccagcattattctgtatttatagacaattatttttgagttttttctatgtaatgtgttattctaattagtaatggcacaattttgttggataattcttaaatcttctattctaaacaaagatcaaatgcttggttacgcttaggctcttgagataatgacctatcacttaaaaagtgtggtgaggtatcacgatctcaggaaaagcaaattaacttgatgtgtcctctcatattgaaagtgttgccaaatcatggaattctatttactttttcaagtttcttccaattgaaatggtgtcggattgcttattccatttggaatatattcctccagatatca

SEQ ID NO: 93387 - DNA, 899 bp, Eucalyptus grandis
  Intron number 1 from transcript Egrandis_v1_0.007237m (loc us Egrandis_v1_0.007237m.g) derived from phytozome v7.0 (c hr-ID scaffold_3; pos 8325674 to 8326572)
tgagccggaccgtcgagtccctgccttactggttggtgagtccgcaggctagctttccgctcttgttcgagctatttagttgagctgtttggttttgttcaatcgataagtgtgagtggtttccttttctaaacgggtcttttgctttttaagtatctgatctttggggtttctttagatcgtgttctcatgatgtatctcgatcgagatgcttatcgcaaaatgagaagggaaagtagatagaaaaagaagttgcagaaatttatggaattaatctatttttgctgttactgttgttgttaatgtagataaacatactctcgaagtcacaagtatgcatctctgactaagttgaatatggcttaggcgaggaatttgcagtttagagaagagcctatgtgcaattgattttttatcgatatggtgagttcctgagttagtggattaagtattggattggctgtgttgatagttggatatatcatgggttatcttatatccgtgaactagtattaaagatggaaaaaggggaagggctctgaccgttattatcatatggtattagaaaagagattggtttatgtagtattcctattggaggtggacggatgctaagggctggtttacttaaaataggagtcggtcttcaatgtcactatttcctgtcgagccactaagtgttaaccgacggctgtctcgagctaagaaacccaagtaagtggcagactcaaacttaaaacttccgtacctaatgacgtcggtctgccatttgcttcttcagatgttgcttatctcacttactaagatatggatgcttaacaaagtttgaatctgtttattaatgtgcatctttcggcggtgcagttgtggcttgccctttgtattgccaccaatagcag

SEQ ID NO: 93388 - DNA, 796 bp, Eucalyptus grandis
  Intron number 1 from transcript Egrandis_v1_0.039156m (loc us Egrandis_v1_0.039156m.g) derived from phytozome v7.0 (c hr-ID scaffold_3; pos 56640492 to 56641287 reverse strand)
agcttcttaataagcctgcagtgaagagcattcaggtatcgcattgccttcaactcctcttgaataggctttctgctggtattcattcatggtttgaagaaccaatctgtgagacgctagcttttaccacccttttgataatcttttggcctgaaaaggacttcttttgttttgggagcaacaaagatctccggacccgttttcaggatttcagctattctgcattcagcttacactaatatctcgtgagtcttcgatcttccggtcatctgtggtgtctcttcatataacaatgtaatgaaactcagatccacggccgtccttgaatatttgcttttggtatgaaacccgtgtaatttagttctgaattctctctgggcctgatgagtgcaacccgggtgttttcgaggagccatttcaagaaagagtgaccacattttttgagtcttactgcagatcatgcacccatctttttgcggaaatcaaatctacagtactcatcctttggttcgagtagataagtagaggatgcagtgggaatttgagttctttcagaaaagttgttctctctctctctctctctctctctctctctctctctctctcacgcacctactcactcagacacaacagaaaagtgacgtttcagacagctatttgtttgttagctacttaatggacataattaatgaaagcttgtccacttccaaattccaacaaattcagttatagactaattccgggttctgtttgattgatagagcgtggacggagatatcatcgactgtgttgacat

SEQ ID NO: 93389 - DNA, 944 bp, Eucalyptus grandis
  Intron number 2 from transcript Egrandis_v1_0.047469m (loc us Egrandis_v1_0.047469m.g) derived from phytozome v7.0 (c hr-ID scaffold_5; pos 3249352 to 3250295)
ttgctgctgccattttgacggccggaaatataaaggtggtgctgtgactaatcattttgtcctcgttatcattgttcgtttagcattcgactgatgatataagttgtgttagcttacttcttttcttctggtattagtgcatagcgttctccttgtgagcttcatttgatcaaatgggatgcattgactcatttatctgtagacttcacatcttttttcatcttaattggtcatgactctgtgtagaagtccctgtgggtttgggtttcctctaggtcagccaaaaaaacaaaaataaataacataaaaggtctcagtcactcaatatggactatggacttgtatcccagcgcttcgatcatgaattcgcgaggaacatgaactagtttaaccttgaaatggtccttttcagggtataattgttgcatgtatgttatccaaccccacttactgggatagtacttagtagtaatcgttgttgctgcgggtggttgacagccaacaatgagtggaactcagcatgctccgaaaaggcaatggacttgcctgatattttatcactgtgaaagtgtccattcaagcaagcagcatgtttgcatattttatacttgacagagttatctggctgctgcctaacattaaaatattcactttccatttcttctacttttctaataacacttatggtagaatttgcttatttgctgaatttattgcttcacttatgatcagtttttactctgttatagtaacatactgaccaaaaaaaaaaatgttaaattcagtcacgtacaagtttgttctgttttattttgccagaactcatataattttattggataaggggaatgtgctccaaattttcgttcctttccaatggaaatgtttcttctgattggattatttttctttctagagattcttgccttcagtgtttggaagtg

SEQ ID NO: 93390 - DNA, 650 bp, Eucalyptus grandis
  Intron number 1 from transcript Egrandis_v1_0.021242m (loc us Egrandis_v1_0.021242m.g) derived from phytozome v7.0 (c hr-ID scaffold_5; pos 51372244 to 51372893)
attatctgcttgcaggtttgtaccacgagtttcaagtcgattgcaatagcaaaataaaatgttgctgttgatccataacaacaaaagacatatatttgtttttgttatgtctagtcaagtggaagccccaaattttcctttttttttaaaggatgaaaatgaaaacaaaaatatataagctgatcttttgaattttttgttgacttaagaattggaaatgtttaattgagatgacctttccaatgggtatctatcaatgcatgttacatgcgaggacttatgccagatattaagcaattcattaattttctggagttatatttaaaatggaaagtaagaacttggagggaatcttgtctaatctaatcattcatattactgaaaccaaaatgataaaacctagatttttcagttgatttgcccatttcttccattttttctccttttaaatttctttacattaaaaaatttaaaatttacatatgatgaaatagttttaaccaatttaggactttttttttcatatcataattttgaatgatgcaacttataaattagatagcagactatacttttcgatgtactactgtccttatgctttttatgcagatgtgttcgaatacttcaaggataggggaaaaggttttatt

SEQ ID NO: 93391 - DNA, 1020 bp, Eucalyptus grandis
  Intron number 1 from transcript Egrandis_v1_0.017108m (loc us Egrandis_v1_0.017108m.g) derived from phytozome v7.0 (c hr-ID scaffold_3; pos 20148400 to 20149419)
gggtcttttcttggtgcggtttctacttgatcataagcctaaatacatgtagtcttctgtctattgatgttgcaatacctgctctttttcctgcataatctctctcaaactaaaggacttattttactagtgggacagtaaaatacccgatcataggtcctccgcttgtagtcaccgccccatcgccggtggggtggcggcaatggccatggcgacccttgcccagatttgggagagggtcaccgccttctctctgtcctggcaagtgccagcaaccttgctggccatcacggccacccgaccaatgatggagcggtggccacaggtggaaggtttgcttttttgttcctttaaatttcatctttttaaatttttatagttagtgattgaagaaatagaagaaatcattttttttttttgtattgtgtcttaaataaaagaaagggttagcatcttaaataaaagaaagggttagtcactttttcagcattgaccgatagatatcaaaagggtagcgctccgttttttgatatatcttcatcgagcgtaaacgtattaaatgcaaagaaggggcattgttcatctaatagcgccaccgaaaacaccactttccgaccaacttgcatgtgttaagcatgctgtcagcattcatcgctcaagattaaccttatgaaaaccttatatttgcaatgagttggatgagaagaaactctcatgttcggttttgagcatattttatttcatgaaaattaagggcgatataatccttgtgtaagggccattccataaaattttaccgaatgtgatatcggatcggttcctttatttagagcttccatttgatttctaaatttttttgctcatactgttctcttttatattcatctttggatgaaaatgtccttgattatctggattatttagccggccgtgagtccgcaaggttgggcccttatttaaaatagaaggatcatgatagtatcttcatttgaatggggttgtatgtgcagttggtgaacc

SEQ ID NO: 93392 - DNA, 674 bp, Eucalyptus grandis
  Intron number 1 from transcript Egrandis_v1_0.026598m (loc us Egrandis_v1_0.026598m.g) derived from phytozome v7.0 (c hr-ID scaffold_3; pos 16482944 to 16483617)
tccaatttataaacaacttgggattgatctattcggtgaggttttttggctctttcagcataacagctattgctataaacagtttgatatctgtatattttgtttttatgttgctattaatgaataaaatatgtgggtttactctacttcatgtttttctttttctttaattgtgcttttcaacaattctgtctgtgtattggagttggtttttcttgtttcttatgccttttagttattactatgaaccatttcaatcaaaaccctggtttcgtttacctcctcatttatgctccctttgtgtctttagttttgtagcatgaagccttcttttcataaactgtgtttttgactgttcatatgttagctcttagatgacggcatcatttgacacataaatgattattgatctgcatgttgaagattgagtagaggctttttttctataacgagtttcgtggagctacatttatgttttttcttcttcaataaaagtttatctgcagaggttaaacagtttggctctagaatgctttagtcattgtcatagaatgaaaagtattttatttaccttgattcatctgttaaactttgatcaaatgcagaattttatgattgtaaccatctgttttttgttaggtcttggattcgtcacgtccataactttcatcttc

SEQ ID NO: 93393 - DNA, 359 bp, Eucalyptus grandis
  Intron number 2 from transcript Egrandis_v1_0.049460m (loc us Egrandis_v1_0.049460m.g) derived from phytozome v7.0 (c hr-ID scaffold_5; pos 47737913 to 47738271 reverse strand)
gcagagttagaagagttctacgattatattagcaggtttttatttccaccatcgatctctaattctaagtcatatgttgacagtcgatcacctaagtcatatattggttgacattgttggtacttttagtttggattttggagtacttgatatttgacttatcttgtcctattatgaattggaaagcttcaagtcttagtctttggtttgtctctttccttcttcattattttcaaatttgaaaatgaaaaaagaaaaagaaaaaaagaacctattggaacctagaactaaccttagaacttgtgacagggtaggttctagattattggttctgacgggtaggttccaggttccaaaaa

SEQ ID NO: 93394 - DNA, 383 bp, Eucalyptus grandis
  Intron number 1 from transcript Egrandis_v1_0.027527m (loc us Egrandis_v1_0.027527m.g) derived from phytozome v7.0 (c hr-ID scaffold_1812; pos 3789 to 4171)
gtgccccggccaccccagaagagaacagggtatgctgtctctttattcaacaacattaaccagtcaattatatctgtgctttgcttactatgctcttggagaatatgattggtaggcattgcttgaaaagctatgtcaaggctgtccattatgttccctagagatgtttcttttctctggggttcctgttcaagttacatccttcctttccttaattcacaatgcttaagaattagcctggttttcctttgagtcttttggcttaaaccagccagatttcagggttggttgtgacaaaagatgttgcctattctaaagttaatatcatcaatttctttatgcgctcaggaaaaaagttgcgattgtgggaagtggaccggctg

SEQ ID NO: 93395 - DNA, 436 bp, Eucalyptus grandis
  Intron number 4 from transcript Egrandis_v1_0.027527m (loc us Egrandis_v1_0.027527m.g) derived from phytozome v7.0 (c hr-ID scaffold_1812; pos 5199 to 5634)
ggattccttggtccagaatcggtgagtatttgaaccgttctctcatatttgtcaaatagttggagctgtgctaagaaaggatttggcatgggaaagtcaaatttgcatgtaaattagttgtttttctttccgtcgtaacagtataacttggttattcagcgtatgtgctaaagaaaatttgattggcatgtgggcctttagaggcttactattgccctaggaaaccttacataatatggaaaagtcgaactggttaaaaatgaagaatgtgaagataccttttaacccatacttaagtttatgtgcatagggctagtgccgggtggatgtaaatctgttctctttttctggacagtttattgacagcatttgtgcctgttgtttttgctggtttgccctttccagactattgcagacaagttaggtctagagagag

SEQ ID NO: 93396 - DNA, 445 bp, Eucalyptus grandis
  Intron number 1 from transcript Egrandis_v1_0.051161m (loc us Egrandis_v1_0.051161m.g) derived from phytozome v7.0 (c hr-ID scaffold_74; pos 15594 to 16038)
actgcaggtttttttttttttttttttaatttgtttctgcatttccttcatcctgttttgcaaaaatcttggaccttgtggatcattatgtatgttctttattaaacttaattctttgattgccatattggaatataaagttgaacgaacatgagtcagtggctggttctttcaggcatatctaggacttcgtttgatttaattgttacacataattcttcctgtttcacacttcttttttttcttttttaaagaaaaaaatggaattgaactgaagacttcatacttgagaaaattaatatcctgagttttttcttcttcctgtcctatgtattcatttctttgaaagcaaatgctattggtttcttgtgggcacgttgcatactataacctttgactaattattgcaggccagaagatcttcgaaggtcaattgggcaagttt

SEQ ID NO: 93397 - DNA, 466 bp, Eucalyptus grandis
  Intron number 1 from transcript Egrandis_v1_0.051746m (loc us Egrandis_v1_0.051746m.g) derived from phytozome v7.0 (c hr-ID scaffold_5; pos 55800693 to 55801158)
ccgtgttttacaaagtggaaccaagagaagtgaaagtggggagaaagagttatgggagaaatatggctaagcatgagttaaagttcgggaaggattaagagaaagtaaagagatggaagaaaactctctttgatgctggtaacttgtctgggtgggatatgaataacaggtacgcggaaaacttgaataaccaaaacttcaagctagcaaattctttgaatccaattctcagtgtgtagataatgagaaattttgtcttagataaatagtgtggttcattgcactcgaggcattattgtccttaggtgcaggctctttgtaattttcatcgcgcaaatgttggcgcaggcacgtgttatttcttttcatcttattatttgcaaaccttcttatgaaatgtcacttatgacttttagaggttgaaatgctaaaggatgtttctctttcttttgagtgctcatcagag

SEQ ID NO: 93398 - DNA, 665 bp, Eucalyptus grandis
  Intron number 3 from transcript Egrandis_v1_0.044418m (loc us Egrandis_v1_0.044418m.g) derived from phytozome v7.0 (c hr-ID scaffold_3; pos 23572741 to 23573405)
gaaggtgggtgacaatatcgcgcagctgatccttagtccgtgatgatagagattaaggcatattgtttaagttaagtagttttattttgttttatcatcttttcagggtttagtgaaatcagttatcggtgctccactttgtttttattctggttagtagatttgttttaggatttgagttctcttgtatagggatgaattctttttggtttggatggataggtatttccttggtgccttacttattatgccttttacacaacaaagaaaccagggagaaacctagccatgtaggacttcgatgtgataattggcatagattggctcaccaaacaacgagctaagataaacttctattgtaaaacaattcagtctaacccgttagtgggtgaaagttgccattttttgagagtcaaggaagaaccttgatttccttaatctcgtcgcttgaggtaacccgtttgtcatatgggggttgtcaaggttatctagtgactgacgtgaatatgacaattgaggagttgaagattgaggacatcactgtagtgcaagaatttctagacttgttttcaaaggaattgtcatgcatgtcgccagagagggagatcaagtttgtgatcgagttagcacccaggacagagccaatctctaaggctccttaccag

SEQ ID NO: 93399 - DNA, 432 bp, Eucalyptus grandis
  Intron number 2 from transcript Egrandis_v1_0.038838m (loc us Egrandis_v1_0.038838m.g) derived from phytozome v7.0 (c hr-ID scaffold_5; pos 21841514 to 21841945)
aggggtaatgcttttacttctgatttcctttttctttcctagataaatggaaaaaaaaaaattagtgtaggatgatgtgaaatgaacccacacctttttgaatgttcaacgatgcacaagaataaaccgtggttcccccttgcccaggtgggttgacttaatttttgtcggtccactccccacttagatttttgtctaccttctaatattttctggtaactttcttatcatcctcttgcttcatcacttacgtcatgcaggtacgaggaccagctccccaagtttccgccacctcggctgttggcggcggcctgccttgttcctttggatttttaggggatccctaggataaaaccccatacccagtgatttaccccgcatgggcttgggggagcagtttaaggacctactcaggtccaaccgaagaagctg

SEQ ID NO: 93400 - DNA, 1012 bp, Eucalyptus grandis
  Intron number 1 from transcript Egrandis_v1_0.022144m (loc us Egrandis_v1_0.022144m.g) derived from phytozome v7.0 (c hr-ID scaffold_5; pos 6478138 to 6479149)
ggggaaagaagaacgaagatcaagtcgccagtcaggtaaaagcctctcaagcatactatcctggacaggccagtgctcttcggctccttgatctccttttttcactcctactcttcgaacctacccgatgatcattctccaatcaatcctaaatgtgcaaaaaagattgactattcccgaagataaatttggaatctccgttgattttgtcgcctatacaaacggatctccagtttccagaagtagcgttcttcggtttaaggaaagtagcttgtgttcataacgattatcaatcagaagctttcttgcaaaactgtccttaagattggcaatttaatcatcactttctatatttcaaatcctagacagattactagttgcgttgttcaaaatagtgtcgcttgcatctgaatgtttatgtgggcgttgatcttcggattctgatgttgtttcactgtagtggactctgtaaatatttcaaggttttgaatatctccacgtatgagatttgccgatatccatatggtcaatatccatgatgttgttgagatgctatccaaagatatttgaacaacaacagaagggttctgaaaaatgtcaagatattctcttctcttcatggtctctatattcaaagagcagttgattgaatctgaaacaacttctcttcatgagtagttcctgtaaaaagatactgttatgcacgtatcagattcaagacgaaccaaagaagattttatcaatttcaaaattttattaataggttttctcaatagtaattgttaatcgtatagcatgatggtctctactcgtgtgaataataattgtaggaatatcaaatgatgcttcaaattcttattcattattgattacatatggccaagttgtttaaacgctagtctgtcacaccacatctgatcgtctgagttcagtagtcataaaagattgatatttactcgaaatctaactgggttttgctttcctcaaacttttgcagaagttggtggtgaaa

SEQ ID NO: 93401 - DNA, 834 bp, Eucalyptus grandis
  Intron number 1 from transcript Egrandis_v1_0.030377m (loc us Egrandis_v1_0.030377m.g) derived from phytozome v7.0 (c hr-ID scaffold_2060; pos 258 to 1091)
aaagtgaaattcaacaagtgagtttagctgtgctaggaaattccgtacggataattctttggggaaccatggctctttgtataagtatgacatgaatcaaatgctcgtgagactgcatcatttttgagtaaatggacatggtgcagtttctagaaagtatcctctaggaaaatgagacaaagctgatttcctgctaccttgtgatgactcaacccacaaaaagaagtttatacttttcctttcgaaatactggcaatttggcattaaaatttttgctgaaaatgaaggttgcttctaccgatcatgcttattggtctatgttccgagggagtcgctaaagaagcaactttttactctcatcacggattctatttttcttctcttcttattacctgggacttgggagaggtactgggtttgattgattaccattttgatggctccatccctttgagaattatacagtaaatactcagagggattacagtagaatgtcttgaatgcttttctggacctgtggtcctcccaattgtattttgttaagtttttttttttttttgcctgtggggtgtgtcaagggttgtgatagaaacaagagattatcaataaccgtggtttcctgcattcgtaaacttttcagagaagttgcttaagggttgtttggagtctgaagtccatcagctgaattttgcatctatatataattggagcgaagtgcattgtaattttagagccttctttgaatgcagggaactcttctttctttgttaatattacttcctttatctgaaaattgcagatttgatttttcaaattcgtacatttggtttgaat

SEQ ID NO: 93402 - DNA, 1022 bp, Eucalyptus grandis
  Intron number 1 from transcript Egrandis_v1_0.025129m (loc us Egrandis_v1_0.025129m.g) derived from phytozome v7.0 (c hr-ID scaffold_5; pos 13653647 to 13654668)
gggttgttgaagctttttgcttggtctgcttgctggtgggtggtgaggcgggatggggttgtttcgcttcggctccattgtgggtcggttcggtgttctgttgggtgaagtgggtctgcatggtcgcgggtggatgtgatgagcgtgagcctgtttcttgctgggcctttcggtgtgttttgagggtttttcagctgcttcagcactgcttggtgctgatacgggggtttaaatggtgtgccgtgctgcaatcttctggcttttgtgggcatttcagtggctgatgattgtttagctcctggtcttgtttgtgggttttactagatttgggttttgggttgaagtgcagctttgcatatgacttttttttttttttttgggttgaatttagattttgtgaggcttgcgaactttgtcggtgttgcttctccctgagtagagaggctactgtcatccccagtgaagtattccaagttcctgtttttgtgaactggaaaatgtgctgcgtaagattgggttttttcctctctagattatagttttcttttggtcctcatgatgtcatatgttctgccggtagaaaaaattcatttgatctctgctacgcattccaaattgcatgttattgttgaataattttgtagcaggaattggtacgtttgcaaatatattagtcgtttgagttaaatgtcttttaacttataaatgtggaagtgacttggaccgtgatgatcttctaataaatggttggcatttatttaactacgatgcaaaatttcgactaaaagtcctctcttcttttgcttgatttgtcagtatagtcttgaaattgagttatcttgctcttttactatgatgtgcaaaagttacctttgcatcacatgtcattctgttggtactcagatgcaaggcaatgggcactatgattgattttattgaatagtttcctaacaaataaattgctttggaccttgctttaattcttgaattattcacactgttctgctttgctgatgccagga

SEQ ID NO: 93403 - DNA, 864 bp, Eucalyptus grandis
  Intron number 1 from transcript Egrandis_v1_0.017552m (loc us Egrandis_v1_0.017503m.g) derived from phytozome v7.0 (c hr-ID scaffold_3; pos 3727691 to 3728554)
ccaactggatcggcggcggtccggtccggtccgggggacatgaaaaggcaatgcatcttttgttgaataaaaggaggattgcaacttgaaatatttgcttattattgaaattcattgaaatgcaaattgcttttatattatcaacgctactcccaatcacatgatactcttgtagacagttccttagcaattatgagacattgttagttggagatttaattgaataaaagacaaatgaaaaagttacgttattttaatattttttttatcttaattgtcataatatttatataaatggctagtgagcttttttttttttgattttttgattgaggctagtgaattgagttaatatattcactatactttttacggcttatttatttattctgtgatttgacaaatcaagtgaacgcatgacgttatgacttatgagaataacatgaaatcgatttttattattcctcaatatcttccaaatattattttcgatttttcaagacacgtgtaaaagaacttgtcacattttttttcaagacacgtgtaaaagaacttgtcacatttttcttgttgttgttttcctttgcacaatggaaacctttccttttaattatatcaaatgtgtagtttttttttttcaaaaatgtgcagttggcaaagttagaaaagttttttttttaattttttttatgtttttgtattttgggaaaataaagctcgtgggttcttggagttggcccaaaaccaaagagggccgccgaagcacgttaaaccagagattccagaaacgtcgcgaggatacagctccgagccattgctcctgaagcaggcaacaaccgatcaacctcgtctcaaactgcaatc

SEQ ID NO: 93404 - DNA, 813 bp, Eucalyptus grandis
  Intron number 1 from transcript Egrandis_v1_0.037676m (loc us Egrandis_v1_0.037676m.g) derived from phytozome v7.0 (c hr-ID scaffold_3; pos 79794628 to 79795440 reverse strand)
ctaccaggtttctatctctgtaatctgtttcgtgcttgttcagaatagttttgtctttatggttatgtttatctcagttacgaagaagcttgcaagtgggaattgggtgatgttaacgatggattatagtacactccgactgattcaaccttaaagatgttgaaaaattaagtgggtgttgcttccttttgtgttgcatcaactattagtgggttgctttgatattgtaactttgccatggattcttcatggtcttcaggtaaatctcactgtcgattcaatgccattcagtaagttacatttcttatacctaaattgcatctccaaaatttttcttttacgtaagttgttaactggtagaaaactgccctaactgctgaagaactgtaatgcagttgaagaatcgaccacaactagatttcccctttctgatgttaatttgttcttttgattaatgattagtaattttcagcttaattgtttttctctgttatattggttttccactagtgtggggtgagtggatcagttacatatatggatcactcgattcaccaatgataaaattaatagggctactactaggtgttgattcatatgtttctgagacaatgttgagataaataaatttgtgctgatttttaactacgtataagagatttcaactgatcagagtttctaaattctcaggctattgtcatggaatgtctgttggatatcttgacaaagtacgcaaagtcgctaaacagttctttgcactaccaaatgaagagaaacgaaaatgctcatgagcgtcaaaccaggttgaaggat

SEQ ID NO: 93405 - DNA, 416 bp, Eucalyptus grandis
  Intron number 1 from transcript Egrandis_v1_0.044224m (loc us Egrandis_v1_0.044224m.g) derived from phytozome v7.0 (c hr-ID scaffold_3; pos 9412939 to 9413354 reverse strand)
atcctgcggtaagggaaacaatcaatgtgccttttctgccttttattgaccaggtgcattaataatttgcatgagctttttaactgtcacaggacaatgtcctggccacaccatatgcctccaccccacttaaaaggaggggaaaaaccccaaaacagagaagaggactgtaatcaggcttttcctccatacaactgaattttgattttgttttgggtttttgttgggggagaggggaaggtggggggggtgtgtttggggttttgtgttgggggttgataaaaatcacaattcaggctgtttggcatcccgaaacagaagttcttaatacgtctaatgtttcttatttatgtcattaatctgattgtcatgagactctagggaaataaaagaagtactaaatttacaattgaaga

SEQ ID NO: 93406 - DNA, 1011 bp, Eucalyptus grandis
  Intron number 1 from transcript Egrandis_v1_0.052355m (loc us Egrandis_v1_0.052355m.g) derived from phytozome v7.0 (c hr-ID scaffold_513; pos 1120 to 2130)
actcatctaaatctctttggttcatcctttttggggttctattcctagtgatatctcttgcctctccaagttggtgtcgcttgatctctctaacaattattttttcagtagacactcgttggaaaattcaattttcacaatgcttgttcaaaatctaacaacattgagaaagcttgttcttgatgaagtagacatgtccatggtttcaccaaagtcttttgcgaatttttcttcttctttgacatatctaagcgtcggttcttgttccttagggggggatatttccagatgccgtttttcgattactgagcctcaccactctctatttattttacaatcataacctgtctggtattcttcccaaatccaattggactagtcctcttgagtctttgtctctatggagtacgagtttttcaagagaaattcccgattcaattggtaacatgaagaattaactgttttagatcttgagaattgcaaattcactggacacatcccctcgtcaatgtggaatctcaaccaactccaagttttgtggattgacgggaatagcttttgtggggttgtagagtttgagttgtttacaaagcttcaaaatctccaaatgctttttgtttctcaagaactagtctaatctacgatacactcgagtatacattcctgaagcttgaaatgttggggtttcattcttgcaacttgaccaagcttccctatttcttgaattcattgaaaagattaacatacttagacctctcttcaaataggattggtggggagatcccgatgtggttttggggaataagccatgatgcattggaaacattagttctttccaataaccttttggagtgaggtatataactattgaatgatttcaccagtgatatcccctccttgatttgccagtttagctcactacaaaatttagaattgtctaataataatttctctagaaatatgccattatgtttagattgcaaggaccattaccgcgctccctagtcaaat

SEQ ID NO: 93407 - DNA, 523 bp, Eucalyptus grandis
  Intron number 1 from transcript Egrandis_v1_0.024332m (loc us Egrandis_v1_0.024332m.g) derived from phytozome v7.0 (c hr-ID scaffold_3; pos 70072917 to 70073439)
ttgtgatctgggcaattctttctccagagtacaaggtatgaagttcgccgatctcgctctatcttttgctgctattttctctcacagcaatctttctggggttccatgaaatccctcaagggtcgagacatggaggtcatctttggcttcactcaagtttctgccgccgcacagtgaaaatgaagcagaacgctttactttcacctgtattctgcattagcacccaaactatatgacttttctcatctgctactgcataacgaggaaagaatgcagcatttcttagccctaaatggttgtggaggttagagatatctaagggatcttctgcatctgttaggacggtgccggtatctctcgaattgtgcatttccctgattgtgcattgatcgttataattattttgagtgcctgtcactacctcatatactcttcattataaaacatgcagaaatcacacaatttttctcttttgcacattcttttatctctgtgtttgaattgatctagtggctttgcagag

SEQ ID NO: 93408 - DNA, 979 bp, Eucalyptus grandis
  Intron number 1 from transcript Egrandis_v1_0.052919m (loc us Egrandis_v1_0.052919m.g) derived from phytozome v7.0 (c hr-ID scaffold_3; pos 10338260 to 10339238 reverse strand)
cttatcagctacgtcgatagcctccccacggggtaaccacgtttccttcttctttccatctctgcccatcatttggttttagcggcagagcagacgatttacttcacgagcgacagcaaaattttcccgggtcttgttgttcaacgaacattaaatttcaaaaaaataatcgtgcatgtcacaaattatgattaaactttttgaaattcctatattaccttgtgcccataaattttgaatgagctagtaagctagttttggtgagtttcggtcgaatctttgcttctaaacgtttttattaaatgtgactgttttgtagaacgtcccatgtagtgtgttcttcgtttgacttgttgggatgtgattgactgaaggtgtttgatcgacaaagaggttatatgtaagtggtggagagaccttactttcgtgatcatttagacagaagtccgaaagggacgaacctgaattacggttcgctgtctctttattctctggttccatttgaatttgcggtggtgatggagccgaaagcatagacaagaattgccgtattcagtcaatatgattatctttcttttggttcacatgattctcagtccttacatgtgatgagaagattagttgtcaaggcagttttgtgcatttgtcgactgaaacccagtttgtgcttgattctgagaagagacgggacgttctgggctgtctagcctcattttggtttactgaggataatcgatgaaagaagttataatctgcttcaagtgtttgatgcttcccctgcaaaattatgtaaaacatttatggtattggaaacagcattcagggtcgggggccatattgtatattttggaataaaggttgggtcttcaagtgcaatcgccaagaacctagagacagtccatactatttagcttgctgttttttctttttttttttcccatgatgatgaatccaacaccaatcctcgtctttctaaggg

SEQ ID NO: 93409 - DNA, 437 bp, Eucalyptus grandis
  Intron number 1 from transcript Egrandis_v1_0.040426m (loc us Egrandis_v1_0.040426m.g) derived from phytozome v7.0 (c hr-ID scaffold_3; pos 75564566 to 75565002 reverse strand)
gggaacttgtgtcttcaggtgcaagctgatttatttaattttgagtccggatattcgttataaattctatcaatagattgtgttattgtttatggttgcttgatgctcataaaattcttagttcaaagaaacacggtcatcttataagctttaatggaatttttgctagacagacttttttttcgttctttttgtaataggacttacactgggcttaaccccatatggcgatccagcaatacaatcgaaccataaaagaattttcttgagaagcatttgctggttgtttgctcattagtctagtctctcagctattgtgagagatcgttggaattgcaagcatgtcttatgaaagatcttttttagtgcttgaagaagtaaaactgattagcttttgctccttccatcaccactgacgtgcttaggtactttcgttc

SEQ ID NO: 93410 - DNA, 321 bp, Eucalyptus grandis
  Intron number 1 from transcript Egrandis_v1_0.055278m (loc us Egrandis_v1_0.055278m.g) derived from phytozome v7.0 (c hr-ID scaffold_5; pos 52937759 to 52938079 reverse strand)
ctgctgcttctctgaagaggcggaggactactccggtgagattctttgactttgcgtcttgattctgtactgactcttgtgtttcttttttcttataattcctttggccgggaaatttgcattatcaatggttacagcatatcagtgttagattaaattagcaagcagcatatgcagagtatggatacatttcgatttccaactttgaatatttcttttctaactacagtggacgtagtagacattttacgctggatgtgataaactcaatttattcacttgacaggaattgcccgtttcgtccttgacaccaagctctga

SEQ ID NO: 93411 - DNA, 981 bp, Eucalyptus grandis
  Intron number 1 from transcript Egrandis_v1_0.048547m (loc us Egrandis_v1_0.048547m.g) derived from phytozome v7.0 (c hr-ID scaffold_5; pos 38123049 to 38124029 reverse strand)
aggtttgataatctaacttcatttctagaataattatgcatgtgcaaagagatgatgtctatatcacactcttccgttgtaatatacattgatgtagaatggatgcacagtttctagttcctgcttctttataatacttacgccacaatataggagtttcaaagaacttgagaatgaaaaaactgcatatatatgtacatataagggtgggacattattagtggaatcttgttagtatatatttatgcttgtgcgcatcaccattatagttacttcttatctacgaatctctttgcttgatgacttagatgtcttgaaaatcaattgtgggatttctcctgggtttagcggatatttaatttattgtctagtatccttcttcctatgggaggtattttgcatgtccctcccctgaattccaactcagaagtaaacattgagtgataatgtggtggctatcaaaagaataatgagaaaaaagataagtgagaatttgatcagtatggatagtggttcgatattattctccactatgaggatacttctgttacgaggatacttcattttgacatcaatatgaactaggacagggaatgataagttgccaatctatttgcatatgacagatgaaatcctggaaaatagtggactgtaatattcatctataatggggatatattccttttccattagctaattcaatgaagttcactcagttttgttgacctaaaaagaaaaaaagaatcttttgggctcatgcctctgctggttccaatctctctgtctctcatgcatttgctaaaccagttatgggctgaaaaactactgagaatgtaccaaaaatgagctaagaagcaaggttattgagggaggattgtcgagaagtgtcgggcaacgaatggtggaatcacttctgcaacggttgaattttaatttgattatgcatatggttgtcttcaaggggagaggggtgttcatcga

SEQ ID NO: 93412 - DNA, 474 bp, Eucalyptus grandis
  Intron number 3 from transcript Egrandis_v1_0.003318m (loc us Egrandis_v1_0.003318m.g) derived from phytozome v7.0 (c hr-ID scaffold_1; pos 15193126 to 15193599 reverse strand)
aagtagctgcccagatcgcccgtaagctccgaccccttttctcctttggtttgaagtttgacctccggaaacaacagtccttttgttttgcatctgtcataaacttggagtgcaacttgcacatcttgatgacaagtcgcgtaacccttgatgaccgcaatgctcatagctccatcccatgcccctgttttagcgcaaaactccaaataataaacaaaagagcaatatgtccccacacatcttccaaactttgagaaagactatcgcactagacgatgcgatgacgcgtatgtcacgtgtatcaataataaatccaaacttaacccatcacatcactaaataaatcaactctaatcgttcagatttcgtttttctgctaaggaagcgcttgtttttattaatctttaatgattattgttggttttccaacctttggcagggcacccaagagtggtgtcggtttttctaaaccag

SEQ ID NO: 93413 - DNA, 896 bp, Eucalyptus grandis
  Intron number 1 from transcript Egrandis_v1_0.032185m (loc us Egrandis_v1_0.032185m.g) derived from phytozome v7.0 (c hr-ID scaffold_3; pos 3756538 to 3757433 reverse strand)
agcactcggaaatcgagatcttcttggctcgtctggtaattcatgcattgctcgtgtcgtctctttgacttctcctgcccctcctcgtcgcgagctcgccttaacggtgccgttttggaattgagtttcttgtctgttgaattgccatggcattgatcgtcgcaaaactggctggtttgtcttcttcgtttcggtgttatgctttcttttttcgtgagtgtcgtgcccgatcaagtatgcttgtttgatcctgggatcaaggtatcacctttccggttggttttcaccaatggccaagattcaaggactacctttttctcctgtcgtttttagagcagcgtcttttcgttcccctttgtttaagcgagaatgcctgccgatcacgctatcaaaattggttttttatggctcgacttcaaccggacttcaatttccattgctgggtaaagaaaattaatggtgttttgtttaattctggttccatccgtttctcatggttgaggaatttctctggttctgatgtgagatgatgttgaattgttgggtcgtatggtcggtgtctgtgcttatgatggtgtccaatgagcgaatgtcatagcaccaatccacagattatcgtgtctcatgactagacatattcttcttagttgttgatctaatgcttcctgctcgcgaggccagttagatcagtctgctttagagttatgatggacttctttgtttctcatgaacctgtattcatcaacatttcttgtttaactgctactgcgattaacttggggtttttttttttgcgggggggaagggatgggtgggtgggtgggggaagtcgtactgattatgataatggcacttactcttgcttgaattttctgttcaaatacttaggggtcatc

SEQ ID NO: 93414 - DNA, 547 bp, Eucalyptus grandis
  Intron number 1 from transcript Egrandis_v1_0.047041m (loc us Egrandis_v1_0.047041m.g) derived from phytozome v7.0 (c hr-ID scaffold_17; pos 463117 to 463663 reverse strand)
gtgtactttggttgcaacgcccaagacttcagtgggtggcctgacgagtcatactaccacaatataaggggaaataaagagggaggaacgtacattttgatagaatgtacgttcctcctccctctctcccttaaaacgctccaaaaagaaagaatagtaagcaaaatgcgacacccatcttcccttcaaggcgaattggcgtcatcggatcgaacatggccaaattctcttcctcatatcggcaacggtgcttaatctatggctaacaaggtacgttcgattctgtgatgtgccttaggatcggtgatacatgtgtttttcccgggcttgtcttccgcacaagtttaggggtttgatttagtgttgaatctggtttttgggaatcagaaattcccttcaggctctttcaagaggattgcgactctggtgcttgtgttattctatctttccgacaaggtcgccgaatctgatccggacacgacagtggtgtactttggttgcaacgcccaagacttcagtgggtggcctgacgagtcatactaccaca

SEQ ID NO: 93415 - DNA, 710 bp, Eucalyptus grandis
  Intron number 1 from transcript Egrandis_v1_0.003823m (loc us Egrandis_v1_0.003823m.g) derived from phytozome v7.0 (c hr-ID scaffold_1; pos 2474349 to 2475058)
gacgagcgtcggcgtgcttgtgagcaggtcgaccatgagccgactcgagctcgagccatggcaaacgcaagaggaaagaaaaaagaagtggagagagaagagagagagagagtcaagggcagaaacggaggggaggggagagagacggagcgctaacggaaagggtgggggcagaaatttgtcaaaacaagactctgataatagttctaataatgctaactttaaatgataagagaattgccatataaagtgattgaagcaataaccctttttattaataaaaaggaacggattcttccccaaaatcaagtgcgaaattgatcgaatgctatttattctaacaagttgttatgaattaggaaaataatagacaatatcatcgaggcttttctatggaagcgttggaatcccattcgtcaggctccatgagacttgcaaaatttgaattaaaagaagtggagattttagtatcgatcaaatcaaaagtcgcttaaaggaaaaatgaaataagagaaaatcaggaatggctactttactttacttgatccaagccgagccaagtcgaccgtaggaaattcgtaatgtaaaatgattataatgagttcaaaaaagaccagttttactgggtgggccccccctcaccgttattctctacgccagccttacagcctacaggcaggcagacagagaaaggctctctcgatccatca

SEQ ID NO: 93416 - DNA, 712 bp, Eucalyptus grandis
  Intron number 1 from transcript Egrandis_v1_0.037922m (loc us Egrandis_v1_0.037922m.g) derived from phytozome v7.0 (c hr-ID scaffold_5; pos 43847277 to 43847988 reverse strand)
cggtaagagagtaacaaaatcatattatattattgtccaacggcacgttattttctggtattgtgatttttttctttttatttcaaagcaagcgaaacaatataatcctccgaggtccttaagccaatattttcttgtcttgtggttttgtttgcgtacaattttttcatatgaaccaatgaatattctctgtagccctcgaaaacaatcaacagatgttctacctaagctcaataaaacatttttaacaataatgatgtgtaatatattatatatggtggataagagacaatggttttttttcactacatcaacacatttctctctgggtggctcgggactgtgggattcaatggatctattggtagaaaaattataccatttcataatcggtttaattcagaccacataattggatccataaaactaaatcatgttccaattcaaaataggtcatctaaaatagttcgaaccacatagttgcatgctgccaattgaattacattattgcggcactaaccacgagtcacatgtgagaaatatttcggcataactttaatcctagtgactccgaatcatacactatcaagctaactccggtgtttattccatctgcatacatacactagccataaccaccgttgcgcttctcattttaattcttgaataggatcttgctgggcattcgcagcaactgcagcccgtggaatcg

SEQ ID NO: 93417 - DNA, 608 bp, Eucalyptus grandis
  Intron number 1 from transcript Egrandis_v1_0.051436m (loc us Egrandis_v1_0.051436m.g) derived from phytozome v7.0 (c hr-ID scaffold_5; pos 5677961 to 5678568 reverse strand)
acgtcgttgcgcttgcattcccaaacaccatcgaggtatgtatgtctcgcgtgagttttttgtccttgtggtgatgtgaatttcaaatgcgaaaaattccctgatgatgatgtttggattcgcggtaacaatgaatttctaatgatgagattgataacttgtgaaagatcgactgggaaatagcttgaaaaaagagaaaaaaactagatgtttcttggagtttacagtactgcaagaacagagcaacggaaacggtgtcgatttctataaaaaaagattgcatctgaggcgtgaaatttctgcgagcgcgtggtgtgatttgaacggcaacaaattgaactgggaagagcatgaagagcggttttccgtcgtgtccaaaggttgttttttgggatgtaaaagcatcgattcatcgtaaaacaaagtcgaagcttatcaaaaggagacggatggttttaaagaaatcaaacgttgacaagcttgtgatcggtatctgcatattctgcaaatacatgtgcggtatctccattccgccgggactggtgtgatgctttgctgatcggaaataggtgtttgttttgcagtttgtgatcctgtttctggcggta

SEQ ID NO: 93418 - DNA, 914 bp, Eucalyptus grandis
  Intron number 1 from transcript Egrandis_v1_0.004606m (loc us Egrandis_v1_0.004606m.g) derived from phytozome v7.0 (c hr-ID scaffold_3; pos 77825616 to 77826529)
ggtgtcgttgatactcggattccgcgctcgaggtaatggtctgatgttccttccatccgtcgtttctgggtagttaatgcgctcgaatttgaggttggtcatgtctttggcattgtgggtttggcccggggcatcgtaatctttttcgcaagctgctcttgtttccatggatcggacctaatgcgttccgttgttttttacccgtgggttggcaatggtactgccttgtttcttgtcagttgatatgaattttagggatgagagctgtattgattggcagttcacttccttggggctattcggatgtttacagagtggaaacatacccacacatggattttgaaaatttggctctagctgcttccattagattctcttcttaggatttgcagactcaggtggaagtggaaagagaagtagtatagtaaggatcaaatgcagtcaattgagggctcttttatgaaatttacccacttatgctgatggaatgtcctgttacagaagtttatgaaagtctgggacaatttaaaggtgcttttgaaatattgggcatgaaagcatgaaactagagaaaggtctctcggttgtctagtatgagtcatatggaggatgttctactgaagttgcaaatggactttgaatgtaaataagatgcacacccttgattgtgcgactcttgttgcttttgcaagttggtcttttagtttttatttctctttgtcaactcgccgcattagtgccgacagaggcgatatgctttcttagctacagatgaactttccttatctttttgtagtaaaacatcacatttgtgagtaatgtctttttttaaaattcttttagccaaggttctgacggtaaattgatgtctttactttaatatgtgcagggtcattcttttgctgaagcagggg

SEQ ID NO: 93419 - DNA, 981 bp, Eucalyptus grandis
  Intron number 1 from transcript Egrandis_v1_0.025897m (loc us Egrandis_v1_0.025897m.g) derived from phytozome v7.0 (c hr-ID scaffold_5; pos 17039648 to 17040628)
gggctcaaggtgggtctttctcttcttcttctttttttattcatttcgctttacattttggaagctggttgtgtgatttcgcccggtttttgggtttttgtagttgtgtgaaagtttgctgatttgtatacgtgcattcgctatttttcgttgggaggattaatttgaaccaagagggattgtttacgggcaaatgggatggtacgggggaattacgaggtgtgacctttggagtgtgtttagtttttgttgaggttgtgttgcggagttgattttttagatgaagttcttgaatcccaatggtctactctagtttaggtggagtaatggaagtgctatgtccgcggaaatcatttttggtgtaggataatcctggtcattctttcatctccaaaagggtgtcactgctgtgtatattgattcaaattttgcattttcaacagatagcaataactgtgatgctacgtttatctgtttaactgaatatgcggatgtttgctactttaagttgtgggaaagactgggtgtggtgatggtctgtttcatttgatattttgtagttttagtgtgtaatccgttgatagagaggtttctgttttagttactcaacttagtaaaccacagatggatttcatgatctgaaacttttgctcttggattggtttggttagttcactgtatgcaaacatacaatcacaagtctcgaattccttttgggttggcagaaggctggttccttttggtttagtatgtgaatgaggaagttgtttgtgtggagtatcattggattttatgttttggctcaagtttgttggtgcagtttttgatctctgcaatgcatatacttgcagtctgcttgagctgtgcaggattttttactgaagcttctcgaaaattccaacaaaagtatatttctatttgattttgtcagctgctgcttttggatttaagaactcaaacaacatgaatgggcaggtgcaa

SEQ ID NO: 93420 - DNA, 416 bp, Eucalyptus grandis
  Intron number 2 from transcript Egrandis_v1_0.049039m (loc us Egrandis_v1_0.049039m.g) derived from phytozome v7.0 (c hr-ID scaffold_3; pos 48064223 to 48064638)
ctggaacgtatcgcagaacaagaagggacggcaaggttcgcgaactgaatagatgtatatcgatgatgagatctaaaaattgtgtttttggtgatatatcaatagctgatgatgggttcttctcttttgccatctgggtatctgcatatgttggtgatttgcgtgggatcttgctcaatcacttcagtgtatcttggtaagtgccttacttgattgatcccccactaatgtttgattcccattgaagatgacgttttatcagttagtccttaattattaattttttaattattcttgcttatctcttcttaacattctccttcattacttttggctctctgatgaaaaccattcattctaacttctctcgtgttttcttaggcgcttacgacgacgaagaagcagccgcgcacgct

SEQ ID NO: 93421 - DNA, 620 bp, Eucalyptus grandis
  Intron number 1 from transcript Egrandis_v1_0.025592m (loc us Egrandis_v1_0.025592m.g) derived from phytozome v7.0 (c hr-ID scaffold_5; pos 67881973 to 67882592 reverse strand)
gaagttgaaggcccaacatatcagcattatattttgtctgcaagagatggaacaactgaagaagttacgtggcgttgtaaataagttggttaggaggatgcacgatagaagggagttagacagaatgattcagttcattgacttagttttgtaactttactgatttgttgtctgttcattcaaggggccatgtaaatatatatgtaaagaaccataatgatagccatctgtatctcccatttaatccttactcctttccattcttctctcttcttcattttttctcacagtaaaccatgtaatcgcccctttcattttgaaattggttatattttctgcaaattgcctcttattagtacttctttcagggtggtaacagttaatttctggaaaactcttacagagtatctgaaaagctacgtaagagatcttcagaatgtacattttcatacgcatatgagcaagtaaattagctgcaactgtaagaatcagagactattcaatataaagagagaaagcaaataataactgaggatcatcgtaagttttttatccaggcatcttccataacaagctgtgtatctaatagaaactagctgaagatacttagacgagtttgg

SEQ ID NO: 93422 - DNA, 561 bp, Eucalyptus grandis
  Intron number 1 from transcript Egrandis_v1_0.043586m (loc us Egrandis_v1_0.043586m.g) derived from phytozome v7.0 (c hr-ID scaffold_5; pos 4942992 to 4943552 reverse strand)
tggtttggctcatgattttttgggctgtctgtgcgatgatcgccaccttttgcctctcgtatggcatgttaagtttgagatttatttgcctatgcggaccaatcatatctactctagcaaggggaattctgtcttgactcaaatcttgaaattttcagtttgacagctgtgacttcccttttggagaaatatgggattgatccaaagcaaatcggtcgcctggatgtaggcactgagactatccttgataagagaaagtccatcaaaaccttcctcatgccaatctttgaggtatacttccgcatgttttggagtctattgattgttgtggcaaggggtgcattagcgttgttgcaaagaaaccgatgtgtacttgtgggggacttttttttcttttctggctattccacagaatcccctcaagaaaatgattgctttgattaatttgagatttatttgcctatgcggaccaatcatatctactctagcaaggggaattctgtcttgactcaaatcttgaaattttcagtttgacagctgtgacttcccttttggagaaat

SEQ ID NO: 93423 - DNA, 441 bp, Eucalyptus grandis
  Intron number 3 from transcript Egrandis_v1_0.024381m (loc us Egrandis_v1_0.024381m.g) derived from phytozome v7.0 (c hr-ID scaffold_5; pos 17585323 to 17585763 reverse strand)
tccaagtgagtaccaagagagcaagaataattctaattctttgatctataactatctctctctctctctctctctctctctctctctctctctctctctctttctgtgaattatgggctttgcctctattttttccaggtgatgtttcatggcttgctggaatgagacatctgtcttgctttcttcttgctactctataagattaaattgtttcttgggacatcagatatggccacttctatttcaaatggatagatagattaaattatactgacaaggggaagcacaaggacatgggtctccgcgttttctttttatgaaaagaaaaccatgtttcattttcaaggagggctttaaggtttcttttctatttacttttgtcttttggggtttctttattttgcaggcatacataacaaacagtgcaaaagtggtattctt

SEQ ID NO: 93424 - DNA, 488 bp, Eucalyptus grandis
  Intron number 2 from transcript Egrandis_v1_0.025566m (loc us Egrandis_v1_0.025566m.g) derived from phytozome v7.0 (c hr-ID scaffold_3; pos 44351229 to 44351716 reverse strand)
caagtcgaagcatttccggggaaaaacgggaggtaataaaacaaaaggaagaaatttgatttgtgccctgtattgttctgttcgaattgatcagaagttatataaattctgcacatgttaagtgagttttcaaagatattgctcgtctgcatcaacatcatatcatgttccgttaggtggcttagagtgtaaggcaggaagaggttttagtacatggatgaactttgttcaaagcgcaagattttcagactgcttgatttcaattatgtagaaagaaacgttggaggacgctgatgcactagagcagcagcgccttcggtatttggcaactgaggcaactcaaatgattaagaacatccagtccaatctaatcggatgtatcatttgcattttggcaagcatgtgtcagtaacaacggtatttgctgtctggttttggctggtacaccgatctcctgattctggtcacaaattctaatgttgtaggac

SEQ ID NO: 93425 - DNA, 715 bp, Eucalyptus grandis
  Intron number 1 from transcript Egrandis_v1_0.002234m (loc us Egrandis_v1_0.002234m.g) derived from phytozome v7.0 (c hr-ID scaffold_3; pos 59263209 to 59263923)
gtgcaagtacgctttcttgaggtctgactttacaggtttatatgatttgctattgaatgagacggttccagtggtgctggaatgggggattgcgaacaatactgacgatggacgcaagcttatccagcagtcacggactggttatctttcctattgtcgcacacacagcattgacaacagtgaaatgctatttacacagtgctattgcacacgggagtacggtggtaacgcatatcttatggaaggatgcaaaggtaacccattccatgctatcacgttccgtattttttattttgatatatactagggaatgtgcttttcacattccgtatttaggggcatcatacagtgaagcagtttgttcatttccagagttttctgagaagaacgctttcacaccgtataatgattgcatacatgcttttctaccttctttttgttagtttttctgcccaagattacacaaagtgaatgcactttcgaacaaaattgatcaaattacattgataataatttactcgaattacaggggaacaggacagtcctttagttacaagtacaatattttagccatggaattaacaatttatgaggaaatgcaacctactagttttcgtaattttactcaaggagatcggtttcgctgttaatatatttgcttctggtttcacaaccatcaggagctgcacctgaaccatcaggaggaccacctcca

SEQ ID NO: 93426 - DNA, 590 bp, Eucalyptus grandis
  Intron number 3 from transcript Egrandis_v1_0.007141m (loc us Egrandis_v1_0.007141m.g) derived from phytozome v7.0 (c hr-ID scaffold_5; pos 7430799 to 7431388 reverse strand)
gatcagcctaagcccatcgcagaagattattagaggttggcaatgaattcctacataatctaattctctcttaattgcaagtaaatgctggctacaaaacttagcacgcgtgttcttttgtttttttggttttcagaattcaagtagaatgaaatgaacaagtatggcgtattgcaggcgagtccgaactcaaggacatcaagtacaacgcgtgaatttggacttttactgactcatctatgcccatgccaggccgtgtctttcccttgatgtatctcctggattgtgaatctgttcttgattttctctgggtgtataatttctgcatgtcgttacactacatgcggcatccattcaaaatatatttactcaaatttgatgctttgtatatcaaatcttctcagttacagcggtattatgttcacatatttaaatcgcttctcttgaagaacattggagcttcctagcatatttccagactttccctcagaaaactagtctctatattctctatgtagttacattcataagtttgttattgttgtcttagcactgcagttgacgtgatattccttttgatatagattggc

SEQ ID NO: 93427 - DNA, 649 bp, Eucalyptus grandis
  Intron number 1 from transcript Egrandis_v1_0.022818m (loc us Egrandis_v1_0.022818m.g) derived from phytozome v7.0 (c hr-ID scaffold_5; pos 2254636 to 2255284 reverse strand)
gcagcctctcctcggtcactccgatcagctacgaggtgagccccgagttttttggaatttttcgggagctgatcggccttgtggaacttgtagtttgattttgatgctgaagcggattgagttgtggtgttggtcttttgccggaattgttgctgtcgtcatttcttttttccggtttcctgatcagtcgaaaagggaagaggggggaaaagaaaatgcttctatgtcggaggaaaatgtggcctcgtgttaaaggtcagattttgcatatgtctgaacatgggtagtagctcagggcggtgcaagcttttgtcatcgaattgattactttgaaacggagcagatgcagcacaaggaattacatagtttcctctcgacccggagcttcaaaatgcgaatttttatagttggcgttcattatcttaagggaggtatggtataaagtctctgtttcaggtcattttgcttaggatgatcttcacctgatgaatccctgtttgtaagcatagagatgggaacgagcttttgcaatgtaactgaattctctaaattccacttgacctgtggtatcggagtactgttatttccataatcgcatgagatgaggcatttcctgaaaactgacctgtgaagtggatgcagttctcag

SEQ ID NO: 93428 - DNA, 428 bp, Eucalyptus grandis
  Intron number 1 from transcript Egrandis_v1_0.008032m (loc us Egrandis_v1_0.008032m.g) derived from phytozome v7.0 (c hr-ID scaffold_8; pos 299006 to 299433)
ggatttcgcagagatctcactgtgtagtgggcgaggtagtgactccacccccccctccccatcattttcgcctcgctcctcaatcgaattccgctctcccgaatcgagctccccccttctcccccttttgggcttttgatcgctgctcgtgggcagcgtcgattctcaaaagggggggcaaaagggtcgatgattaaaaaaaaaaaaacaaaagattacagaacgaatacaataatccgctttgccacttctttttttgtcgatactgaattgggcaagcggaaaaatctcttctttttgctgttttccgggtgatttggattgtgatgggttttggtttttccagtgttttttccgggtgctcagtgagatgtttttgctgcgtgttgctagggtttgcggatcctcatcggaatctctccatcggt

SEQ ID NO: 93429 - DNA, 735 bp, Eucalyptus grandis
  Intron number 1 from transcript Egrandis_v1_0.002039m (loc us Egrandis_v1_0.001846m.g) derived from phytozome v7.0 (c hr-ID scaffold_10; pos 6984318 to 6985052)
ttttttcgggctctctctccttcggctccggcgaggtaatgcagcgaggccgctggcctctcgccgtcgcgccttccgccgtcggtcttgcgtaatgctcgctcgcggtggtcggggcaggggcgttttgttgcagtcatttttttatttttttttattattttttgctttttttggtcggttgtgcatttcggtgggccttttgactttttggattttcgaaatgctgctctagttttggtctggctcgggggtatttcgtgtttctcgggttcgctctttcgatcggtggccataactctggattgtttcctattttttctccccatttcttttggttctttggtagtgtcttttaagttcactcggattgtttgctttttttttttttttttttttgggttctttggtagtgtcttttaagttcattttttgttgttgtggttcgctaatgatctgtagtatcactctcggtaaacatgcgaagatggagagccgtgtcttttcgttgttcgataatttttttttcttttccgtctgttttatttgcttggctttctttcatcttttagcatttcgagctcgagtttttagagtattgttagctgcatgctatctgaagtgggtctaagggtcgggatgtcttgagtttctagggtaaaattgcttattttatctgttttgtctttcgttattgcagggttctgccaagattcgactttcgtcttctcgttt

SEQ ID NO: 93430 - DNA, 978 bp, Eucalyptus grandis
  Intron number 1 from transcript Egrandis_v1_0.049044m (loc us Egrandis_v1_0.049044m.g) derived from phytozome v7.0 (c hr-ID scaffold_10; pos 7083857 to 7084834)
cagcagatacgactttcctcctggctttgtgtttggtgctggcacttcagcttatcaggtctgtgcatgctccctctgtttcgatgagtgtgttttcgtgtagagagagagagagagagagagagagaataatttgattgaagctgtggaatttggaaggtcgaaggagcagcaaatgaggatgggaggactccaagtataatggacacctgggcccactctgactcaggctagtttctttcctgttattttcatataatgattttctttcacaggaacttcaaccatgttgattttcttcaatttgggtactcctcctttgtgttttgtgggcaggagaaatattttgaatgatctttggaagtttcactcctggcctctagggtgaggtcaggagaaatacagtgctgcatagttaatgttatgatcaacttggggtctgaaaattgattttgggtttgccaaatttaattgcaccaagagccttggctcttcagattgcccaggctctagtttggtaatattttgttacatcaaagaaatttcttgattattcaagaaaaagtactcaattgagcttagctttaggcgagtcgagaacatttcaggttgatatttgaagttttgaaactgaacagcttagtggaatcatgtactagaatatcttgggggactcgagaaaagtttaaccttcagcacatgaattttcttttcacttttatgcttcagtttggtggagtctaaccaaactctgaagtccttatgaacaaggatgggcatctaaagcagctaaatttcttgaagcatttaaaagcagtggaaagtaaaatagttgtcatgattctgtaagcaggttccatgttttcattgctaaaagcttgaaaattcattgctaagcaggcataatatgtgggttttatggctgtagttttgctaattatctggttttccatcttgcagggattacaagcggagcaa

SEQ ID NO: 93431 - DNA, 704 bp, Eucalyptus grandis
  Intron number 1 from transcript Egrandis_v1_0.009151m (loc us Egrandis_v1_0.009151m.g) derived from phytozome v7.0 (c hr-ID scaffold_8; pos 1912807 to 1913510)
cctcgctaggctcgagagcttctccgagtacgttggtgagtagctcgctcagttttcttcttccttattttttcacgaattcatttccagagaatatagctgatatttctgcctgttcttctgctaacttgagctgcgatggttgatgaagataattattcttattctgggaggagggggagaaaaattaaaggagaaaatgtatagacttttttacatgcccgttactcttttcacagaattatcctaattttttttttgaaaattttccatcagactttcattctcatttttcccttttgatttttcgacataagatatctggcatcgggtagagttttgggacgtgcctcgttgggttcttgatttttcaagatttttttattaacattatcttgaaaacaaaaataaattagacgagaggaaaggtggagggaggatgaggaggttctgttgggcataaagcattctgaggtgaggctctttatttatttgataattatttatcatgctttctttttgtcagaatttatttatcaagttggcgcaacatctgtttccacgtctcttttaaatttagataatgtttgaaattttgacagaatagtaaacgaagtattatttatttttatctttttcaaagggtaaagaaacggttgttacttccgtgacaaatgatgcagctaggcaactgggatttgaag

SEQ ID NO: 93432 - DNA, 820 bp, Eucalyptus grandis
  Intron number 1 from transcript Egrandis_v1_0.044221m (loc us Egrandis_v1_0.044221m.g) derived from phytozome v7.0 (c hr-ID scaffold_8; pos 68095226 to 68096045)
aaccggtgaagaagtcgaagagcgtgaagctgctggtgaggacttcaggggacgggattttagacgatgatttgtttgtgtatagaaaatggtttggcaacatttgacatagcccatttcttttttttctttttctcttggtttttaaattgtgctaactctattcttgttagcgcatgtttctatgcaagctgctaggcgagattttattagatggttgtgtttgataatggggaatcgaaaagctctgacttgtgtggtgctccaatgaacggagttaatagttaatctcacgtagaagattgcaagtgaaatggtgtattggtatcttgtggaccagacggaactagatccacagattgtttcgtttgtatcgatactctatctctcttttgcagcagtttctccaaccatagaaaacgaaaaaaagaattatgctttcgcatctattttgacagaagaagaggggggaggggaagaatgagaaacttttcgcagcgcattcgttctaaacttatctggaggcagaatgctttttgaaagtcccatctccttttgaagctctcggggatttcatcttcaaatatttgaacctccaaaaactgtaaatgggttggagaaactgctcacttatggtgattctgtattgttttcattcgggttctctttgttaggaattatatcaagctcatacttgctcccgaagaactttgagatttcgaagctctgttgagggcagtcaccggcccctctgcctctgcctcactccctttcgagcacgcgagggatagctgctttgtcggcgacggcaggggaacgg

SEQ ID NO: 93433 - DNA, 655 bp, Eucalyptus grandis
  Intron number 2 from transcript Egrandis_v1_0.003223m (loc us Egrandis_v1_0.002899m.g) derived from phytozome v7.0 (c hr-ID scaffold_1; pos 14501581 to 14502235)
ccctgacttgagctgttggactgaaggctttgttggttggttttgtagtgaattctcttttttgtatttgagtccgggtgttactgtttaatcagtcattggcttacaatggcatggggtcaggtcaatcatgtgaaaattttttgttcaatttcgtcagagtgagtggaaaaatcaacacacgcacgcatgcacagatgattggattgagttacttagttatttaagttgattaaaatgaatgtaatggctcggattgacctggcttgtggagtgtggtggagggaagtacccatttttttcatcattccacaaaacttaagtttcttgaaagatcttcgaacggccagcaatgaatttatacaggcatactcagtttgtcttgaagtattttctgccttcatagtgtgaattcttaccccccgaaactaaaatatttggtcattgccatatcatttttcatgaaatatgtttctggatttgtcatctgtacaaagtgtacttctttgttttgcctgaaatttgtgaaaaaattttcccgtgttctttcaagaatctaagagttcataaggtagtttgaacttccttcagataaaaaaaaaggttggactctgacaaaaatgtagatttggatgttgtagagtcttccagcata

SEQ ID NO: 93434 - DNA, 759 bp, Eucalyptus grandis
  Intron number 1 from transcript Egrandis_v1_0.005512m (loc us Egrandis_v1_0.005512m.g) derived from phytozome v7.0 (c hr-ID scaffold_10; pos 39221753 to 39222511 reverse strand )
tcctcagccccgacgtcccgatcgctccgccgctggtacgcccctaatcttcacttccctccctcaatttgatttcttgattcttgtcatcgtcaccctcgcttcatctggtggcatggccctgtcaagctaatcccacctcttattccgaggagttaatcctgatgaattgaagcgggttctgtgtactttttagatgccgcgatcaaaagaaccttttttttctcttcccttttggttctgtcgactctcttggttgctgattttcccttttcttggccgcaaaacaatcattagtcaatgacttccggactgggtgcatcattcctgcacggcaatgaagatgtaaaagcaaaagccataaaaaaaaggcaaagaaagagtcatatccagctgtcaagttgatttttcccccaacatggctgtttgcagagttcatggaattatcttgtgatcctttcatgcgttgtttttttattaatatgggtttgactcctggactgttgatcttgttgttcacttacggacgggcactgccttaatttgctcgactaagttagtacttggggaagaaattataggtgcataggcatcaatcagttgggcaaatgatcatatagtcatatggatgcaagcttgtcagcactggaagttggatagatttggttgattatgagtattgcctttggttcctacgatactacgtgactgaacaaactgattgtgaatgcagaagagggacctactgatccagagaac

SEQ ID NO: 93435 - DNA, 906 bp, Eucalyptus grandis
  Intron number 1 from transcript Egrandis_v1_0.010147m (loc us Egrandis_v1_0.010152m.g) derived from phytozome v7.0 (c hr-ID scaffold_10; pos 39227504 to 39228409 reverse strand )
ggagacggtgagcgtcttgccctgtctgctccttaaaccagttgtgaagctcttaatgcctttaagatggtctggaatgttgcattaacaaattgcaatcgagtcctaaattttgtaatcattactattaaatccttaactttcaccgaaaatacaattaagtcctaaaacttacgcagaaagtgcaatttaaggatgccatgtaggcatttcttaagtggtatgaaggtagctttaggtaatgttcacccagaaaactttattgcatttttctgtggaaaattttctggaactcaattgaactattggaaagttttaggacttccttgcattctgtacacaaggtttagaaattccggtgtacttttcccgctgcatagttgtgtatgaagaacaaagtaatggaatgtgttttggcaagtgataagccaacttgatttgaatagacaaacttacaatgctgagacgtttgacaaaacaataagcagacgtgtttatatcattcatttctttctaacttatgtatcttgtcgccagttaatcaggattcctgcaagttccttcccatcattaaaatctggattacaaattgggactactggaccatatactaaaacaataggggtgctctcgattgacactttaaatctgatttctataatataaaggcatagatcatgtactccaccatttcaggagatgaaaaataagaatccagatcgtaggcccaggaatggtagacgactctgataactatttgattagcaattttgtgacctccatgttatttttaatagtaagatacttaggtcactatttctgacggtagaattgtagctcattgcttcattggctgctcatttatttctaggaaaggtttcttaattacagcagtggttactactg

SEQ ID NO: 93436 - DNA, 725 bp, Eucalyptus grandis
  Intron number 1 from transcript Egrandis_v1_0.049006m (loc us Egrandis_v1_0.049006m.g) derived from phytozome v7.0 (c hr-ID scaffold_10; pos 29184997 to 29185721)
cattattcgtgggctcgtgggctcgtgggctcgagactgctggattcgttcatttgtgatgcctgtgcaatatcctttcgatttacgcgattggctcgtgtccgatcgtcaggagatgcattgaactttgagcttgctaatcttttctccatcttgtactaaataaaccactttaagtcgggaaaatattgtgtaggctagcctttccacatcatcatgggactgacccattcaactgacgacacgtcgcgccacatgtcgtcctgggtggcacaccacactctcccccttcccgtgaaatctctcgtccttctctctcttctctgtcctaactttgcttttcttcttgatgatactcccgctattttctcattttagtatgtttatcgcttcgatgttttgtcctaaagagggagattatctgtttatggcggtaaacggtgaaatttcgagaagttcttatgtttgtttcaaagcttcactcatcttctcttttctcctgtcttatgatcgtgcggctgtatttggtcccagcaagcccttgggtgaccttctccgtccttgtgtcgattgctacgatttgctagccgcattaaccattactgcctaactttgctgccccatatatgttcttgaactcaaattgggaagaattaagctgattatttgatttcaaccgatccattccaggcaaaaactactgtctctacggttccactagtcga

SEQ ID NO: 93437 - DNA, 762 bp, Eucalyptus grandis
  Intron number 3 from transcript Egrandis_v1_0.045225m (loc us Egrandis_v1_0.045225m.g) derived from phytozome v7.0 (c hr-ID scaffold_1; pos 25558343 to 25559104 reverse strand)
tctctctctctctctctctctctctgtttagattggtttatgggggcattattttggttcaaagcacgtgtggcttggctttaacccaaccaaaatagcatttctttaaatttaaaaaaaaaattcagattacttttagatgataaattttgtacaaaaatttggatattcaattaaagccagagtctaatttcaaatttaaacattaagatgagattatgccaaattccatttgataaattattgatttaataagtaggatttaggaagtagcatgtggatcttgcaaatttcaaatgggtgtctgaaattggaaaaagtgcttgtttcttttttaatcaggaaaaaaaaagtgcttgttcaagagcccaataagttgtcccatgtatttagtgaagaaactttgtcaaatgtccctacacatcgcatgtattgacttgtctatatgttcttttgatccatgacatcattttgaccgcctacttggcttaaatcatgatgtaaatcttgtataaaataacaccgtagaatttattgaacttttaaggttggattgtgcagtttgggatggcttttcaatggcaaaaagtttggacgaactcaaaagcaattgtgtatatgtcttcgagaatttgatggaaagaaagagtctcatcttttaagttaaaaacagcagaagccaaaagtcaaatgccaaagtaaacacccattcaagattagacaactaataataatttgtccgtgtgattgagtgcagcttca

SEQ ID NO: 93438 - DNA, 613 bp, Eucalyptus grandis
  Intron number 2 from transcript Egrandis_v1_0.030257m (loc us Egrandis_v1_0.030257m.g) derived from phytozome v7.0 (c hr-ID scaffold_8; pos 10202170 to 10202782)
gattccgggtatgcatgtctcctttccggcaactactgtcgttgttgtcgttgttgttgttttttttttttttttgcctttttcaattgctttttttcgagggtttcaacaatttttgtgatgaaactaccccgttccagtataggcttgagcaacttttgcttaatttgctccttcgcgttgtatagtgttttcgattactgggcgttacttgatcacgtcatgttggattgagttgtttcaatcaatggactaaggtaatgagggccatccttggttaaatgaaaccctcgtgtcgagttagctcttgctgaatgaatgtcctgttctgctatgatacctcttttaccatctgcattgtcgcacacaactgagtagcttttgagcatttgcagatccattattcccctatgtgcagaaaatgttaatttgatttattccattctctcatcttctttcattagctactttagagacattagcacgtgtgatttgtgcgcaaattgtttatattaccgatttgtgcttcattcaaaggatttcttatggcttttgtgaactgatgttttttgtttactctgtggtgatatttcagtactgcagatcatactaa

SEQ ID NO: 93439 - DNA, 701 bp, Eucalyptus grandis
  Intron number 1 from transcript Egrandis_v1_0.017677m (loc us Egrandis_v1_0.017616m.g) derived from phytozome v7.0 (c hr-ID scaffold_8; pos 65110512 to 65111212)
gctctcgatcggcctgctgttcctctcttctttcggtgagcgttttgatgattatgtgggggtgctgattgcggagtcgtttcggtttcgcatctcgcggaggtgccgggtttttggcttctctccttctaattttttcggtcggttatgtcgatacttccatgatacgcttctggcgcgtgaaccgttgcgcgcctgggcagaagatcggtgaacgggcgcgggggatttcttgtagctgtagctaattgggcgggacttgctcgctctgttgatgaaactctcgaattggttattgtcattgcccgattttgattcatgcgggcatcttgggcctgtttggtagcaatcttttttttttttttttaatgttctgtttttttattctccggaacaggcaaaacagaaataacttaagctaatttttctatttctcagaatagatagtgattagaaaatagatttgaaatagaaataaaaagtaaataaagttatatctgaacagaaattgtcttggaacaggaatgttaccaaacgcatcttagcatccaacagttaaccacagccgagttgttcttgactgtgatatgtgtttcttgtttggttcatgtattggtgagagaattcagtcctgactttatttatttattttttattatcttgttgttttattgattttgttgggtgtttggtgctcctag

SEQ ID NO: 93440 - DNA, 781 bp, Eucalyptus grandis
  Intron number 3 from transcript Egrandis_v1_0.031054m (loc us Egrandis_v1_0.027989m.g) derived from phytozome v7.0 (c hr-ID scaffold_8; pos 42294961 to 42295741 reverse strand)
gtcggtaaaaagatccttttcttttcccctctttgtatgacgtcttctttgacctgccttcgtctctggctcagatctctcaaattttcttccattgtatgcactcacaagttgttaatttcatatggcaattgttttctgtgatctttactgggatagtttgtacaggtgactggtatagactttttcatttgggggagtagctgtattttccggcgaattaaacaagctgcagctgaagtgtctgtttagagaactgtggttgaaatgctactaccaccatgcttaaaaaataaaacctttttgacaagaaaatctgagcatgtataaatgatctatgaatgaaagcttggttacagacattagtctagttacgatggctcagacattgtttatttagttgactgctgttttagaaatgttatttgcatactcaaatcttatactgggagagccttttcaataaaccatctctgtctccatcatgcattgatctgtgatttattgttcttcacttcttcatatagtcaaggagctggtaatttttgggcattttaaatattagagcgtgtcattggactcgctttgaaacagactaaggaggaattgataaattcagcaatgcatatttaattaatttactaaggaaaagtgaagttgagcatgatggacatcctttggtgattctacagtttaatcttacttacattattatcccacttatgacatgcttgtgtcttttgagaatctccatgtattaatgctgtatatacaggaaaga

SEQ ID NO: 93441 - DNA, 851 bp, Eucalyptus grandis
  Intron number 3 from transcript Egrandis_v1_0.029303m (loc us Egrandis_v1_0.029303m.g) derived from phytozome v7.0 (c hr-ID scaffold_1; pos 30535646 to 30536496)
gggtggcttcttgtgaattgcttaccacggctcacgtgagttgatttgaatcgattagttcagttcccttatgagcttattattaattttatgttgtctgtagaaataagttgttatcttgatctttcctcgaagttaaataggatctgtgctaccatttttattgagctgttgatatttttccactatttcttactggttttgaagggaagagaagatgacaatatagaaacaataaagaaaatgtttaaggtgttcttagagtctagccttttagttattgagtattacaattctaagggaaaagtcagaatggtgaggaaatctctaaatatgttgaaattctgtacatttatttgcctgatcttatttcatttaattatttatctatattggcttttattcagattgatgctggaaagcttgttgaagaggtctttgaggtcgttaaagtaatacaatttttgcatgttgcgttcctgtgcaactttttctaacatcaatgtgtgcatttttgtttttttacgtcgtaattgactcgttcccaaatcctcaaagccctcacattttcctcatcgaaatcaatgtttcatggatctccatccattctcaatcttcatattgcttttgtagttgagcatgcatcagcctttggggttattattaatatgcaggacctcctcatggaggatcacgagtgagaactcgttgaggaaagtgctgaaaggacagatagttcctctgttatttcaaatgttacctgttctcttgtgcggctctctttccattgctgaccatggtttgatttttaaataggatttccggagtatttggggtggaggtcgtggcct

SEQ ID NO: 93442 - DNA, 1060 bp, Eucalyptus grandis
  Intron number 1 from transcript Egrandis_v1_0.029629m (loc us Egrandis_v1_0.029629m.g) derived from phytozome v7.0 (c hr-ID scaffold_10; pos 12146007 to 12147066)
gaagtactcgagttcgatctccgacccgaatcgtaaacccctcgttgtcatttatcttgtttacatgatcatgtttacatagggggataaaagctctttggtcgatcgatcctagtgttcgagttttggacactgcattgtggagttcatttcgatttctgtcgaaaggtctgatttttatgcgtgggtttcttgtttgaaatgctttaagatgctgttttggtacatcgtagttacgtgttactgttctttttgttcctccggctcttctcttgggttggttctgttgaaattggagttgcccatttagcctatgggtttccttcgacgtgaaatcgaatgccctttttgatcagagccgactagttgctttgaatcaatgtgtagttctgttgtgagctgccctgtatccatttcttttatcttccattaattaagaaaactcctgattgttttgacatttgcggatgcattcaatgggaaacctcgcttttagttgaagccctgtcgaatttctggcttgtgggtttagtttcttataataatttgtcacagaaaacgaatctatgtggaggatctctgtgtgtgacttgcacaatgagttttatctactttccatgagaatttctcgcacaatgcaaaaattgcatgatggaatgcttgaggcaacatttagcttcttaaagctgtgcattagagattttgttggtgcaacaaatgttcatcggaatgaagttatctgactgaagatagatatatcattagtactgggcgccgtaaattgcaagcatggttttcttcggcttttatcatctcattgtctgttaattttatacgcccttctttgtagatatctttacaaaagataggacataaattggaattttgtttttgtatcaaactatattggcactggataaatgaaagcagaggccaccattgcatacagatagagctgcatattttgatctctttctataagttgtgatcaatatttaattccttatattgatggtatgttgtagattcacttcgttcttctaattagtcgtcaagggaa

SEQ ID NO: 93443 - DNA, 497 bp, Eucalyptus grandis
  Intron number 1 from transcript Egrandis_v1_0.035789m (loc us Egrandis_v1_0.035789m.g) derived from phytozome v7.0 (c hr-ID scaffold_8; pos 5426845 to 5427341)
gaggtcctccctctctccctccctctctctctctctctctctcatgtacatgtgtgtgaactcccaaaaaagaaagaagaaaccatgcaccgacacaaatgcacccaccaaacatctgcgagccacatatggcatacttgcatgaaagtgtaacggagggagccacatacttctgctttctcccaagccagccatggacgtataaactcaaaagaacatagaaatcaagcagacttatgaaatgaacctccctggaatgagtgaaggtgacacatagagagccacatacttcgcttccctctgagccaaccatgcatgcataaactcatgaagacttagaaatcaagcagatttatcaacgatgaaatgaagctcgctgaaaaatttttactccctccccccccctcccctcttccctcttctcttctccctccctccgagattaacattcaacaataacaggtgacagaaaagctgcccaaggtttggtgacatat

SEQ ID NO: 93444 - DNA, 827 bp, Eucalyptus grandis
  Intron number 2 from transcript Egrandis_v1_0.035789m (loc us Egrandis_v1_0.035789m.g) derived from phytozome v7.0 (c hr-ID scaffold_8; pos 5427394 to 5428220)
gggaggttagttctatcctaacgtggtgaacccatatgggcactttttcccttttactgggatgacgtttttttcgtctttaaacgaagattatccttatccaggtttagatttctcacattcaaaagaagctaatgcagagtcaattactgttcctcttgttttccattttggggaatgatgtgtgtgcgtgtctatgtgtgtgtgcatgcttgcagacttttttggttgaagtcagaatagtaatttgctagcccgacaggatcaccatggttccaagttccatcttattacctgcttagcatagttctttgagagctccggacttgtgctgcttttatcaattctttgtacctaaactcatcttgccttcgtatttggaaatttctactttctcacttcgtctgtggtaattttgcaatcattgatgcaaactctttccctgagaacatcttcctttcggttgtttgcctcaaagagctgcttccattgtgctgtgataggcatcgtccttaattctaaagaggtacatccataggtcttgagaaatccacgcaccaaaagttgcaaagtcacgcgttttggattcttgagcacttatatttaacctacgcatgactagtctcaagtattagaacacaaatcggatggagttgaagttttatctggggtgacatgcttttgctaaaattttggcgtttccttaagtattttgacccaccagtcacggttattgactctggggtgaaaagtatatgttcactttgatttctctttcctaattttgtgcagattttggttgactgcatcgagaatcagcctgctgt

SEQ ID NO: 93445 - DNA, 746 bp, Eucalyptus grandis
  Intron number 1 from transcript Egrandis_v1_0.021745m (loc us Egrandis_v1_0.017412m.g) derived from phytozome v7.0 (c hr-ID scaffold_1; pos 15489638 to 15490383)
tttgccttgcaaccctttccatcttgctcgctcaggtaagtcagaaaacggggcctttctcccttctcctcctcctcctcctccttttttcctcgtgtcatctttgggttgctgatggatgatctaatttgagcttgtttctctagcttagcttttggagaccgatttttcttcaagagaataaagaactcttaagaatcggtttgaaagttaagagacaggatgtgggtttttttacggcgcccgcgaagttggagattttcgagtaaagatttggtttttgcgatcctgaatttcgattgatttcgcgccgatcatggtcttctagctgatgttattacctgccatcgttattggtcgagctctagtttcaattcttgaactttggcttgtttccgatccttgagaattcagtttgagcctgttcatcgttctcctattttcttctgtgttgctctcttagttggtacgttatgcatcatgcactttagattatggaagttgcgaacttgctgctttaaattgacaattggttgatatcatctgttctcttttatccaaagaaagttatatcttgcttttgaaaagatgggtctggtctaataatgagaagtccgaacaagggcaagagacttgatgatcatgattgccttctcaataaaagctgaaggttatcatgttgtggttctgttttatgttgccttagtaaaggatgtgacttcttttgaacgtatcttggcaggtca

SEQ ID NO: 93446 - DNA, 976 bp, Eucalyptus grandis
  Intron number 2 from transcript Egrandis_v1_0.027266m (loc us Egrandis_v1_0.027266m.g) derived from phytozome v7.0 (c hr-ID scaffold_10; pos 599514 to 600489)
cgtttcagctttggttcgattttagccacgaccaggttacaaactacctcgatttctggattctatcttcttcttcctcctcctcggcttcttcgaagtaaatggcgctgtctctttgtgatatttatgaaaataaatagtttggaatatcttgatacaattaatcgaaaaaaaaataatttttgtttttttttataattcaaataattcattattcgtgaaacgaactttctaaaaccctaccgcagtcttttcttcaccaagttctgacgatagaagtaaaatttgcaaaaatgttgattctttctaggataaatttagggtttagtctaggattatcactaaatggatcgttttttaggaatataatcgagttcacatagcgacgcgagtgtttgtgtatggagtgtattttttctcataatcgaagtcttccacgtgccgcacggcaatggacccaatgaaaattcttggttttttagatatatggtggttgtttgaaagctcagttctcatgacgaaattgtcgttcgggccaatcgttcgacaaatgatgtggtcgggactgagaatttctacgtagttaaaagttagaaaattggtagatctcttattcgacacgctaggaatatgcctataaaggacttgatttttctttttttcttttttttgaggtttagtaagttgaaggaattttatttagtactaggtaactcaaaacgttgctattttagttaatcggtccgtttttagcattaaccgatctatgtacacgttaataaaacctgtcggaccacgtctaaaattcccctctccctctttatttatgaagtttcaaaaaaattcggatttttttctcgaattttgatcctagcttttcctcctcatttcccaaacataagattaaggtttttcgttgcgacttgctgaaaatagcgtttgatttcttgcaccgcaggtgtttgcgtacatactg

SEQ ID NO: 93447 - DNA, 1037 bp, Eucalyptus grandis
  Intron number 1 from transcript Egrandis_v1_0.010363m (loc us Egrandis_v1_0.010363m.g) derived from phytozome v7.0 (c hr-ID scaffold_1; pos 7375015 to 7376051 reverse strand)
actccgtcatcgcgggcctcgccttcggcgtcgtaacgtcgcattttttgctggtttttcgctttagcgcttcctctgctttttggcaagttcccataaaaacagagtgagcgcgggttactctgtttttttggacccttctggctcttttcggtttagggaaaaaaaagagagagtaaaacatcatattcgttttggtgtttaagaggaatgacatcagtgaagacacgcaggtcaagtcgttctgcttcttccagcttcattccttaaaacaagtttttcatagagaatttcataaaaaaactcgaaccacttcttctttttgtcttttcttctctttttttaagcatggcattcggaaatatgacttgcaagcttgatttggctcacttgatcagggcccacttatatagaagtctggttataccactcttcttgctatgcctagcaacattctgttttctaggagtttctgacacactgcgtgcgtagtcgatcatatttgtgaaatgagtggtacctttctggctctttctttgatctctgtcttttcactttggtcgggacgagtcttttctgtcgttgttagcacttgaactcggtccgtcattttgtgtttggattagagaaatggaggtgcgtgtaggctccaaatcgggtttgaagggtcgtgcgtttccatgattaaagtacaagaataccttatgacgcaaaggtgaagctctgcatctgatctccccggctaaagtggttggattgacatgtcttctttaggccatcagcacaatggcgctttcctgtaaaagtaaatggggcatgttttagttagagagagagagagagagaggcatggggacctacaaaaagggtctgcttggccccaagctggcttattaatgactccttttagcagagttaactcggtcgaagtcaccgattgcttacttttctaatggaaacgattcattatatgcgtgacgtatagcgtaatttacagtaatgcgatgtgattgtgggtgtttctgctgcagttggga

SEQ ID NO: 93448 - DNA, 471 bp, Eucalyptus grandis
  Intron number 1 from transcript Egrandis_v1_0.013356m (loc us Egrandis_v1_0.013356m.g) derived from phytozome v7.0 (c hr-ID scaffold_10; pos 39041108 to 39041578)
ctgatttctttgacctcctggttcgtgcttttgctttcgtgagtaaagctgtagacttgctggaaaaactgctggatcttaggagatgccgttttgtagtggttgctgatccatttaaatgcttattgatctgtcttttggagcttgatggacctaggtttaaaagggtcgttagatatcgtagtctttcttttggaagatgggttacgccccccctgttactttagtttgtgagagaatttccttttatttaatgtaagtgctggtcgaaaaaccaaagctttttttggttagatagtggagctgaggtaagctttgcctactgatttttaccatattgttggtctgtgatttctcctggaacgtctgattcggagaaaagaaaaagaggaaatgaggcgttctttctaacttaatcaaatattatttccagaagacgtaaggctcggtactggtaagaactgcattcag

SEQ ID NO: 93449 - DNA, 583 bp, Eucalyptus grandis
  Intron number 2 from transcript Egrandis_v1_0.017031m (loc us Egrandis_v1_0.015860m.g) derived from phytozome v7.0 (c hr-ID scaffold_8; pos 20372014 to 20372596 reverse strand)
aaggtttgtccttgcttccctcttgtgatggatacctgggtgtttcttgttttgtttaaaagggaagagttggatagtttctttgttaaatggttcaattaggattctctctttctcctatttgttacatgatgtgatttgatgtagaatcttagtttgaattgcacttccatctttttgttttaatgggtttggtggttgggttatcctttctgatggaactccagcctatttttcttgtttaagttgccacaacaatttctttttcctttaactgttgatgacaatgaggctgagcatggcctttgagaggtcaatagaagattgatgatagctcaaactttgtaggatttcagaccaagttgactcgactcaaagctgtctttctctttgttttttccttatccatttctatagcataatgcaaaatttggtgagcgttccactggcagtgcccgctggtttcgcacttatcataggattgtttcaccttttctcttcttatgtaaatgctagttgaaagaatttttgtttccatgattctccaggagcggtcaacgggcagatctcgtggttttgggta

SEQ ID NO: 93450 - DNA, 1047 bp, Eucalyptus grandis
  Intron number 1 from transcript Egrandis_v1_0.043519m (loc us Egrandis_v1_0.043519m.g) derived from phytozome v7.0 (c hr-ID scaffold_1; pos 1408828 to 1409874 reverse strand)
ccgattggccttcttcctccgtctgctcagacgtacttcggtcctctctcctctgttcctccgtcgttcgtttctgcttgttgtccgaacggaatttgtcgagtgtctgctctgtgatgtgtctgaagaggcgttgacgatttgttcggttcttgctttgaagtgttaggttagattcagatctcgtaacctgtttggtcagcaagtttgaaatttgataatttgagattggagcttcattggactggaggatagttgaaattatggcttttagctgcgggagttgttcgtagttactcggattttagatgatgggtagaactgtttcttgattgaaggaaactgtggtggagagcgggctatgccgcgttgttgacatgttgtattgggatatggatgtagaatttttcggtagcaagatgttgtcttgaacttgtctctgggtgtatagttggtgatcgcgattgtgatggtgatcgagaactcttccttgatgctctgtttctcttcctgtgaggcttagatgtttgttggcacttgtgagattgtagcttctgcagcccagaaaaatcggtctttgcactgtgcaagaattgagcggcagtagatattggttgactgaatgctgcagaagcaagagttcattcgcaagtgtttatttgccaaaaaactccattttaagtggcagtagatgcgaaacatgaatccaagttcagttgtttggtttcccagaataattttgccaagtgggttcattctaagttgaacaccaatggcctaaggcattgatttttagaccatagtgccaaatcttctttataagttggatcttagatgataaatggtggagttttagaaaggttttgggtatttactgtgcatataaactaaattctgtactgagttatgctcattgggtcttacatgcattcgattcttactgactgtaatatgtcactgatataccgagagggatttcgtgttgattggaactccttgttgtggtacacagccgaagcaaatccacgagatcaaggatttcctcct

SEQ ID NO: 93451 - DNA, 845 bp, Eucalyptus grandis
  Intron number 1 from transcript Egrandis_v1_0.006720m (loc us Egrandis_v1_0.006720m.g) derived from phytozome v7.0 (c hr-ID scaffold_8; pos 36077652 to 36078496 reverse strand)
tccactactacgacttcgtggtaagtaaaccaaagtggatatctgcggctctacgtgtgaagtttcaagttttgttagttaaatcgatgtttcctttgctagaatattataattaaccatcagtttccagaagatacggaaccaatgattatgcatttgaatattagcgattaattattctcaaatctatcttatccccatgtgtgaaaattgttttgtgcgcttaggattatatgtcgagagaaaagaaaaatggatgtgacacgggctgaaatatgcggatcaaaaaacgagagagtccatccatatgaccttccccttttagtttcatttacgtgaaataaggcagtgatgagaactcggtgtgtatgaatctaactcgcacacaccattaaatgagatggggctcgtttagacgcacaatcgaacaacgcatgcagattgggctcatatgtgctttactttgcggagcctccgcgtgaccagacatcgtcatttctccacttttgttaccaaagagggaatcagcggactgatcgagtatttttattcttccttcctttattgggcgtggaccaccactagggaaaatttggacgtaaatctaagaaaacttaaatttggggaccatatagagggaccagccaatgtctcagctaaacatagtccacaataattgttctgacttccaagtagaaatttgattgtgtggtgacctgtagatacaccgacaaaatcgttgagatatagtaccttatcttgtcattttttttaatggatggtgcatttttgtagtaataaatctacttaaaattaatttttatccttgcagctgagagaaatta

SEQ ID NO: 93452 - DNA, 594 bp, Eucalyptus grandis
  Intron number 1 from transcript Egrandis_v1_0.015448m (loc us Egrandis_v1_0.015448m.g) derived from phytozome v7.0 (c hr-ID scaffold_8; pos 10300740 to 10301333 reverse strand)
gagacgcgggggacggcgagtggctcagtgacgaggtactcgcgagtcctgtttagattttcggtcttcttggcgagaggtcacattacattttttaaacgtcgtaaagtaatggcatgttattttaaatttgtacttctttgtcgagtagaagcacgaatatgttttaaggttgttttccatgcctgggatgttttctgtttcgaatattcattatctttgtcgctgtgttctctctgcttttgcagaaggacgtccgttttgagtctggtgatgcaaaggagcgaggtgctaaatcaacccctgcaaagagatctcgttgcgcaaatgtccacaatctgtcggggagggtctgtactactgccccttttagatagtgatggcggctgttttttcaagtctctagtttgctcgacttgtgtatttggttcatctgcagagacgcggagacagaataagtagaaagatgaaggcattgcaagaactcattcctcagtgcaccaaggttgttcgactaccatttccgatggtgatgcttgtgttccctctctgtgatgagcattttgctgatacaaatttacctctccccatttt

SEQ ID NO: 93453 - DNA, 690 bp, Eucalyptus grandis
  Intron number 1 from transcript Egrandis_v1_0.031339m (loc us Egrandis_v1_0.031339m.g) derived from phytozome v7.0 (c hr-ID scaffold_8; pos 49980461 to 49981150 reverse strand)
gccgtttctccccccaccgagctcgacgatttcaggtccagattccgtagcccctctctctctctctctctctctctctctctctctctctttctgtgcttttcttggggagggagcgagcttaatgcgactcgacgcgaggaagagtgatgcccagtagatacccatgaatatttaagcgcgtcttttgagttggcgtgccgactgttcgatgaaattcctgaagtttctctgctttcgaggctggtcgtttttgtagggtccgatggagcatctaattgttcagggaaaggtcgaatgctttctgattggcattagtggatgcttttctagaaattcaagcccgtcgatagaggcatgatatgcttatgttcttaatactgttggaggattcgtagccaatattgcagaccatggatgatccgtctagtgtgaaagttcaaattcatcgatcaattgagcaaaccttgtgttctgatattgtgttgagtttactgcttaagtggtagatgaatctggttccatttgtgaaattcaatgtgaatcccaaggtgtgtaggtaatgcatgcaagacattttgcttggagtgtccattagctaaaagcctaaatgcagttccgtggcgtactccctttgcactgattgagaatgattatcgactttaatcctatgtctggtgtgtgcagggc

SEQ ID NO: 93454 - DNA, 928 bp, Eucalyptus grandis
  Intron number 2 from transcript Egrandis_v1_0.038193m (loc us Egrandis_v1_0.038193m.g) derived from phytozome v7.0 (c hr-ID scaffold_10; pos 3826548 to 3827475 reverse strand)
ccaagcttctcccgaagaaccgcctcctttctgaagtaagtcggctgagtgttgttggtgtttttatcgaggaagaaaaaaacaacaacaaaaagtttcgcttttgatcgggtttcgctgttttgtcgctgaaatgaaggcgaattatttttgttgttttttgggcttttctcctttttgggtgctgttgtcgagtcacgcggcgaggtgggtttccgctggaggaatttgatgttctatttttattttatttttttgtttttcgttcgtctttttagattattaattattgcaagccattcgagtgggtttggggctagatgaaaatttggataaagggacgtgagacctcgagttgtgatgttgctcgcgataagaagattaaaagaagttgttgaaatgatcgggattgcatcccgaaacaatataggagtttaatggtgaatgtgttgcgctgttttgtcttctgagtaattgatttcttgctatcagtagcatcccctaacgataggaattgaacactaaatctggcttttgagacttttgtgatcatatttatcgattgtgtgcttgctttacttctgcatataactaatgcgttgccatccgagccatagtaatgaccgttttagatattctcgtgtttggacccaaagaacagtttcaattaattgcattacgggttatgaaaaattgtaaaattctaacataatatgtgatgtcgaagatatctaatgtagatattatttagtcgagtgtcctgcatcaggatcataatctagtgattggttgagtgttctctctcatatcttttttggtatagtggatctttgcaatgctgctcgtctaattttttattaatggatggtgcgtaagaattgtatgtcctcatttgaatgatcacgtcttcttgttcacatctaccaga

SEQ ID NO: 93455 - DNA, 744 bp, Eucalyptus grandis
  Intron number 1 from transcript Egrandis_v1_0.051298m (loc us Egrandis_v1_0.051298m.g) derived from phytozome v7.0 (c hr-ID scaffold_8; pos 25369649 to 25370392 reverse strand)
ctcaagttgtggttattcatctagtaagtcacaaaaacttacacttgtccatttttcttgttcatgctacttgactttgttatatacaagacatctgaagcctctgaaaacacgcaagcgtgatatgtgaagtaccataaggcttttccattttgttggactttaaatgatatttcaagttttcatgagataaaaaaaaaaaaaaacaataggcaaccttttacgtaaaatatgttaaaaaaaacacagtactttccctgctaattgtcactacagaaaaaataaataccatttacctcaacagaaactagatacgatttgaggattttgttctatcaagagtgcagatcaacctaatgacataagtggtggcgaccatattgtttttattattttttttttgttcaacatattttgtgtaattaatcaatcgatattttttgcctcagtaatggtcattattgttattgagaagaattacggtcatcatttcattcatgggaaatattacctgaaaaattattagttggtcatgttggttcaatgttaattttattgtttggattatttttcagatatttacagtcagtttttttcacttcatacaaattagtatagaactatgattgattagatgatccattaactttgattgattggtgatcttatcatgtcagataagttgagaaacaatgccgagccaatcaagaaccaaaccaaagacccaatcaagaacccgatcga

SEQ ID NO: 93456 - DNA, 861 bp, Eucalyptus grandis
  Intron number 1 from transcript Egrandis_v1_0.022191m (loc us Egrandis_v1_0.022191m.g) derived from phytozome v7.0 (c hr-ID scaffold_10; pos 12150090 to 12150950 reverse strand )
agccctgtccaggtaaatgatgttgttctcttcttccggagtttctgttcctggctttgactaatttttcctagaaaattaatgatgtaagatgtttggcatggccatggaagttctcagagagtcatgagatgggacttacaagttcaatagtatcaatggaattgttttccctaagtttgatttttcattgaccaactttccatgttaatagtttaattaaaaaccaaagccactgaacaattaatcatttcaatcctggaaaagaaatttaaattatcaagacaaaaaagttggaaatagaagaactcgatcaaaaatttattgcatgtctagagagcatacaaggttttctttaaacttgttttcatttttcttccttaatattctttccagtatcctatttgttttgccacagtcagttggcatctaaatttttgagtttattatttggtgcctcggtttggttggagtttgagattttatttccctaaatcggaaaagaaaaggatcttctggtaaatccagaacacggtaagaaaataattttctaggaaaacagagtaacaggaaagttcaatcccaggatgaaatttttctcctagttgaagctgattaagaggcatcatcagtttcatataatcctctatatttctttgactcaacatcataataatggccatatatacacacgtgcatacatactaccatagataacttttttcacgtaagtctcacttcatacggaacattgcctgataaattttacaatcttctttaactatacctacttacatcgcaaatgactaacttattatgtaattagtctggttgctgcaagccgccatcatcgtgcatcta

SEQ ID NO: 93457 - DNA, 953 bp, Eucalyptus grandis
  Intron number 1 from transcript Egrandis_v1_0.018357m (loc us Egrandis_v1_0.018357m.g) derived from phytozome v7.0 (c hr-ID scaffold_10; pos 7902878 to 7903830)
gttgtttgagttatcgctacaataacgtgggacaggtcatgtggaaaaatagcttaatgccaggatgataaaaagctttacacctctcattttcatttcccctatttcatattgaagcgggaaataaaataatagttgttttgggtgcttccactaacgatattgttctttcgttatctcaatatttgacttgctccgtcatgtaagcacgtgaatattttgttaactcatatcttctttcttgagacaaacatagattgaacttacatggaaatccaaaggtaaggacaacttgcctaatgaaaacggagatttaggagcagccgggcgcactagtgaacaggtacgtcttcccctaatggtctgtcagtgttcaagaggggacgatgatttatatttcatcttgaatggactggtttgagtacctttctgctatattttgccgaccgatataggaataattttgtgacaaactgcttgatataatacgtaagcgggcttcactgcagttaaaattgaaaactcattatctttacagattattttgaaatggaaatctgagccacagacggtgcttattattcaaaaaccaggatcggaggatgctctagatctatgtgagacaatagtcaggtttgaaaccattcaaatttcctgcaacaaaagtgatattggcttttggtgcatcattgaataaacttaatgacttcaaatttcctgcaaaagagagtgcaacgttcagatgacgttagtatttgggtaaattcccacatctttgaatactggtaatgataaacaaatcatagacacatgcgcattcctttttgattgttaaatatttagtccttcaattttctatttgctagatggttaaacttcgacaacaagcgcatttacgtggagccaagggtcaaacagaagcttatcgagaaaagttgttccttcaacgttgt

SEQ ID NO: 93458 - DNA, 691 bp, Eucalyptus grandis
  Intron number 2 from transcript Egrandis_v1_0.025995m (loc us Egrandis_v1_0.018755m.g) derived from phytozome v7.0 (c hr-ID scaffold_10; pos 8462884 to 8463574)
gtgagtttggaagagcgcatcagagccactgcagggtttgtccagtgttgctctttatcgcagcattccatagtaaaattatgatcgattgaatgagtgtttggttctctcaaatcatgatttctcataggaactggaccaaccatttactatgaatatttgactgttgctagaagaggcctgtgagatgaactggatactgttggagccagtttcaaatgcttcaagtttgcacttggatacttgactgaaattagtctcccttgccctaaccgctcgcatttcggacagaactgaattactacttgttttcctgctatgatttcccaattctgtgtctctattattcaaccattggctgttctatcacacatgcatgattgtgtttgcgtgatataccgattgcaaccttgatcttattgtatgacgaacttctaggataaggctggctcgtgcatgccatgattttgtgtattccggatacttcaggagtctctggttaagtttgccttgcattatgtagttcaaaatgttaatgcctgtaatgaggatgcaccctggttatctgtatcttctcatgcccaaccaattcttttgtttctctgtcggttaatataaatggactctgtgtgattgaaatttacaattgccatcagatatattggtggactctttgaattcgagtcccttg

SEQ ID NO: 93459 - DNA, 644 bp, Eucalyptus grandis
  Intron number 1 from transcript Egrandis_v1_0.029017m (loc us Egrandis_v1_0.027929m.g) derived from phytozome v7.0 (c hr-ID scaffold_1; pos 7935951 to 7936594 reverse strand)
gaaagttgtcgcctccccggctccgtttcttgaaggtaaaattcgatttcctttcttcgttggttcgatttcaagactgtatcttttgtttggttctttttttctctgtcactgttgagaaaaagaatttcgaagaatttgtaggagggactagttggtttggtttgattagttattgggtactgtcgtgtgaatcgccgtgggttgatgatgcttgtcggactgtcaatctgttgctcgtgggtaaggttggaatatgaagaatcgggtcttggaaattgccgattgtgcaagaattgctaccctttttagatagatgcagaaccttgagcttgcagtttcttttcccttgcattaaatgggttttcttgatttttgctggctgaaaaaaatcgtgtgttttttcgcttccttgtagtttttgctcaatatcctaccgaccacttgtgctttgccaattccagtggcctgctactcttgcttgattgcttatcaaagtgaaattcgaaaactttttgattttgttcatatggggtctgcctaaattcctgtccgaaaatggtattttgtgtcctgagttgtttctttttttctttggcttttgatcttgtagttttggacgaggaagaacttgtaacttggta

SEQ ID NO: 93460 - DNA, 732 bp, Eucalyptus grandis
  Intron number 2 from transcript Egrandis_v1_0.029144m (loc us Egrandis_v1_0.029144m.g) derived from phytozome v7.0 (c hr-ID scaffold_8; pos 64868576 to 64869307)
aggtaggtttacaattatcatttttgttttgatgaaacattgacttttgtatattgctattggtttttgacttctttttaacaatgagctctgaatgatttgtttcttctctttccggagattcagaaggcaaaagtggcatcttgttagtgcatcattaatatcaagaaacaatttaaagtgtattaaagacatgacaacatgtaaatgaccgtgtgcaaggaaaaacacattggaattgaaagattgattgtttctgtggctctttcttgaaatcaaagcagctaaatatgaactcgtactcatggcaccttattgtatatatattgggtaaattctttcttgatcttatcttaattacacacttagatatttgtgtggcacctagatgtctacatgtaccatagagtctaacattggctaaaaaatataagatatgcaacttcaaatggtgtgtggattaattttgcacatgagcttaaggttgatttagttcactcaaaaacatagccaagggaattgttgcatttcatgggatcctaccattcaagttgtttctttttatagtatatctgcttcttatacaagtgaattgaaggtcgagaaaagccttttctatgtaatgtgtttctgttctgctacatcattggcccctaaattcctgtcagttcctcattttagtactcaaaaattgcaggttagcctagcagctgtcgatataattcctctgtt

SEQ ID NO: 93461 - DNA, 889 bp, Eucalyptus grandis
  Intron number 1 from transcript Egrandis_v1_0.027807m (loc us Egrandis_v1_0.025463m.g) derived from phytozome v7.0 (c hr-ID scaffold_1; pos 31793090 to 31793978)
ctcacgagctcaaagccggcctccatcctctcaaggtttcgctctctcgttcgctcgcatcctacgctttgcaatgtgttcgcaatgttatgcgttgtttgatctgatgtgagttcatgtttcaagttcctttctttctgggttgggaggggggtttgttttctgattgaaatcactctagtggaatggcgtgttggtgaaagtggagatttttgggcgagtgggtttgtgttttttctgatccagcagtggttttacctcgagtgccatcggcacggcacgattggcatggcgtgtccccgatttacattgccttgagcgtggcggtatcagcttagttaattgggtgcgtttgaggaagtcgtggcttgacctcttttatatgcaagaagaaaatttgggttttctctgtcaaagtggtttgaatttatcttgagataggaagaggtggatggtgagtagcgaaaatgggtgttccctttgttttcttttctggtttagtttgttttgaattaccggtacattgagtttggtttgtccgtgtgtggttaagtgcattctggggaatatgtgttattggggagtaggtattgcttcctttatggagaatcctcactagaattggtacttcagaaagcagaggaagatgttgcgctacttatactttccacatttccatttcacccttccatcaagtgcaagactgttgtctggtaaattggtaatgttagcatgacattgataattaggatagttaattttgatgtgaatcaagcacatgatattgaaatggatgttgcgctttttatttaggaccaaagcttatcatttggtgttgcttcttgttgttgcagtacaagtttgttttctggtacactcgtcgaactcc

SEQ ID NO: 93462 - DNA, 330 bp, Eucalyptus grandis
  Intron number 2 from transcript Egrandis_v1_0.011905m (loc us Egrandis_v1_0.011890m.g) derived from phytozome v7.0 (c hr-ID scaffold_1; pos 3177679 to 3178008)
acgactcccccgtcctcgatctcctcttccacggggtcggttcctcttcttgcctcttctcctcgtttctactcttttcgcccccttctctcgattagtgtagggggagagagggtttggaagtgcacgtttgattcgttcagttcggtttcgtgctttgaccaagtgttgaattttgctggtggagtctttgacatgtggaagactttgcgtgatgcttatattgtccttgtctcttgttcggaaggaattattctaatggggagcggcttttatgagttttgaggggctaaagtttgtgcctttttggtcaggctcaagtccataggc

SEQ ID NO: 93463 - DNA, 583 bp, Eucalyptus grandis
  Intron number 2 from transcript Egrandis_v1_0.050054m (loc us Egrandis_v1_0.050054m.g) derived from phytozome v7.0 (c hr-ID scaffold_8; pos 51422138 to 51422720 reverse strand)
attttgtcaaggcttgcattctccctgttccggacgtacattgctttaattaagtcatgcttcagttttctgttcttcatttgttgcgggaaaatgtctattggggccaggaaaagcatgttactcaaaatatgacaagcaaatcagcactcctggaaatcaggttgtaacttggtgaccacctttttctattttgaagtaatcatgcaacactgctaaactgttcttactgaaatcttggttctagattgaacatgcttgcaaattttttgtttttttttttatcgagagaagtttacataataaacattctgacgatgaaggcaaacttatgacttgccaaacttgccttcttgaaaggcttagatctgttattgtcatgtcacattctttagcagctacaatgaggacaacgttctttcttcttagcttgatctttcatcctttctcttttaggttaaagcgtctgcttcgaacctagttcatgtttccatcatgtacttgatcaattttcttataacctgatcttccctttgagtcaacatcaaagatacttgacttatccgccgcatttcaggtctcc

SEQ ID NO: 93464 - DNA, 1010 bp, Eucalyptus grandis
  Intron number 4 from transcript Egrandis_v1_0.048498m (loc us Egrandis_v1_0.048498m.g) derived from phytozome v7.0 (c hr-ID scaffold_1; pos 28884949 to 28885958)
ctggtaaaataacatcttaccttgaaccacatgatcatatctgtttctgcattgccttagcagtttctcattctctggtctagataaatataaaatcgtttgtttaattttggagtagcctgaacgaactgggggttgaacttctggtttttagcttatctgaggatggaaattcttagactgaactgtcaatttgattaatttcattgcaactttttctttttccagtaactgaactaagtgatggagattcatccaaaaggatagtggaaataatctgccaaacgagctggttgaagtctgagcacagcagttgtgaacagattgagagggtcttgaaagtccacaacatgcaaaggaccctcgcccggttcaaagaatagtgagagatggtcaagatcagagccagcaagttatccaagaagcacccccgctgtttggctgatgggaacgagctcctaagattctatggcacggccgtggcttgctcgcttggtgccaattctcttgtgccaagtgtcaaacaactgtgttgatatgaattcaatattctatcaaacactcttgaggcagtcattagttggtccaattcctggtagagatacactagcagacactacttttttggtgcaccaccaagaggccatattcaacttatctcgtagtccagcggccagcaaagaatagaacaacatagattagtcccattttaaagtttgcctgctctctcatgccatgcccgtctctttttgcattgctcttggctcttgtttcatctttggcttggtacatcatttatctgtgcatgagatgctgttacagttgtagaaatgctttaaatccatcattttgaaggctaatatcccgagactccttattctctcacttcgttatgctgttaatatgagaggatgtatttcctcctctttttaaatccaagttacgagaattctcctgatccaagactgactcttcacattttttggcacaggctgtgaagtacttcttgg

SEQ ID NO: 93465 - DNA, 726 bp, Eucalyptus grandis
  Intron number 1 from transcript Egrandis_v1_0.008641m (loc us Egrandis_v1_0.006044m.g) derived from phytozome v7.0 (c hr-ID scaffold_10; pos 24488843 to 24489568 reverse strand )
ctcgggtacgcgagccggcgatactgtttttcttgttggtattcgattcggtcgttgattgtttattaaataccagtccacctcccatcagacaccatcttaatactttatagttcggttcgcgggtttgtttatcttgcaaaagctaatgacttcacgtaatcattagtcggttcggttcgagatgtatgctgcgttggtgaaggagctctccccgtatctttgtttgggttctaggatgagctgtgtacaaagttccatgctcgaacctttgtttgaatgtttgtatggtttgtttgttcctgagctagtaattggcaggcaaaaggagcattcaaagaacctctgtttatacaggattgtttgaatgtttgtatggtttgcttgttcctgagctagtaattggcaggcaaaaggagcattcaaagaacctctgtttatacaggagttcctctgattgttgtgaatgcatctaactgatgatgaaatcgcatcgatagcgtcgagtgttgtcctagctcgttggagaactagattggcctcgattctccaccttgcctttttcccgcaagtgtctttgctatacggtcgtttggtggcaactatagccagatcgatccttatcttgttcttgtgtcttcatttttcttcgttagccgttctcattcctttcctccatctctgcgagcagtttgaagaaattctgggcaaaggggcgaccaagac

SEQ ID NO: 93466 - DNA, 421 bp, Eucalyptus grandis
  Intron number 2 from transcript Egrandis_v1_0.035711m (loc us Egrandis_v1_0.033791m.g) derived from phytozome v7.0 (c hr-ID scaffold_8; pos 8403088 to 8403508 reverse strand)
tataaagacaggttggtacgtcaattcctgtcatctgaggttgatacagtttctgcatcttgctacattggatggtgaactttctaaatttgtcaccactatgtaatgagtattccaagatgagattttaactctttctctgtagtcgacaaggtgtttgctttcgattctgctggtgatgtgaatgagtttgcaccaaatgtggcgcctttgtggatgaattagaatttttgttaatatttcattttgattatgggaaccaagctgctgctgaaaaggtggggatgtgcaactataaaggggttcttgaagatttataaattagaggtttattttttgttaagatctgttatgaggttgggtcttgaagatttatgaattagaggtttatgttctgttcagatctgttgcgaggttggga

SEQ ID NO: 93467 - DNA, 873 bp, Eucalyptus grandis
  Intron number 1 from transcript Egrandis_v1_0.021664m (loc us Egrandis_v1_0.018942m.g) derived from phytozome v7.0 (c hr-ID scaffold_10; pos 27787995 to 27788867 reverse strand )
ctctgaaggattgccaggctcaagccgggtcttctgtaaatttctctttcatgctgacttacaagttcccattgcttgccgtgtagtctcgtgtgaagtccgtcgctttagagttatattcatgtattgagctttatttatgtattttatcagatacccatttgaatttaggcctcttaaacaaggaaaaactgcccttgatgcgtgtgcttaagggatgaatagtttcggtttaattccatttgatgacgcattacttgtatgttcctagagtatagagtgcctctggtgtgatctcctgcatttagcagtcgtatggtgtttcccggctggtgatggcggtccaccgataaaaaaagggccggaaacatttcggcacattaaccctgcatctatggggttgaagtttctcaggttatagtttgtgcaggccgcagtctgggtgcatattgtaatatgtcgtgcttgatcttaggatcattgagtctggttgaagatgcagtatagtcgaacaatctaattgcttatgtccttgatttggctccagttctagaaatctttgcttgtgttttaagacatcgtgagctcaccattgatgtgtctctaatctggctgggcattatcctctacggtgatcaaacgatcaacctctcattgacttagttctgccatctgcaagatttcattgtgctcctgtttttttattgtattcttgtgagagcttagtcttgcatggttgccctgctccaaagatatgtggaatgatcaatatcttgtgctatggcataacaatgatttggcctgttgtttaaatgagatcttttcctcctcctcgtaggtacattctccatccgtgagtgtgtataagggcca

SEQ ID NO: 93468 - DNA, 670 bp, Eucalyptus grandis
  Intron number 1 from transcript Egrandis_v1_0.018595m (loc us Egrandis_v1_0.018595m.g) derived from phytozome v7.0 (c hr-ID scaffold_8; pos 36238634 to 36239303 reverse strand)
gcgagtgaagaaactcgctagaaattcgtcgtcaggtgccgtagtagatctctctctgtctctctcttgcattccttgcttctttctgaatcttggattccatccttggaggagagaaaaagaaaaagtttcgcttcacggcatcactccgagttgtgggttttacatagatttcggtctcttgtccttgacttcataagtgttgctaaatcgctcttgaactctagtgttcttttggcatgctactgtccattgtggtcctgttggttgcttcgtatttatcttgttctgcgatcagctcatcgttatatgatggggcggttgatgggtcattggcgaatctaccgtatttagctgtatagtgatcgtgggaatgtttctgtgcaaagtgactggttgttcttgttatggggcagttaatgggtcattgacaaacctaccatgcttagctgtatagagatcaggggatgttgctgcgcgaagtgactggttggtgttaggatctgtaggaagcttttgattgattcgtacattcgaaagagaagagtggagagatcgtagtatgtaatagaggaaagttccactagtgtgaatacacatgttggtctgtgcaagcaatgggcatttgtttagaataatgaaattcggcacgtcaattgtccaggttcta

SEQ ID NO: 93469 - DNA, 515 bp, Eucalyptus grandis
  Intron number 1 from transcript Egrandis_v1_0.022256m (loc us Egrandis_v1_0.014847m.g) derived from phytozome v7.0 (c hr-ID scaffold_8; pos 55021656 to 55022170 reverse strand)
cttctcctctgctgctcagtccctcggtttcgcaggtagcgcgcttctcgtccgtcagattttttttgtttattgttgccgagggatctcgacgtggattgtagatgccggagcgatggttctttgttagcgggggcttttaaaggttgagtttgatgtccggatatggttgtgtggggggaggggggcgtttgatgattgatgaagaattctgagtaactcattcgaggaatgtgcacctggtcaggattgtgcttgtttaattgagatgtcgtatttttatcgttttcatcgtgtttgctttgtgtatttgatgttggagacgtgattctgtaataggattaatcacgtcgagttgcttcttcgagtcgagttgcttcttcgagtcgagttgcttcatgttcttaaatgttggttccgggttgaattagtttgttgatacaaaacggagctgcatttctcttggcagtgaaaggttttgatgtgattgtcgttggaattcacagggccggttc

SEQ ID NO: 93470 - DNA, 898 bp, Eucalyptus grandis
  Intron number 3 from transcript Egrandis_v1_0.020202m (loc us Egrandis_v1_0.013300m.g) derived from phytozome v7.0 (c hr-ID scaffold_10; pos 29708239 to 29709136)
ttacctacgagtctacgtgcaggtgatcaacacattaccctttttcttatattattttttggattggggtcttggttatagcatttttgtatgaaaattccatgctcctcaaaatctatgtgactatcacctggtttatttcccaaagatgtaataaatagaaatgttagtttcttttcctaaatgatgcgagaaccatccagagcaagtctatggttgctgaaaaaccttcctctttgaatcatcaagattcaaaagaaagttgttctgttttcttgctgaggtgtgatgtctatggttatctagagcaagcaaatgctacaaacatcaagtataaagctagccatcgagaaactgattggatcttttgatcaaccaaaaattgaaagatattttgaaggtcatgttttgtacctttgccctcttagaaagagttgcagcacttcttgactgctagtgcctacatctcttcattataggaaatacttaatcttgaaaatatcttcaactttattaccaaaaagcaaaaaaggcaaggtgagttggtccctgacattccaggatgtgtacggagttcgcaccctttgtgctatattggtagttcaaaaaatgcgtcacattttctaacagtaatctctgcaattgatccacccagattgcactgctagatgatgttgctttatggtctgagaggccataggaagttgggctgtttagatatggtttttattgattagtatgaaaggaatataatgctgggagtggaaagttatttatgaaggagtgtgaaagattgttctcttgctctgatatggtaactaagcagtaccttcattgattagttcttgagtactgactatttttttccttacagagttctcgtagaacttgccattcc

SEQ ID NO: 93471 - DNA, 550 bp, Eucalyptus grandis
  Intron number 2 from transcript Egrandis_v1_0.000858m (loc us Egrandis_v1_0.000355m.g) derived from phytozome v7.0 (c hr-ID scaffold_10; pos 37438963 to 37439512 reverse strand )
caaccttcattaatatttggactgatattctacaggtaaactagcatccacctaaatatgaaaaatgtaaaagccaaaaaacgcaacttcatttattttattttatttttaagatcctaatcaaggtatgatacttagattcacactgatgggatggattttgatatgtgcttcatatgactttgctctctcacctcaatatgtactttatatggcaaatactgcaatacccgtgccactcaattgtagttgggagagatgacaggtagttcttacataattgatatagactttaggagaaccacaacccaaaagctagttatttaagtgggagaatgcaataaaacataaaccaacacgtcccggtcccatactattaaatcccataacttgcaattacgattatattaattttttattaaaattatatccaataaattgcttgaatcttctcattagtttttttgtttaaccttttttttttcttttctatttgcttctttttatccctgcagggcttcttgaattttctgcctctacttcctagtag

SEQ ID NO: 93472 - DNA, 648 bp, Eucalyptus grandis
  Intron number 3 from transcript Egrandis_v1_0.006499m (loc us Egrandis_v1_0.006499m.g) derived from phytozome v7.0 (c hr-ID scaffold_8; pos 58316488 to 58317135)
ggccaggaggaaattgctatccctgttcattcaacgtacgtcactcacgtcttactttttcttctccataattcttagattgtaaagccaatcaaacagcgagatgcattttgcttctgattggtggctaacttgctacaaattgctctgtaattatacctatcataaatgatggtgggaaattatttcttttttcctttttcttttaaatctcttgcggtgacttgctttggcaatgaagttaaccaatgtgtacattttttagaaggataggagataactgcagtagctactattattaagacttgaaatgccactttataacttgcaaaggaagaaagcagggaataaaaaggaatgccctgtgatctattagacagcatcattaatctttattagcctcgtagccaagtaatgtaaaagttctatatctaatcttagtatgccgcagatagcgcaatggtaagtttctgtttcattggactctagcacaacaactatagcagtttagtatggccgagttctatccatgttttccccagttttggattcttggagcaacttaggtgttgcagtttaaggggtgattgtgcattctggagtctggatcttacaagcatgttattactcttgcagcattgaagcagc

SEQ ID NO: 93473 - DNA, 394 bp, Eucalyptus grandis
  Intron number 1 from transcript Egrandis_v1_0.031706m (loc us Egrandis_v1_0.031706m.g) derived from phytozome v7.0 (c hr-ID scaffold_1; pos 21790473 to 21790866)
gagatctcgtggtaatgcatgacttatggcctcttgtttgagttttttacatactaattttttggctagaaacctgctgtgcacgaatcgattcattcaagcgtttcgttgtcggggatgcctgctcaagtagtcactttttactatgcttttggattaacttttcgatccgttgcacatatagaggagcctgcacactctatgttcaacggcttaagaaaagaactatcagtagagtaacattatttgcatgattttcatttgagagtgattcaatgtattacattgtggactcgggaggtttagcctcataggaaattgagggatattttctcagtttgtaacattcttatatgcagacggaccggctagaagtttgtttacaagctgtgat

SEQ ID NO: 93474 - DNA, 858 bp, Eucalyptus grandis
  Intron number 2 from transcript Egrandis_v1_0.020695m (loc us Egrandis_v1_0.020243m.g) derived from phytozome v7.0 (c hr-ID scaffold_1; pos 37215122 to 37215979 reverse strand)
ccgttcgattccgtccttgcatcgatatacacaaggtgctcccttttggcaagggccttatgatggtcctgagtttcaatggagtagcttcctttggttgtttgttgttagtgcacttcatgtatgttcagagtatctgttcttctaagaggggcgaaaaagggtggaaaaacattgcggggggttttgctatcaaagtctatctttatgagctttcatggagtggtgcttaataggtgtaggaataactgcttcggaaatttgtttcggaagtgctgcgtcgaaatttgaatgggtattggtgggtctagcattgctcttcaggaatggtgaattcccagctggagactgcgtggttgtctccgaaatgcatctttgattttgcataagggtgttgttgctaccggaagtaaattttttttcttttgacttatctgattttaggagtcaataatggctaatttgtttctccttattctcttcaaattgacttagttcatcggtcaattgttccatccacattttcgcatctttaactgctccatatgttgcatctatgccaagagcttccatgagaataagttccatttgcctctttaagttgcctcagaagtcaattttgcttaaatcattgtttgacctgttctgttgcctgttgtttttcattgggttaagaaggccagtgctatggttgaatggaggatgttgcttgttcctttcagttagatgcatcatttgttgtgaggtcttccatggacacaatctgcatcttcacttggtcattgtagcagccagttgatcaaattcaatgtattgttatcagggtaaagtaaaacaaattgtagggtcgaccctttg

SEQ ID NO: 93475 - DNA, 607 bp, Eucalyptus grandis
  Intron number 1 from transcript Egrandis_v1_0.003825m (loc us Egrandis_v1_0.003825m.g) derived from phytozome v7.0 (c hr-ID scaffold_10; pos 21149154 to 21149760 reverse strand )
cctgcgcttcctggtaatttgatttggggggagggggctttagttgttttccacggatgttgtttctaactttcaatgcgtttattttgaatttgattttgctgtttccgggtgggaaatggaaatccaacttgctgaagttttgcggacttcagttcgaactgatttatctaactatgtgctcgtggggttaagttaatgatgttataatctgtactacgtattctgattttgttgttattcatttggtgtatgattctgcaaattcgtaattggctttatgcttatcactagtaaaacgagtcagttatagtggctaatatcaagaagtatatgcagtcaacggtgttctatacttgtttagacgagagctgtgcttatactgttgattgatattagacggtgttctatactaggttagatgataggatactcctctgattttgtgcaatatattcaccagtggtgtctctgcaaatttcgatgaccagttagttcctgcagttgtcatatatgtcgattggaatttccaatctttagagcatctgttgaagactgttggttactttcggacgacattcttataaatagaatttaattgtcaggg

SEQ ID NO: 93476 - DNA, 545 bp, Eucalyptus grandis
  Intron number 1 from transcript Egrandis_v1_0.022024m (loc us Egrandis_v1_0.021287m.g) derived from phytozome v7.0 (c hr-ID scaffold_10; pos 10666595 to 10667139)
ttccccctgctcagcatcgtattctggcgagataggtgagcgacgtgttcttttagcgttcgtgctgttttgtcccgcttaggattagattgagatgggaatccgcagctgcggggacctcggtagctcttctgtttttctttgtccctggattttgagtactttgcggccgatgaacttgaccgatcgtcggggctcttgatcgggagcgtcgatggtctgcgtctcggaatatagtttgacgaaggaaatccggttgatttctcctgtatctttttgtccgatcgctcgttttctacgagcatctgcgatcatcgcattaaatagcgtcgaggaaattgtgatcgaacggttgcctgaactctagttgtagtgttctagttggcacctatctaaagcgaggatagaacgatcctgcagaaaaaaggctgatatacacggcttccggagaagcagagaagtattttgttgttgttgttgtgcgcgttttgttcggcttatttattcttcatattcattttgattattatgcagaaacattgtcc

SEQ ID NO: 93477 - DNA, 837 bp, Eucalyptus grandis
  Intron number 2 from transcript Egrandis_v1_0.022024m (loc us Egrandis_v1_0.021287m.g) derived from phytozome v7.0 (c hr-ID scaffold_10; pos 10667176 to 10668012)
tcacctcagtaagtaactcgaaaacagtgcgaaagtattggacatttgaaccatgaaacacagatgtctcttttgatattaggtgttggtgcctattggatcctttaagctcgtgataaaatttgtggagaagtggccttccatctaaatttacttcaattgttaatagagcttaactgccaattaaaatcagtgtttttttccctgtctttgttgagtaatgaatgccttcatagtggccattttctcttccattgctaattgttggcaataaacaagcatctttcaattgtgatgttgaaaatcaatgtctggatgggaccatcctttctttatatattgaaaatctgtagcttggttgacatattgtgaaggcgttttgtcttttatttttcttttctgtttaccaactattttctgcaacatgcatcttctgcttacgttattcagttgtaagatggagaagctggtcttctgctgtggtcattcccacagcttcactgagatttactatattgcactcatcagtccttccacattttttgtcccctctcatgtagatgacgtacaaatagcagcctaaatgtgatgttctgtcgtgatttagccctttacttgttcaaacgttttctttgataggaatctcaataatgcgataatgagattttttaaattgttcttcaaagtatgaagtgctattaaagctacttcacctaactagacagtagtttcaatagaagcatgggtgtcatttatagttcgtagagagtacaaaaagtgtctccacatgtatcttgtctgatgacatgacgcaagtgcaattttttctacagtctg

SEQ ID NO: 93478 - DNA, 468 bp, Eucalyptus grandis
  Intron number 1 from transcript Egrandis_v1_0.007661m (loc us Egrandis_v1_0.007484m.g) derived from phytozome v7.0 (c hr-ID scaffold_1; pos 24690207 to 24690674)
ccaccgtctggctcgcttgggacacgcagagttccgtacgtctctctctctctctctctctgttttgtgtgatttattgcgtttccgagggagttggggaatgacacggactgaagtaaagttagatgcttgatagtaaaacggagtggttttgtgcgcgtgggcgtgtttggtttatgtctgatagtgaagattgcgatagattagcgggaggaaactagactagagactgaagaaattattgtagttggagatcattggttaaagaatgagttcctctgtgtgctctgttgaagctcgagttttccctaataatttccgagcaagtacgcctgtggcaccgctattgttcataatttcttgtccctgctcctttaggttctctttagccaacagatttgaattttctaatgaatggttcttatctttctgctttttcttccccatattgttggaaatgccagcggt

SEQ ID NO: 93479 - DNA, 401 bp, Eucalyptus grandis
  Intron number 1 from transcript Egrandis_v1_0.014394m (loc us Egrandis_v1_0.014394m.g) derived from phytozome v7.0 (c hr-ID scaffold_10; pos 13490309 to 13490709 reverse strand )
tcgcagggatcattcgacgggaccaggctttgaaggtgggttcagcttggtttaacccaagatccgattttgtttctggtcttctcttctgtcggctgagttttttttcttgaaacttttcaatctgcttctataatttgatcactttcttggtttttgataatgcttttgttatttccttaagtgctgtgctttttttaatggagtctgccgcggaaccttcccctcccagctcaaacagctgggaatgtctgtttttattagtactactaaagaaacgacccctttatttattgtacccttctctttataacccccgttctttatattcgagtcacttgtaacctctgtcccattgcttttcagttcgacttttttcccctgttttctgggcgtgcaca

SEQ ID NO: 93480 - DNA, 512 bp, Eucalyptus grandis
  Intron number 1 from transcript Egrandis_v1_0.050801m (loc us Egrandis_v1_0.050801m.g) derived from phytozome v7.0 (c hr-ID scaffold_8; pos 34701297 to 34701808)
aggacatcaataagcctcccctcaaaacaattgaggcaaacccccccttttagaatatttaaataataaacaatgtattcatttaacagtttaagttgaaatacttgtcattggtcccacgaaatctaacatgatattagagctgatgatctttggttcaaatcttactagaccccatttacctttctaattaaatttctatgcttagtctcatacccactcgtctctttttgcttttgcttttgagaaaagagaatgttgccttcttattcccctgaatttgctctgtttaagagaccttggacatcaaactgtcaacatcatcatgagaaaagaaaaataacttggaccagcgctcctgaatccatcaatcgcatgctgcactaataatataactaatttcatctgctaaactacattttctttgctaaccgaccctggtttcccctcattcttgtctctctgtttctttttctttttctttttcttttgcccttatttgcagagccctg

SEQ ID NO: 93481 - DNA, 402 bp, Eucalyptus grandis
  Intron number 1 from transcript Egrandis_v1_0.054775m (loc us Egrandis_v1_0.054775m.g) derived from phytozome v7.0 (c hr-ID scaffold_8; pos 54489338 to 54489739 reverse strand)
ggacttgcaaagcatccccaacaggtgattgcctctatcattcctttgatgtgccttgtatcattgaaacttgatgtggttcaattggtttattttctagattcgtgttagttttgttgaaattgaattttatgctattgaaattatactataaaaatcacataaccaaacaacctttttttttttctttcctagtttaggtcattcaataatcatgtgtatcgatgctaattcatctacactggagtaaatccttatataatacatttcacttaggtcttcagttttcactttgttcttgttgaaacatagtttgattcaagacaattttcttactcattgccatttgacctccaacaaacattagggaagaaggtgagatcgcgaaaacagttacccagg

SEQ ID NO: 93482 - DNA, 820 bp, Eucalyptus grandis
  Intron number 5 from transcript Egrandis_v1_0.026856m (loc us Egrandis_v1_0.023200m.g) derived from phytozome v7.0 (c hr-ID scaffold_8; pos 68179181 to 68180000 reverse strand)
ttgctgaatctccctaataaaggtatgagcttgaagacaatgtgacactatctttgttctagtgttttctggtaatcttttaattggatgttttgatgctaattatagctactaatttagtaggtctttagtgtgattgttccttttagccttctgactttctctttcactagaatctgaaatgagactttttatttattgtcgagcgccttaaatcttgaaaacatttaggacacttctggatccgactttcttttttacttttagataaatcttaatcttgcggccaaacaccgacttttttcaccatttaaactgtcaaatggattgttaccaaacaatcttgctcaagtagtcatcagatctcttaacaaattcaaatttaaaataattttacttggcaaagaatttgcaaagtacaaaataaatgagctctttgtaagtatgaattcagaactcatccattaaactaacagataggtgctcacttcatacgaatctggtggagcaacattctgcctgtatttttcacatgataatttgctcttccaacagactcaacttgcatttggagttgtatatttcatcaatgtaaaaaaaattctctttgaccagtttgagctttttgaaaaggaaaaaaaaaaaaaaccatttgagcttctctaaatgcctgcatttaattgtttctctcttctaatgcattttgcctcgctggtgttaaagtctgtatcatattttgcacagtgaaattgctaagcttggaagtttgtcctatgctgttttttttatgttacagaaaagccagtgacagagaggtttc

SEQ ID NO: 93483 - DNA, 957 bp, Eucalyptus grandis
  Intron number 2 from transcript Egrandis_v1_0.002781m (loc us Egrandis_v1_0.002781m.g) derived from phytozome v7.0 (c hr-ID scaffold_1; pos 39150815 to 39151771)
cccgccgggacgatccggagactcgcgaggtccaggtacgtcttcagatctccactcgcttcgccttcgccccccgctgtaggaagcccctccgctaggtcgccagagtagagaagatgaagctggatcggaggttgagcggatgaagcgttgcgcgttaggattcgaacgaactcttgcggcggagtttggatttggtgttctaagtttagataatggcgtgtcgcgtgcgattgagctggagagattgctcgtgttggctgttactcggtgcttttgagagatttgcagcgacgcgtgcgatgtagagtggagttcgagatgatttcgaacttgaggagctcgacatctgtagtttctatctttagaaattgcggtaccagggatgacggcaatgattggttgatcgatgaatgtattagcaatttaccggatagaaatgaggttgcaaggaactgcctagctcattctcttcgacagtaatcgttggagcttgatcttcctccttttcggagcaatattactcatacttcttctctagccctgagggcagaaactagatgaagtattagagtccatatttccactttattttattttattttaattaatgacgttcaggagaatgtgaattatcgtttgtagatacaacaatatctgattcagtctgagaagatacaatcaaatattcaggatagggatagaatcaaatatgacagaacgcctgtcttcgttaatgttctctgtagcctaaaaatggaagtgttatggaaaaacttctggaataagctctcaatctcttaaggcatagaagctgaaaaatggatagtatcgaaagcttatcgctcaaacttggtgttgatgacgtctactttttgctggctttttacctatcatgatgtaatgttcagcttcaaagattcctgagacaataactgtgtgtgcagttctttggta

SEQ ID NO: 93484 - DNA, 733 bp, Eucalyptus grandis
  Intron number 2 from transcript Egrandis_v1_0.021596m (loc us Egrandis_v1_0.021596m.g) derived from phytozome v7.0 (c hr-ID scaffold_8; pos 17485970 to 17486702 reverse strand)
gggcgcgttaaccccagacgattgttacaaaagaggcgagtcctttttttttttttggttccttttctggattacgctgttgcggttgcggttatggtatgttggtttgtatggagcaatgtgtttgttgcattgcttcattgtgtactagaagtctgcttgaagcgtgtgagggagtctggtgaagttcggactcgccttacttgcggaatttgatgtcgagtaactcgactacagatcgtaatcttgaccggaggcagtgtcgctgttttgattttctcgactttgagtttggttcgactcggttgtcacaaagaggttttgatgtaagctcccagcatgagctcgaactagagctatcacagtaaagtgaaaaccagaagttaaatcattttcacagttttcattacaaatatagggcgccaaagatataaaagaatgcagcaacttaaattaggctcttgagatacttgattgaagtattagcaagcccaagcttttctttattcggtactcgagtcgagttgagttgatgtagctagcgagtctggatttacttgattaagttaccttggtttgtttggaggcccaagtcactctgtctacaatcttctgaagttgctttgagtgagctactattcttctgcttgtattctgtagagcggtgttaatcttgagatgactttgttctatttcagagcaggagttgtgacgtgtgctactactgaagaaa

SEQ ID NO: 93485 - DNA, 407 bp, Eucalyptus grandis
  Intron number 1 from transcript Egrandis_v1_0.038202m (loc us Egrandis_v1_0.038202m.g) derived from phytozome v7.0 (c hr-ID scaffold_1; pos 1249858 to 1250264)
tctcatatcgaaaagttatgagtgtgtgacgattattttttatctattcaattgatgaaaagataagtgaaaagataagtgcgtatttgttcaattgaagattatttttattttttattacgaatttacagttaaaaaaatgaacagctgtgtcattttgaaacgatttgttcacaaaaggtttcgcttttttattaagaacggttctagatcaattgaagtagctgcgcaatgaccgctcactgttcttcttataaatatgtcctgaaaaatcgacaccttattcaaagtttccattagcaccgttcctgcctgttgtttcttcttgccttgctttcatatttacccgcttccttgggcttttgagtcatgaaactcttaagcatttgtttcgtggagttcctatc

SEQ ID NO: 93486 - DNA, 881 bp, Eucalyptus grandis
  Intron number 2 from transcript Egrandis_v1_0.029047m (loc us Egrandis_v1_0.028995m.g) derived from phytozome v7.0 (c hr-ID scaffold_10; pos 28582265 to 28583145 reverse strand )
catcaggacgatcaggagggacgtcgagttcctgggtatgtcgcgcgccgccctcctctctttcgtgtccttgtcctttttttccgagtttgaattgaagatgcgggcttagggtttccgaaggtgtgttcgcgacgtctatacgtccggttataatagagtttcaatccgtttcggcatgagctgcgtttgcgacactttgaaagctattaggctatcggttagttgaatgcctatggatgtttatgaggattgtggtttggtggtgggtctgttggaatttctgatgctccaatgggaagtagagacgaaatatagataagctaactgaggcaagcttcaactggatgagcttattgatacccgcggcagcaactggacgggacattgtgtaacactgtagttgtaatttgatggttttgtgaagattgcctgtgctgaagtttcctgatgtgtaatgggccatctttgggtttggtgtcgctatgataatggaggaggtagagattctttagaaaatcctcaggagtgacttggctcgtttatttcagctcgaggttggctgagtttatataggggaattttgctccttttgtatatatctgtggtctgcagtgaggaccttaatcaaagccggcacagtggaagattagtgttgttatttctgggttgcggggtatgtctaaggtgaatgtctggtttaagttttggtgtcttttgtgcccatgtgctttgaggtcgcaaggcttcatcatgtttctctgcacttatgaatcccctatttttcgagagacagacttcctttgcatcaattttttttttcttcaaaaatctctgctcatcccttaaattgctggaattttccttcaggatcatctcgt

SEQ ID NO: 93487 - DNA, 959 bp, Eucalyptus grandis
  Intron number 1 from transcript Egrandis_v1_0.022026m (loc us Egrandis_v1_0.018216m.g) derived from phytozome v7.0 (c hr-ID scaffold_1; pos 29764185 to 29765143)
gctcttctatcgaatcgtcgccggttaaggtaagcgcgtcaagctcaatttgtgctttttctttttgtttttctcgaagtttggatgccgatggttagtttctggttgattgtttactgattagagaatcaattcgttggaaaaatttgatcttgtgttgatcaaaggtggccttgccttgccagagtgccgctccattttcttttccttttagtggaaattcagtttacacacctgaaatatttggtttggtggtgtggttgactggatagagtcgggcattgttcagtgtgcatggtgtgcattgcaattctgccggcatgttctctccgttatatattggtatatgcctttgagagaactgctgaatatgagttgatgcaaattcatgaggtggtttaggttaacacacctaagttgtcatgttcggaaggggaaaaaagaggaaccaagcattgcaaagaaaatgcaggctgtccaaggattcagtttagcaaaatgaagcataaattatcgatggttttttgtttttgagggcattacgtgatggctggagagaacagttcttgaattgaaggaaattaaaaagaaaatcaccaaagtatctaaatagaaaatgaaaagaatgggaaaatctggacaagaagaattgatagaaaaggttggattaatggtgaatgtgctgatttctggccttagttacttatcactaaatgatttggaaagactacttagattcgacctatgaaagtaattgtcctagctgatgaagacctgcaagtatttcaaccagatatgttttcagtggccaaacaccttggtatactgatagaatctgcagatagaaggtttattatgtggactttttttgtggatttgttgcatgttatggctctgacgtcatttctttttgggcatttacaggaagagccttctggctttttgagcttgaacagagt

SEQ ID NO: 93488 - DNA, 899 bp, Eucalyptus grandis
  Intron number 2 from transcript Egrandis_v1_0.025045m (loc us Egrandis_v1_0.025045m.g) derived from phytozome v7.0 (c hr-ID scaffold_10; pos 31000205 to 31001103)
ttttgttcattgcaggcagattctcctcgcaagaagtaagcttcgatccgcctctttttttttttttatctccgtcctttgatctgccgacaaatttaatttcttgatgacgtcgtgcgtgctgcgtgctcgcaatagcggtgtcgatttggcatgtctaggtcaagaattgcgcgtcttaagtttttgtgggtctccatcgagacgtccggtgctcatttgtggctttaaacgagtgaatgggtagattacttttttcgtttttcgtttgttactttgtgagctgatgttccggcgagagcagtcgggaacctgtttttccttcctatcgatgcgtttcaacgttgtcatcttgatgtccacggcaagaaattagcatttggagctttacatgccttttcaggtctactgggaaggcacttttccagaatagttggtgtttaagctgctggatttaattgtttgaatcataaaattcatgtgtccggtctccctgttaatgctccatatcttgaaacgtatgtattaaggcaagcccatctcatcaaaagcgggttatactaatattaggtatatcacgaacgagtttatgatgccttcaagaaaattctttgcatagtttatgatgccttaaagaaaatgcattgccagtgttcgctttatatagtcttgcctccctcacatgtcaataacaaggagtagagaccttatagcggtaaaatctttttggctacttgggcaatgtgcattcatcgtgctttggtcattcttcgtgctttggtcaaatgatggttcgatcctcaacatggggcaagacgtattgcttcctttgatatgttgacttcatatttgcttgttgattaggtattcaagatccccctcaccttggagagagcaat

SEQ ID NO: 93489 - DNA, 307 bp, Eucalyptus grandis
  Intron number 2 from transcript Egrandis_v1_0.043983m (loc us Egrandis_v1_0.043983m.g) derived from phytozome v7.0 (c hr-ID scaffold_1; pos 35352011 to 35352317 reverse strand)
tgttaaaagaggtaaacagaaacccacagcaaagagtagatttatctcgaggccatcaatcaaaactgattgtaaggtgaaaattaatgtgattgtggatggtggtggatgatgcactatatctcatgttcttttggaccataatcatgctctaggtcccaaaatttcatgatttcaaagatctggtaggaaattggattctagttcaaagaggagagttgagttgaatgatcaagtgagcataactttagacaagaattctcactctgtagctattgaagtgggaaaatctgagaactcagcattt

SEQ ID NO: 93490 - DNA, 823 bp, Eucalyptus grandis
  Intron number 1 from transcript Egrandis_v1_0.054544m (loc us Egrandis_v1_0.054544m.g) derived from phytozome v7.0 (c hr-ID scaffold_8; pos 4389713 to 4390535 reverse strand)
tatacaaggtctgttttctgttgctcgtcccatattttccatcttaatctcaacctagtcccagaagagtgatattaggcacccattttcatcaatcaattacagcttatgcttggaaaagtaaattgataggtacatgctgggtatagaacagggagatcctagaaatttctcaagtcatgtatgcgcttcatgactgtacctatttaagatttgttttctttttccttccatgtcttgaatttttttcttaccgagtacaaattttttgtacctatttaacattgaacaatcttttggaatgaagacaaatttttattaccgagtacaaagcgcaaaataacatggtgcaagtgtataatgtgtctctgtataaacaaataatttatttctttttaaaggatatcgaacctttacgagggtctggattaagctaaaactagaacttacatttctacgtgttttatttggtatcatgaaataagaagttatatcaatctttttgctactttatcctatggacttagcaggtaaaggaaagagaacttttgaggagggtgaatagcattctggatcaaattaaaaagtagaaattaaatgaagattaaagaaaagacgtgagagaggtagccatgcatcaaaatcaaggacctatagctttcaaaatgcacgacttttcttttgtttttgtgacacatgaaatctcaatggaaatatttagtgtcatgtcatggtaaaattgctctcagaatgtattcaatttgtggttgactttgatgcgcctacagggatccggcaattccatccttgcctgaaacagtcg

SEQ ID NO: 93491 - DNA, 860 bp, Eucalyptus grandis
  Intron number 4 from transcript Egrandis_v1_0.019919m (loc us Egrandis_v1_0.019919m.g) derived from phytozome v7.0 (c hr-ID scaffold_10; pos 12138507 to 12139366 reverse strand )
tttgtggagattggtatatccaactctcttttcatttcattctccaattgtattgttcaaactagatcagcattgtctgtgttgctgatgatttgctctagtgttatttcaatccacattggaagcctgtaagaatgttttgatcaagttcctcaaatatgaaaagaccgacattttactcatattccgatttccaaatgatggacactggttatgtcctgctaactaaagatggttgcactttcactgtctagacttttcgtgtatttgcctttggtcatcgatcaagtaatggcttgccatcatgtataaaaaccttctctgtcaaagttatggagatttaagtaaaatgaaatctttttgtaccatcccatttcataatgacttcggttcaatggtaggaaagtatctagtgtgcagaagcttgtcgttcatatgactgcaatatcattgtaaagtttcccttcccctaataagatgatctgattgtttttccagtagtccagtttctctgaaccgtcttcttctttatatgacaacactatcagtttgatttccacgtatcaggcaaccgagcttatggtgaatagctcctttttttgggttacaaatagctgtaattagatgacagtatgtatattctttctgtttcctttaactaattctttttgtagattgctgtgtaaatgctcatggaatcttatggttgagtttagcttagaatgtggactttgtagtctgtgtgctgcactctttcgttgcctatagatgatgtacttagctgtgagcaattaatatgatccgcagtggtgtttttgtgcttgatttagggagtactgaagaatactggaggaggttgg

SEQ ID NO: 93492 - DNA, 704 bp, Eucalyptus grandis
  Intron number 1 from transcript Egrandis_v1_0.000149m (loc us Egrandis_v1_0.000149m.g) derived from phytozome v7.0 (c hr-ID scaffold_10; pos 31772233 to 31772936 reverse strand )
gcttggcttcgttcgcggaagatcggatcggccaggtgagttcgatcgcgatcagactgaaaactcttcttcctcctctcgtgttctgtttctcgaggaattgtcgatgctcgggagggcgtgcgattcgtgtactctttctttgtcgattgatgtgatgttttttttttttttttggagttttgaagtttggtttgagtcgtgtcggtcaagagcagcgtgttttgatctcgttcgtagcgggtgagcgtgagatgatttctgtgagattccagcttctcgaaatttagtttggccatgcgtttgttgttcctttgccagttccatctgaaggttctggcttctgagttttctccccgccatatgtgttatctagtctgatttgtcatttgattcaacttccatgcagtgcgtcagctaatgaatatgtgcagaattgcttgtgtcttttgcatgtcgaatgggttatcgaagtaaatattgagtttgtttagcaccgcagcgtcttcgagaactgatagcttcgactgctctaggggcttgatgttgtggagctgtaccatagcatcgaagttgcaagagattactcagattggtctcctgatatttttatttatctatatctcatagggggtcgtaattatcttttacttgcataatacttcgtaggcctgccatctggtatcctagttctggagatcagc

SEQ ID NO: 93493 - DNA, 862 bp, Eucalyptus grandis
  Intron number 1 from transcript Egrandis_v1_0.043316m (loc us Egrandis_v1_0.043316m.g) derived from phytozome v7.0 (c hr-ID scaffold_8; pos 20033368 to 20034229)
gaagaagtttcctttcaagcaggttatcgtgataggtagccatcaatctctctgctaattctgtccagcaactctgcatgcccgatcagaaaatctttgactattgcacggagagatacatttgttaatgcaaaattatgcatccaatacttgaggaaaaactccagtgtgaaattatttctttttcttacgcgtgccattttgcatactacacatcagaccgttgtacttgccttacacccatgtacactaagccttttttctcttcgcatcttatctatttggcaacttcccgtctttgctcaaatgctccagttgacgcacttgatctctctgatgattcttccttgcttacagattgatatactacacatgaatctcatttgctgtttctttgtattgtggcttcatgcaaatattcatcatttactttttcttcatttcatttgcgacatgacaatttaagtccatggtttattgtcttctaagctaagttttgtgattgaacgctatcaccactagggatgttgcagtgatgtgacagtactcctttaggattggcaaagaacacaagaaattgcaggcagcaaattggaaaattttagatggcttcgttgtgaatttactttagagaaaagtgatgtaggagggagttttattacctacttcagcaacctatacataggctgacttgggaaagcgtgaaagttagcattctgacatgctccatacttaggaacagtataatttaattggtcatgtcaggcaaattattaggagcattttcaatagacggaactagaatttgttatctcccagtttccttaaagacttcatgttttatttaggtgctggcattggt

SEQ ID NO: 93494 - DNA, 681 bp, Eucalyptus grandis
  Intron number 1 from transcript Egrandis_v1_0.019085m (loc us Egrandis_v1_0.019085m.g) derived from phytozome v7.0 (c hr-ID scaffold_8; pos 11807758 to 11808438 reverse strand)
gtacgaggcttgccctttctgcaacaaagttaaaggttagctaccgggctttctctagaatctcttaagaagctagaatagttcagcgagggaagcttttcgccgtttcggtacgtgctgcttcttgtttgcgtgggaagtaatcggtgttctttggccctcgaaggctgagcatgcgaagttttgctgtaagagatttagtctagtggtgtgtatgcactgagagaggcatcttggggatgtacgctttggctgatccctctctctggttcgaatcagagtgtcctccagattttgttcgctcacagcggtttctttgtatttgtagcattccttttttcctcttgtcatcacaaagggaagttgaggcttggggaaatgtaaaatgataacgatgaagttaatcggatctcattggacaccgtaaccagtatctacagaatatgtaggaagatagttcttggccaggaaaaccaaactaaagtgagagaatttaaaatgctgaagtgtgccttcgcttgtgctgctggtattacggcatctctcatgattgttagtacgtcagttgttgtccattattaatctcgtgtgtgggtatcattaatttcattatgatgttgtttgattttcttttcttttccttcagcattcttggattactacaaaataccgtacaaagtt

SEQ ID NO: 93495 - DNA, 786 bp, Eucalyptus grandis
  Intron number 2 from transcript Egrandis_v1_0.003524m (loc us Egrandis_v1_0.003524m.g) derived from phytozome v7.0 (c hr-ID scaffold_8; pos 8209857 to 8210642)
acccattattcttcttcgtgctgtctgttcaaaaggtatgagctcagttccttatactcctgtcaacttgctagcattcaagttcaaatggcttgaaaaaatctgttgattggtggagtccataccgatcttactgtattcttcttttctctttaattcctatatagttcccaaaacgacattgaaattcttgccataattcacacttctataaaccaactattccaggttaaatttattgtcctacttattgagttatttctgtcatgttaatttttcagatattcttcactttacagattaagcttcttaatagtggtttgctgcacatttaggcttccaaactacaatgggtggtgttgcttaggtttatctttctttattacttaatgttatcatacttcatttctaattctcaaaatttgaccttggtacaataggttaaatctcctttggcctgggctgatctaatcaaccaaatttatctcctcttaaccataacctttttttgaatgtattttcccaaagtcattattatccctgaacccatttaaaaagcttttgagaaagtcctggtcaaattcaatatccaaattgtgacaatctggaaagagatgtcattgatcgtctgtgcctaaagtttcttgttcatttgcattttggcttttgtgcttgtgttttattgctctcgtaacttttcttttgcagattcaaacaaccatcatgagctttttcgtttgcactcaattacttccctcacttatccatccttaaatgcaggataat

SEQ ID NO: 93496 - DNA, 976 bp, Eucalyptus grandis
  Intron number 2 from transcript Egrandis_v1_0.038797m (loc us Egrandis_v1_0.038797m.g) derived from phytozome v7.0 (c hr-ID scaffold_10; pos 18536314 to 18537289)
aagtgcaacagtggaaggtggctttaatagaggttgcttcaatcaaaggatggcactgcagagatagaggatcagagagtttcaagagcttttcaataagactatatacttcattcctctagcatatcttcacaaagaagagaaaaaattatttctgatttcttggagttgatatgtatatagagctatagccacaaaatgatcaataactgtgtcagggactatgattagctcattttttctatcatgatttagaaaatactctcttaaaaataatttttaatatgggacatcaattaattgaaaatacttttatcatcaaagatagaatttttagacataatttgttgtggataatgacaatattatccaccaactaatctttctaagtgataagtaataaagagtattttgaataaataatattttccaataggcgattttctgcaaagcaaatgcaaggacaaagttatatctagttccgaaaatgcaacgaaagagtagtgttatggctagttcgatatatatttttaggtggtttaaatttccacgaatttgttttgttcacagcataaatcgtgacgcttgcattagtcaaggatgacggtgtattcaatgtggttattttgctgtgaatgtgctgtcgtttttcgggttcaaagttctatgccatgggcgttagcctttgatttgttgtgtttttgacttggtagctttgccagcaatcttgtgctctctttctgtctgcgtaattttgttcctttctcaatgtaaaaagatatgatacatctgtgtgtttaaaatagatatcttggctttgattcgtttcggccactcggtaaaaagttctatttccgccactattgtgaactcagacttcacatttagaatatcctggaacttaatgtcctttatgttattactcaatctcgatttcttgtgtggcagccaagggaacttataaaactttttactg

SEQ ID NO: 93497 - DNA, 688 bp, Eucalyptus grandis
  Intron number 1 from transcript Egrandis_v1_0.028654m (loc us Egrandis_v1_0.028654m.g) derived from phytozome v7.0 (c hr-ID scaffold_8; pos 64004584 to 64005271 reverse strand)
ggtcgcggtacctacacccccaaaaaggtattgtcccctttggtatctctgacaaatttgattgctgatttggatgatttcattttgttacagtgcaactgattagttggtttttctcatttcttttagttggttcttttagcaagagcagaattttgaggtttgtgtctttgttctgggatggggtatgtgactcatgcttgggttttgttcaagcaatcagaataatgagaatagggatttgatctgcataaaatgatagtttgctaattttcaagtgatctaaaaggaggccctttagaactttacttggtcgctattactcgagattcttcagtgaaaaattagggcgagcaagtagtgtgcttatcttcaagatgcgtagaacgttaatgtggatggggttctccattgttgatcctaaagtagcttttctagtataatttgactgaacaccttttttaggatatttattggctttaatttttttctttttggaggggtggtgggaacagtcttaagttttgtggtgaatttgcttcatttctgatggctattggttgtacttttatgtgactattatcctttgtgctttcatgagttcttaatataaaactttgaagcatgtttttttttttttttatcgtataatttgcataattcatttgaaattggattaaacagtcta

SEQ ID NO: 93498 - DNA, 636 bp, Eucalyptus grandis
  Intron number 1 from transcript Egrandis_v1_0.023891m (loc us Egrandis_v1_0.023891m.g) derived from phytozome v7.0 (c hr-ID scaffold_8; pos 67261079 to 67261714)
gtcttggaggccgacatacagcacgccaacgctctgtaagttcggatttttgctggtttcgttcctttctttgggtttttctgaggtgggtttgttctgcttttgtcttaaattttttttttgtccgtcttttccctttctgggtatctccttcggtgtctttgtcttggggtctttgtgttgcttttatgtgttgtcaacagctttcttcctgactctacgggcaaaaattatggaacccacgaacagtaaactggaaattttccaactgagagagagagagagagagagagagagagagagagactgttggtgaaattggcgcttttgggcagtaatattcggtctttttcatcaagtgttctaagcgaaatgagctaaagagctaaaccccggacatgaatttgttgacttatctggtccagcagtttcgtttgatcattcacagtgcattttgctgcctgagagttagggaaattattctgtcctgccactcgcggagatgtggaaagagatgaacttttgaggagcgatgggaatatgatctgctcggcggggttttttcttcttctgttctgaaatttgagctctttgtgatcagggcggctgcgattccgagggcaaagggcggcgctc

SEQ ID NO: 93499 - DNA, 791 bp, Eucalyptus grandis
  Intron number 4 from transcript Egrandis_v1_0.012174m (loc us Egrandis_v1_0.006585m.g) derived from phytozome v7.0 (c hr-ID scaffold_1; pos 5375894 to 5376684 reverse strand)
actggtttctgcaaaacaaaggtgtgtgactttcttctgtatgtgctccatttgctctactggtgtttgtggatattgctgatgctgatatggtttggggaaagccggtattctgcatgggaagtacagtaattcacttggatagaatcttgacacattctccctgtccatgtcctattcagtcgaataatatgagtttttcttgagttaatttagtatgcaactagaattgttcaccaactttttttctttttctctcctgattcaagattgaacttttaagaccaattctgtattgggttttctaaagtggctgagaaaatacttgagtatgcagactcatatccttctcttgtaatatttgtctttttgtggagcaggaaaatgatgtaaggataagtgtagatgagaacgtgaaattttaaatctgatgaaattggctgccacttaattgaatggaagattaatgtggcagcatattttatgaaattattatggtttggaccatcttttagatgcaaggaaaagaggcaaccttatcatgcttggtaatactatagtggtgtggatttctttttttaagattggatgaaagggagagaggcaactcttatttcgtggctcgaacttagctaaaaggaaataatgatgaataaaatcaaaagatgatgataatcttgatgcaatgcagaattaagtatttgctgatttttccagttcgattatcattaactgtttgaatggtgtatgttgcagataccagctgaaataactgctgccctggagccaat

SEQ ID NO: 93500 - DNA, 743 bp, Eucalyptus grandis
  Intron number 2 from transcript Egrandis_v1_0.032856m (loc us Egrandis_v1_0.032856m.g) derived from phytozome v7.0 (c hr-ID scaffold_1; pos 22573030 to 22573772 reverse strand)
cggctgccgcggctcctgctgttgaggagaagaaggtactttcctctccttttggctactttgtttgtagagagacagctataagatttgattgtgttgaattgtagaggtcttttgtgcatcttgattgattctgtgttggaaaatggaaattagtttgtcaaattcttttgtgactttgcattcttccttctgatctgaatctagaagatcactaaaggcttctatatttgtcattacggataaccaggaaattcgtttgcttggccgagtctacttagcaattgaaatcttaagtcctataactcaacggaacaacatctcaaaagccttatgcgcatgatgatcttgatattagttagtgatgaatgaatctgtagatagtttagaagtttgcattctgccggagtaaaaagtagtgctttttctttgtgaactctgcaattatatgtttaatgttctcttttgtcaatgtatagagttggtggattgtattagaaataaagaaagctaaatatgcaatcagtaattcttctgaaaattttgcatgagaaatatgcaaggatgttgttcgagttcttatggttatatgaacaccgtagctagaatcagtcggaaattctagggtgtgtgatgctgcctggtctaattgatgtctttgatggacaatcgccttgtcatttgtctgagttgcttccttttcttctggaattgactgcaggaagaaccaaaggaggagagtg

SEQ ID NO: 93501 - DNA, 848 bp, Eucalyptus grandis
  Intron number 2 from transcript Egrandis_v1_0.026138m (loc us Egrandis_v1_0.026138m.g) derived from phytozome v7.0 (c hr-ID scaffold_1; pos 11282369 to 11283216)
ctagacaactaactcactcaattgtgagaggtactcattgttcattatgttgcttgaagatgtttattttctgttatgagcatagtcaactcatgggtatctgattcttagtgttgggacttatgtgcttaatctttttgttccctgtgctgtcttattctgttttcactttgattgaggtagcattgcaggcctcaaattttcactcttttcgtttgatatcaatgcaagctgataagacttgttttccatgacttaagagtatttcagtggtattgctacgattctatttatgtaattagaatgtgtacatgctcaggtcattgctttgtacaccagtatggttacttctgtccagaagttctttgatattatagttcactatgtagagtttgctttgagcaattactacatggatgttgcttgaggtgccagctccacagacctctgtctgagtaatgatgccttcagcgataaatacttaagcagatcaatttgctaattaatatgtattagcatcaatttttcttttgtaggtattaaccttagtgttactgatgcagttctctttgaaaaaaaagtctgagcgctgtcagttttcctgttatttttgtctttagtatattgcaaagggtagaagcataggctattggttaatcattcaacgtttattgcagttagcatgactaagtccctcctatcatactatgaaagtaactttcattttttggggtgttctttggcgaggcatctcattctagttgctgaaacttaaaagacaatgctgtggaatgacatgttattttttaacaagaagggagttcatctttcaggagaaggtttgagga

SEQ ID NO: 93502 - DNA, 954 bp, Eucalyptus grandis
  Intron number 1 from transcript Egrandis_v1_0.005921m (loc us Egrandis_v1_0.005921m.g) derived from phytozome v7.0 (c hr-ID scaffold_10; pos 11821920 to 11822873 reverse strand )
gcaatacctggtttttgtctccattctccatctccctttttccctttttttcgttcgccagccgtttttagtgcttgggacaccgttcgtgttgaatttcctgatacgggcatgggatgttaatgcaatgcgattgcaatcgatggtctgggagaacggagttcttggattctggtgtctttgttaatgagcatttcaggaagaacgtgtgaacgtggatgatggtacggaattagattccgtgcgaaatgaggaggaccttgtgtctagattacgatgactcggctcgagaaagtatggatgtgatatgatttgtcagttaagctgaagtagcaacgttctgttcttgatgtgatcaggaacccactttatgtttagtccagattacatcggttttgtttgatggcgttacctatctggatcgtcattcttccgcctggaaaatccaatgcagtcacttaggggctgtgcaatttgttcacggcgtcattttaaatgtgactgggtgttgcatttctgagaacagtttccataaatttgtgaatgaaagagaagggcacgatgtcgagcagtatcttattgcagaagaaatgtgttggggtttgagctggtccatggtagaatcaatttaattattatcttttgacgctaggtcgggctcgatacactgtatactgtttctaggataattgtactcaccaaacggtaaaaatgttcaaaagacagaaccatccacattttactggttgtgcagagcagcatactagggagtacatgtgtccagtgaataggtggtcctcacaatcatgtgatatccaatagatgctgtactaactgatctagaagcttataacgccaatgagaaggtaaatcgcaatttgattgaagacaaaagaattgactgatccatttttgttgtattttccagggttagctcaaccgggcttccaagtg

SEQ ID NO: 93503 - DNA, 703 bp, Eucalyptus grandis
  Intron number 1 from transcript Egrandis_v1_0.051858m (loc us Egrandis_v1_0.051858m.g) derived from phytozome v7.0 (c hr-ID scaffold_8; pos 55422185 to 55422887)
tggaaccttctgaggtttggtagcaagaaacaagaggtgatacagtgatggaactattagcgaacggaaggccactccatggaagttcgagcactaaagggaggggacgtataaagcatgcccgacagatcattcaaaaatcatgccaaaaatggcattgttcaccggggtttgactttttcttagcttaagtatatgttgtaagtccattttcattctttcacttggcgaataatttcaacaaggattctgtccaaacgaggtcttaaatttttctaatttggttttgcctgacaatccgttggtcaacccaaatttccaattccaagtgttcttctactccccaagtatcagcctcaaaagtgacttagagaaaacattcatcaagatggtttttagcgagttgaaaaagggttattcagtattatcggattgcttggttaaagtagataaccgcgtgagtgaaatcatgagaatgattggcccttatatagatgaaacactgattgccggtacccatggagtgggcagtgctagaaagaccactcttgtcataatcatctacaatcaactttcatctgatttcgaagattgttgtttcctttctaacattttagaaacttcgaaggtgaaggtggtgagtaattgcagaattagctcatctctgacatcctcaaaaggaaattgacaaatataagtaacc

SEQ ID NO: 93504 - DNA, 524 bp, Eucalyptus grandis
  Intron number 2 from transcript Egrandis_v1_0.008118m (loc us Egrandis_v1_0.007687m.g) derived from phytozome v7.0 (c hr-ID scaffold_10; pos 16450681 to 16451204)
agcttgtgcaggtaaacaaaatttctcttccttttcttctgtatagcgtccttggtgctcattttgaattagcctttgtaaagcaattagatataatggtaactagctcatgaaagcaaggtcaacttcaaattttttttggcccatacagcacttgtagggattgttcagtactttgatgcgttagaaagtttttgatgccgccccttttggatgtaggattttaatgacattatttacttgctgaatgattttagttagatgtcaatctcatcattaaaggcatggaatatgcaattttttctaaagtcaactttgtttatatgccatagaacctgtcgtcttataatctgttttctttagcaagagacatttgttggctctcttcttttgcatctgctactttgcagcagatgctgtgattatattgatatgtcttgtttcattagctgattgaagctcattaagttttctggtgttggtttttagatttctggggaagctgcagttgtgagaaaggctct

SEQ ID NO: 93505 - DNA, 761 bp, Eucalyptus grandis
  Intron number 1 from transcript Egrandis_v1_0.022114m (loc us Egrandis_v1_0.022114m.g) derived from phytozome v7.0 (c hr-ID scaffold_8; pos 27115522 to 27116282)
ctcttgttacacggagtaacatttgcattcatcgggtaagactgacaatgaagtcatcaaccatcacctatgtgaagttttgttggttactgtcttttcattccttcgggagaaacgtccagactaaatgaggatgtcattagactagtcaattgttagccttgccactggatttgaagtttcgctgtttaagcatgcatcctagaatttgatgaccgttgaagaacccatgcttattggtttccagactcattctccacttaatcatataaccgctttctcccccaatatggccctcctttatctgagaagttgttcccccatcattgtttagatcaaaagaccacttaggatgttgttctcataatggttatagcttgttcttttctgtctggttataatttgttactctttagactgaaaaattgactcatctgaagcgcaatgatatccggcatgtctcgcgatgtctattgtggcgaaagcatgtggaagaaccattgatagtgatgtgcaaaagattttttcagagatatattgcaccttttagcacaaggagttccgatgggtgcatataatcctaattcaaagaagacttaatatatcgaacttgttacaaaattgctggctttttgagtgttctatatgtccttgatgaatctacacagcactaattagttttggtacatgctgtgcatgcaaatatctgttcgttgacgccaaatggaacaaattgtctcactccttacttgatgcagaac

SEQ ID NO: 93506 - DNA, 887 bp, Eucalyptus grandis
  Intron number 2 from transcript Egrandis_v1_0.022114m (loc us Egrandis_v1_0.022114m.g) derived from phytozome v7.0 (c hr-ID scaffold_8; pos 27116334 to 27117220)
atccatttgtgagttttctgaatatagagactgatgctttttttgctaagcaagtgcttaaatactgggatgagatttggctctgtttgtatgcagttaaataaatgaccttttcttacgttttactttccctcaaatgatttgaaaataatacaatgtttttattttttaagtgattatgaaaagattatatatttctcctggtcaagtttgtctcctggtcaagtttgtttatttttaaaaggttttaggtgtttcgagtttcataaaagtcaaattgcaagagctgcaagatcttttttttaaaaacaagcaaaccagctcattacacgaaagaagctactgcagcttgttcagggagactgctgatttgtgaaattattttggcatgcaaggacaacatctcataagttgcagatccgagtgtagttgcagtgttgttagatttaaccatggaagttcttttgctagtttgagagatgttttggtgtggtcggagggggataaattactggctaagcatatgtggtaggagactgaaatgtcactttagcttttgtttcttcgataaattattttattgaaattcccattcacaatctttcaatgaatggcatcccttaatattctaagttaagatggattggatctgtctaggtagccatcatgaccttggattctcacgaggatcatgaaatttagtggatatatgatagtccatactttactatcttcgataagtgtcatcatgtgaaaccagtaagcataaaaaatgtgcgttgtgccattattgttttgtggatagggaaaatcttatgttctttttgtactgatggtgtttcattattcgaacttatatattttgctttgctttattagatcttatc

SEQ ID NO: 93507 - DNA, 851 bp, Eucalyptus grandis
  Intron number 1 from transcript Egrandis_v1_0.029289m (loc us Egrandis_v1_0.029289m.g) derived from phytozome v7.0 (c hr-ID scaffold_10; pos 32514213 to 32515063)
gatccatcgcaaggattttggcttcggaacggcaggtacgtctcgttgagaatgagtaaaaaacgtgttgccttttctcgctctttgattgctcggtattgagctagagtagcttcgggaccctcgagcttttcctccaccatctccagctcgttccagagagcagacaatttgttaaaaatggctgtaatggagagattgccctgttttaattctgatagggcttgttttattctctatatgtatgaagtgcttttattatgctccttctgagatgacaagagtccacatttcgctttgaagtcgagcgattaagctggtagcgaagttgaatttcagtggggtagtttttaatcacatttttgatggacttcttttgtctactttcatgtgaatgggaaactttgccaccctcgagctaatttgaactctcagtcacaaatagaaccaccctctccctcccctctcattttccattgtaaagtaatcgtaccaatagctgaattgaggtgcttcgattttgcttgctgaaaatgtccaattatttgcaattgtgttttggagtccacacgtgtgccagtggtgtttgatcaattataatcaatgcatccaagctaggtggtcagtgcatgttcaccactcacgatagatctttactgttggtctatgtctacatctgttcttcctttgccgagactcttttaaattaagttggcatttattgtttaggtttatgtttcttttaatttgaaaacattttttttttcactgagaacgtactcaaatgtttttatccaactatgtccttcaaattgtggctgcagttcagttgcaggtcacacaagcatctc

SEQ ID NO: 93508 - DNA, 673 bp, Eucalyptus grandis
  Intron number 2 from transcript Egrandis_v1_0.018650m (loc us Egrandis_v1_0.016351m.g) derived from phytozome v7.0 (c hr-ID scaffold_10; pos 30568824 to 30569496)
attgttcaaggcactagcgaatcaggtagaagtagtgaagtttcttgattttgaggtcctacttatatgttttccttgattttcaggggagtcacaactttttatttcttcattcgtgtttgattaagtgtgagaaaatagatcagctgaatacatgaagagagcccctcttaaaagtgtagaatttgttcagcaaaattggatacctttacttctctgcgattgagactgctagctgaaaagttaagaacgttaaacctaacgggtcgctagacctaacgggcctttaggagatgatgttaggttcttgttaactcaacttagggatgaaaggtcatatcagtatggtggattgaactattttaggagtcatctcattttcagcttttcgcctttgattacggaattccatttttgtttgtagctctgaattatttcatcttcaatcagtttgccaacaccgggtcacgagccttttaaaatctacatcatgatgtgatggttacactatctaatcgaaatcaacggaccaattggactcaagatgttttacagcacttccaaatcaccgtgcctctctcgaccaattcacatgtgaatcacagtttccttctcaagtcatactcattggcaattcttgcgtgtgaactgtaggtgcttgtgccaccaccgg

SEQ ID NO: 93509 - DNA, 416 bp, Eucalyptus grandis
  Intron number 1 from transcript Egrandis_v1_0.049715m (loc us Egrandis_v1_0.049715m.g) derived from phytozome v7.0 (c hr-ID scaffold_8; pos 54826292 to 54826707 reverse strand)
cccaacaggtgactgcttttagcattccatctcatgtgccttatatcgttaaactcaatgcattttaattggtttctttttctagatttgtgttagtcttgttgaaattgaattgtatgcaattgaaattatgcagcaaaatcaggctaaataatatcacaatgccaatttttgtcccatttcattcccagcaagaaacatttttcgttagttcaggtcattcatttaccctaagttccagtgctagtttatcaaaatggtataaatcgttgaagaacgcatttagaataggtctgtagttttctatttggtcttgtcaaagcatagtttggttcaactccgtctctaactcattgtcttttgactttcaacaaacactaggcaagaaggtcagtttgcaaaaacaatcacgcgga

SEQ ID NO: 93510 - DNA, 416 bp, Eucalyptus grandis
  Intron number 2 from transcript Egrandis_v1_0.053266m (loc us Egrandis_v1_0.053266m.g) derived from phytozome v7.0 (c hr-ID scaffold_8; pos 54456030 to 54456445 reverse strand)
cccaacaggtgactgcttttaggattccatctcatgtgccttatatctttaaactcgatgcattttaattggtttcttttctagatttgtgttagtcttgttgaaattgaattgtatgcaattgaaattatgcagcaaaatcacgctaaataatatcacaatgccaatttttgtcccatttcattcccaacaagaaacatttttcgttagttcaggtcattcatttaccctaagttctagtgctagtttatcaaaacggtataaatcgttgaggaacgcatttagaataggtctgtagttttgaatttggtcttgtcagagcatagtttggcttaactcaattttctaactcattgccttttgactttcaacaaacaataggcaagaaggtcaacttgcaaaaacaatcacgcaga

SEQ ID NO: 93511 - DNA, 709 bp, Eucalyptus grandis
  Intron number 2 from transcript Egrandis_v1_0.023746m (loc us Egrandis_v1_0.019140m.g) derived from phytozome v7.0 (c hr-ID scaffold_10; pos 31557798 to 31558506 reverse strand )
ggatatagaagactttgatcctaatcgcgcctgtcagtccctcgcattcttcttgttcttccagttgatttgataaaaatagattggggtgaaaaggtttgatgaatatggcatcaatgctgaagcttcaaggttaggggtaataaaaggtcagtttgaaataatggatagttgttagtcagtgtagccgtgtaaagtacgtagatggactttctctgctagagttaaagttgcttttcaattatatgggcttggccatgacgcatctaactgaggaaagatgaggatcgcttgtttaagttgtgattgttccagtatgaatcaatgaaatgatggcatggaataccacgggatcagattgttctgtgttctttgcattcctttgagttgtgatagcatttctctggatcaaatcgttctgtctcatgggtgttgattgagatgcaagagagaacatgaccaattcatcagtgtttatgtctaatttaatctgcattagaaatatatgataaaaagttatttgaagatgctgatgatactttttgtgtttctggacttctgattagcctatgaattgtgaagagcaggctgctaatgcccaactttttcttcttctggacttcttattagactacgaatctttgagatgtttttttgtctcgtacacgcaaattaactattcaaacatatgtgcgtgcagtttttggat

SEQ ID NO: 93512 - DNA, 529 bp, Eucalyptus grandis
  Intron number 2 from transcript Egrandis_v1_0.006741m (loc us Egrandis_v1_0.006071m.g) derived from phytozome v7.0 (c hr-ID scaffold_10; pos 3146571 to 3147099 reverse strand)
gacaacaggtagcttcatttgcctagggttgattatttaaagatttgcaccttctgcttagatgatagggaaattctttcagtattcaattagcgcagcttgatttgtcattagtgtaaaccaaagttgacaaagtccttaaactcgaagactaggactagttgaggcctttttagcatttgcacttttatctttgcttctttttgtctgtttttctgcactgtgcaccgacagcagatcccctggtcatttggatgtctatttgactagataccctatgttatattgtttgctgctgatttttggctattgatgtttggtttctcagacataagtctgtgtatattctaactcttgggattttcctacaatttgttcttcccatgcaaatgtctggtgcccttttgtcaattgtctaaaatgattctcgtgttcttatatagccatgattgtatttttttttttttaattgcattgatgattgatgattgcaggaaaatcccaattatagaggtggcatcaatacttc

SEQ ID NO: 93513 - DNA, 931 bp, Eucalyptus grandis
  Intron number 2 from transcript Egrandis_v1_0.006783m (loc us Egrandis_v1_0.006784m.g) derived from phytozome v7.0 (c hr-ID scaffold_10; pos 22971691 to 22972621 reverse strand )
attctggaacaattcaggtttgctcttgttctttggcaaccttgtctactatttctttagctacccgtgcattgagtttgtttcctatagggatggaattggggcaggtataatccggtacttattcctttacagtctttagttggggatatatgtctattagagagagtagcatcacttgttgcgggtatcaggtgggaagctgacaacttaaataatgtgggtttgggatcttatttccaaatgcaacaggttaggagggtttatgaaatgacgaaaagctagcgggatggattttagttgaggaatgtttagccgttcattctggaagctcgtgatcatcctcattaagaacttttatgccttaattgaattgatcatgctaaatcctttgtatgtagttatagtttactttgacccagaaagtcaaaccatctgaagtgttagaagatgcatgatgcaatctttgttttcattttcttgacttgttacactgaactttctacgtacaatagatggctagctgcacttgcttccatctgctggctagagataaatggaactatagaggtgcactgaaattttatgttgcacttatctgggatgaaatgaactgctgtgtagtttagatcaccctttaataatttaacattctcttatgctatatgtctttctttcttttctttttctactgaaacttataagatcaatcttcttttctttgcatggtttgcaatcacttgtctcatacttagatggccccaaactttgtttgaatatgctggttagtatttgtatcacctttaatagtgcaaaagtaaggcagctacttctactaccattgcttgactttttcgatacaatggctagaaactgatcgaaagtaccaaccatttgttttagctttactgcgagaaggagaggctgttaa

SEQ ID NO: 93514 - DNA, 955 bp, Eucalyptus grandis
  Intron number 3 from transcript Egrandis_v1_0.028975m (loc us Egrandis_v1_0.028975m.g) derived from phytozome v7.0 (c hr-ID scaffold_1; pos 3263033 to 3263987 reverse strand)
tgctttgctttcagcagttgctgcattttctcattgtaagatatttcatcctttacaatttagatgctgacattcttttctaacttggtttttggctttcttcttcttgcatggcctattctacaactcggttgatgacttttgtgagttgatatgaagtggatctttaatatattacatttgtgatcatgctccaaattgcagttgtctatgattgtaagagacgtaggacttgcttatgaatgtcagatagttctagcttaataaatgcttaaggtgatttgcttatggatggactttagctcaaccaatttgcatttcaaagagatacttgttacgagttgctgagagagaaaagcaatatgaatcacctaaggcaggaagagtcgtaattatcccacttgcctttgtgctcttaccctgattttgaatctgacaaggaaagccattgatgttaatcattacatggtttctcatttttctaccaataaaggaagacccagctcaataatcctctattcttcaatgagatagataagagcaccagtcttatacaaaaatgcttatgcaatctcttaagaagttaaagggcttcattgaaaattcttgaagtttcatgatgctattgaacatcatcctagatgtttggatttccagtgcaataatctcagtttgaaacttttgatttaaggaagatctagctactatcaatgattgttcagttgatgaacattcaaaaggctttttccttttcttttgctgatctgtcatgccttgtttacgctctcacttttgatattttttgagtgtggtgccaaagattgcatcctcacatcaatgctatgtgtttgcttttcctctattcttctgtatatttcatgtcacttcccggatggtcacttgataaattgtgttgttttggaccttgtagtgcgtatcccggtggtttctttga

SEQ ID NO: 93515 - DNA, 885 bp, Eucalyptus grandis
  Intron number 2 from transcript Egrandis_v1_0.009059m (loc us Egrandis_v1_0.009059m.g) derived from phytozome v7.0 (c hr-ID scaffold_1; pos 2994296 to 2995180)
aatacagaggaaacttttcgttgtctacatttcaggtaattgctctttgataattaggttgtattgcctcgatcagtaccgaagagtaaaactgagacaggtgttgagactcttttattgctgctactgcacatatggagccccgtttgatttcttcgtcttgtgttctctgtctcttctcttttaaaattttttcctatatcctttatctagtgatgtaatggtctctgttgcttttagctgttagtcgtacctaagctgcaaaagtatctgtgtagagggaagattctaggaccttttttggccactaattaggctattcgattgtttgattcttatataagaaggatagagttgatttacatttaggatgtcactaaatgttttcctgttgccgcatgttgatataatgctaattgcttgtaatcctaggttagggtgcatcctgtggatttaagtttgaaagcatttggatactgtttatttttatctaggagttaaaccaggaggatccattgaacttatgctttgaaggaaagggagcagttgattgactcccgtgtacattatatgtttaagtgctggctcatggatgtgctcataacttgtagtcctggacgcagatttcttttcttctctttcatttgaaaatttcccttgattttgtacactgccttgattttgtacactgcattattttatatctatccttttccctttttcttaccctgtaatcagtacagagtaattctttcttcagtattccttcgaaagcaatagttggttcgggggagaccttttgtcaatctaatgacaataatcttttttatttcacttaacattaagtttacatgaccccgccttttcatccaatggcaggtgaag

SEQ ID NO: 93516 - DNA, 929 bp, Eucalyptus grandis
  Intron number 1 from transcript Egrandis_v1_0.028600m (loc us Egrandis_v1_0.028600m.g) derived from phytozome v7.0 (c hr-ID scaffold_8; pos 8319578 to 8320506 reverse strand)
ttccagccgctcgagcaagaagctctacgtcagcggtcaggtcctcttcctcttctttcttttgttcagttttcaagatgagtccttttctttctcaattaactgatgcggatatcgtgtagctgaaattgcaatgtccattagcatgatttacttaataattggcttttcggatgaagtttgactgaatttgagttgctgtgattgcattacgatgtccgtctagattttgatttatgtaatcggcggtaaatgctccgtttctgctcatgttggtgcttcgaattccggcttctttggcttgccttttctggattgagatggtagctaattcttttatcatgtcaaagaatactggcacactttcatgccatgtttcttgaagtattaatctttctgagctgctttctttggctgtttcggcattgtattatcggcatccttctttgtgcaatacgtgcgatatttagtgcaaaagatgtagttcaattatcacaagacaacttgtgcatgcgcgaggccaattctggggactattgcagcgataaatggaaatatgatggtcggcggtatttgtaataagggcctactgttattccaatagcttaaacagatggtttttaatgcctccacattttttttgagtgttgacgactcaaatgtcagctctgccactccaatggtcggcgaattgtaagtttcaacactactttgtgggctgaaagtgctgaaagtggtgatacatgatgtttggcaatagttatgcatcccaagtatgaaatgacgagttttacctcattggaaaatggaatttctctttggcgctactgtagagaatcataccaggcacggtttcttccatagtgatctcatgcagtccattgtactcaacagggctttcttttcggaccactgaggagagtttaagg

SEQ ID NO: 93517 - DNA, 911 bp, Eucalyptus grandis
  Intron number 2 from transcript Egrandis_v1_0.031354m (loc us Egrandis_v1_0.031354m.g) derived from phytozome v7.0 (c hr-ID scaffold_1; pos 38541878 to 38542788)
atcaggttggtcgcgcataaatatcttactgccttcatgtggggctcgctctgggcgcaccacgtgtcccgtctgcccccacggacacattaagtttgggaaaaaagtgcaagaagtgggaccactttctcgccacctactcccttttttattttcttccaactttttgaccaacgagcaaatggtaggacgaattagaagtcacataattcacaagaaagtgcaaatcttgacaaaataataacctaaaaatagtcaaacttacatttatgttttgcaacataaattatatatatatcttatcattatatcaatttaaattaagcaaggtaaataaaaggaatgtcttatttagaaattattgaagaatatgctcacctctatgtggtgcacttagaatttcaatttgagatgctagatgtaattgtgatacgacaatatgacactcccaactcattgaatctttgcaatttatgataccgcaaatgtgaggatttattgtaatgatatggtaatgtcgatataaatgctaattgagatgtgcattaattaaacggagttgaagctttagttggattcaccatctaaataagaacaatacgaaagactatagaatggtcctcctaccagttaggatacgtaatcatgtctcagctaaataattatcttctttttcaaaagataatgttgtcaaagtaaaccttttgttccaaaagtgattcacacagaaaattagtgctttaagtcactaatcagcaagatgtaataggctaatacccactagggccgtgtttagcatgttctggatacgtcaatgaacaattattaataattctttatgcaattaaacaaactctaatgtcaatttctttgcaggtagttccccaaatcgcgaaaagtgcagctggcga

SEQ ID NO: 93518 - DNA, 352 bp, Eucalyptus grandis
  Intron number 2 from transcript Egrandis_v1_0.015274m (loc us Egrandis_v1_0.015274m.g) derived from phytozome v7.0 (c hr-ID scaffold_10; pos 18920853 to 18921204 reverse strand )
gccaggtccttttttaatattctccttttatttgtttttcgtcgaaatctgctcgcgattagtttcttgttctttagctcccgtctttattctcagctgacgacctatgacccacgacaccttaacgcgactttacttcgggaaaacgggaaaaacgtgattacttgatgggagatgattagctttggcacgatttcatcgttttggcttctcctgtttatcatttcaattatttttttgggttttagttatttgttgagcggttcttgtttggccaagattttgaagtatgatagcctgatgtgtccttgcttttcttttccctgtgtttttttggatttcagttgtttac

SEQ ID NO: 93519 - DNA, 732 bp, Eucalyptus grandis
  Intron number 3 from transcript Egrandis_v1_0.018585m (loc us Egrandis_v1_0.015003m.g) derived from phytozome v7.0 (c hr-ID scaffold_1; pos 21239699 to 21240430)
cacgatacagcttcaaggtgagtggcatgtacgtggttttctttttctcgataaagatgtcagttgacgtttataattttaacatgaagtttgttaaaagccttcagttgattccttgttgtcttttataatggatagcttcattatataccctagcatcagtggtaagaagaaatctgaacatttgattaagttagctagctttatgctgttggtttttgtgatcgtgcccatttgagttgctggttttggtatttttattaatataagttgacaattccttgagcttaggacagtcacatcactgcatcctccattgcagaactttgtctttctggtggagccaccacatcaggccaatgtataagccacagagtacccattacattaggaacaaggcgttccaacttattcttccctatcctgagaaaagatctccaaaatgttcgttagtcagaccatgggcttgtggattttcatgggatagtaaactttaggaatttggtggagtgcgtctgttcttgcaattagattgcattacatggtggtgctcgggttgtactattaaataatcttttacataggcacattgtgtctaaatgtctgcaattccaatgtaatgaatgctgaatgctttaactgaaactgcccatttgctagtttgcagcactaacttagctcggccacacattcagaaatttgtattgttgttcaggaataaagatcaattgg

SEQ ID NO: 93520 - DNA, 681 bp, Eucalyptus grandis
  Intron number 3 from transcript Egrandis_v1_0.016235m (loc us Egrandis_v1_0.016235m.g) derived from phytozome v7.0 (c hr-ID scaffold_10; pos 9811641 to 9812321 reverse strand)
atttgtgttcaagtgagtttcgcattcatcaaagagatgtttaactatcttaacttgccgaaacagcaggccctttctcgcctttgattaattgcaattgctatatttcctttttgctttcacagtgtgagcaagttctcaccctatcatttggatagttatttaatcttttaagaactaatgggattgacctcttgttttgagaagttgaatttggtatgcatgctgtttccaagtgcaagagttgttaaataccacctataagagtctaatattcagattgcatttgactctgtaacttgacgtgttggattttgattaaattgatgtatcttatataattgaaggaatttactttccagttagatattatcctggaaatttccttctgcattacatgcaccatgtcctttgtagcattgatgagaactactccttacacttcttttcatttctattggggatctacgtgcctctctttagttgtgctgttcctctactcttgttggaagtacagagagtcagattcttcttttaataccttcaattgacaaagcacaatatggttttcctttttctcattttctttcctttaatattttgcttttgatcttttggtctgctggactatattttatcttagttgcttgaattattagtttcttgctgattttttgcagc

SEQ ID NO: 93521 - DNA, 708 bp, Eucalyptus grandis
  Intron number 1 from transcript Egrandis_v1_0.023154m (loc us Egrandis_v1_0.023154m.g) derived from phytozome v7.0 (c hr-ID scaffold_10; pos 19841131 to 19841838 reverse strand )
tgtgaggtaaatccacttttgatcttctctaaacatcatgttatgcttaaggtttctgtactcgttcatgttttgctttgatgttgattattccaattttattgtggcgtcaatactatgttagattgatgtcccagtaacacattctctgctgtccttgtagctttttggtgcttgaccactgctcaatgcttttatagctgttttgtattggcttaatagtgggaacgtgttggcagttgtgttccttcgtatcatataccttactgtgtagcgcttgctcctcgctatttagcttctgaataaccatcacaacagattgtcactctcacattgttttgtacttgattggtctgtatattattgcgcttttttcacatcaaactgtaatgatccagctgacctcacagaattaattatggaaacagaaacattagtagtcgatgtcctgaaaagatacctaacagaaacttctcttcattttcttgtgatctttttctatttaagttaattatcctccatgccatggtaaaaataagaatgtcaccgcagtttttggccatttccatgatggatcagtgtcgtccagacattgtgcctacttactaataataagctgttctctattgcacttcttaatgatgctgaacatttgatactctgacgcagggagctcattgaggttttatctctttcaagttggttcag

SEQ ID NO: 93522 - DNA, 931 bp, Eucalyptus grandis
  Intron number 1 from transcript Egrandis_v1_0.023035m (loc us Egrandis_v1_0.020211m.g) derived from phytozome v7.0 (c hr-ID scaffold_1; pos 28375367 to 28376297)
ctctgggcattgaaaaggtaccactaaattaatctgtcacacttaaattctttttttccctttcagaaacactaaccttggcaaaatttttgcttttgatagttgagccttgagaatctttcatataataattcatcatcttcttccttgtcctcagttagttccaaaaaaatgctgcctttcatgcatgttctctgtttgtttttggccaattgcttattttgatatttcagtcagtccaggaccgtcagtaataaaacggattcttgtcatgacaccatcaatattacaatgcaatcgtcattgaaccatcaatctacagaggttgagcttcttgatgtggatgtttcttggtcaaacaagaaaaacaattcttttgtttctatatatattcacatgaccattagcttaatgaaagtgcatatgcttgaggtgtaagtactgtccttttgtacgttgtcttcatctctctctgtccttcacctatcttctaagataggtacgttttatttatgaactgataaatttaaagaaggatccgtgtcataacaaccaagaacattttatacttttaaggtcacacatacaagggacgtcctccttgaccgagcttgagacctacgagttagaaaacgatctctattgcgaatgataatcaatttgtttctaaaactgatgataactaacttacttttttccttagtcaggtcattccctatgcaagcatagcaatttaacaagagcataaataagatgatgatctagcaataaacaagagacaagactacaaaatcaactgtcatgagaactgaaacagatacaaaatcaagagattacaggatgattatgtgagttaaaatgtaatgtccattgataatatggagtgttgaatccaggccttcctggtggggaaggactttggagctctgcc

SEQ ID NO: 93523 - DNA, 580 bp, Eucalyptus grandis
  Intron number 5 from transcript Egrandis_v1_0.046714m (loc us Egrandis_v1_0.046714m.g) derived from phytozome v7.0 (c hr-ID scaffold_8; pos 18777585 to 18778164)
gttcaaatctctagagacagggcacaagtctgcgagtgagtgtaaagtaggaatagagtaggactgacaaaaaaaaaaagtggtcttcctgggcgatttcgaattttaaaagatattttcatttatttattgaggcgtccaccattgaaagtgaagtttgataatatgtcataactaatattccctctgggcatattatatcataattaatattccctcttgttatcattttcgtaagaactcacttgttcgcttttccatctttcgatttttctttttcactctatcaaatggctaatctaaggtacttttcgagcacgatgctcttctcgctcgatgatcacatgattggcttgaatggacggaaattcacaacatttgaagcttgatgatcatgttgaatatatacatccgttgtttgtcatcactttgccgatatcaacttttgatgtgaaaatccgtggtataaaaattgaagtccaaaatctttttttcgagtgattattgtctgaatatgtaatttaaaactgtttattatatcgtaggtgtgcaagggacgtgcaaatatagaacaagggtg

SEQ ID NO: 93524 - DNA, 562 bp, Eucalyptus grandis
  Intron number 1 from transcript Egrandis_v1_0.030136m (loc us Egrandis_v1_0.030136m.g) derived from phytozome v7.0 (c hr-ID scaffold_1; pos 1738112 to 1738673 reverse strand)
ctgagatccaggaggcaatctcgatcgaaggtacttggtcaattgaaatgttcctcaccattaaaatggtatattcattgtattgcattacggttataaatgggcatgatccctagatggcctgatcaacaacacttagattggtgctcatgatgttgaaaaataaaaagaacaaaaaaaaaaaaaacagatattggagattatgtgatgtttactctcaagctctgtttacactttcttcatctttgaattcctatctaatgatctagaacctaatcctagatatgaagaacaaaaaggccagttttttttttttttttacttgcataatttttcaatgttcttacttaggattttatctattgtaaatctttatttattatatgaacttaaaaaaacaaaaataaaggaagattttgaaaaaataaataaataatctaataagtcatcaacggaaacggaagaaggggattggaaaaactcataggacggatcagcgcgaatgtcactttttgttacttctataggcagacagcgcaggacggtgaggcacacggttaaa

SEQ ID NO: 93525 - DNA, 835 bp, Eucalyptus grandis
  Intron number 2 from transcript Egrandis_v1_0.004120m (loc us Egrandis_v1_0.004120m.g) derived from phytozome v7.0 (c hr-ID scaffold_10; pos 37306133 to 37306967)
gattggtgagatgtcattgaattgaaagtacttggtttatttttctgttgggcaatggtttttttcttcagtaagaggtgacatcaactatgattagcacagcggcattcaaactgtggaagtatcttgacacatgaatgaaaataatgtaaattgagtgctaagtttgagtattatcaacagtctcatggctaatcttatttggctggtttacctggatcagcctcatctatttgcagaagtttatttagccaaactttcaatttgtagaactgcatataggaacaaacctttgtgcaccattccttcatgcaaaatattgctccactgcattgcattatcatacactagtacattttaaacactggaaagtgcagactgcagattacattcgagaagtacccccaagtgatttttacacatccatgtggctgccaatatttgaatgcagggttaaattttttcctcatttgattgatctggctaaaacagcttagtcaatgacttctctaagcaatggtccttctgacatgtctcctccaacgaattaatcagctctgctcaactttttctgttaatactctggttctatttgtattactctattttcccacttgtgtaggaataggaatagattataatgaagtttttttaaaagactggattcacgtgatgttgttgtgtggcgctattgatgtctagtttcacatggctgaattgggaccgggtaattagagttaattgacaagacttacttaattgtacgagggaaactctacgaacttatttgatcactgtctcttctcatgggacatgacttatttcagataaatac

SEQ ID NO: 93526 - DNA, 657 bp, Eucalyptus grandis
  Intron number 1 from transcript Egrandis_v1_0.003727m (loc us Egrandis_v1_0.003300m.g) derived from phytozome v7.0 (c hr-ID scaffold_10; pos 31197243 to 31197899)
acgagcccaggagctctcagccaggcttgctgaaggtcagatgaagtttcatgtctggtatttagtgagattttcttcacatgctgtaccactgaaatgctttgaggatggttgggaatctgttacattgcagtttttgcttggatctgtattttagttggatatggtttgcatcagaattctcagccatttgcactgcaatttttggattatgaatatattaggcttcgctttgtttcagagaaaagttttctataatatgtttagcctgcaatatcaaatctctttaagaaataaaatcataataatatgtttgtatttcaccagaattgcaaaagaggctatttatggtattccaagccgtctaattttttatttggaacgaagtaactaaaccattgcattggataacaactttaactttgaaagcagtttcccttattggcattcgtgaattgttttttgggttttgttgaagtcattttcaggacttatttagttcttgaatgcaaatgggaacgggaaatttaaaactttagattaaccatcattgtcatctgctgctagtgctattgtgcaaccaggaaagcacatgatgatctgtcttacatttctggtctgagttatgccctggttcttctcatagctcaacagaag

SEQ ID NO: 93527 - DNA, 621 bp, Eucalyptus grandis
  Intron number 1 from transcript Egrandis_v1_0.019487m (loc us Egrandis_v1_0.019487m.g) derived from phytozome v7.0 (c hr-ID scaffold_10; pos 29770305 to 29770925 reverse strand )
cgaggaccacgacctcccccacgctaattcctccggtacgtgtaaatcgttgccctttgcgcaaattgtctctccctcgcgggccattctctgactaaacccagcctatcgccgtgatctgagctgtcccatacgttgctgtcgaaaaccctgcaagatttcaagaagagggtttgctcatcgttttctttgcccaggatgctcagtctcttcttgtccgaagaacagaagatcgttttgattgtgtgttgacgtcggaacagcttctccttttttaatcttttctcttttgtttttttgcaattttttctacccattttttcaaggatactgttgtttagtattcctgacgaatggattgactgtgaaggaagaaacagaaactgtttaatttactgtgcatgtgattctgtgctctctctctctctctctctctctctctctctgagtgaaagatggcgtgcatcattacttttctacttataaagaacaaataaataatctaaggaacacgatttagctcctcgtctgggtcataatgttggcaaccctaatttggggtgttttaatgtatctacctgtgcgcgcgcgcacgtttttttgttatttccaggcttggag

SEQ ID NO: 93528 - DNA, 782 bp, Eucalyptus grandis
  Intron number 1 from transcript Egrandis_v1_0.010086m (loc us Egrandis_v1_0.010086m.g) derived from phytozome v7.0 (c hr-ID scaffold_1; pos 10022034 to 10022815 reverse strand)
gggtgccaggttacacttttcgttttgcttcaactttggcaatggttcggattcacccatcataaagaacacttgctaataatgcgaaagagaacatgttcttcatggagcacagttcagcatagtactcttcatacaatttaattttgagatgtttttaaatttgggaagcttttcctttttattcttccatttttttttctcattgcttagaaaggctgatttgctattatcacttcaacatcatagtttttgaattgagaagagagtttcaactgcataattcaattatctcagccaaaaagtaatttctttcccttccatggccaacaattggaaatgagtcgcaaactgatgtttactagttctatacagcaaaaaaaggcagttgttctagtaactgctgtacgggatggatttactagcctcaatttatcaggtaaaaaagaaaatggaaaaaataaaaagcaaaaggaaaagcttttgcctttcagcagtatgccagatgcatatagcaggatcatgtaaaagagtaagcaatcaaacagcccttgtcttcttttgtttaggcatgcgtacatatcctttacacagttcttggtgaaataaaaccttgacccaacctattcagtagttccggaaattttggtatgtgcaattctttagaaaaatcaaaccttggtaaggccacggttcatttagatctgacttgaatgaaacggaaaggaggcaactggatgtgtcacctgtccatatgatatgatgtcttcttgtcttgcagg

SEQ ID NO: 93529 - DNA, 957 bp, Eucalyptus grandis
  Intron number 1 from transcript Egrandis_v1_0.009465m (loc us Egrandis_v1_0.009465m.g) derived from phytozome v7.0 (c hr-ID scaffold_1; pos 12100503 to 12101459 reverse strand)
atcacgaccggccccaaggggaagtccttcatcaggtacggattccttcgtttcggtggtttgctggcgtcccgaatggatgctccgtcttcgttttggtttccggaacgttgtgctgcagctgcgcgatcgtttgaactcgcttagattctatgcggtttgtacgtatatccgcggaagaacggaatcgaagtcctttggatgaaacgtctggagtcggccgcgggttcgctagaggatttcctacggtttgatttgagttttagggcttaattgggaattttaggactcgattgcgctttggagtcgaagtgcggggctagattgcgttcgttacataaggtttaggacttaaaggtgcgggttactcattctctttttatcgtagatggggtgctggaatttctttgttttactctgcgtcattgactgggtagagctctcgctggaggtccgagaagtcgatgattcgttatgaggttataatggaaatggcagttgtagtcccccccggattgttgcttgctgtggtagaactgtttaataggtcgattttatgtcgggttgtctaaggaaaaatgctttttctctattgaaataagagtaacgagtgattttttaatgctttgctgcctctaaattaagctgatgttctttctatttgatggttcatgtaaggtaagcatcatatttgtacctcttggtgtgctactttccttttttttttaataaatgtgccagctacctgctctatagacacgaacacatccgttcgcacaaaatgtattgcctgaactttgtgcatattgttactggattggagacggacggtgttgtagtctctgatcatacatctcttcggtgcaaaccctggtcaatctctgtttgaaggtttcccctatgattattgatattgattcgatttgtttatcttgattccccaacttaggtttgacg

SEQ ID NO: 93530 - DNA, 771 bp, Eucalyptus grandis
  Intron number 1 from transcript Egrandis_v1_0.006867m (loc us Egrandis_v1_0.006883m.g) derived from phytozome v7.0 (c hr-ID scaffold_10; pos 2116541 to 2117311 reverse strand)
tcaaccctcctctctcttcaaatcaaggggtaatagaaatcacttctttacctagtaatgtaatttcattttatttcagattaaatgtttgaacgaagaacatatattttatgcctcgatgcagcagaaccatagtgattcatatggagtaaaattgtactgctgatatagagaagcaaaccgaccattatttgataaaacaatcacgtcataatacgcatgatgatctatttctgaacgtaaacatccaagtcaatctgattgatgctacacgatgcatccattacttaatacactgtgttgttcgcacgagatgacgtcactgtttttcatctcttttccactctcttctgatttatttcttcttggatcattagatatctgaaatttaacttgattgagattgttacagcttgagggtatgagcgcttttgatatgaaacaaggatttatatctacaagaaacataatcgaacagggtgattcctctgaggatgccaaactaggaaagttaatgagaatgggttttcattgtatcctccaaaaaggaggggaaaaagggaacttgtgatacagtaactctggattttatcattcaggtgttgtcttactgatatcaggaaaagcatgcaggttgtcgtgatacagtatgatttttttgtgttatatatgtacgatcgactggcattatcttttctatttcttacaaataattggtggtgacaattttttttttgttgttgttgttgtttggatcaaatcaggtgcacc

SEQ ID NO: 93531 - DNA, 1031 bp, Eucalyptus grandis
  Intron number 1 from transcript Egrandis_v1_0.018676m (loc us Egrandis_v1_0.015312m.g) derived from phytozome v7.0 (c hr-ID scaffold_8; pos 68240377 to 68241407 reverse strand)
cctcctccaagccctcccctccgtctcagtctcccgtgagcctccctctcccgggctgctttcttgatgcttttcttgtcgtgggcagttcttgtttttgagtttcttttctttggctctccattgttggattgacctgctcttcggagccggtcaaacgtctgttgcttgctggggtttcttgtacagtgttttgtttgctccctagaggttgaagtttttctcttgcgtgattcgtgggtcggtggactagaattttcttgatggtcggtccgcggttgaattccgctgtttccgtggactcaaaatcgattgcatccgaattaccgcgcttgttactgctgatgggtcgtgcaattagaagtcgaaagcttagctaggaactgctggctgaaaacactgcgtctgtggagtttctgtactgtattcgcttgtttggtgtctgtgtgttattaaagaccgtaatcaaaattggggagggtattttgggatgttatgttgtcagctcatttgttaaattgcccttgcaactcgctccctgtttaataggataatgcatgttacgcaaaagaaagcccaatagatggttctgaagattctgtagataggcaagatcatatttttcttttttctgtcaacttaaatgtacctgctgatgcggtgctccttgggttttgttgtgtgtaaccaagattgtgattaatttctgccggtttatacagagttgctcaaactagataacaactacacactcctttgttgagacacctggaaagctcaattgtagaggttttctatggtagtattgcatgccaatgaatttccttggccagaaattgcggactctctgatatttacatgctcaagataatgtatgaagggattttagaccctagttaagatataatttggcattactctacatctgcattaaacagcagttttcctttacttctggtgtttatggtggttttagctgtttgaagattacataacagcagctgctcatagttgcctacttttataggacg

SEQ ID NO: 93532 - DNA, 705 bp, Eucalyptus grandis
  Intron number 3 from transcript Egrandis_v1_0.015516m (loc us Egrandis_v1_0.014993m.g) derived from phytozome v7.0 (c hr-ID scaffold_10; pos 5037533 to 5038237 reverse strand)
cttcagtttcattggtaatagttttcttctgactgagtcgatatctgtggtaatgacttcatctatgttgaactggaaacaggaagaatttttttataagcattcagatggaactacttctgaaagataaaaaactatccccgaggtaaccaaaagttagtagtgcaatgaggcgcatctcattctacaggaatgtacttcaagctgcaggctaattaaaaaatttgtttcctcccacaaaagcttttctgctttcctattttatagaagatcgactgcttccttattagttctacctactggactgttaaaatcaatctcttttaggtaaatttcactctgttgtggattctgatgacatggtgatcttcactttaagatgattgacctatttgactcttgatatttttcagcgctattaagaatatctgcagtaagtgaccttcagtagattcttgcattgaatctgttcttcataaaaaaaaaaggaatgtcattggtagttcatcttatttaagtgtagttttcgtctttgttctaattttttctggcagtaattagtatctccccatcctcccagtgcgtcttatatcttccgatggagttgacttctctaaagagtacctgaagattataaatttaacaaaggcatgcttctgtctctcacttgaaacaggtgggactattccaatcctggttaccttg

SEQ ID NO: 93533 - DNA, 399 bp, Eucalyptus grandis
  Intron number 2 from transcript Egrandis_v1_0.010751m (loc us Egrandis_v1_0.010751m.g) derived from phytozome v7.0 (c hr-ID scaffold_8; pos 56486972 to 56487370 reverse strand)
ggtgtcgcttcaaccatccccgtgatcggagcacggtaactctgtcggatttgcttttttttttttttttatcgccatttattctctttctggttttggtttttggcttttcgatgttatcacttggcttcgtgcagccactctgggggcgatcttgtagtttttgttatggcggtcgctgcaattagatttgttggcgatattggattattactagaattgacaagttgggattgtccattgttgtcgggcttactaaatttgattttaatggcgatggattcaaaagtcatcaaagcattcttagaagatctatatggtttggcgcggaggtgatgacccctataggtttgttgattataactattaaaatgtggatgtcgaactcttgtgcaggtc

SEQ ID NO: 93534 - DNA, 398 bp, Eucalyptus grandis
  Intron number 2 from transcript Egrandis_v1_0.031345m (loc us Egrandis_v1_0.031345m.g) derived from phytozome v7.0 (c hr-ID scaffold_1; pos 15204914 to 15205311 reverse strand)
ctcggaggctcttaaaattgcagccactgtcccaggtaataatcaaaaactaaaataacattagaggtgtacttagggttgtccacaagaaagataaaaaaagttcctgaagacagaaaattagttgtaatacgtgttaaggatatgaagcaggcgctggagaggtccttgtccaaaaagaaacttggtgcttgaaggaatgaatttgttttcaggattgacagaagcaaagtttttacagcaaaaaaggaaacctttctttgccatatgtaatggagtaggctgagaagcaagcataaaacctaaactatttccatttccttggaagctaatttctcttctttgctcgatcaatgcatgtagggttctcatcgttgagtttgaaaggaacggaccga

SEQ ID NO: 93535 - DNA, 882 bp, Eucalyptus grandis
  Intron number 1 from transcript Egrandis_v1_0.031001m (loc us Egrandis_v1_0.031001m.g) derived from phytozome v7.0 (c hr-ID scaffold_1; pos 24493717 to 24494598 reverse strand)
ggatcttcgacagccgcggcaatcctacggtcgaggtgggttcatccttggggacgtctgtccttccatccagtcgttcctcaacatgctatatctgttatcgctctcggcttggcctcttcattctgtgtgatcgtgggcggtgattcctaggtaccttctctggggaaaaaaagttctaatcatgtcatgccggagcgtttgcgtttcttcttttctccgcgtcgttgtttcagtattacgcaaggccgattcatttttagtgatgtgtgaaagtttgaatccaatttgggaattgtgaataaagagggacaaatttaaattttgtgatgttatgagaaaatattagatggtttgggatcaccaattcgatgtgatcttgaaacaatcacgaagtgtcacatggagttatgacgagagggacttcttcttttttcttttttttttggtaacttgggaactcccgtacagccacaatcgaccaccggcgagggaaatccggagcgattctagcacagaacccactatcacgacatcacgtttaagaccactagcgacaacgttgggattcgaacaccttcccttgcatcagggaaaggagcccgaagccaacgccaccaccacatgaggtggtagagggacttcttcttgcccaagacaaaaaatatttttgtttcttctatcactagacttgcgcaccactaccctgcactaatttattttcctctctcttgtatcctctctccttccttctctgaagaaggaaagggaaacgaccttctctctccagcaaagcgttctctctccctctccttaattcaaatattggatctaccttcactctcagattttgctccttcggccctctactccagcgtccat

SEQ ID NO: 93536 - DNA, 900 bp, Eucalyptus grandis
  Intron number 3 from transcript Egrandis_v1_0.000659m (loc us Egrandis_v1_0.000659m.g) derived from phytozome v7.0 (c hr-ID scaffold_1; pos 30652145 to 30653044 reverse strand)
ttgaggtgttatcatcttttattaagttgtcgttttttggattttgtggggtttgctttctcttactgctgaaattggggatttcctgtgtttactactggtacataaaagttggagcaacttcccatatctaaaaacaaataaatgtgtgtactataattatcatcctttctacttaaagatcatataaatctataactcctggctttgttatctcactaaaaatgaacagtgaaacttgcttgaagaaaattgatgcaattgagctagaatcaattctcttgtcacatcatttaacctttctaatgttgaaagtttattttctaatgttagaagtttagtgtagaatacccaaataatcaccttaaagaggttacagattggagagatacccacatgatggaagtactagcaatattgtcctcacggatgatgctgctttccttgataataagttatcacaaatttactgtgacattttgacttgaaggacgacatatggggagatgtaagtacataagtgcgttaactaatcagcaagtcttgctccaaagccatataaaccttaatgtgtcatctagaaattcatattagctgcttgctgaaagaggttccaagtcttgtttcaaggcttgcctttttggtggaataactgtcacctcaatactctgtcaagatagttttgagcatgtcctagagtaaagggaaattttacccagtcagttgattgtggggttgttgtttgccgagcgttttttattgtggatgttgttacgtttagtggttcaggagatgtagctactctgcagcattctgctctccactttctctttaaaatattcaaacatgtgaattttgtgcgtagattctgccattcattggaccaacacaatcaatctt

SEQ ID NO: 93537 - DNA, 285 bp, Eucalyptus grandis
  Intron number 2 from transcript Egrandis_v1_0.000659m (loc us Egrandis_v1_0.000659m.g) derived from phytozome v7.0 (c hr-ID scaffold_1; pos 30653094 to 30653378 reverse strand)
aggacatattttcactgctgaagtaagaagataattgctctgattaatatgttgtgtatctatgctttgattggtgtattttgaaaacaatgtttgctatgtcagcactgtcttctttttcttattttcaaggacaaacctttgtggctagttcttgagtttgtgcttaagtgcagtattcggacatagacccatcaccctaagtaaaaagatatgtgctgctttatactttatatgagtgtctttgctgatcgtacattgttttgtttgtgtcttaggtacacc

SEQ ID NO: 93538 - DNA, 928 bp, Eucalyptus grandis
  Intron number 1 from transcript Egrandis_v1_0.053086m (loc us Egrandis_v1_0.053086m.g) derived from phytozome v7.0 (c hr-ID scaffold_10; pos 30239303 to 30240230 reverse strand )
tcgccggactcgtctcgacgtcgcctttctccccatgtgttcaggaaacgatttcgacttacaaaaactcagaaaaatggccgaacaacgctcgggtgtcgggatttctcgcccgatccgtacggccgaaattttttttgcgaaaaatcaatcaaaaaacatcaaattgatcgggaaaacgtgaactagggctctgataccaatgttgggaataacggatccccgaaaaccggattcgacaccgaatcgaacccctaaatcaatgcggaagacgaagcccgggaaaacacgtatcaccgatcgtaaagcacaccacggattcgagcgtaccttattagccacagattaaacaccgacgccgacaagaggaagagaaacggtcctgttcgattcgatgaagccttgaagggaagaaaagcgcgccgtatgcttactgtttttccttttgagagagagatagcgtaaaaagaaaaagacgtacgttgttttctatttccaactaatatcatttctctctctctcctcccttttatacctctccctttccacgggccatattcccatgggccgggccttttgggcccagcttgggcggacgggccttaagcccatctcataaatctatcaaaatgtatatcgcttttttcattcttgtaacgttacgcagggtaagtaagtgcttttgtatttgattccaatatctagttattggttataaagagtgaccgttttgaggatgttccagaggtaaattcaaggctcatgttgtttgccttgctttgtcctctccctttagaatcctacgatcgacaagggtgcccgaccgttgcgccttttggtgccgacatcgagtttaaccatgggattttcgctgctccccgaaaacactagagaactgtggaaggagtgggagctgcggttgctggtc

SEQ ID NO: 93539 - DNA, 726 bp, Eucalyptus grandis
  Intron number 2 from transcript Egrandis_v1_0.033257m (loc us Egrandis_v1_0.032931m.g) derived from phytozome v7.0 (c hr-ID scaffold_8; pos 13497782 to 13498507)
agtgtcaagaacaatacacaggtacgatatcttagtggcctcacgtcagtacttcatcgacatgtgatgttttcatagacttgatattttttaccaaatagtaaggagtactgataagtaacatagctaaacattttaatggagaatcttttgtacagcaactaggatggtagagaacctaatcttgcgaggctgaaatacaatttcattttttttttctttcagcaagaagtacgctaaggtaagtggtagttgcacatggattaagtaagaggactgtacttcggaatcatgatagagtactgatcagtaaacatagctaaacattttaatggagaatcttttgtgagacaactaggatggtagagaacctaatcttgtgagactggaatacagttttcttttatcttttttcagcaagaagtacgccaaggtaagtggtagttgcacatggattaagtaggactgtccttcagaatcatgatagtttccgattactaggtaatatagtgcgcgtaaatcctggtgttattgatctgggaagcaccttgaagatctgtttgggttcatcaatctattaattgtacgacaaacaaaattcttggagtgaatgagttaaaattcatcaatctgatgcccgcagcgccgatgtggctttgagtaagtttttgatgattcattgtcttttcaggtgctcataaattgccggaacaacaagaagctcct

SEQ ID NO: 93540 - DNA, 587 bp, Eucalyptus grandis
  Intron number 1 from transcript Egrandis_v1_0.027267m (loc us Egrandis_v1_0.027323m.g) derived from phytozome v7.0 (c hr-ID scaffold_8; pos 66386176 to 66386762 reverse strand)
ggtatgtatgtttttttatttgatatacgccctgtcaaatctggtttaaagaattcatcactttgttctggggtgtcaatggtccaaactggtttttgtgtgtgatagcatggccatcatcttagccagttaaagcttttgatccatactgaatatttttgagaaacattagttttgctggtccatctcggtttcttcttttttagaagttctaattgtacattttgcaccataaaaagcatgattgcataataaaatcatgttcttgtactaattgtacctgtaagaagtgtttcacgacaaaaacagattcagtcagtttatggcatattttctgtctcaatgtcacttcataatgaaatgattagtgaaatttggctagaaatggaagttacctagaagtcttgggctttagttctttcatttttcttttagattcaaactgttggctatcgggtgcagctctctctgtaagatttttgcttgttcatgggtctaacttaaggtgaagtacacataggttgctctctctgatgacggctttaatgctttgttgaaggtttgaagctacggaaacaatccgagac

SEQ ID NO: 93541 - DNA, 815 bp, Eucalyptus grandis
  Intron number 2 from transcript Egrandis_v1_0.011849m (loc us Egrandis_v1_0.008652m.g) derived from phytozome v7.0 (c hr-ID scaffold_10; pos 8071891 to 8072705 reverse strand)
tggagatctgccggtcaaaattactggatctgcaggtatattatttggtgttggtgcacaacttgctcatctgtcgataagttgatgttacatcttgatttctttcttccattcatttgggtagctcgtgtgaccattttattgatgaatcgtttttttcctagacactagttgcatgtcctccttgaactatttgatctgatgtaagggcatacttttaaaccatcatggaaatttactggcaaagaaaagctgaagacttgatatccacaaggctggactcaatgggcacatgtgcagtttaggccattttttgcatgcgcggtatcgagcaatcctcgccgcagggtaatgcaagtaaagagatcttgggcatcattatgatatttgagtttagaatttaatttgctggtgatattttgacattctattgattattaatcagggaacaggaagtgataaaggcatagccttgcaataacgtgataaaaacatgcccatgcactatttttgtactttgcatatcttgttgtttctactttatgatggtgcctaatgtaatggatggccagcatttgccgaaggttgagtaagtgtggatgcggcaaccaaaccccatctaatttgtttgttactagaagatgctttattattgagtcgaatgcgacactatttgtctattgattaggggccaagtgagatctgttgcatagatgttaccttttcactttgaaggttattgtgatatgttagtatattactattttttaagatttaccgtttctcaatagtgcaggcatttgacttggtaagtg

SEQ ID NO: 93542 - DNA, 1070 bp, Eucalyptus grandis
  Intron number 1 from transcript Egrandis_v1_0.003442m (loc us Egrandis_v1_0.003442m.g) derived from phytozome v7.0 (c hr-ID scaffold_1; pos 26711219 to 26712288)
tgggggtcttcggagcctctcgatctcgctctcaggtgaggttttgacttcaattcgtcgagttctttgtaccctttttgtttgatttaagatttgacttctcgtgctgttaattcctcgtttctgagccctagcttctgctgggctgctgcgaaaccctagaaagtttggaaatttgtagatttgtgtgaaatcgagcgtagcggttttgtgttgcagttagatctgcaattgtttcgaaccaacgacggtataaagggagccagttttccgctttgggttctcctagaaagtggatcgggatggagatcggttaattaattggggattggtcggttgcttctgctctacgatggattcaatcgatctcgtggtcaatgcaggattagttggttgaattctgggtaattagggtttcttttagcatgggttgaaattggggctaatggaagttcctgcgttcctaagatcattgacttgccgtcaaaatgacttgagcatttcttaggtttttggagttcacaactatgatgggtttgaggagtgtctgaagaaaactgcatccaggggatactaggggaaggaggagaaacttaagtttgatagagtaacttgatgtaccggatcttttgatctccagagcattttcttgaagctattttaaaatatgcttgcaaattgaactaatgagtgaagtggagctaactagatagattggtaaactaatcttgtcccttgctgctatggggaagaagaatatgaataatgatgtacactcggctgatgaaatttgtggtgtgttagtattaggggtttcattcatatgtgaggagtgcaaaaaaaggtgaatttattcctagttttaataaactagtcacgatctcttctttctctttattcttggcctgaatcgacttgcgaggagatacatcgaggaggtgatggtgctactgaaatttgtccttttacttgtttggtatgcatgactttagagttccttggaatcttattttgttgttctttgttttgtctcagggatctcctgcaatctgttagtgccgagcttcttt

SEQ ID NO: 93543 - DNA, 858 bp, Eucalyptus grandis
  Intron number 3 from transcript Egrandis_v1_0.028433m (loc us Egrandis_v1_0.027155m.g) derived from phytozome v7.0 (c hr-ID scaffold_10; pos 3477908 to 3478765)
ggctattggtctctgttttacccgtacaagggaaggtccgtccctcaatcagtttttttccggaatactagcttcgtcatcttcttcaacattgccttgtaagtaacttttaccagtataatttgcctggctattcttttgaatgtttggtaatagatctactttgattgaaaccacgacacaatagtactggggtagtattaactaggaagtggatttcattgtgcaagctgacctttattctgcaatttaagacatgcctaggaaagtgagggaaattgtaattgagggtgtacaaatctgcctcctatatcttatagcggcttctttctcttagagatgcttctgctgtccaggctagttgctgaccgaaactaccatattagttccgctgcttttaaatgtgtttcatttgaaagaacaattatgacccgcctggtcagaatctcagatttgtgatttacaccattgcagttctttatcaacttcttgcaatttttggtcttcacatgtaatgtttcatatgccttgtgaatgttccatcagtacggggattttgttaatttttgagggctctcataaggggtttgttagtagcaccggcatgggcacttgttgaagactgattattctctgtggaatatatgaaacatgatttgaataccaagttagttgacatgaccttactccaaatattgatctaaatttacgaaagttgtaacgtttctactagtgatatttggttaaccagtgtgctcacggagtcattcagatgatcagtttcaattcattgcctattccttttaatggtcatattcttcaaattatcacaggtttgtggggggattggcagcggcg

SEQ ID NO: 93544 - DNA, 1004 bp, Eucalyptus grandis
  Intron number 1 from transcript Egrandis_v1_0.055027m (loc us Egrandis_v1_0.055027m.g) derived from phytozome v7.0 (c hr-ID scaffold_8; pos 39490928 to 39491931 reverse strand)
gttgttgagggaagggtaaaagttctttgatcgttgttaaagtttcatttcttctctgtttttgagactgcttgaaactgtgtggaatgagtgatggctgaggaaaaaatccctgttctaagtaaacttcttcgtcaaggtcttcctctaaggtcggggtactgtgatggttagtgggggccatgagcatgctgttttttcttcttcttcttcttttgtctttttttgtcttttgcctttgcttttcttttctttttttttcttttttttttggggtaaaggcctttgcttttctttttatttcctaacaattgcgcttaatgtgcttttactgtaattttttgttcttgtggattccatcatcaaatgcacgaaacataatgccaatgtactccatccagcgtttaattgagttgtgtgtatttgcgggtcaatatagtggactgtttgcaaagacgaggagatctccctaaatcttttatttatttgattgagaaacccattggattaaggtagtttgcttccccatgcatatcattcttcctcaagcaagtatttcctatatatgatactcgaatagtctacaaggatttatggtcgtcttctttcctttgcttttgccatgattgcttaacatatgtctgcaacctacttgtggttttctcttaatagaatgtgggattaatgacataaccacaaagtcatagataaatgatcatacaaatggtagaaaagttgaagaagttaacacctggaaagggtttctatatgcttctacctagtataagttacaaataaagttcaatccatgtttggaagggttttttaagcagatctgttgcccttcttccatcatttttaagaacccaaacatgtctcaggtttgaagatagatttatcttttaaattatacacctgtgaaaagactttcttcctttttgactcacttatttgtttaacatttttcagataaattcatttatccattgctttgtcgaaacccg

SEQ ID NO: 93545 - DNA, 511 bp, Eucalyptus grandis
  Intron number 1 from transcript Egrandis_v1_0.033724m (loc us Egrandis_v1_0.033724m.g) derived from phytozome v7.0 (c hr-ID scaffold_8; pos 46669230 to 46669740 reverse strand)
acgttgctaagaacactccgccaaaggtagagtagtgggcaatcaaattcaaaaacatgccctagtccctttctcatttacttgttaacagtgaattttcttctcaataaatgccaaaagcttgaacctaactggttcatgggatttgcaaggtattccctccactttgaatagctagcctttgtgttcgagcccttaaattacctcaaaaaaagaagaaattatatacaactcttggatgattagtcgcgtcactactacatattgcccacataaacatgaaattcatggcaaataatccaatctttcccattaacttgtttccacggtgaattggctcattcttaacgtgcgattgttttttgtggcaatgtttctttgcttctccaattgattgccggtctcactcttttccagccaaagtttacaaagatacacatttacatgttcttatattcataatgtttcatgattaggactcacaggggaattcgtttttccagggtaacca

SEQ ID NO: 93546 - DNA, 939 bp, Eucalyptus grandis
  Intron number 2 from transcript Egrandis_v1_0.025213m (loc us Egrandis_v1_0.022682m.g) derived from phytozome v7.0 (c hr-ID scaffold_10; pos 28563796 to 28564734)
agaagtacggctacggacaggttcggttctcgatcattttcgatcttccgtttattctgtgaagagggttatgatcaaagtgtgtttttgatgattccgttggatggtaggagtagctagtctctgattgttgatgagatcgtttactggaagtaagatattatgtaccggtttatccctccgggactttcatgaatcaataagttacaggacaaatcctgtgatggtgaagtattctcgttcagaaacatgtcgtggtggttaatcatcgttctcagaacatgaaatcagatggccatcgaatgaagggctcaagattaattaccgaactgtgatgcctgatgtgatgattgtttggaaatgatcaatggaagtttcaaattcagaaaaaaaagaaaagaaaatatgaagcctctctttcccttgctatttagtaagccagtggatgagatatgttgatttgaggcctcactccaactgttgttctctttgcattaccatctatctattggaagattgaaagtgatgtaaaccacacaaagagctgaagaaatgatcatatagcttggtctagaattgtggtttatttgtacattaaagagttgcttatggagttttattgtcctgcttctcttggtgtccccttctgataccaactctgtgaggatcaacttatagttgatgtggatttcatatttttggttccctttgatttgttttgttactcaaaatggtatgatcctatatactcttgttttcaaagatgttttatggtttctggtattctttgaaaattgggagagcttgtgatgtggttatgctagtagaactaagagggacagtacatgctactgagagctctctgtgattataacttctgtatgatgatgcatcttaaagagattcttcttcatgctaacaatcttctcttctttatag

SEQ ID NO: 93547 - DNA, 976 bp, Eucalyptus grandis
  Intron number 1 from transcript Egrandis_v1_0.007662m (loc us Egrandis_v1_0.007662m.g) derived from phytozome v7.0 (c hr-ID scaffold_1; pos 2287999 to 2288974 reverse strand)
ccctctcccggcgctccgtcggcctcggcagcacggtacggctacctcgtgctctgctacactcgcgcgctctgtttttttcttttttctttttttttccgcgtttccggcgatgaaacgacgccgacgacgacggtgaagtagttcggcttctggatgtggagacagtcgagtgttgcgagctcctagaggttggtgagcggacgagatgcttgtcctttccctgtcgggcaaccgtacgaggacgctttagcctcgtgcatttcgtttttagttcgacgaggaatcggctgacgagtcaatcctgtatcggcggcgttgttcgcgtgttccgagtcttcgatttccctctgattcgaatgctgatgtgaggttctcttgatttgatgcgagggccgatggagaattggatgctcatttcttgagcgatgatgaatggttgactttggtgttggtcgtgtgatccgcagggaccgtcgttttctttttaaaaagactgagaaggtttcaataaacgcgaagtcgatgtttgagctgagatgtagttgagtactgggaaatgagaaactgatggttttaaatctgcgatgtaacgattttgaacggtgaaatcggagctgaaccgagctagatgcgtagaattgaagtattgggtcttgtttatgaagaaagtagggatttttattaggttggatggttcagattgccaacttatacatgaagttttcacggcagcaattttgcttaatgttaactttatcatttctttgtgatgaagcaggacattgttgggatgtgattgagttttgattttcaccaattgatacttagaaatttgtttggaatctgctttgctcgttatactttctatcataatagtgggcgtacattatgattctttgtgtcttcttctatgcttgctgctcattttttcaatgtctggatgtcattctgcaggtcgcagtgattgcgccaa

SEQ ID NO: 93548 - DNA, 288 bp, Eucalyptus grandis
  Intron number 2 from transcript Egrandis_v1_0.012560m (loc us Egrandis_v1_0.008815m.g) derived from phytozome v7.0 (c hr-ID scaffold_8; pos 31570743 to 31571030)
ccctgttgttctttttggtggttcatacggtggaagtaagtaaagccctttgaactacgttttgaactctacatttttttctcctgtctactgtgtttctctatgcatagattggtcaaaataattttcctagagaattttgatgcatcggtcatcttcttgaacattttaaaatttttggaatgggcagaaaatttcagtttttgatgtataagaatttttcttttcttgttcccctttgaggttcattgaacattttgcatggtaatctttcacagtgttagcagc

SEQ ID NO: 93549 - DNA, 805 bp, Eucalyptus grandis
  Intron number 1 from transcript Egrandis_v1_0.028646m (loc us Egrandis_v1_0.028646m.g) derived from phytozome v7.0 (c hr-ID scaffold_8; pos 51138882 to 51139686)
tggaatagggtggggagcacaggtaggcttgttttatcgtatacctggattttgatttcatcaaccttaagggccaagcgtcggaaccaacaagtgtttttggctttcatgcagtctgcagattaaccacgtgaatcaacgtgctcaaaatgattgtttagataataaacaccaatttgattttttactccatccggaatgcttgacgtattgtctgcttcatttccatggtctctgtgagaattttcctttgtaaatgtctggtctgtcatccttctatttcatggaatgtgccatttgtttctcctttctggaactctatctaagaacagtatttctcaggatgagatttggactttttgtttgattaccatgttgccattgagttttcaagttcctttctgcatctctgttccctttctctgaatttgtgttttgcttttttgtggaagtgggagaagtccctgagccagagattgcccttgtgttacttataatcgttccctttctgttaacatgtctatcgcattaatagcttctgcttgtgtggcttaagctcgagcaaagaagtcttgcataaaacataaaaatcaactaaagaaatctttagtcgattccccttcctcccgaaatgataacaacaataatagtaaaaatcaaatacataaatgaaaagattatccctgcaagaaatgtttgattttgtgctatatttttatgtagagatatccttattccagtcaatagtaaccagtcaagggtgattgcaggctggaggagaattgacagactttgttatagtgtt

SEQ ID NO: 93550 - DNA, 351 bp, Eucalyptus grandis
  Intron number 3 from transcript Egrandis_v1_0.047181m (loc us Egrandis_v1_0.047181m.g) derived from phytozome v7.0 (c hr-ID scaffold_8; pos 49845048 to 49845398)
gctacatatctcctagtgaggtaagttcatttttatctcctgcatatacaatgtcttcatttcttgctgtatgtcgtcgaaatgcttttctttaatccaagcgaggacatggataaccttgcatgcgcactcaacatgcactcgatcaactctcaaattctcccgtgagattcacccaattcaattcaaatgtgttgtttttcgtactttgtcatcactcatcaccattcgaaagaacatcaccaattcaagaaagttcttcagtttgtgcatgacaatggcccttcttaactcagaaaaaatagaaggcagttttggttgataattttgtttctctttgtcagttgaggc

SEQ ID NO: 93551 - DNA, 724 bp, Eucalyptus grandis
  Intron number 2 from transcript Egrandis_v1_0.011836m (loc us Egrandis_v1_0.011836m.g) derived from phytozome v7.0 (c hr-ID scaffold_10; pos 1433458 to 1434181)
gattcattgagagacatcttctcggaccctttgacgtaagttcaatgtcgtatccatttatcctggcttatttatgtggcagaagagctttatttcctttcttcgggtggttagtttgattggggttggtcattgtgcatgtgatgagaaaattattaataattgagacgttgttctcacgttgtttttgaaaagttaggctgattacccagtttatggactaggtatatgtaggttcctggatgatgatggagattcatgtgaaatagtggtctcttgcttggacatggagattattatgcatattccagatggaagatcatggcttttcgtattcagttcctctggtacaagttaggttatacttaaggcatcgattgccaaatggaactactgatacatcattcatctctactttctgaaacccaaacaagtctacgatctagcacttgcatgtataccagcatttctcttctgctgtgaacttgtgtctgaacaattgtaatccgttccgataggaaaactgtaaggaatgtacctcttgctaaaagcatgggatcagagtgaagatgtatgacctctctgtgtaattccttttaaagacctctgacgttgattatagattggtgtcttttgttggttgttctctattttctatttcatatttttttctcggtgaaaatcttgtgtgaccatctcatttaaaaaacgcaggggagctctt

SEQ ID NO: 93552 - DNA, 412 bp, Eucalyptus grandis
  Intron number 1 from transcript Egrandis_v1_0.040994m (loc us Egrandis_v1_0.040994m.g) derived from phytozome v7.0 (c hr-ID scaffold_10; pos 21674637 to 21675048)
aaagtaatttgaaggtgaaatacttacaactcacacaaggaagagaagaagatagataggcttgtcgatttatttcaccttcacaaaaaaaataataattatatttataaacttgttacatgacctttactcttcctaatagataaatctagctttttgaataagatctagaaactaacaaaataattaccacatctcaccttatctttgaaaacaatcactatctctaaaaacaataaaaatacgaatagactcattaaagataatgatgaacagacttattaaagattaggctgtaattatgtttcttcttcaatgcggattaatttggtttatttctaacactacatcttcttatggacaacctcatcgacaaggggcaggacgtggtgctgctccacagcaagggcat

SEQ ID NO: 93553 - DNA, 870 bp, Eucalyptus grandis
  Intron number 1 from transcript Egrandis_v1_0.005128m (loc us Egrandis_v1_0.005128m.g) derived from phytozome v7.0 (c hr-ID scaffold_10; pos 6847684 to 6848553 reverse strand)
cggatcctctgcctccgtatccggcttcagtcaaggtctgagctcgagttttcgattactcgctctttgctcgaaactgctcttgaaaagcgcgcgcgcgcgcgcgcgggtgtgctctgcggtgcgaccggaatgatgtctttcgccggtcatttcgcggatgcacgtgttggatgatcgagcgttcgagatgtgcgtcttcgttcgggagttagcgtgcttattggatacgctgttaatagtcaatgtagctattgatgttcggattgttgtttttgctaggaataggtaatgctgttttagaacttccaaagcaatcgatgctgatgtcgcatgttgttgggccgtctgagctattcctttcgttaggtctttgcaattggttgcgtcgggacttggtatgtagcatgaatgctgttgtgtggaaatgtttttccgtctctaagatgaacagcagtactcttcgaggcagaaatcattattgaactgcaatagaaagattggaaccattttctggttaagacttgatgatgcgtaaagtcctactaagatagcaacttgggctccttgcttctggaggttctctttcaaccagtgttcagtaggtcccctttcaatcttcagtttggatgttgtgattagctcttgcaataatgataaacagagtcttttcccttaattgggtttggttaaatggatagttctcttttgttgcaccccttaagtatgacgttgtatgttgttgggttttctcaaagattccatcatatattgtgaaaataggatcctgccatctgcttgcctttgttttgtaaagaacgtcaaaaaatggctatatgttttccttgagtgaattcgattgcctgcagg

SEQ ID NO: 93554 - DNA, 500 bp, Eucalyptus grandis
  Intron number 2 from transcript Egrandis_v1_0.030437m (loc us Egrandis_v1_0.030437m.g) derived from phytozome v7.0 (c hr-ID scaffold_8; pos 73646670 to 73647169)
ccattgtataggtaaggaacaaccttcgtgtggtggttctgttctgtagctaaatcgcatttaagatgtggcttgatagtttatcatggcttagatcctcattgtaactatctgcaaagcacaaatactagttttttctctcggcccctcccttagtcagaatagagcccaagctttttaatgggcatcaggtccagattaaattttgatgttgagagtttgtcctacggccaaggcttaaaatgccttttcttgttagatgactttcttgataggtcatgcatctctaaattaaatgcgcaaaggctcacatattgtggtcagaagctttggccgttgaagattatgaagcattggtatccttgtattttccgagttgtgatcatgcttgtttcataatgcatcttaccttccttcctagaaactgcattttcgtttgtttgataaccttttaagagatagtgatgaagtgcctcttggtgcagctgacgtagaggatt

SEQ ID NO: 93555 - DNA, 730 bp, Eucalyptus grandis
  Intron number 2 from transcript Egrandis_v1_0.020803m (loc us Egrandis_v1_0.020803m.g) derived from phytozome v7.0 (c hr-ID scaffold_8; pos 6271048 to 6271777)
accgtgtcgacactcgagtccccatcgaagtcactgtatggatcctccttaaacctttacctctctctcgagactttctcggagccatatgatcagttgctaaactagattggtgttaattatgcatcgtcatgttgttacaagtttgttggattttgtggcagttgcttgtaaatattgttaaatgagatttaagatcggctgatagcggagttcaagatgcggcacgatgctgttaaaggggttgtggaatttagtggtttagtggcttgagtttttgctttatgggcatcttttacaagttaagggtcaacaatcaagaaaatcatttgaaatcttcctttgagatgaaagtgctccggggttcatcctcatttatatacaagaatcacatttgaagttgttcctggactttctatggaatggagacatttggttcttgacatatcatcgtgaaatgtgacaagtacttcgaacacttctttaatatgctctcttctgtgatcgattagagaaatccacctccgttaactcaatacctagtgacttttttgtcacattgagatgcctaataattgactaaactattcagggatcgggaaacataaaaagctaatgatgtgcataattttctggatcttaacacgtaagatcttgacggttgttgttttgttttgtcttgtgaatatgcacagatcggagagctaaagaagctcgttgaagagggtaa

SEQ ID NO: 93556 - DNA, 991 bp, Eucalyptus grandis
  Intron number 1 from transcript Egrandis_v1_0.007501m (loc us Egrandis_v1_0.004851m.g) derived from phytozome v7.0 (c hr-ID scaffold_10; pos 7848173 to 7849163)
gtcgggtaaatccaccctacttgactctctagcaggtttgatctctctctctctctctctctctctctctctaccactaatctatctatatcgcaaataagatggtacataaatttgcgtgcatagcagattggatgatgtcttttcaataagttcttgactatccagggaaatttcctttgctttcttgaaatggttagaacaagaaattctcatgtctaagtggttttggtacctcctctgcttttacttttactcaccaattaagagggtcgcgacaatttctctaggcatgtccaattcaagtgcttgtagactttattcaacgaagagttatcatcgttccctttcccctttgaattcgaaccaaatcgtgggtataaagagggttgtcttgtttgtacattgaaaacctatatgaaaacaaaagcaaaagaaactagattttagacctaaagtggcgacggcacctggggaacatttcttattttggctcatctttggtttcttaatcattccgagggttggctaaggctagcaccagttccgttgagccaaactcaggttcacgacgagaaaataccaaaaaagaaaatctaatatcggcaatccaaacttctgtcgagttattttatatagctcatgcggcctttgttaattattaaataagccaattcagctacacttatacacttacagcctagaaacgtttcgaatacatggatgaccattcttacggttaaaaattaacaccagcgtaagatctacttggaattggaatattaagcaactacttctatttaaattgggctttatcgttttgaattttccgcaacatctggtttggttaagacaaagttcccctaaatggcagctcagcagaaccttgtagcaattttgatttatttactcgcatgtagcttgtgcatatattcaccatatgtaaagaagcattgatgttactgcaggtagattatccagaaaagtgatc

SEQ ID NO: 93557 - DNA, 820 bp, Eucalyptus grandis
  Intron number 2 from transcript Egrandis_v1_0.046541m (loc us Egrandis_v1_0.046541m.g) derived from phytozome v7.0 (c hr-ID scaffold_10; pos 7180325 to 7181144)
ggtcgatttgggtactttctatttgtaattgtttgatttgcctttctgggatacgactgaattttgcccaatgctcgaattggtcttttgtgacattcgatgattggagtgcttccctcgtgtgccttgtgatttattgttttggtttcgaccattgatcctgctgttctcttgttgtcaattcgcaaactttagcttctccaagataacaaggttgtgcggatgggatggttttatcattgcttatgtttgttgagttgccagttatgcttgttcagcccctgtggacaactttaaggattcgtgctggatgcagagacgagttctcagcttagttgaagaatcagcatgcgtttttcttttgtttttgtttttgctttgtttcgtggaagattttctaggtgttcatgtactgcaatcatttggttcatgtcgacaaacgatgatatgcaattttatctaaacctgccttacataggtaaacctctgtatgtggttttgccaaaaacttcttaccataggtatatcgagttattaacggtgctttcttgaattgtgcaaatgcaatctgatagttttagttccaagttttaggaagcttaggagcttctcttctagttgggttaagcttaggagcttctcgcgtatgaattttgtctgtcacagagagttgttctttgtggtaaaagagagacaggtctatatgtaaattcttttttgactgagctaatcttcaactgctgtaaagctattaattgttggttgtgaaaggaaatcaaactttctgcttgttttaaatcggttttaggtaacaagcata

SEQ ID NO: 93558 - DNA, 727 bp, Eucalyptus grandis
  Intron number 2 from transcript Egrandis_v1_0.007358m (loc us Egrandis_v1_0.003990m.g) derived from phytozome v7.0 (c hr-ID scaffold_1; pos 31007009 to 31007735 reverse strand)
tgcccactccaatctttggtttggttgaaggtaactttaacttaaaagaatcctccaataatagttccttccttttacagcaatactatttcagatgtttgcatgtaatttaagagagtattctgaatgatgatgaatgcttcaggtggcaaaccttttgtaattgcttgtgaatgtgggtagaatggcaaaatgagaagtaatttttgaccagatcatttttgacagtgcaatagaactataaaatttgtaaagcatttcatgcatgcaagttgttaaatgctttctgagagagcacctctaagagtaccagctgtcttgataattatgggtgtagtgcaccttggtatcggtgctcaattatttacatagcatcttaagatgctgaagacttttgaataaggctatggtaggaaatacattttgaaggtcattacatggtattattgctattaacaaaaatttagaatcttcaaatttctgaaagcaccacttatcagagtcttggctttgtttttgcttgcctaagccaatagagattacatgagatcaggtcatggtttggagtcaccttatgggaagaaaaggtgtatttttttttctagtgctattgctccactgtttattattagttgaagacctgtccacccagaagggttgcaagctagtaacagcttattggtaacctcaagatacagatattgaactctcagccaaaccaacgttt

SEQ ID NO: 93559 - DNA, 939 bp, Eucalyptus grandis
  Intron number 1 from transcript Egrandis_v1_0.005181m (loc us Egrandis_v1_0.005181m.g) derived from phytozome v7.0 (c hr-ID scaffold_1; pos 31978410 to 31979348)
cgcactgtaatgtccctctcgtcatcatcttcccgcttcatctccttgaacgagatcgtttgacaggcactcgcctcttcgaatgatgaatcccgatgcgtgcgcgttcggctttctgcgaacggtgatgtttctggcttttgatcgcgagcggccgagagatgatttgccggatcgcgagttaatctgatgacgatgattatagtgctgaattcgtgatcgtttgcatgcctgatccttctttctccagcctacgttgagttccacgatgctcggggggaactggtggagcttttgtatggttcagagagcgcgtctagtgtttctcgtgctctgtttgggtttgccgcggaaccaggtctcgattagggagaagtttctgaagaagctcgcttaaaatttactctcaaaaagcttaggctattagagcacggtgctatggtacattctatagctcagttagcgcgaaatttgttgcgattttgaaggttatgtatgcgtatgtatttaataatgcacgcacatgcaatttgtgatctgtatcgaaaatagatagtagttgagctaactggaaataaatagccgatgaagggatgaaattgatgaagttggaggggaggagacctcttcggaatgtttaacagagagttaaccgggagaagagtctctttgaatttttttgatgatagaggcgtgtcgcaataagggagattggacataaattgtttgaacaagtcaattttacttgtgctgcactggaacatgtttccaagatgttaattgaccataatacaatatcgtcacaaaacatgtgtctttccaatagctttctttgaccatcagcacactttgtcgttgattggcaagtggataacggaatttccaatgacaaaaactatgtcaggcaagtaggtactgctgtcaatagattggtggaag

SEQ ID NO: 93560 - DNA, 565 bp, Eucalyptus grandis
  Intron number 2 from transcript Egrandis_v1_0.022631m (loc us Egrandis_v1_0.022631m.g) derived from phytozome v7.0 (c hr-ID scaffold_10; pos 7155172 to 7155736)
tggtacgagtgtgtgtcctcacatctcgccgcgaggttcgtttctctcctcgatttggccttatccgaggctttttatgttgctcgcttgctcgattttgcttgatttggaacttcctttttggataggatcgcttctagtagtttgcgtagtgatcgattcgatgattgtgagtttcagatgctggttcttggtaccatgtttcgtgatttagcttcttagcatcagtacccaaaagggtcatgaaaagcgaggatttttctgtgtttatgaatgcctattatttctatagacttgcatgaaagcatattcggaggcccttatcttcaattaaaggtcaacaatattgatcgtctgattttcttggtatggtttggggaggagatcagtgcatgcctgcgccgtgtactttgaatttgtcgaagttgagaaattttcagcattgttgcatctcatcttgttatagcattttattttgattttagagtcgaatgcttcctaatgtctcctacttttgttcaattgtttagcttccctggcaaagctgctggtgttagagtaggtg

SEQ ID NO: 93561 - DNA, 780 bp, Eucalyptus grandis
  Intron number 2 from transcript Egrandis_v1_0.008928m (loc us Egrandis_v1_0.008928m.g) derived from phytozome v7.0 (c hr-ID scaffold_10; pos 7062447 to 7063226)
gatacctgggcccactctgactcaggctagtttctttcctgttattttcatataatgatcttctgtcacatgaatttcaacagaagcatgttggttttttttttcaatttggggtactccgcctttatttttttatgggcaggagaattttttgaatcttcttgtgaagtttcactcctgacctcctgaggccaggagaaatacagtgctgcaaagttaatgttatgatcaacttggggtctgaaaatcgatcttgggtttgccaaatataattgcgccaagagctttggctcagaagattgcctaaaaccctctatttggtaatattttgttatatcaaagaaatttcttgattattcaagaaaaagtactcaactgagctcagctttaagcgagtcgagaacatttcaggttggtttttgaagtttttacactgaacagtggagtggaatcgtgtagtagactgtcttaggggacttgagaaaagttgagtcttgggcacaagaattttcttttcacttttgtgcttcagtttggtggagtctgaccaaacttcgaagtccttatgaaaaacaatgggcatctaaagtagctaaattcttaaagcatttaaaagcagtgaaaagtaaaatagttgtcatgattctgtaagcaggttctacgttttcattgctagatgctcggaaattcattagtaagccggcataatacatgggttttgtggttttaattttgctaattatctggttttccatcttgcagtgattacaggcggagcaa

SEQ ID NO: 93562 - DNA, 955 bp, Eucalyptus grandis
  Intron number 1 from transcript Egrandis_v1_0.016712m (loc us Egrandis_v1_0.016712m.g) derived from phytozome v7.0 (c hr-ID scaffold_8; pos 40623163 to 40624117)
agtaaggagctctgtgagaatctccccaccaacaagtaagttttgtttgtcatttgccgcttagtttcttttgtgtatgtggagccatcctttagattggaaaagcctgcttggtcataatttgatttgcatttcccgtttggtcaatggatgaataattgaatcgtaatcatatcggctgttgatgcctgtgagtatgttttatatcaaatgctgtccaggccatgcgtcgatttatcgatgtgagtttaactatactcttgcccttagtgggtttggatgcggctgacaaatttagaaagcctatgtgttgtcatcagcttcttcacttaattcgaggagttggagttgttgagtcacagcactaaattttctagccgagtgagttccccatcatatgtggacaacccaacggttgtcacaagaatgcaactcaatgataaaacaagccattcgaaattattgcttaaactgctgcttattttcttcaattgtacaacctacagcagttttgacatgaaacttaatagttacagcaggtccacaaagcatatcttttcaatgtaggtggttgtttcgatcggtctcagcatatatagagaaagcggtatgagttggctcttctttattcgttggtgactttgcttgatatgcttttcctgtccggtgactttgatggtcaaaagtgccgtagttggtaattgggtgttgtaaggaatatgaaattgaaagattgccaatcctgcgattcaactttatgcttgagcaagaatgttccttgcgttgtgaaattagaatgatagtcaggctaggaaatgttttcatttagttatgctcacattaaacacacaaaggcccataatgccaaaatggtttatgttcttctattatgagatgtcctacttcagtgcattcacacctttggtatttgattctcaggcacatcgagttcttc

SEQ ID NO: 93563 - DNA, 922 bp, Eucalyptus grandis
  Intron number 1 from transcript Egrandis_v1_0.028722m (loc us Egrandis_v1_0.028722m.g) derived from phytozome v7.0 (c hr-ID scaffold_10; pos 10359021 to 10359942)
tcatcaacgaggacctggtgagagcaacggaaaccctagagatttttttgctgccgccgtgtcgcttgctgcgtgttgggttgcttgtttcggggtgacgtgccggttattttgagaagctcgcgcgggcgattgatttgattctctgcggagctactgcgtagttcttagttgattctgttttgagctgggtttatctgaattttctgtcttgaatgaagaaaaacctgtggaggggcgtagaaagagggggatttcagtttaattacggtagagatgatattatgaagtgagaaccttcaattggaagattcgtgaatgtcaatctttcttataggagtcggaaggacggtaaattttgaatcttttcatggcgatcggctgcgcggctgttcaacagtgagctgcgaagtgtttctagtttgtgggtgtcgccacaccagccaaaacgatctttaaggattcgtcattggttgtggagatacggttcttgatgatgacccactaactctataatcgatgagcctcccagcgcatggttttgttcaaataatttcggatgctggctgagctgaagtggtcatgagtagcacaatagggttcggcatttacagtgagagctaccaggattttgtcagcgtagtcgcattatgcattggaacacaattgctgttgtatctggttaagatgttctagccctgttgtgaatattgagaggaggattccattttcaatcaagtgcaaatgaactagtagtgaaacctttttaaagttgcctgtgtcctttatagaatgtaacttcttcatcatatcctcttgcttgcttggtctctttgaacatctttagtgatctactgcagtaaatgacttgtcaaagttgtagtcgatatgggaggctcattccgtaatattgatgttaggt

SEQ ID NO: 93564 - DNA, 930 bp, Eucalyptus grandis
  Intron number 1 from transcript Egrandis_v1_0.020213m (loc us Egrandis_v1_0.020076m.g) derived from phytozome v7.0 (c hr-ID scaffold_10; pos 31813977 to 31814906 reverse strand )
gagcgctacgtcttcaagcgccgcaacgacggtgcgttccgttccgttccccggacaccccaaaaaaaaaaaaaaaaattatttagtctgctcgggctcgatgtgatgtgaaatcgttcgtattttgattggcgatgtgcggttgcgcctccgtgggatgcgtattggttgctgggatgtgagctgcttatagacggtgtttttatgtcggaagttctttcgatgttactgcacgagtgtagtgttacttggagaagttgtgggttgtgtgcctatgtctctggtcattttgtgcacatttgagatgctaggagaagttccttcctatcccgttccgcgccctcgattgattggcgcagattcagtgtgttttgttagatacttctcgacttgaaagttccaaaattgaatgaaacagatggagctcattgtcggctactcttgttgatgtcgaaaaattgaagctccagttctttcatagcgggacatcacgtagcgtcgtgctttgtcgagaatcggcttgcctgagcccaaaaaaaaagaaattagaccttcccatcccgttctgcacccttgataattgggtgcagattcagcatgttttgttagataaagttccaaaattgaataaaacgatggagctcagttgttggctacgttttttgatattgaaattggagctccagttctttcatagcatgacattttgtcgcatcatgctttgtcgaaaatcagcttgccagagatttttttccccagaatatgcaatgccatgctttagacagatgcttgtactgggagttcacttgcaatgtgaatagtaatcatttttcagtatgcttgaagaataggcttttctttattttcagcgactatctcactcttgggttctcaggtatatacattatcaatcttggtaaaacttgggag

SEQ ID NO: 93565 - DNA, 593 bp, Eucalyptus grandis
  Intron number 1 from transcript Egrandis_v1_0.049640m (loc us Egrandis_v1_0.049640m.g) derived from phytozome v7.0 (c hr-ID scaffold_8; pos 41078206 to 41078798)
aggacatcaacaagcctcctgtcaaaataattcaggcaaacccacttttacaatatttaaataataaaccacgtcttcatctatctaacagttgaagtttttaaaataattggcattggtcccccaaatctcgtatgatatcataattgaagattttgaattcaaatcttatcaaattctattttcctctccaattaaattttcatatttagtactaggcaaaagaccatagtaaacatgatggggagtattagaatatttaaataataaattactgatttatttaatggcttttagaatactcaactatgatctcataaaatctcatatctaactttctctttttgcttttgagaaagagaaccgctctgtttttagtgaccttggacaccaaacggtccacatcatcatgagaaaagaaaaataacttgtaccatcgcacctgaatccatcgatcgcatgccgcactagtcatataactaatatcatccgctaaactacattttctttgccaactgacgttgattttcccctcattcttgtccctctgtttctgttttttgttttttttttttcctgtttgcagagtcctg

SEQ ID NO: 93566 - DNA, 1004 bp, Eucalyptus grandis
  Intron number 1 from transcript Egrandis_v1_0.000479m (loc us Egrandis_v1_0.000445m.g) derived from phytozome v7.0 (c hr-ID scaffold_10; pos 9227892 to 9228895)
atttccacaaatcgaagaccctcgacaacaaatacgtgagttcctccgcccgctcgcctcgcgatcacgagccggaatttgcatgtcctgtggccgattcgtttggggttctggcattagtaccgagcgcggttgagtgtagaattggggtgggggggttggcagggggcggtgtttgtttgcgacggtgtttctctcgttttgattctgcttttgatcgcgcaaagcttgatggcattgccaattgccagagcactctgtttcgatttccgcattcgtctgcatggaagctgagctaacacgtagcattttgggtctttacttcatttcccttgtacgacaatctcgtcttaattactctctggacaagttaattaaaccacgcgtgtgaattgccgttttactcgttaaattccaaagttcagtaatttcgggacttgcttatccctgaaagaagtataggaaaacaaaccgggtggtggcgctttgagcagattgaatattaatgtatgtcgtgaagagctgtagtttgtatgcatccagaatgaacatcctcgtgggtgaaaaatagaaaagttaaacatttaccgaaattttctcccgggtagtcataattgtgcttgtttcctattggaatgtgctttgctatatagaatgtgcagtggcgcttgtcaagtcctgatgaataagtaaatcttgttatggttttgtccacttttttctaagttttttgcttttctaattctatttatatcctaaatttgttctacgaattgcctttaaaagttattcttttgttctgatattggagtgagatccgtttcagtctcccattatctgaaaatagtctgtggtagatatcttgcgcggcccttgtcagtaattatctcttggtgtatcatacttcctttcttcagcaaaatggggaatattattggatgcattatattattttgactctgagggatagcatttttaaattttgttgtggacatttggtgtag

SEQ ID NO: 93567 - DNA, 787 bp, Eucalyptus grandis
  Intron number 3 from transcript Egrandis_v1_0.048504m (loc us Egrandis_v1_0.048504m.g) derived from phytozome v7.0 (c hr-ID scaffold_1; pos 6226054 to 6226840)
ttgcaggacggaccgacatccctgtggctgaaagggtcccaagtgacaattaccgtatgtgctttcctaattgcaggctttcgtataggattcaggggataccattgatcgattttgctccttctccattaagcatgagtgttctagagtttttcacaaaatggatcatattttaacaagatgcatttgtggtagatgtgaagggatgaacgtggtcgagtcattgataggatccccatcagtagatataacctagtagtgataggagtagtatcgacactcgcacatgtgagggacccttgattttgtatgcattttcagttaccatgtgtgcctttggtctggatcatgtgtgcatgcaacatatgtgacgggtttccaaggatggaagaggtttgcaggacctctcattttatttctgaagtctgggcagctcttgtttgtcattgctcactacagaaaggaatctcttgtagtcaccatagcatgtttatttcataaagcaggaaaaccccgcaaggctacctcttggctcttaataataatcactgagaactcttggatgctctacatcatatttgtgatgttcttgaaccgtaactttgcagatctcatacttaagtttgatcaattgtaatggccttctgactgtgagctgattctcatgcactcttctaaatgacttaaaagccaatcgtttattctaaagaagcatcatcagttttttgattttatcattgtttctcgtaaagaaaggtgcaaagcttcgaattgtggattttgtcca

SEQ ID NO: 93568 - DNA, 546 bp, Eucalyptus grandis
  Intron number 1 from transcript Egrandis_v1_0.035419m (loc us Egrandis_v1_0.035419m.g) derived from phytozome v7.0 (c hr-ID scaffold_8; pos 49284058 to 49284603)
gaccccaccgggtatgtcccttctctcccgatctttcctcgaattcgtgggggagttgaatgaattcccgagtgcggttggcgaatcgcgcgaggcatcggaaatggcgggtcttgatctgtctgagtgtagaattttgcatcttttttgcgttgtcttaggaatgtataagccgttcggttgcttgatgattgctttgacttcgattcttttacgtaattggtctctgaacactctcgtaaatggttgaatgcgattaaatgtcgccgaaatcgctgaaataagtgaccttttgaatcgtgtgtgttgaagtcaggcaatccgattttttaatttggtaatttactttttctttcggggaattgctgtttatcctcacgaatggtcagcgaacctttgattgagaggactttgaaaaattttcaagttgagttcgagctcgaaggaagagaaaaatctaacataagttgaacctcctgtagagattttagagtacatgaaatttgtgttccttttgtttatgtgcactcacaggctccctcgtgc

SEQ ID NO: 93569 - DNA, 665 bp, Eucalyptus grandis
  Intron number 1 from transcript Egrandis_v1_0.046489m (loc us Egrandis_v1_0.046489m.g) derived from phytozome v7.0 (c hr-ID scaffold_8; pos 36350627 to 36351291)
aagtttgagatctaggaaggtgcattgtcatggaagagaattttgaagatgctgaaaagcgcctctgggtgcaaattgatgagaatactcaagtcatactgaggagcaaagaggtgaaatttatttagagtagaagatataataaatccagcaaaatctctgttcatgttccttaaattgagaatgtcggttgatggcctgctttgttttctaccttatagagacatacaaagcaactctatataaacatctaaggtatatgttttcggccttacccatgtgaaacaagaagaaagttaacgctccatttggttagttggaatttttcatttctcgttttggtaagaataaaatgagttctctgcttccttgaagaggtgtttagtctatggaaagacaaaggaatcaacaccaaatagacattttaaacatgcttggtttgtcttattttccagttaagaagaagaacactaattatcttgttacaacatgcgtttgatttaattagtttggggtcgaagaacttttgatattgtttcataacatgcgtttgatttaattagtttggggttgaagaagaacttttgatattgttgcatactcatctttattctttgctgctgttggtaggaaaaaggagctatacgagcactcagtttggatat

SEQ ID NO: 93570 - DNA, 994 bp, Eucalyptus grandis
  Intron number 1 from transcript Egrandis_v1_0.005594m (loc us Egrandis_v1_0.005590m.g) derived from phytozome v7.0 (c hr-ID scaffold_10; pos 4941304 to 4942297)
tgctgccatctcagcggaacctcgaacgggaacaggtgcgcttgcttgctcgctcgcttgctttcacgagttcctgctcttcggtttgtcaaactctgctccgcgtggagtgtgaatcgaaggcgtaagcggatgggactcgcgatcgatttgacctctcttgggtcggcgacgtgccttttgacgtgggaaagtttctggttgaattggctgtgccgcttcgtttagtttgaattatattcgagtttgtctcagtattggagctgaaaagtattgatcttttggcactttcatgcctagttctccttcggtgagcttatccgcgtcgtctggaggttgcattacatacacatcgaggagtcattgcttatcgatacgtgttatgggttgattcgtagtagaactggtttgtttcattgctgaagatgatgaagcaacagtgacatctggatattgaaactgttggtgtcgatttcgactcctacgtcttgcaagaagacagagcaaaagtccgagagtgaaagttagactaaaagtagaatggcaccgataaaaacaaaaaaaaaaaagaatataaatatcttgatttttatatacatatatatttttttgagccaataacagtatctcgagttaaatagctcttcttctgtggttacttaatggaaaacatggtttataaacatataggtcttgtccacaggtgcccctaggacacttattaagcatacttaatagggtatatttcaatttcccaagcgtagattacacataacctaagaaaaaccgtgtactggaaaatttgcaaactttatttatgtggtttcttagcaagcgccgtgggagtactttctgacaagatcctaaagacgtacatgtgcgagctgtctgctctcatgcttgtgcatctgtgtacgcaactacttacatcttgtgatgattcatggatatggcaacaggtacctaacaacacaacttaggcattacacacgac

SEQ ID NO: 93571 - DNA, 990 bp, Eucalyptus grandis
  Intron number 1 from transcript Egrandis_v1_0.010840m (loc us Egrandis_v1_0.010840m.g) derived from phytozome v7.0 (c hr-ID scaffold_1; pos 12882336 to 12883325)
ctctctctctctctctctctctgcaatctcctctggtacgatatctctcgcgtctctgcgttcgaattcctcatctgggtcggtttctttgggttgaattccgcttcgattcgcgtcgtccggcgagaattcctaggaaaaggagggaaatttcgagtcttggcgctgttaattggacgacgacgccgcctgtttgtgttcaatgatgtgcttgtctctctagtttttctgggttggaggttaaaatttgtgggcaacttctcgttgttcgatctgttgtttgtttctggtcgttcgaggattttgtagctcggttgagggtgatttgaggttctggttttttttttccggatctgtgtttcgagctctatcttagaggttttggtctttccgttttttcttttttttttcctgcttgagttttagattttgggtttagatcatggtattcctttttgggaattctccagacgtttttgctgtcgttgatttagctgcggttggatgtccaaagtcttgaatttcggatcgttgtctgacgaagggcgatgattgcatgtcgtgaatgcgaattctaatacgattgcgcgattaattctagattttgttagcaagtcgtgggcactacttaaggaaccgaacgagtgaagtttgcaatttcaatacactgctgttagtgctccaaagattaagacatttcttgttaaatatgcttatgaccaagaaatttttcctcctgctgaatacttgtatcagcttaccaaagaataaagcaaaataaaaacaccagattgtgattgtatttgattggtcatctttacaatttgcgattaaagaggaggaagaacccgaattcctaatactatcatgcatttcatcagatggtctcttgtggagacttatattaataaatggatttcactgtttggttcagcttcactaatttccctttgtctttcattgaactgcagattagctttccagatcttc

SEQ ID NO: 93572 - DNA, 488 bp, Eucalyptus grandis
  Intron number 1 from transcript Egrandis_v1_0.051696m (loc us Egrandis_v1_0.051696m.g) derived from phytozome v7.0 (c hr-ID scaffold_8; pos 29769962 to 29770449 reverse strand)
attacacggacgagatcatcaagggattcttgcaggtgcgtttttcttgtctggtctcgagagattttggtcggttgcttgttttaatctcttttgttcttttccaattatttcgtcgacctcctcttgtcggctggatgtggtgtgagcgtggtcctctggattgatgaagttttgtttttatcgactggaaggaacgaacggaaacccaacccaatcaaattttaacaattgacggactcttgtgaatctcataaaattaatagtttggacggtagggtagtcagttaagaaatggaaaatgcatgtaagctgtgtaaaatatgagttacgcggttttgtaaattatgagttacacaatccaagaagacatgatccggtgtttatagctaggtttcatcgtgagcctcaaagaataccttaatctaattttaccaattttaattataacagacaatactgattgccggaactgatacatcatcggt

SEQ ID NO: 93573 - DNA, 858 bp, Eucalyptus grandis
  Intron number 1 from transcript Egrandis_v1_0.025050m (loc us Egrandis_v1_0.025050m.g) derived from phytozome v7.0 (c hr-ID scaffold_1; pos 316561 to 317418)
tcaagaggcagaacgaggtcgatttggccctcaaggtatcgccttttcgcgcccgtggttctgggtctttgttttcttggcttttcttgttggttttcgaattctctcttggtaactttggtgtgtgatgtgaaaaatctctgcccttccacataggaattgaaagtttagaaggccattttgggtgtctgtggttcttgggtctttgttttctttgcatgtccgttttccaaaaggccattttgattgtagcggatgctttaactggtatgagcagagcaagtgatctgggcaattgagtgttgctctgaagtttggtgaattcgttttttgtattggttatcagcgattcaaccggtgcattgagctagtgagtggcatgggtgaattgtagaaaatgggttgagtgttgactgatgagattggcttaccttgcaacaatgattcttgtaggcttttctggccttattgattttatccatgtttaggattttctgagttcgggtttgggtattcttttcaatcttttacattaggcattcacaaagaaaggagaatataactgtgcagattagttttaaattaaagcataataataataacaacaacaacaacaacaagaacattgggcagacatgcaggttttgcatgtttcatcaagggaaacaacgttgggcatattcaaactactgtcgtcataagtatattgagaagaaagagaaacaaagtaatacccttgctatatacatacgggtggtgtgaattctggatgcactatttcaatatctccattttactgttctcattccatctaaaaagattccagctataggtcttcgagtacgtgtgcaaggagga

SEQ ID NO: 93574 - DNA, 794 bp, Eucalyptus grandis
  Intron number 2 from transcript Egrandis_v1_0.011483m (loc us Egrandis_v1_0.009595m.g) derived from phytozome v7.0 (c hr-ID scaffold_8; pos 68538209 to 68539002 reverse strand)
tcgaccctcaccggcggcgtcattgcgaaccgagagtaagtccctaaagtacggctccgctgttcatgctccgccaccgggaatgagggggacataaaaaaaagggcaaaatgtaaaatatacttttcgcttttgcttttctcgattagagagttgcggctttgggttggtatgattacgcaatgattaaaaaaaaaaaaagggggtttcaggtgtgggtccggttttgattgtactagaaatctttgtgtgttcttgtttgtgttctttttttcttttcccttttctgtaggcccctccctcctctgctgctggaattgctgttcgtacgatggaaagcttgtttttttccttaattttttttttctgggaacaacgaatttgaatttggaaaataaacttctggtgagtttgtgctcccttgatgctactcccgctggtggctggctggtttctcctctgtttttcctcttgtagactgggctgtttggcttttgttttgtagctgttgtttaagctatgctacctttgttgcctttgtgtttgccttgactagaagctgttgtttgttttgtcgacaccctttcattcgttcgtactagtttgaccttattagtgtaagtttttggtgccggtctactttgtataatattggttataagtcaatgtattgtttacttaccaaaaaaaagaaaattacgaaaagaaactttaaagttgggttttgctcttttgttgaaaaaaattcaatttttgcagaggaatctcctgggcaaccaaggacaacgtccagc

SEQ ID NO: 93575 - DNA, 995 bp, Eucalyptus grandis
  Intron number 3 from transcript Egrandis_v1_0.018594m (loc us Egrandis_v1_0.018312m.g) derived from phytozome v7.0 (c hr-ID scaffold_10; pos 9179359 to 9180353)
cgatcctcaaatcatcacacacgcatctaatttgggtacggtttaatgttcgttgtgcttttcagaatcgtatgtgcccatttagcctgataattttagggtgatccctttgtcaatggatgttcctatttcaagtattgtttacatcattggtccaatcctttgtaggaattgttcgtaataacgaacttgcaaaatggatcatttgttagataggtcactctatttttgctttcttgcttactttccttgtgttctgttaatttttttttcttttggctatgaatgaaatcttggtcactgacattgtgagcaattgctcttttgatgggaggcttcgactggtggcaagccaaaacttctatcgcataaacttaatgattcgagacctctcgatgcaagcttttcttgaaaaagcatatagccttcttagatttcatgtcagtctgtaggttgtgtcacaattgtcagtttaatttttctctctgggtatctcatatgttatgctcatagttttattgtcaccacgtctcccatattacagatgaatcaaaatgaaaattagagcttcattttagtaacttccatttgttcttgttatatattagttgtctctatgaagggacgaagttgtttggaaagttgacaatatatcttgatctttgatctattgttcatcatgcaaacatgtacacacgcaagcacacatgtgcatacttctcagcaagggtgcaggccccctttttttcgcagtgtatgaatcatgtcatgattttaactgacaacctgatttttaaatggaagaatagctattggggatgtgcatgaaattgctcgaaggttcacttagttgtggttcatattgtctcttcatgtttttgtctttttattttgacaaatatggctttaatctggagattcaaattgtgcttcctctgattattttctggccggtgacaggtaaactgccagtagagtcttcttccgtggacttc

SEQ ID NO: 93576 - DNA, 999 bp, Eucalyptus grandis
  Intron number 1 from transcript Egrandis_v1_0.006803m (loc us Egrandis_v1_0.006803m.g) derived from phytozome v7.0 (c hr-ID scaffold_1; pos 13082742 to 13083740 reverse strand)
gtctcctcggaccaccaccacactttcgccactcggtactctttctctctctctctctctctctctctctgatggagtgttatctttgagttctggtgctaattcagtttctaaagttctttcaagaaacgaatttttagtgtagagatgtgagggtgaggctgatgggtctaatgcttgaccgagtttctcggttgtaacgctctgttctcgtttttgggtttgatttagtttgtagaaatttatggcccgtatggaagtagcctttgtaggggactcgacctgactgtacttaaactgtgattcgatgccatcatcaacaaggttggccttttggtttggttccctctgcttcttttgttgttcttttcgaattgtgcaacgggccctctgttgtgattcgcttttaaaccctgagactgcgttcgaaagaaaaccaatctggctcgaaaagatcgggcggaggagatcagggctcccagcaacctaagtgaatatgcccgcctgcccgcctaccacctaagataggaagaaacatgtttgcccggtaacgatgtttcatactttctgttactgccaatgtgggaacgactagcgagcaagctcacttgcagctcaattgcagttgctattgcttttgggatgtctggaaaaactctttaactggtagtaagatgattaaatttcgttttggttgcttattcggatgacttctaggacttgagtgcactggaagaacactagtcttaagtgtgaattattcattttgtgttcagtcgttttggagtaatgtatcttgacagagctttgagtttgcgcttccaaaattctgttcaggcgtcctgcttttgatgaagttcttttcattttgccttgtgcatttagccacttttcatcgtatctgattatggcgtttggatcaattgatagcatatttgagtttctcatgcaaaatttgttggtcatggaaagttttatttgaatacagtatcttctcgg

SEQ ID NO: 93577 - DNA, 882 bp, Eucalyptus grandis
  Intron number 4 from transcript Egrandis_v1_0.003236m (loc us Egrandis_v1_0.003236m.g) derived from phytozome v7.0 (c hr-ID scaffold_1; pos 17108483 to 17109364)
ttgttgttcctcctggctctggtattgtgcatcaggtatgtgattcgtacaggaggtccttcacgtgttattttgacatttcaatcatccagaattcacggtgttctgtcctttacagtctttctttaactggcagtatgtgatttgaatgggaggtacttcacatggacactgacagtttccgttttcttagatctgttcactctgcatttctggtcattgtgcatattagcttaccacgtgactctgatagggcctctgactaacttatgccctcctaacttttggaaacagttcctttaaaattttgctcttaacattgtggcctctattttcaatgtcttaattcatgtagcatgtttaaaatgagaaaacgaatttaggattgaatgcgtatggttttatgatgcaatgtacttttataagtttctatgtcaattgtttagatcttcaactttccataatttaagttgttactttgttgcctgccacaacgtcttaagaagttctaatcgatctttaatgagtttagttttcaaagccataataaatgctcctttttattattatttttaatttttttttaaattacatctatgggtacttccttgatgtgagagatcagtatatcgtgcataatctggaaatgatgctggcggctctcaaaagatcgtaggttgatgtcgtactgcacaattgaccttagcaattggattgtatatttcttttgacatctgtttggattgaggtggacccatactgatttggttgcttgtaaggatgtcattgaagtgtcttggatttatctcttttttaaccccaatatgacggtaacttgaaatttcaggtcaaccttgaatatcttggaagggttgttttcaa

SEQ ID NO: 93578 - DNA, 531 bp, Eucalyptus grandis
  Intron number 1 from transcript Egrandis_v1_0.044163m (loc us Egrandis_v1_0.044163m.g) derived from phytozome v7.0 (c hr-ID scaffold_8; pos 51444499 to 51445029)
gaagcaagctcttggagaagtcagttccttatgaggatgggaagttgctaatgggtaggtactttgacgatatcaacaccaatcaaatcgtaattttctttatggatccaattcgttcgttttaatgatggaagttttttgctataatactttgccttcctttatgcaaggattttctagcttatattttgcttatttctacctacataaaggcagcattactgcgtttatctttacgaataagaatttgataattacgacgacggacgcctctaaaagaaccaaaaataaataaaagaagaagaaggagaaaaggagactgcttgaaaagcttcattagcctcaatctctttctaataaattacgatatttctgaaaagaagttatgagtgggtcttgtggagcaaccacgggattgctttacccctttcctctgagcaaataaaataagaaatggcagtggcgaaaagattataagttttccaaattatccccgagttctattgtttgtgctatcgttagataatactt

SEQ ID NO: 93579 - DNA, 461 bp, Eucalyptus grandis
  Intron number 2 from transcript Egrandis_v1_0.033430m (loc us Egrandis_v1_0.030767m.g) derived from phytozome v7.0 (c hr-ID scaffold_1; pos 12895444 to 12895904 reverse strand)
tcagggtatgtaaatttgagctgtttttctctttttcttctccgtgattttttttttccttttcagagtaatgtaatgtttcattgcgaacagtgagatggggaagatttatgtacctcattatgtttcagatcatccaatggggccttatttagtagtttcttttttccctcaaagagagaaattaatcaagaattagactaacctactctcattttgcaacttttcttgctataattaagtacttaactcagttgttaagattttttttttttggtccattgcatgaatctttgcttacttttgactgtattgctttcagagaagaagatgttgcttaatctattctcattttgcttttgtcttgctataattaagtacttaactcgattgttaaaatatttttggtccattgtatgaatctttgcttacttttgattgtattgctttcagagaggaag

SEQ ID NO: 93580 - DNA, 917 bp, Eucalyptus grandis
  Intron number 1 from transcript Egrandis_v1_0.033430m (loc us Egrandis_v1_0.030767m.g) derived from phytozome v7.0 (c hr-ID scaffold_1; pos 12895908 to 12896824 reverse strand)
tcctcctccgccgccgccggcgacctcctccgtcagtaagtcccgcctcctccttagttccgtctcgctgcagtcgctgctcgctcggcgcttgagccccggcggctgcggtggctccgaaacccttcggtcctgatccccgccgcatcgctcgttatagaatcgagaagtcgagacgctccgacgcggcgctagaccgcgtcgtcagcgttcgagcggcgacgcgatcgagcgtccgaatccggaatcggcgttctcgcggagctgctcatgcttcttttttactgcgttacgtgctttgattacgcgtcgtgtcggcttagtatcttgtgtttgtctgatctggttggctaagggcgagacgaaagcttcgtctttcgacgttgttagtttttcgaagttcgtgaattgaggtttagcgtttgggttaatgaagtgtacgtgtgtcaaatgacggccttagcacatgtttcgactcctagatacagaagcgtaactctttcgttttcatgctgcttctttgcgattgaagtgtcgatgcaatgtgatgactgctgaaaggcgatatcgctttgcgtggggcttttgcaatttggaattggagtgaagttgcttgacttttgcggttatgaacggggaaagatattagttgaaaggttgatgcttgtgtggatttatgtgtgttatcgactgtgattgatgggtttagttcaattgatgttacatccataaggatacggttttgtacttcgtgttctgttttcactctgttccaggacgcgcagagctgttgagggaactgttgtttgggattcatatttttcctgtagtggcaaaatctgtgtaactatattctgatatgtaatgtcctttttgcatcaggaaggcaatatctcgcctaagcaccaagtggaaga

SEQ ID NO: 93581 - DNA, 378 bp, Eucalyptus grandis
  Intron number 4 from transcript Egrandis_v1_0.022268m (loc us Egrandis_v1_0.022268m.g) derived from phytozome v7.0 (c hr-ID scaffold_1826; pos 5238 to 5615 reverse strand)
ttcatcttcggagcactctcacttctagtatgtccgacacaacatcttcattagagtctctatgttcttgcttggctactcaataggggaacctgaaatagttgtgggatagttgaattcagctaattcgaagacacaagttcttgccattattcaggaatgctgctttatttgattatttagaagcatgttcacaaaggaataaaaaaaaaaaaaaaaaactgagcaaaatggcatttgcagcgtaagccacttcagaaatacgtaaattcaggcaacgcagttaataacgagttgcttagaactttttataatgcccgcctctgacacggatattgtcgaattggactctgagatgttacaagttggtgttaggta

SEQ ID NO: 93582 - DNA, 682 bp, Eucalyptus grandis
  Intron number 2 from transcript Egrandis_v1_0.016947m (loc us Egrandis_v1_0.016947m.g) derived from phytozome v7.0 (c hr-ID scaffold_463; pos 20829 to 21510)
gaatttgaagaagtctctctgcaccaccaaacaaggtaaaatttctaccttctattgtcaaaaaagaggctaaaggaattactgattccgtagttttaatgatcgattttaattttttattatttttttccacttcaccattttaggtggtggtcaactttagcaaatctaaacatattttgattttacgaaccaatacaaacaaaaagactatagttaaatgacataatccgaagttaaaaatgtatacacactgatcgaaaaagtattgggtatctcttatgtgctaacgtgacaattacgaagacccctaagagggcgacacatgtggcgtgtgggggcccaaattgtcaggccattgagctctcctctcctctttctctctcctctttgcacgctattctctctcttctgcctcctacctccccttcacgctcttcctcctctctcttctctctcctctcttctctctctcacgctttgtctcacccgactctctctctctctctctcctttggtatgacttttatggaaatgtgtgctataatttatcaaattgaacataaaaaattctctatggtgggagagataggcgacattgacttttataaattatgtgcttagtagaacctttacgcaacatgtgttacaacttttattgtttattttttgtgtgtgcaga

SEQ ID NO: 93583 - DNA, 683 bp, Eucalyptus grandis
  Intron number 1 from transcript Egrandis_v1_0.025579m (loc us Egrandis_v1_0.020045m.g) derived from phytozome v7.0 (c hr-ID scaffold_1; pos 39750524 to 39751206)
gtcgattccgattcccctgacaagaccgccgctgggtatgcctctccctcctgctgctcctccgtgtgtccgtcgtaagtacctcagttaggtagggaatagcaatagctatggaaccccaatcatctgctcagttcgtgttgatgttgtgtcggtgctgagctgaggcatgagcttaggtgtaggcaaaggttcgaccttggcgagagcctgagattcgattaaaatttccgatgcagtccatagatcatctggctgatagcgacgcagccgactcggtttactctcacggggcaatgaaaggagcgtaaagtttccattttgcaattagagttaggaatattcggctcaattctatgctatttattgttgcctggtgtcagcttcctagttcctacctttgaataattagctatccgacccccccaaaaaaaaagaaaagaaaagaaaagaaaagaaaaaaagcaaagagcctgtgctcgagcaagtttcaggcggggcgattcccatccacactcttttttctttacctgcaattttatggaggagacattagtttcctcggaggaagtcacactgtatgatgatcgataggcaacaaattgcatgctgcaatgggatgttaggttccatgacttgcctgtgcagattttgtatcatagaagggcctgagacagtgcagg

SEQ ID NO: 93584 - DNA, 814 bp, Eucalyptus grandis
  Intron number 4 from transcript Egrandis_v1_0.046821m (loc us Egrandis_v1_0.046821m.g) derived from phytozome v7.0 (c hr-ID scaffold_1; pos 38414494 to 38415307)
acaaagtatggtctttctccccgttttcctccctgtgtaaaatttacttaatgttggactgtagtgtttccaatcgtatcactgaactttgacttcaatcgcccaatgtcagctaattgctgacatggtggccacgtgaccatgtgtatactacatcagtactttgcttgaaaattggctggattttggtcaaagtgcataaattgtaaagaaataaaagttctggacatgagatgatcaaaactaaagttcagcgagctgctagcaaaatccactcaagttcagtgactgctgatggaattttccctttctcctattgcttttatggagtcacaagtgaaataagttttcaatgaacctttgagagctgaagtactttgattgactgtgtttgttcagaaattatctttttgaggtgattcatgttttgctgatcattgtttcattggctacccaataacaaaagtaaatgtgttgtgatataatttattgagttggaacaaatttttatacatatagggaggggagggagggagatcatttcgcttgtgtaaataaattagcggtagttcattttcttatttactctactttagttcactctttatgtgtagcttttcatcaagatctaaattttcatcttcaatactgttccatttatatcatcctccattgctaaatctagaattttaatagatatttcatcttgggataatatcaaatcaagtatggtctcaacacctttttcccttgctgattgtttcctttaattaaatcagtcaatagagattctgaaaaggattggggcgttctc

SEQ ID NO: 93585 - DNA, 670 bp, Eucalyptus grandis
  Intron number 1 from transcript Egrandis_v1_0.006845m (loc us Egrandis_v1_0.006845m.g) derived from phytozome v7.0 (c hr-ID scaffold_10; pos 31126444 to 31127113)
ggcattgctaaagaaagctcaagaattactggaggtacgctcatttctctttctctctctctctctctctctcattcccaaaacttgttctttgatgttttctgctattttgttgatcgcaaagctttaaaattcgttttcagtgagaaagaaaaggaacaaaaaataataaaagaaagagtcaaaagtgatttggtgcaagaacgttgcttcaccggtccttgtttgttgattcttttcacagtttcggagaaaacgaggaaagaacagcaagattttcggtggggcttgcttggattgaggaaattgttgagagggtcgatccacattactcaatcgagtggcggagctctcttttcttgttcccatctgctgttttcatttaccttctggagctttcttgcattattgagctccataaactgaataactacagttgattttggctaattactcaagcttcattttcaatcggacaaaccaaaacattaatgagtggcaagtttctgtctatatcaggcaaagtcactctgatatgtcgattttaaagtgcgcgatatgagtccagtttagtttatgttgtattagaattctctctctacttcacagacagagtctgcctttggtggttcttacttgctgaacccgcaactccttggcacctctagtt

SEQ ID NO: 93586 - DNA, 570 bp, Eucalyptus grandis
  Intron number 1 from transcript Egrandis_v1_0.012833m (loc us Egrandis_v1_0.008059m.g) derived from phytozome v7.0 (c hr-ID scaffold_10; pos 2714890 to 2715459 reverse strand)
gcctccactggcaacatcctggtaaccatcacctgcctactcgcgacaatgaaacgatgaacagtcatcatctcgccttacccatcatgaatctctcagtttttccaactccaggaggataaattttgcatttttcgtttttttcgggcctttgccagtcttgggttttgttcatcgtatcgagctgaattgatcacttccgtatctcgttggcttcccgagtttcgtatttgattttctgttttggccatttcttcgactggctgattggcgtaattctacttgcaaagtggttatgcacgtgcaattcttgtttctaggggtgctgttgcgttggcttgttgctgatgacgcgtgctgttcggttgattgatctatccgtgcctttcttgagttctgcttctatccattgttccgtatcagcttaagcaaattgcatttgaatagaggctggtggatattccgtgctcgtagactttgttttctgagtataaagattttgtatttcttgcccatattttggttctggttattgtggttcagcttgcgacttcttctgctccgcacgaa

SEQ ID NO: 93587 - DNA, 1023 bp, Eucalyptus grandis
  Intron number 2 from transcript Egrandis_v1_0.016305m (loc us Egrandis_v1_0.016312m.g) derived from phytozome v7.0 (c hr-ID scaffold_8; pos 10350429 to 10351451 reverse strand)
acaccggcgttcagtttgtacgtctcctcaatcccttaacaaaagcgaaaatatgatcttggtcatgtgatgttacacctaagtttgggttctctgtatctttttcctctcctttttttagcaagaccaattaatggggcagtccccacaagaagaagcaggtagacctccattaaaatggagatctgaaaatggaacataaagtgtagacattgactaggattgctaacgtatgaggcggtcaaaatgtgaaactaatggtaatggagtaatgtgaagatggtttgtaccgaaagggccacccactatcggtttgtagagtgttatcttgggtggtcgacaagctttaattctagacgttgatgcctgcaactaatttgtgaggaaaggctaaaagtaacattatggtcattttgtagacctattatcatgaagtggttcctcaactctttgagtaggtaatgcaagagaataaattctaattcaaaactcgttatacgaaggttgattcacaatactatatcgtctatcctatcactagagaataagtgacaatgtgcaacaaggttgtctatggtgcttccttgttacctcaatttcccttttatgttctccggtgatgggatctctgatgttaatgaagtttgataacgtgaaaattcagtatcgatcttgatatcttatgtaagacataagttaaaaaaagaacagagaacagccgactaaaagaggccagcgggggccgttactcactgacacttggtgtttggtgcaattttaaaagaatatgtattacaatctattacattcgatataaaattgttgtatctcgccccttaagttaggtatggcaattttttcctgtctcgctcttcgcggtcaccaactttgtctatcatcgatatgtatgaatttggaactcacaatctcatgtgatacgtagtgtctggctaaccgaaactaacagcagctgattgaaattatcaaactgtgatgttcttgttgcaggtcaccataataagg

SEQ ID NO: 93588 - DNA, 829 bp, Eucalyptus grandis
  Intron number 1 from transcript Egrandis_v1_0.027617m (loc us Egrandis_v1_0.027617m.g) derived from phytozome v7.0 (c hr-ID scaffold_1; pos 32132739 to 32133567)
ctcgcaactcaagactctgtattgctcgtcggtaaacctatcaaattgggtttaagacccatatatgatcatgttaaaaataaataggtcatgtatgggtcatttcaattttgtagagccttccttaaatgtgtttaaaattttaaaggttaaaataaatggatctaaatgggttgagtttatgaccaatttccgaccaaaggctcacatacacactctctcctctttggccttacaaaattattttttagaaaaatcagattataattataattatttttctttttcttatttagtatttcttttttttctttcttcttccttcttccatcttccttcgattatattgactgaccaggtgatggacaagttaccggactcgagaaaggcctcaggcaattggctgaagaagaaggaattttttttcttttttaaaataaaaaataatttttaaaaaataataaattaataaaatttatttacaaacatatattttttttattttcttggaaaacattttccaagaaacaaatgtaacctcaattatttaaaaaaattataaaaaatgtccataaatttgaattgcacgaaagtattttagtagtacctttttttcgaaaaaaaaaatcataagaaacaagatctcctaaatttggttaaactagttaggttaggaatgggtcgggtatgggttaagaaatttgcattataataaatgggtcataaaggggttaaatgagtcaatatgagtcggaccatttatgatccaatccaaacccgacttaagttaccgatttaacaggtttacttgccggagtccctagctata

SEQ ID NO: 93589 - DNA, 648 bp, Eucalyptus grandis
  Intron number 2 from transcript Egrandis_v1_0.010132m (loc us Egrandis_v1_0.009286m.g) derived from phytozome v7.0 (c hr-ID scaffold_8; pos 41298266 to 41298913)
gaagagattttgaagagtggagttgtggaaagaaggtaaaaaggaagtctctctctttttagcgtgttcggcctcgtattcattccgtttctagcgacctcaatggcgtttaaagaggtggtctctctttgtatggttttagtgagctgaatgcatgatggtgctaatgactaatgcgaaaatttggtccatgtgtgtcaggttaagttcttgaactatctgtttaggtctatgatgtccttttaggcggactgattctcagttgtttgtggcgtaatgaagttgaatcagtgacccagaaaagtgcattagaatcggagtgttgggaattggcgaggagtgcccaagaaagctgtttttgtatattacattagtcaattaatatagaatagggtctgtctatttgggcatttaagaactgcatacatttccaagagcattgagggaaaaattactgcgagagagatgatatagattgtctttgcattttctctccttctgttttgatgctgctgtacattgtattttaaggagcttatcaagaaggataactttgtttgctttaatgaaatcttcgagagagaatctatgattgcacttattctgctgttatagcttgcacttggttttcgtgcagtggagatagtg

SEQ ID NO: 93590 - DNA, 985 bp, Eucalyptus grandis
  Intron number 2 from transcript Egrandis_v1_0.008994m (loc us Egrandis_v1_0.008994m.g) derived from phytozome v7.0 (c hr-ID scaffold_10; pos 10797428 to 10798412)
gcctcgaacagacggtaattatcactcgcctctcgtttcctctctctgtcattctttccgttggttcttgctgagagacgttggtaaagatattccctgtgggccttccatgcaccgggatgacgtaccgccgacacaatattccctccggtgaagttttcgggtgacgtcagctactatgttggacatgcatttatttattaaattgagaatttttgtacttcagtatttacctctcctttttagtcctttctggattagaagaagcactccctacattttttttttaagttttgttttttggcattatcgataagtttacgaggaccatattattatgggtgacatttttcttctcctaaaaaggggaaaatcgcctcctgcttccttgtttttaactacgacttgcacggtctctgcattacctgatgcaactaaagcttggatcagtcaatgtctatgtcagctcaatacctaaatgtttttagcacagaacaattccggaagaaataatttttctagtgaatataatatgcctgttcgtttatcggttcctctagcacattcctggtactgctcaaagtaagtttccttagcagcatatgaagcaacagattactcgaatgccagctcctgccttgacagggcggtgctcttcaattcgaggtttgtgttctgataaattggttagatcaatctcgtatgtcatctgccaataattcccctaaatggtttaagtagactgcggataaaggttcaagtgaatgagggtcaccctgtgtttcgcacagagacttctttaagcgcatttataatggccatgttggacattcactaatttcctagaatgttccacatttggaaaaggcttagcaggacggtgtacatttcggctaactgatttcacaagttaaagaacactgccaggcaaagatgacttatatgtttcctttcttttctagtttagatcgctggagttttcaag

SEQ ID NO: 93591 - DNA, 443 bp, Eucalyptus grandis
  Intron number 1 from transcript Egrandis_v1_0.030468m (loc us Egrandis_v1_0.030468m.g) derived from phytozome v7.0 (c hr-ID scaffold_1; pos 17047249 to 17047691 reverse strand)
gagcaacgagtgacgaatcatttgaagaagattggtagagagacaaagacgatttcaaaacaaactatttgaagcttctgtagaaatgcacgaaaactcaaagtgagttattttttacatgatttagttcatgcttaaaattggcgtaccgcattaaatagcaaattcagagtaggatggtgtatcaaagtcactttggtgtccattgagattagtgatgctgctgagtttgcttgtgtgctccttaactgttttgctgttgactcctgttgtaagtttctacatataagctaaaattgttgcctagttcagattttttccatcctggattcaattatgtagcattattagaatccgtttttttcgtttttgtttatcacttctcttaagtctcttcttttcctttcctgaaaaagaatagataacatttttcagctgtaggt

SEQ ID NO: 93592 - DNA, 569 bp, Eucalyptus grandis
  Intron number 2 from transcript Egrandis_v1_0.046160m (loc us Egrandis_v1_0.046160m.g) derived from phytozome v7.0 (c hr-ID scaffold_10; pos 28798659 to 28799227)
gataaagctgctgcccatttgaaggtttgttatcagcttctcttttgatatagagcatctggcgcgtggctgaagttaaagtaaatcaaatctaagtttagcggaatgatccgtaaggtgcttctcagatgatcttctctaaatcgtaactgcttttttgcttaatttcgctttaaatatgttgtgtcaagttgcgtgtaaacttcttgggaaagcacatcggccatcattttttgtctcttccccgtatttattcaagttgatttgcagaacagcttaaaagtagattttagaatacttagtttttctctatgccattctcgttttttatttgagtaatcttcggctgaacttgtcaacgcactagtttattgggaaactgacaagtttttaaccttttctaagttgtaattcgtaaaccttgtcgagaagagattttatacagcgtgtgtttttgaagcggacacaacttctttacctcttgtcatgatgaactctacttactctcaagttaccgtacgatattactgatagggtggtgccaaggaaattgtcatttctgccccagg

SEQ ID NO: 93593 - DNA, 542 bp, Eucalyptus grandis
  Intron number 1 from transcript Egrandis_v1_0.000461m (loc us Egrandis_v1_0.000461m.g) derived from phytozome v7.0 (c hr-ID scaffold_1; pos 14459776 to 14460317 reverse strand)
ctgatcttgttaaggtagctattagactacattcctccccacccttttttggctatgcgccttatatcatatattgatgttgaatttaccaactttaatatgggctcctcaagtcagtcactcactctcatttccccttagcatttacttaggatgagtttctggacattctgcagatggaagaagttgataatctgttctatatactttggctagcttcgtagttctgatctgctgttctcagaaaaagctaaagatgggtaaagcaatcgcccttgcaattgtatttatagttatatggcgattgctatcatttcctacttaaaagaatttatgaattactcttgaaaacacaaatcctaaactgatacttccctccctttctattaaaaaactgtattgccaaggacaaactgttccttggacatagttgttacaatattttgagcttttagttttggggaggatcataaaagaggacctttgtgaaacgtgttcagtggtacttatttgaataatgatgatcttactataggctctaa

SEQ ID NO: 93594 - DNA, 641 bp, Eucalyptus grandis
  Intron number 1 from transcript Egrandis_v1_0.045547m (loc us Egrandis_v1_0.045547m.g) derived from phytozome v7.0 (c hr-ID scaffold_1; pos 38518575 to 38519215)
aacagctgacttacactgctgaaaggtacctttcaaaagcttggttttatcgctcgacctcttatgttagggaattgtgcttctcctagcaattacaatagcttggtctcttgatatacactactttcttttctatgagctcttactataatctacgttgctactttgatattagatatagactagtccagacagacctttaacctttcttgttaatcacgtagttgtttgggagaaagttcgtgaacttttttctctgacaaatgaagcaattgaactctaccccatgataaactcttttttatggaaaaattgattattaatctgctggatatgctgtgtggatgaggacaacttgtaaatgcatttaaaaattgtcattcagcaatctccgtctcaggttatgcctaaacaaacggcacttccagtgagttactaagttgccaaaagtaattctcatcatcgttattggaacatgtgattgaaaccccccacccttatctagatccaacgacttctatcttctgcctcccttcttagaagtaatttttggtttaaaaaaataaaaataataattgttacctctttgaaatgattggcttttacttgactccaggtgcccgctcgtcaaacgcattgta

SEQ ID NO: 93595 - DNA, 976 bp, Eucalyptus grandis
  Intron number 1 from transcript Egrandis_v1_0.026944m (loc us Egrandis_v1_0.026946m.g) derived from phytozome v7.0 (c hr-ID scaffold_1; pos 35817467 to 35818442)
acgttcaggtccgctgattgctcccttgaaaccgggtcgtttcggacgaaacgtagattcgtgatctgatttcgcatgcgttctgtttttttctgtttgtctcggttcgtgtgacgcatttgcctgctgttagattctggcggaagagcgcgtgagtagtgactgagagcagtattcggttcgatggtgttttgatcttaggaaagtcgtaattttgctgtagtgggtatgtaggaaagtccttaacttcgggggtcgagtttgaatggctgcgttactgaaacttgtggggtctaacaacatcgctttcctgttcatgtttatcatcgtttgatcttcgttgatattgtctggggtcggtgtcggttgctattgtgcgcgtcggccttagctcgaattgcttgttgaaatgtattcagtaagtgtagtctggatacatgcgaagcagaagtcgatgcattttaaagcgttaggcctgatttctctcgatgtgctggagcgatgatggtgattgacatctttctaagtcttacatacttctttcctttgtgaagtttggtctaggcgctcggtgtctgagcaactctttcatattggtctggttcatattcggtctgatttgtcttggcttatagaatattcatgtctcttcataatgctgatttgtagcattcttgtttatccttcaagtatgtttcttttagccaaagattcgctctaagtgtttaaagtattccccttcactcatcgacttcttgttttgcgtggtttggcacagatttgtttgatcttgtgttttcaaatctagtaggatcagatcatttttttgttaatcattgatgagaaccatagaggaatctgtatgttaagcatctctcctaaatggggaagcataaacattgagattcagtttttcaattttaactctattttgacaatcccttttgttgcttttaggtgaacgacctttcattga

SEQ ID NO: 93596 - DNA, 709 bp, Eucalyptus grandis
  Intron number 1 from transcript Egrandis_v1_0.052402m (loc us Egrandis_v1_0.052402m.g) derived from phytozome v7.0 (c hr-ID scaffold_8; pos 15666469 to 15667177)
acgaacccggggatcaacggccatcctccacccgggtccgaacccttatcgacgacttgtcgctcacgctcgattccggcgatcgctatcttcttatcgggtccaacggcacagttcttctcagctcaaaccacgtcgtcttctgccaaaatgttgttctgggtgtctctgtatctagtagtggacaagtgcatggcgatctcatcatgttaaaaggcgtggatcttggttaccttgttgaattggcttgttggtgaagctgctttatcacatagaatttgagtttggtggttgaagtatttggatttcagtagctggagatagtgatttgatttcaagagaaagttgggtttatttttaaagagagtggaatgaatgatttctcatgcgaaatattgtcgatatccattgggacattggaagattggggcgatgtttttgaaatggtgattcggagagagtgtatattttggcaaaattaaatcatgggcacttgcagttttctcattcgagaatagtaatgtaaagagtccaaagaaccacatgacattctcatttgaagcagtgcttgtagtcctgaattgggggatatgcttttagtcatttatgtgaattccttacggctttgctcgtcatcgggcgatgcttgtaacaggtaagactactacattgaagattattaggagggaagcatatggtggagccttac

SEQ ID NO: 93597 - DNA, 835 bp, Eucalyptus grandis
  Intron number 3 from transcript Egrandis_v1_0.039149m (loc us Egrandis_v1_0.039149m.g) derived from phytozome v7.0 (c hr-ID scaffold_1; pos 21119735 to 21120569 reverse strand)
caagtgactgtcaccctgagtgagttacctgccaagtattatggaatctcttgcttgttgttggccgtgaaagacccttatgtcatttttcctaggatagttgtttctaaaagattttctaatcttaattttttgtggtttgttgcttttccgccgactaacattcttttgacattgtcggtagagtagtgtaaatccaacaactgtacattaaatttagatatcatcttgccagtggagtgctcagttttatgctgaattgggattgtcattgtggtctctaatgcgatgtatgttggatatatctgcccattgtttttttttttttttttttgggggggggggggggggggggggtgggttacagaatgagaatgtttgattaaggattggcattgcctgctccaggatttacagccaaaaagcattttcttgtgactttcaagtagtcgaaaactccctttttttggcaaatcgataacttgtggaatggtatgggcttttaatagtttttaaagaatttgagtttctcatattgagattgagacatttctgaagtcctctcgtggagtgagaaaacatgaagaggatgtcttatcatgaacagaaatgaggattttaggattatcatggttgcaacttttgggagtgatgatgaatggttcatttttcttcatttggtttagcagcactcttttttcatttttttttttttttgaagtggtagaggggatgatcattaatattctgtcggcattaatactctagcaagtttcctatattctacttcttatgtgcaggggcgttgctgccatctcgttttctgaaaaggggt

SEQ ID NO: 93598 - DNA, 775 bp, Eucalyptus grandis
  Intron number 4 from transcript Egrandis_v1_0.013100m (loc us Egrandis_v1_0.013108m.g) derived from phytozome v7.0 (c hr-ID scaffold_8; pos 6103007 to 6103781)
cgagggtggttaagcctacaatacttcactttcaggtgaatggtcttggaagcagtggatgtgattgctaggctgtttcttcccttctctatgtaattctagatagaatttgctgccgtttgagttatccctattttggggcatcaagaggggtgaggcgacatacatttccagtttgttttgtcgttctggtcacaatgggatatagaaggtgcaatcaatagaaagtgttgagttcgaagtcacttcctacgctgtaccctaactacgagatcttcccttttgcagctagtttttcctgcaagctgcaaaactccaggaaattacataaataacagagagaagaaaatgctggcagattaattcttctgaactgattcagtattactcattggtctagaaagggtctttctaacataatatttggagtttgctgaactttctgtagcttgccagattcagcgaatagttgagcttggatcaactaattagaggaggaaaaacatcataattttaaaaatttattactctttcttgcatgttatgtggacaaaatcataaaagcgaatagaatattcaagtggtggaaatttttgtggtctgaagtgtccattggtctaagagaatgtgtgtctgggcaatctggaatttcacgctgttgtcctgcatatacatacatctatgtacatgcatggttttcctacttgattcaatacctaattttttttaataacctgcagctcagaaacttggtgtgggctacttcgaaacacga

SEQ ID NO: 93599 - DNA, 717 bp, Eucalyptus grandis
  Intron number 1 from transcript Egrandis_v1_0.046146m (loc us Egrandis_v1_0.046146m.g) derived from phytozome v7.0 (c hr-ID scaffold_10; pos 6879279 to 6879995 reverse strand)
cattctggaggtcatcactagcccgcagcgacgtatgatacttttcaatcatttcctgtttttccatgtgttgccaatatgaacctagaatgtttgagaagtaacgtgagaactatctgcacacttccatactaagttcagttgcttgaaggaaccctgtgaaaaccatgattcatatatgaaatatttgatgcgagtgaaactgacaaattgttgtcagactatcttcttctgttaaatgaagtgaagctttattgggtgaaaagttcatataattttcgtagaatggtaagatatcgacatgtttgcacagatgaatgaggatgtggttgcctcagagacattggattgactaggatgctgtatcaagataattctcatgcaagttagttcattgacgttcacagacattaatctcaatgtcagaataagcacactgaaaaaaaaaaaaaaatcagcttagtcattgcttgctgttgacgttgaagcatggataaaacaaagttcagaagctattaaatcaacaaagcagcccatttttcggtgttcgtggttttgtttcatctagtagattgccaatttgccattggaaaataccgtacgtaatctgatatgagttttatggaagtcattaaattctctgtaaaacagaatgcaagcatgtacatattgttgcccaattccttctgatgcagggtttgaagacgtagaaacggc

SEQ ID NO: 93600 - DNA, 687 bp, Eucalyptus grandis
  Intron number 1 from transcript Egrandis_v1_0.026752m (loc us Egrandis_v1_0.026752m.g) derived from phytozome v7.0 (c hr-ID scaffold_8; pos 32670343 to 32671029 reverse strand)
ttgctctctctgctatcattcctggccttaaaaaggtaaatgttcttgaaaatactttttatatttccttggaaagattccttattactaagaatatatatcttcgtcattagattagagtatatatcaaattatcaaaatgttgatgcacccgcgctaggaagtcttgaagattgtttgccccgaatcattactgtccgtgattgttgtgaatttcctaaagtctggttcacaacaatcttatttaagagatctaatcatattagcaaaacaattatccccattgctatcgaaatagtcaatagcacagcacttcatttcatgcataagatcatctcatccaatcacaattcattcaactggaaagaggtgtgagtttggggtctcatttttaaagtaaggggtaaagttaaaatgatgtatatctacgtgcattagggacctgcttacaattccttaaacttgaatatcacactccgagcgaatcttctggtttatcacctggccttttacttccatgggaaacaattaaagttaggatgagcaaggtttgtttacctttgccgagtcatgaacaaatatcggacactggttttccttcaagttcatcaaagttgaaatttgaagggggtagatactagacagtatactcaaatcaacttccttgtgtactgttgtgtttttcag

SEQ ID NO: 93601 - DNA, 651 bp, Eucalyptus grandis
  Intron number 2 from transcript Egrandis_v1_0.022471m (loc us Egrandis_v1_0.022471m.g) derived from phytozome v7.0 (c hr-ID scaffold_8; pos 60839105 to 60839755)
cgcttataggctatacggctcctatagtcaccgtcaatcttctttaacctctctgatgctcgctgctgatatctcttctaccctcttctttctcaattgggttcttgtctgctcctttaatcgggtgaagttttctcttccgactgataaaaatcgaacttctagcttcgattcctgtctttgctggcccaaaaacaggtcatgtggtggaatttgtcgaataatgaacccaaagaaagaggaggatggtgatgccagttgagatctatgattagcatttgaacttagatacggaaaatacatgccttttccgagtcagatgcgtaccttttggtttctggattcctttcctacgttctgttaaactactgcaattatccgtgtgatttctttggggttatcactttttgtgttcttttcttgttttgctcgtattgtccttttctggccaagaaaaaggaggtttgagtgtaaagttattcgaaggcctttggtgcaagggcctgctttatcttgatttgctagcgaacctaacccagatcctactgctattggtggtttaattccgtcttctgggaaaatttgtggttttattaagtgtttcacaattcactaagttgtatctaaacatgccaggaatatacgtgggag

SEQ ID NO: 93602 - DNA, 945 bp, Eucalyptus grandis
  Intron number 1 from transcript Egrandis_v1_0.048819m (loc us Egrandis_v1_0.048819m.g) derived from phytozome v7.0 (c hr-ID scaffold_1; pos 23255142 to 23256086 reverse strand)
acccgggtggaccgccagacccaacccgggtcgtacgatgtttatgctacctgttccaactcctatgtgttagagaaaactcccatattattttgaatatgacaaaacttatctaaagtctattctgaagatcgccatacttttgtgtcaaagtctatcttacaatagaagtctactcactctgataaactccagactgaacgcaataagacttatacagatgagggattatctttctttgttcaagaattcggtttgtataggttatatatgattttctggttggaaatatcacctacgagattgattatctttatcggaatcaatttacatacatcaaatattttcgaatagcaagttaatttggaaagaatctacttatggaaacaaagatcctgattgtatgggcgaacatgattgacgggttttcatcataatcttcaaacggctcgatatctcattgattgattctgtccaacaggttgattgaatttttttttttttggaaagtgccaacgattgagaagacatgaaggggcatttaaggaagcctttccagtcatttgatatagtgcatgaaagaaaaattccaaaaatctgaaacttcccacttacttgttattctttacactgagctcatatttgtactcaaaagagaaagacttacattgtgatttcgtgagaaagactcttcactgagaagtcgagatcacaaaattgtaaattctcttttgattcttagtggaaaccagccaaaacgttgtcagcgtgggagagtggacgtagcttgatctaagctaaaccgctataaattatgtgtctctttctcttacataaactcctttactttattcatacttcaattttatagttaaagtctaaactttttttaaagtctgctgaacatcagactcagtttcaaaagcaaaatattcttattgctct

SEQ ID NO: 93603 - DNA, 605 bp, Eucalyptus grandis
  Intron number 1 from transcript Egrandis_v1_0.003310m (loc us Egrandis_v1_0.002614m.g) derived from phytozome v7.0 (c hr-ID scaffold_239; pos 47947 to 48551 reverse strand)
aggtttcggcggagacgcagtccgtacggtactgggtgagttcgggggatctcatgaaattggggctgctgggtggatttagtgatgagctggaattgccgggggaggggggcggtgttttcttggggcttttataattcttttttttttatatgctcggattttactatttattattttcgggatttatttaattgctagatatggacaaaatgatgctgatgcttggcagccttttcgatgccgctattctgcatttgtttacgcaatacttatagtggctgccctccttcgggttaaatgcacgcttaaaattctggcaaaataacttaccatgtatagctgttgctaaaattcgtaattgatttatcccacccactatattatatgattaatagatgtctgcataaatcttgcaatgctagagctaagtttagaaaaaacggaatggtgcccatctattacagaagagagcaccgtgtattcattgaaagttctcatatgatccatgattagtcttgttctgcagccatttacttgtatggtggggcttctttgtttctgccgttttgatttaactaaatacactttgatgcaggaatata

SEQ ID NO: 93604 - DNA, 515 bp, Eucalyptus grandis
  Intron number 1 from transcript Egrandis_v1_0.013817m (loc us Egrandis_v1_0.012214m.g) derived from phytozome v7.0 (c hr-ID scaffold_34; pos 367389 to 367903 reverse strand)
gcccggccctcgccgggtccgactgcttccaccaggttcggggttttcccgcgagcctgtctcgcgcctcgtttgcttcccgcgggaactgctgcgagtcttcagacaattctgctttttttgcttctgattgtttagcgggactgtgattactccttggcgtgctgtttttctgtttaaaatttgaattttgtagcttttttgacttgctgaagaatcggaaatgctctgtttccggatgatttttctgctcatgaagccaatgcgaagcttatcccttcgtagtgatcgataattagttggtcaattgcgtggaattttccgaagtcttcgttttctgaaggttttaggcgtattctgtgggcttgcttgtcctgttactaaataagaactctggggatctctttatgttgggtgaactgaatttggaaaagggtagtagaagttgaatgattgatcttggcctggttttgttgccagcccaaccttaataagttcttggcattggggcggcc

SEQ ID NO: 93605 - DNA, 614 bp, Eucalyptus grandis
  Intron number 2 from transcript Egrandis_v1_0.048751m (loc us Egrandis_v1_0.048751m.g) derived from phytozome v7.0 (c hr-ID scaffold_10; pos 36859254 to 36859867 reverse strand )
tgttccaaatagcacattggaatttcatttgcacggtgagtatgacttcagaggaatacatttacatatttcatcagatgatgccctttttaacatccatcgtcttctctctatgttaccctttttccaagttcagacttgaacttttgtcggtatgtatggattctaactactatcaactttgatattctaggttaatgccttttttaagtgctgcttgaatagtggactcgtttatatgctccctccattctggaagaagggacttacataacaaagccgtttatcaaacaaacaggcaatagctggaatttcgttgattttcattttcgattaatcagattgttatcattaatttcggatgttgttgtcaatgacaaagcctcgcctttttctaggtgcgtggcaaaaatccactaaaaattagaaaaaaaggggataaatctcagatgattttggtgaaaacccataataataagctaacttgatctccattgcgtaacgcatccataggcaacataagatgcatgattattttggagctcaaaagctgatcgagaacataatggttgttataactggcaagtattattgcaggaaaggatcaaccaacc

SEQ ID NO: 93606 - DNA, 780 bp, Eucalyptus grandis
  Intron number 1 from transcript Egrandis_v1_0.015238m (loc us Egrandis_v1_0.015238m.g) derived from phytozome v7.0 (c hr-ID scaffold_10; pos 6629706 to 6630485)
gcctggtcggatttcgcctacacttcgcccaataggtgagcgagcgagcgagggagggatcgagttctgtgtcgttttttgaccatgacgtgtttgcgtgagtgtgtgaatggagcggagagtgcctgtgtaggccggacggagaggagatgacattctttggtgcacgaatctgtcatctttttggttaacagtgccctgtgatgctgtcattaggcttaggactgtgctatcattcgactttcagcgcgtatctgattgtcggggtgcccacggcttctgctttctgctcggaaagagagagctttaccttttgcttcatgggaaaagtacagttctttccaatgaacgtcatgctttacaattcgtgaagttgaatgtgcaattacctttgattcgagttcatgttcttctcaaaattacttttgcattcccatatggaccgagtattggcactaggtagcatcatttttgaaagtctaagctaaggtagcaaactctcatcaaagcaggtcgggtcatctctaatcctaagcttttgcattttcgtgcttgggcacgtatgctggtctttaagcttgggattgctctggtttgtgtccacacttttcagaataatggatttgatttgtacttttgtatcaatgtccatcttaactttccctgtaacagttattgctgacagttcctttttttttcctccttatcttgtaagtttctcttttgcctcccttggaagtctttgacattcatctgttcttatttattcaggtcagaact

SEQ ID NO: 93607 - DNA, 853 bp, Eucalyptus grandis
  Intron number 2 from transcript Egrandis_v1_0.026413m (loc us Egrandis_v1_0.026413m.g) derived from phytozome v7.0 (c hr-ID scaffold_8; pos 49358488 to 49359340)
gaccccaccgggtatgtcccttctctcccgatctttcctcgaattcgtgggggagttgaatgaattcccgagtgcggttggccaatcgcgcgaggcatcggaaatggcgggtcttgatctgtctgagtgtagaattttgcatcttttttgggttgtcttgggaatgtataagccgttcggttgcttgatgatctgctttgacttcgattcttttacgtaattggtctctgaacactctcccaaatggttaattgcgattgaatgtcgccaaaattgctgaaataagtgatcttttgaatcatgcgtattcaattcaggcaccatttaatggcaatctggctttttaatttggtaatttacttgttctttcgctgaattgctgttgatcctcaggaatgttcagcgaatctttgattgaaaggacttcaaaaatttttcaagttgagtttgagctcaaaggaagagaaaaatctaacagaagtctaacctgcctgtacaaattttagactacgtgaaatttgtgtttctgtggtttatgctcatttacaggctccctcatatgtgcaaacgtattacaaacacataaaacatgactactcaataactcagcggttgcacaagttaagcgctgcaaacctcgaaactcaactagacttaatattcgagtaagtcgcttagccgagctcaagtagctcgtgagtaggaggaatttcttctactgcgagctcatagccaagtgccaagtatgcaggagaagatataggaggaccggatgttcagcaattaacgtgcacactctctgttttttcctcttgcagtgcagacaaaagaaatcttggggtgccgcagttac

SEQ ID NO: 93608 - DNA, 998 bp, Eucalyptus grandis
  Intron number 3 from transcript Egrandis_v1_0.024996m (loc us Egrandis_v1_0.023491m.g) derived from phytozome v7.0 (c hr-ID scaffold_8; pos 50115918 to 50116915)
gcaagacactcgtttctcgtactcagggtacaaaggtgcgatttttatcgtgtcttggcgtgaatctgtgagctggtgcttggctgggttcttgtatttgcgtacgaaaatcgtttgaagatgttgtgaatggtactgtgtgaagtttagttaagttcgctcaatgccactggatatttctcattagactttgtgaaaataacgtaggaaaagtttatctgctttgttctgttcttttgttttcatttggggccttttgataagtaggcgatggaccgtgattatatttttttgacattaagaaaaatgggtggaagggacaacttattgatggattggactctttcccggagaaaatctgctctggatgtggactgggattttgttggtttttttaatttatgcatcagatcgatgtattctcatttgaagttcgttcctgtgaagtttttttgtccatgagctgggaacttgggtttaggttgtattcccctgactacttccctccgaagaagcatcaaggtgtttttttggctgtttagttttggacttattgatggcttgatcaactgatattatatccttaccaaaatggaagaggtcttagtttttgggaactctctgtggagcttccatgattgatagtttgacatcaaatggtgtttgcatgagaacacatgtatcatgcatgatatcctgtgaaaccaacgagccttatagatttgaatttgctgtcaacattcacataagccatggtgataatgacctggctcttggagtaaaaattacttgttaatcaggatgtgcacataggtgatggttaagcgacattgttttcttattattggccccattcactctgtctccttgtaaatgccttttatgaatttgaatacctatgcatgttcatattgagtttaaaaagggtttctacatgcaagactaatggggcctattctgcagattgcttcagaaggtctcaagcatagagtgtttga

SEQ ID NO: 93609 - DNA, 915 bp, Eucalyptus grandis
  Intron number 2 from transcript Egrandis_v1_0.013556m (loc us Egrandis_v1_0.013556m.g) derived from phytozome v7.0 (c hr-ID scaffold_1; pos 7545281 to 7546195 reverse strand)
aaggtttttggaaatagctggaagaaagcaaggtaagctggagtttttttctgtagttcgtgctaaagtgctatagatgtcaattgttttttttgttttcatgggccaagttgcgaattgatttacgaatcgtgtgaaatttgacagctatatctttgcctactggaatgctccatcagatgctagacttattgattgtatgatgcagttaaaggcagtctgtttgaggtgctctagtacactcttgacactaggaaaagaaaatcagttaatttaaaaggaattgcattctatatgcatgaattactttggggaagagggaaaaacaaattcactccagtggttcttctgagttctgatcacaacgattagtaggaggtagctggggatgtcttgtggagtgttcttggaaagtacaagccataagttggcatggttttcatcctggcatgtattaaagcagcagctcagtgtcatcagtgatttgcttacgtacaccttatattcttaagaatgatattcattagaaagattctgatgtcgtaaagtcgttttgttctatatggggaaagccggaaaaggggactttactttctgacaaagttgaacactatgttttggagatgctttgcttgtgttcatatctagtagtttcattggctctcctgtcagtcttacaaggtgaaggatagacttaatagaggattcacccctagaattatcaagggagatgtctgaaattatttatcttgatccatcatgctacgtttacgcccctactctgacttcctatccaagatggatgcacttcgagaaaatcttaccactactttcttttgatttatattcttagtcatctgatggatgaatcttgctgcagaaaagagagccacccaaaagtccttgccagacaga

SEQ ID NO: 93610 - DNA, 938 bp, Eucalyptus grandis
  Intron number 2 from transcript Egrandis_v1_0.009539m (loc us Egrandis_v1_0.009532m.g) derived from phytozome v7.0 (c hr-ID scaffold_10; pos 7379404 to 7380341)
caagtgagttcgaatccttttctgaagtaaattcaccttcagtctctgtgcttcccatggccttctcacctctgctaactttaattgaaaatggtggaaacacttgtaatgctctgattggcatagagttcttactgctacggccttttatcctagcaagctagttcaatggtatgattgtgtctgttggatgctctgcttcaaggtagcttgtcattcacactaaatggatctacactagtagttgtgctacttattcttgggctattccagctctgcaaatgcattatttcactataactataccgatgcaatggtttagaatgattctgtagtcaaacatcatttgggacaaatatgcgtatctaaattgtttctggtgttattgtgaaatcaggtggcttgagaatggattatctgttttgattctgtgatgtggctaaactcggattgtccagttgtttgatgataaaatatgttgaacggtccaattcagatgcaataagtgttgctcttctctctttcctcttgcatgaacaacatatgtaccttagagctatacttgcttccaaactggcctttaattagtgggtgacacattgacccctcatctgactttggtaataactataagaaaattaagacacatttgattggtaggttagaagcaaagttgtttaaagtattttgttaaagtcaaatgggattcacattgaagcatgtaatcctccacttagaggccagttggaagaaaagtatggcttcaagctatgttcacaaactgcaattaatgtcctcgctagccaatcattctattctctggcttctgtttgttgaatgtttttctagggttgacaccaatttgctgctttttaaaatttttccgtggcaattgcataattgttatgtcggctatgttaatctacaggagttctttg

SEQ ID NO: 93611 - DNA, 682 bp, Eucalyptus grandis
  Intron number 2 from transcript Egrandis_v1_0.018079m (loc us Egrandis_v1_0.018067m.g) derived from phytozome v7.0 (c hr-ID scaffold_8; pos 6199270 to 6199951)
atcgcatcgacactcgcgtccccatcgaagtcactgtatggatcccccatcaaactttcacctcgcttgagactttctccgagccatatgattagttgctaagttagattggtgttgatgatgcatcgtcatgttgttacaagtttgttgaaatttgttaaatgacacttaagttcggctgatagcagagttcaagatgcggcacgttgttgttcaaggggttgtggaatttagtagtttagtggcttgagttttcgttttgtgggcatcttttacaagttaagggtcaacaagcatgaaaattattcaaaatcttcctttgagatgaaagtgctccagggttcatccagaatttatatacgggaatcacatataaagttgttcctggactttatgtggagacatttgattcttaacatattgtgaaatatgtcgagtacttggaatacttattttatttgctctcttctgtgagagattcaagaaatctacctccgttaactcaataccttgtgacttttttgtcgcattgagatgcatgataatagagggatctagacgcataaaaagctaatgacatgcataattttctggatcttaacatgtaagatcttgatgttgttgttctgtcatgtgaatatgcacagatcggagagctaaagaagctcgttgaagaaggtaa

SEQ ID NO: 93612 - DNA, 622 bp, Eucalyptus grandis
  Intron number 1 from transcript Egrandis_v1_0.050714m (loc us Egrandis_v1_0.050714m.g) derived from phytozome v7.0 (c hr-ID scaffold_10; pos 889203 to 889824)
ttgaagagagggtggttgactttggcttggacaaggtaaggcccgcaaaagttgctacctcatacaaatatttcgaccacattagaaattcaacaatgaaatctgatggtttgattttcaactagtggttgtatgtcatgttcagtaccacggtaggagagaatcaccggttctagagctactaagatgtttgtatgagattagaaggcttgatccattcccatcactatctggtgttaactcatcaactaaaagcacatcaatgctctggtatatgaaagaagaaactaatgattccaatctagttacagggatatatcctatgaacacatctccgagtctctgtatcaagatgctttaacacccattgtccacattaattcttcaacttacatgagcaggcctttctagaaggcattcagagttatgatcaacttctgattatgtgagctattgcaagagttcttttactatttgctcgaaacctgaagtacgcattctaaacttgcgaaaaaagctgccacggtgtcttttctcaagtacccctttttatgtaacttgttttgtgccgtgtgatctttaatcaggccatagagctgttgagcgcttcattacactccaa

SEQ ID NO: 93613 - DNA, 658 bp, Eucalyptus grandis
  Intron number 1 from transcript Egrandis_v1_0.023348m (loc us Egrandis_v1_0.016314m.g) derived from phytozome v7.0 (c hr-ID scaffold_8; pos 49014206 to 49014863 reverse strand)
ctaacaactcattgcttcaggtacatctctcaatgtcctgttgtgggcacatctcattttgaattcctatgcattaaaggattgattacacactcctttgtgattatgtaccacaatttgatttcttcctttaatatcaaactagggttctttttgtttaccaagatttttaattctatatgcaaaagacgatattttaccacgcctttcaggacaatataacttatctttcaagcattcaaattgtgaccccaatttgtatatatactattaatcaacaagatttttcttaagatgaacgtacaataaagggtataataaaatattagatcttgcacgatcattgcaatctcaaacaaacacaatcctatgatattctcattggattaacatagaaaatgcatggaatttgcaatactcactcattatatatgaaccacttgcatgttcaatcaagaatatatcattggatatattcgtcaatataagcaatacataacatttatgatttatttctctgtatagatctaactgaagacagaagccttttttcttgatattgagtcaatgctttctgcttttttctcttttctcttttctcttttctctctttttttttttttgatagagaaaggtgctattgacgacaaagcccata

SEQ ID NO: 93614 - DNA, 770 bp, Eucalyptus grandis
  Intron number 2 from transcript Egrandis_v1_0.018016m (loc us Egrandis_v1_0.017961m.g) derived from phytozome v7.0 (c hr-ID scaffold_10; pos 30882586 to 30883355)
cgttctaagaaaagtgattgctctacacctacaaggtagtttctgctcaaattcagctgaagttaaagaaatttgttaaatatgattatgttgcaaaaatatacttcatattattgctagagttgatgaggccccagttcaaatataacaattattattctaggcacagcttactgtgagtgaaactagcagcagaaagtagatttattcacagaacaatgaaggatctttccttgtcttgtttttcaaaccatgtcagcttggttttggctgatgatgtatatgctccaaggatgaacactttttactcttagaacatctataagatagagtaaactaaattaaataaggggaaagtataggattatttttgtaattttgattgttctagaaaagtcacatagtatttcaggtggcttttgttattttgatttttccaaggaaaaatcgccgtgtgttatactttgtgagactaagacagtgctttgattgactataactcataaaagtggaggatgcataagaaccgtaatatgtgtatgtgtagaagtcacagaaactgcatgcttcccccatctctttccctggaggtagatgcatctgcagattatctttttcaatcatgacatatggttaatgtgctgtttctttatatcaattttattaggattctctgccgagcatcatccatccttcgtagtttgggccatgctctaaaacctgattccctattcttctgtacagaaaagtgcccactatcttgtcaggcc

SEQ ID NO: 93615 - DNA, 579 bp, Eucalyptus grandis
  Intron number 1 from transcript Egrandis_v1_0.000766m (loc us Egrandis_v1_0.000765m.g) derived from phytozome v7.0 (c hr-ID scaffold_8; pos 8101038 to 8101616)
gaccgcgataatttggctttcggatccatctacaggtacgcactctgtttctttccgtccacgcgatatccgtattctttggaatggagatgaatttgtttgtagaagtcgattttctgcagtagctcagctcctttgagtacagtcatttgttggaatcagaattttatgcttgaatttaggaaactagaatttccgctgtcttatagagtcctggtgggtaatacgtatgaaaacgagtagtaatgcgatgtttgctcgatgcaagagttcgtttcctagatatgcagccacgtctattttttgtattcccattggagcatgcgatttcctctcgttccccttgataattttcgtgcaaggattttatactgattcagacataggtgcgttaggtttccgccaaatgctttcagctgatccttgcttccgaagaaatggtaaaaagtatcataaatagtgtgaagcattgcaattcaatgcgctgagtctaagcttacttttgtgtaataattcaaacagaacaataccttcagttacttgcataaagccatcttgaatggtcgcactatttgcaga

SEQ ID NO: 93616 - DNA, 762 bp, Eucalyptus grandis
  Intron number 2 from transcript Egrandis_v1_0.002633m (loc us Egrandis_v1_0.002034m.g) derived from phytozome v7.0 (c hr-ID scaffold_10; pos 29131677 to 29132438)
cagccggtagtcatctgtttcttcgacttcatccttttccttctgtagccatcctgattatcatgtggtcacactgaattttttattttgtgttgacattctagagatgctacaaattcctttttgttaatattgattgtattaggcataaaaatagtgtgtgcacttacgcaaatgaaatgaggtgtccatcaggggaattcatctagatatagatggcaggatttaatgttcctttggacgaacaaaaggacaatttttcacttcatgcttttcctgctgcagccatcttttttctgactatcttatggttgcagtgaactttttgttttgttgacattctagtgatgctacaagtccctctttgctaatattgattgtgataggcatactaatggatgctttgtgcgtatttttgcgcatgagatgaggtgtcggggaactcatctatatataaatggtaggcttagagtgtcctctggctgagctaatggataatgcacctgaatagaagacacatgcaaaggccggaaaaatcatggcaagaaaatccattctatcattagttttgcttttagaaatatactttacacaattacctcattggatataagttagtgaatgtcttaaatcttccgtgtttgtgctgacttctgtgctgtggattaatgatgcatcacaattaaggtaagagttatagtgtgttttcaaatgttatgacagtactaaatgagaataatttatgttgattgccagagtgga

SEQ ID NO: 93617 - DNA, 890 bp, Eucalyptus grandis
  Intron number 4 from transcript Egrandis_v1_0.031545m (loc us Egrandis_v1_0.031545m.g) derived from phytozome v7.0 (c hr-ID scaffold_10; pos 1511614 to 1512503)
accgccagcctccgccgcgctacatcaggcgccgggtatgttaatctgacttgctaggctcagcatgcgtttaaattctgctcgtctactttggtgccggcttgggttcattgttgatgcagtcactggcattgctgatgaaagtgaatggtggttatatggttttatcctctcttccttctttcagtgggactgttgctgtttattttaggacgtccttgcttgtgctatgattctaagagaaatttgacttgtcatgcttctgaatgatagtgatgttgatgaactttcagtttgtccattttttactggaaaaccttgaagatgtgtataaattgtttcggctagatctcatttggcataagctgtctaagaaaattcgtagaagattagtgaaaatctaagctatcgagattgcacaagaattctcctttaccattggaagatagaatgtatcgtcaacgtagaatccccatgagtatgtgtgttctgcatagcgctgctgaactttgccctatcatttgataacttatggtccgattgtctctctatacaaaagctattacttctttgatggtggattgcttcaaagttttagctgatgagctttttgggattaaacagtgagaataatttcttatgtgcgctcttcgtagtttgtaattatctgaaaatgagtatcagtctggcattctgattgtctacatgttcattctcatttcgactagaattgactgggcagcactggacggggatcctgtgctccttttctgttacttgagctgttttcacacgtcttaaaagtttgcatttcctgcttaataccacacagctatgtgttattcattttcctttaagatttttgttgtgattgtgatttcatttgcagg

SEQ ID NO: 93618 - DNA, 697 bp, Eucalyptus grandis
  Intron number 1 from transcript Egrandis_v1_0.022322m (loc us Egrandis_v1_0.016621m.g) derived from phytozome v7.0 (c hr-ID scaffold_10; pos 5322448 to 5323144)
cctcagagtcgtctttcttctactttctctctcaggttcgtcctctctctctcttttccttccagccagtctttgtcactacccttttagcttctcctgggcagctgccagtcctggtgggaaagatctcttttctttttcttttttttaggagaattgcgagcctcttgtcttctagaaagcgcaaaagacccgatcaatgatggtcgcatgttgctttcttcattgggctttactagattttcttccgttcctctctctctcctctctctctctcttctgggggatatggccggagcaagaataggaaaatgagacttgttgttgggagttcgctaattttattaccctttttcttttccatgctttccgggctttgagggaaaagtttagatggattcgtttcacttcatgttagtcgtaggtttttttcctttggtagtgccaaatttggtgagagtgagacgagattgtcgttaacaattcccacatgctaatgtgatgtgacgaaagtgtgcatcttgcaagggaagttactccagttacaaatatggatgtgtggacattctggtttaacggtttgaattaattttctggtactctctgtctctccaattttacgtgtttctggtcctgactctgtttcttcctctgcgttttagattctgcgactcgaattctaggccttgagttcggg

SEQ ID NO: 93619 - DNA, 478 bp, Eucalyptus grandis
  Intron number 2 from transcript Egrandis_v1_0.030575m (loc us Egrandis_v1_0.030557m.g) derived from phytozome v7.0 (c hr-ID scaffold_10; pos 36808074 to 36808551 reverse strand )
cctccctaagcattgtcaaatctgtgcaaaatattgtgagttactcctcccccttttgttttgtacagtggagattgtttaagccaaattatgggtaccctgtacaaagatgcattttcatgtagctttctactggttttacaggtatgtcaatagttagaaatgtttttgcaatctttatatgaggaaataaagggttttctcggaaaataaactgcatctctaaggtgttatttgcctgtctttgaaaattttgtccaacttattaatttcatcggcattttctgtttggggtcttagttggtacctggttctatcactgtttcttctggtagattcttttagttggcacctggaatttctaacattccacttaggcatttccaaggccattggacaaaatgtgatcttttccctgatttgattttaatttgtctggacagtgggataaatctgaggatcgggtggctattattgg

SEQ ID NO: 93620 - DNA, 752 bp, Eucalyptus grandis
  Intron number 1 from transcript Egrandis_v1_0.001041m (loc us Egrandis_v1_0.001041m.g) derived from phytozome v7.0 (c hr-ID scaffold_8; pos 48454183 to 48454934 reverse strand)
ggaacaggtatcgacacgtttgtttgtgtatttatgtgcgtaaagggaagaatcactacttggctgcggaaaaattaagtcttgctttcatgttgcttcatggtataatacgatttagctcaatttcacgtatatttgaaaattctcacgatcaggatactgaggatatttctgattttcttgttaattttatcttgagcaaaaatacatgtactcgtagctgaggcataagaagtattcttttgagttccaattgtatatgaagatgaggcgggtcatttgtgaagttctaaaaggttgggcacgcaatgtgaagattgaaattttatctgaatgtgaagacgcggttatctggtacataaagttttagctcgagcaattggttgtgcactctctctgccgttctatcagagtaggctgtctcttttggcgcttccgtggctattccatgttcatttgcctccagtaattttttgtataattgctagcgacactcagttttaacatgaatgacaagtagtattccattctggtctttttcttattctttgatcctgtgctaaaagttttgttttgtttgtttcggattgttgaggaagaaacttttgatattggaaatggacgtttccattcatattattgtttctttaccctgagtctattggtgcaacactggaatttcattctcatttgatcacttgtttcctcattgatcaggtgaggcaaattttctaggaggcgttgcttctgct

SEQ ID NO: 93621 - DNA, 661 bp, Eucalyptus grandis
  Intron number 2 from transcript Egrandis_v1_0.008205m (loc us Egrandis_v1_0.008205m.g) derived from phytozome v7.0 (c hr-ID scaffold_10; pos 10489323 to 10489983 reverse strand )
tggtcgcctccatttcttccttcgtagcctcggtatgatggcttctcaacctcgcgatcttgctgttcacagcttctctttcaactgctaaattagacggtgtttgataatggtgggctaattgcaagtaatataatactagagtgtgtttgttttagaggaaattttgtgataagagaaaatattttctgaaaaatcattttcaaggagaatgttcttctttttcagataaggaaattcatttttttttttttaaactttaagtatgtatttttttttaacataaatgatttttctcattttcagcaaatcaaacgcatcaaagttcggcatatttttttactcaaacaaacccacaccataccatcacatggttttcatagtgaactgatcaagaacattaaataagaaacgaaataataataaaaatctcagtaacaaactgtcactccagcaatctttattgttttccaacgttgaaaacattgagattgctgaagggcacacatctccagggctccctagcagataagtcttcctgagaatcttgtctctgatgaatttttaaagtgggtttgctcatgaccgatcagtagcattatttttggccaacttgccgcttgcagggtatagttcttttatccttaacggcgacgcttaa

SEQ ID NO: 93622 - DNA, 981 bp, Eucalyptus grandis
  Intron number 5 from transcript Egrandis_v1_0.022639m (loc us Egrandis_v1_0.022639m.g) derived from phytozome v7.0 (c hr-ID scaffold_10; pos 26411704 to 26412684)
atttaggtaggaaactgatttctgaagcaggtttgacaataaaagaattgtaaagcatggaacaaattattatttaaagggcgtttagggggattttttattgtctaataatcactggctttggcacagcagaaattaactcttgattggtgaatgctttctttaatataatcttgccgtggaaccctactattgttgtggaagtcttgcatttttgacttcctagattgctgtttccatagttcttttagttgattcatcctcacaaatgacgcatgcacctctcctattttcaaaagatcctagcttttgagctcctcataagatttaaagatttgacattgtcaatttagattgtcaatacttttaaaaaattcacatggatctaagtgaaatagccttagtatcaaggattaagtactttaattgtgccaagctcaaacttaagaagaatgaacttcccaaagagttcgttgagtgatttagtgcttttggggatgtgatatattccgttgagttatatctattttcacccggagtaaccttagtggctaggttgccatcccatgggtggagccttactcaatgcactagataggatggtttgcgtgcctccgaagaattagtggacttgcagtttctattaccaattttatccccacaaaacttaagaataattaaaagcatgtcagtggacaaataccttgatatatggataaaatattaggaaaacaagctcttttgtttagctatgacatgtgaatggtgaaaaaggatcccttgttgttgtattctgatgacttttccaatgtggcttacaaattagcgggaaataaagagtttgacatgttttgagctgtcaaacggctatagttattgttataaggcaatgtaaagtggtgactatatgatataggtagcttttatatatttagactctggggaataattgcttctgttgattggtccacgctgcagatt

SEQ ID NO: 93623 - DNA, 728 bp, Eucalyptus grandis
  Intron number 1 from transcript Egrandis_v1_0.005170m (loc us Egrandis_v1_0.005170m.g) derived from phytozome v7.0 (c hr-ID scaffold_8; pos 18949459 to 18950186 reverse strand)
tggataccgaagggaggattgcggctattatttccgtaagcgatgttcccttaagctgttctttcttcttctcttcttcctcctcctcctttccttaaatgctagcttcactaagagatctgatcaaaatttacttaccaagtgacgtggcaggttttaattgggtatttttaataaattccacacattaaggcactagtttctttaaaaacataaaagaaaaaattgccacatcacttaagttgaaaagtttaaatagatttcttagtagggtcggcatgcactgctctcgtttattttacgaatcttggagcttttctggatttgacattgttacttcattttcgtttggggggaaatggttgatttaattgttgctcgtgtcccttgcacggctgttattgttatgcggttgaataaactgcacgcgtattgaatgacgtttgtaaatcagaattacgcggagcgagacgtgaacttatgaatcatttggtatatataggtgaacaaaagcaaaatcgcttttcttcaagagaaaatgtcatgctacgatggcatggattccctaggtgaattaaattaactgtgatctgagcgctgtcaaggagagtaaattatatttatgtttaactgctaaaatgataaatttaattcttcattgattgatcaccgactctaattaatctgttgcaggcacccctaattctgggtgggtcaggcattggtat

SEQ ID NO: 93624 - DNA, 904 bp, Eucalyptus grandis
  Intron number 3 from transcript Egrandis_v1_0.024427m (loc us Egrandis_v1_0.024427m.g) derived from phytozome v7.0 (c hr-ID scaffold_10; pos 24223900 to 24224803 reverse strand )
aaggacatttatttgcccagggactactacactgggtgagcaacagcagccaattacattaatgctatcatgtagtagactttggtttcagaatcctttggaagcttctatctgatgccaattttcttcatatctccattatgagttcacaagtttcatgtttgatgttgatttaataaaacttaatgagtcttttatccatgcatctgaaaatttctgtgtcataataattcaaataaatgttctccttggattttatttgcaaggaatttgaatacatgattcttattcacagtaaattagtagaaatatccaagagcttgtgcatccaaatgttttttcctagtaattgttttactcggtttgtcttctttcactgtttacattttggtaaaatcatcttcgggagattgactcagcatgctaaagggttcatttttgcaaactttaatttggatcagagggccgctttccgtgttctcctttgtcatcacaagttgggtgttttattgaagttgttgagatatttacccagcgaaaataaagttttgaagagatcaatcaagtaattagagttcatttgaagatgatgttaatggtagtgaagattggaaggaagttgggtttgaatacattgagaagatgttccaagtcttgaagaatatcaagtcatcttaaaactgacacttgcaaggttagcagccagagtgcttgcttttacttgcttatcctgactttatggcttgttggggatattctggcaagttacaagctgtggttttccctgtgtatgttgtttgtttttttggccttttcaaatgaaccctgtaatgactttttcctgtatctctctccgtctctctctctatatgcagagaaccacgtggttttggtttcgtccaat

SEQ ID NO: 93625 - DNA, 438 bp, Eucalyptus grandis
  Intron number 2 from transcript Egrandis_v1_0.024427m (loc us Egrandis_v1_0.024427m.g) derived from phytozome v7.0 (c hr-ID scaffold_10; pos 24224812 to 24225249 reverse strand )
attgcaggttttctttttatttgtttctgcatttccttcatgctgttttgcaaaaatcttaagaccttgtagatcattaactatgttctttattaaacttaattttttgattgccatattggaatataaagttgaaagagcatgagtcagtggctggttctttaaggcacatctaggacttcgtttgatttaattgttgcacataattcttcctgtttcgcacttctttttttgttttttaaaggaaaaaaaaatggcattgaactaaagacttcatacttgagaaaattaatatcctgcgttttttcttcttcctgtcctatgtattcttttctttgaaagcaaatgctattggtttcttgtgggcatgttgcatactataacctttgactaattattgcaggcaagaagatcttcgaaggccatttgggcagtttg

SEQ ID NO: 93626 - DNA, 508 bp, Eucalyptus grandis
  Intron number 2 from transcript Egrandis_v1_0.028709m (loc us Egrandis_v1_0.028695m.g) derived from phytozome v7.0 (c hr-ID scaffold_10; pos 21399641 to 21400148)
ctacagctgaaggtaaatgggatctttgtgcgtgcattatctgtttttggtgagaccgatttgttctcactgggtgattgcgttgatggatgaggaaggtcaggccaagctgtgggttttgcacagtagataaaactaaattctgggttgtagctgtcgaatgtaaaatgcacgttgatgatttgttgagggtggtgattagggaaatatggcatgggatgatctgtttaatgaggaaacttaaagggcctcgttctctggatggattgcagcttaattatttgaatgtgttttcgtgtgtcctgcggttaagttaatcttctgttcttctttttttctccttatgttaaaggtttcttgatctggtttcccttccagtagtcatgaaatatcgtgactggtttcatggaaatgttatcatggcaatgcagttttttgcatttatttataaagcaaacctttaatgtgaatgatttgatcatgactagttgtttccttgtttccagaa

SEQ ID NO: 93627 - DNA, 447 bp, Eucalyptus grandis
  Intron number 2 from transcript Egrandis_v1_0.030947m (loc us Egrandis_v1_0.030948m.g) derived from phytozome v7.0 (c hr-ID scaffold_10; pos 28025692 to 28026138 reverse strand )
agcaaggtaccattccttcttttgattaattgcattacatggtgaatagactgtgaacagtttgtcttcagtgatatgaaaatggaggatatacagatctattctgcgtagcagagttggtgaagaaaattatattgaaggcctttgtttgtaattttccattccgaggcctcttaactgttgagcttctgcgatttgtcactagcagttaagctcaacatatttatcgaatttaaatcaaaagtaacatgcctcttactctcgaccaaaaaaaaaaaaacatgcctattactctaattttagcaatattcataactctgttctaaatttgaggccaatagcttctgcagtcaggcctcccgctgttttggtgatattatcaactgcaaccatagtttgggtgtactatttgaaatatcggtacacatttttactgcagttgacttg

SEQ ID NO: 93628 - DNA, 552 bp, Eucalyptus grandis
  Intron number 1 from transcript Egrandis_v1_0.043285m (loc us Egrandis_v1_0.043285m.g) derived from phytozome v7.0 (c hr-ID scaffold_10; pos 17507389 to 17507940)
tcaggtcgtttccttttctacacggtcttgtattgattttacttgacatggcttgggttgtttctaagctttcttttttatgaatgtattattaagattattgaattgttactttatattgtttgtacggtattagaactgcataatcagtaatgaaaaccgaaaaatatctcatcaaataatgtatcattaaatgggcattaataaatatattaagatctcgtttatgtttaaaccaaaatcaaagtttgaacccatttcatgatttgtggatgccctgggctagactttcatcaactcatgccccgatccataactcgaccctaagctccctcgcaacctcgacatgccaatccatggagccatttattcttcaaagtgaataatatgaagagaaaagtgctaaaaatgaatcttgagatgggtcaggtatggatcaacatatttgtattgcaaataaattggtcatgaacgtgtaaatatgtcaaattggatcagaccaattatggcctagccaggcccgtccaattgatagatctacccacaaagcat

SEQ ID NO: 93629 - DNA, 613 bp, Eucalyptus grandis
  Intron number 2 from transcript Egrandis_v1_0.013241m (loc us Egrandis_v1_0.013241m.g) derived from phytozome v7.0 (c hr-ID scaffold_10; pos 3578411 to 3579023)
ataaacttgaagcagctccccttctaactgcacaggtaaggaacaatctttttttgcgttatttgtttcagtgatgcttgagagtgctttctagtttatgcgcttaaatatcataaaaacatagccacttattcattagtaactttctcaaagccataaactagaaagtaactttctcaattcaatgataaactttcaattctgagaactggtaattgtccatgcgactttcccataaaaaaaacaactagagatagtgacttttcttaattggggtcacttgtctttctaacgtctcaataaggaataattcttcgatccaccaggtgtcagggaattaaatattgctggataaaatgggttaactctagccaaatctttcgctttttcatggaagaaaatcgagataatatggcatggatcaactacatcgaccccgaatccttttccaccattgaatccggtggttctcaccaaatgtaggacttcatatggccataaagtgcataaactcaatccatgcaagaactttttccagatacttacttgttctgcatttttgagttagaaatgttattaactctaaagacaaatcacaggtgaccaaatttaa

SEQ ID NO: 93630 - DNA, 567 bp, Eucalyptus grandis
  Intron number 2 from transcript Egrandis_v1_0.031724m (loc us Egrandis_v1_0.031724m.g) derived from phytozome v7.0 (c hr-ID scaffold_8; pos 12024482 to 12025048 reverse strand)
tttttgtgagtgcctacgtgagaatattttcccctttcttgccgcttcacatggcatcttctttactatgcttggccattgcacgatgagttcttgcccaaaagaatagttcttaagataagaagctcttttataactgcccctttcccctcctttagattgtgtttgagtgtgtcaacttgtaattttgaaatgcttggatggtaattgcagtatagttccttgagcatacgttgatgaacgataagtaactgctaatgatgtggttgggagagccgtacatgaatgctcaaactgtgcgaaaaatctgaaattttgcttgctgaacgcttttttttttttttcatttccagatggaacacaagtgtctttggccttttttctcttcagttttatttgtttatttttgctaaggcatttttatttagttttattctacaaaatatgcacaagaggtgttgattcaatgattcattcatgcctcatgaatccataatatgcaatgtaaacttccttaatgaatcatatttgttagggaagttgctgcgagaagttgaacccgagtta

SEQ ID NO: 93631 - DNA, 511 bp, Eucalyptus grandis
  Intron number 2 from transcript Egrandis_v1_0.005182m (loc us Egrandis_v1_0.002121m.g) derived from phytozome v7.0 (c hr-ID scaffold_10; pos 31602811 to 31603321)
tcatcgttggttttatcgatacaggtgaactttcttaacacagtcctctgtatacatcgaattcttggaccattgcctgtttcaggagtttctggcttgacaagcagctatctattctaaaaggagaaccttgctctagttgtttctccagtcctggcagatgcatccgtttaaactagtgttgccgattagcttggttgtgcctttgttggggaaacacagcttttaaattcagggtctgaatttgctcttttatgctgaatagatgtctatgtattgttaagtaaattgctacgataagaagaaatatttgtttctacatgatgttgagcaaattatcagttttttttttttttatcaaaagcaaattatcagttaatctacatgatattgcgcaaattgtgagttagctatcgtccttgcatccaaatcttggatgtaattggaaaaaggaaaaaaagaaaaaaaaaaggtaggcatgatccgtgatgttacttttcaaagcaggaat

SEQ ID NO: 93632 - DNA, 658 bp, Eucalyptus grandis
  Intron number 2 from transcript Egrandis_v1_0.031469m (loc us Egrandis_v1_0.031469m.g) derived from phytozome v7.0 (c hr-ID scaffold_1; pos 32117329 to 32117986)
gtgaactatcggttccaaacttgttagctcaggtactctctctctctctctctctctctctctctctctctctcatatctgccttaaaagttcattcacagatcaagcttccaaggaatttacagaaaaactcaggatttcagctcaaacaaactattcacccttctgctttattgatcttctttgtttcaatctggggcctagtggtttacatggtgaagcctggctctttttctgagcatctctctgtttttattgaatccagcacacccagtttaggcctttgcacaatttccacacacgtctagagttgtttatcagataaatggataaagagtatggaaacatgcatgctcccagagtcccactcaatctgaccttgacggtcgggagccttaccttatgtactcggacaagcctgcgtgcatttgagagatttttgttcaattcaaaagatttggatgcttcctgtcatgagtacaattagacgattacctaagcctggccgcatttggatttggtactccaaaaactcttagatccggcagatctcacgcccacgagacgctagaattacttgtagctctctctctctctcttatactctgtttggatataagcagacgctaatgagccgtgatattgccaacactgcagg

SEQ ID NO: 93633 - DNA, 350 bp, Eucalyptus grandis
  Intron number 5 from transcript Egrandis_v1_0.008520m (loc us Egrandis_v1_0.008520m.g) derived from phytozome v7.0 (c hr-ID scaffold_8; pos 54943423 to 54943772 reverse strand)
tggaactctgatatcctttggcatcatttcgtcaggtatgtttaataccttgtttgagtgaaaccatcccaagcgattctcaaccacccaagtcctgcacaagaatcacaattgcttttttttttcttttttgttacttcattatttgattctcctcttttcacatgctctatgatctgatggttgaaatgttccagtgtgccggtttcttcttctccttttctttccttccctctctttttccaaaaatcttgacatggttttatctgttgatgtatcttacagtctaatcatgtttgctatctttggtcccaggtgccaaatacatttttgaggtattcaatttccat

SEQ ID NO: 93634 - DNA, 977 bp, Eucalyptus grandis
  Intron number 2 from transcript Egrandis_v1_0.027484m (loc us Egrandis_v1_0.027484m.g) derived from phytozome v7.0 (c hr-ID scaffold_10; pos 30827312 to 30828288)
tgttgatttcttataccagcaacactttccccacggtgagtactcgttgagaacgccttctttttaccgcttgtcttcggcgcttgcgttttctttgcgaattcgcttctcggtcgctggagaatgattggattgtgtagcatttttccggatgatctgctttggatcgttgcgaatttttgttgaggttcttgttaggttctttacctttcggggaaccgaacataattgtcaaggaaaaagtctggtttttctatgtttctatgtttgttttctctctctttcgtcgcctaattgagagcagatctttgaggttcgtatatcgtatcggtagtacattgccttgaatgcggatacggattacagaagtccttgtgttacgtactatggctcttttcttctttgtgctgcttgctcaatttggaaatgtagcaaataacatttgatgtactctcttctctggtttgctgaataatggggaaatgctattatatgttattgtttctcttcttatgctatgtctagtggaaggttggagatattgtcccaattgtgcacatcataccccgctagcatcagtttgtaggatacactcctgtagctcctattatatgcccgctatagtgttgtctgctagatttcaattatagtactttgtgtgattgctgagagtttttgggactcgattattttaagtgtattagtgtttatggatcttagtgatatatgctgccattttctcattctatcgattatatggttccagttgttgatttcgggtaaatgtgtttctgctttttacttacatttcttatgagcttaatggagcaaatgatctatcaaattgtttggtttctcctgttaagtctgctttaagaaatttttgtgtgattgattggttggatgtcgaggggtttttttattcaatatttgaacattttctcatgattttattactgaatgatggaaacaggact

SEQ ID NO: 93635 - DNA, 682 bp, Eucalyptus grandis
  Intron number 2 from transcript Egrandis_v1_0.018083m (loc us Egrandis_v1_0.018083m.g) derived from phytozome v7.0 (c hr-ID scaffold_8; pos 6182380 to 6183061)
atcgcatcgacactcgcgtccccatcgaagtcactgtatggatcccccatcaaactttcacctcgcttgagactttctccgagccatatgattagttgctaagttagattggtgttgatgatgcatcgtcatgttgttacaagtttgttgaaatttgttaaatgacacttaagttcggctgatagcagagttcaagatgcggcacgttgttgttcaaggggttgtggaatttagtagtttagtggcttgagttttcgttttgtgggcatcttttacaagttaagggtcaacaagcatgaaaattattcaaaatcttcctttgagatgaaagtgctccagggttcatccagaatttatatacgggaatcacatataaagttgttcctggactttatgtggagacatttgattcttgacatattgtgaaatatgacaagtacttggaatacttcttttatttgctctcttctgtgagagattcaagaaatcaacctccgttaactcaataccttgtgacttttttgtcgcattgagatgcatgataatagagggatctagacgcataaaaagctaatgacatgcataattttctggatcttaacatgtaagatcttgatgttgttgttctgtcatgtgaatatgcacagatcggagagctaaagaagctcgttgaagaaggtaa

SEQ ID NO: 93636 - DNA, 940 bp, Eucalyptus grandis
  Intron number 1 from transcript Egrandis_v1_0.020581m (loc us Egrandis_v1_0.020520m.g) derived from phytozome v7.0 (c hr-ID scaffold_10; pos 29064451 to 29065390)
cagcttcgttccagccatcgccgcgtcggaatcccgtaagtagtttctctccgaaattccagttcctctggcgaactgcgctagggtttatcggcggcgattcccgcgaacttggaaatcgccgtctccatctccatctctgtccgcgcctgccgcgacgacgacgacgaattcgtccgcctgttgcgaatgtacggcttggatgggatcgaattgacgtctttgctcgctcgttagctctccgtgtttggccagtgtctcttctctgggatcgatcgtttttcgcgttgaactcggcgagtgcgtggaaatggttgtgcgggccttgcaatttgtgttcttgtggttttcatgttccgtgcgagataagatagtgagatagagggccgtatgtacactgtccctgttcgtgcttgcgtgatgaccgcgctgtcgcgggcgttgcgagggataatggcatctttggaggctttggaatttagtagatacttgtgatggtatgtgaagtgtttaacaaactatgtatccgttccgagaagtgacaatctggatgatggagatcttcgggtcggtcattcatggtacttctatagaggtgcaaagctaattattatttggtcatacatatggtgagagttaaacaagtgctttgtggagttttctggtgtatgaaatcttctatgggtcccttggcttttttttttttatcctttttgggtgaactgggtccattgatgtgctggtttttctctctgattctttctttcattgcgtagaaaatggacgaacttttgttaccctgcactatgtatataagttcgatctccccgaaccccttagtgttgctacttgctggtatttgaattgagtactgagcttgtgcatcttgttcctccattttgcagattgtgctttccttttgggatttgaggcaagcagg

SEQ ID NO: 93637 - DNA, 495 bp, Eucalyptus grandis
  Intron number 1 from transcript Egrandis_v1_0.016891m (loc us Egrandis_v1_0.016891m.g) derived from phytozome v7.0 (c hr-ID scaffold_10; pos 28520823 to 28521317 reverse strand )
tgcgtccaacaccctcaggctcccttcctttcacggtatccgtcttctccccgctatttctttctttcgttctttcgttttcttgacgtcctctcgacccttttgaatgattcgactgtaaggccgtgcacatttccaatagtggcattccatcctggtgtgacgggatgcggatggaatagttttatttgttgcgattcagttttaggaaaaattggtagaacgtactgtgcataaggggagatgcggtcgatttgatttgtgtgtggcacttatgtcgtgttatgttcttggatcgtttcttataagactcttcctttttttccaattccttgggcctttttaggaaaaattggtagaacgtactgtgcataacgggagatgcggttgatttgattggtgtggagcacttatgtcgtgttatgttcttggatcgtttcttataagactcttcttttttccaattctttgggcctttttaatgatggtgttcag

SEQ ID NO: 93638 - DNA, 770 bp, Eucalyptus grandis
  Intron number 2 from transcript Egrandis_v1_0.031477m (loc us Egrandis_v1_0.031315m.g) derived from phytozome v7.0 (c hr-ID scaffold_8; pos 44268170 to 44268939)
tggtcgaccagaacagagtgcgtttcccagttcttgagctctcttttattcctttcttgctttggtgtttgttgtgtcgtgtgattacgtagctgggttgaagttttcttttcttgggtaatctagatttactaatatatgatgcgggtgaagatttaattgcatagggatggtgtagttctatgatgggtttgattctttcagctgcttcggagtgatttgaggatggttgggacacatttataatgcctttgttgtcgatgtgctcatggaaaaagtcatcagttttagtaggtagggagccaaactactagaaatagaagctttggacaccgttggttttcaaattggctgtgtcaatttagattgcattgtgcgaatgaaagttttcccagttttatggggatatttgctggacgctttgttgtcggattctgttcacaaacatctgaaaagatccactcgattgctttccccccgagaagtaatttctttggcatcattcttgacattcgtgttccgtggatgctgagcgcccgacttaattgttcttggttgcaaagaatccttacttgggacatcagtctcttccttgtttcacattgccatggtggtaatcatatgtttgcttcagcatttctagaaagatcttagcaatgtgttgttcagactttcccatgctacatttgtttctctttttgcaccaaacatgtccccagatactattactaagtctgaagctttgatttgcttgtcccaggctcttgtcg

SEQ ID NO: 93639 - DNA, 441 bp, Eucalyptus grandis
  Intron number 2 from transcript Egrandis_v1_0.018919m (loc us Egrandis_v1_0.005944m.g) derived from phytozome v7.0 (c hr-ID scaffold_8; pos 4995186 to 4995626 reverse strand)
catcaccttctcagcaacaatcggtcgcaaagcaggtcatttttgagaagatatcctcttgacaattactatttttttgctttgatgtgatttccattgcattaattaaattcttcttatctacgtagcttcatgatcatcttttatatgtacctctgttttgaatgctagttgttggaagtagcacgggaatttgaagttgaagaaaaaagatctggagatttgttctcattcgcatcatgtgaatctttggctagccagaaattgaagagaagggattgttgttgctttttgataagctttaatgctctagggtttggctattttctggcttctgtttctgcatcaccttttctatgcttcgtcttttcttggatagtttcaccgtttaggtctgagcaacggacgattatttatcgaacaattttttttggcaggtgc

SEQ ID NO: 93640 - DNA, 957 bp, Eucalyptus grandis
  Intron number 1 from transcript Egrandis_v1_0.018919m (loc us Egrandis_v1_0.005944m.g) derived from phytozome v7.0 (c hr-ID scaffold_8; pos 4995736 to 4996692 reverse strand)
agtagccatcgtcccgccgtgtccacctctctctcgttctctctctctctgtgagtttcctgtgcgtttggagtgtctgtgaaccggagcgcgctcgcaggtgagccttgtccatggcagtcgactgcactcgcgcgtgagaagcaagcgcccgccgccgcgcgcgcgttctcttctcgctgcaccagtgctccttcgttctttttgatcgcctgaagattcgtgcggaatcgcctgaaaatctgtttgctgtattactatcggcattttgagttttttagtgttctggcgagggttttgtgtttagcgagcgggatttggtgagagttgaaggaaagcacgtgcgtctctggggtgtttttttattgtttagcgagcaaaatcgtgtcttttgatggagttttgtttgtcacgaaggagaggaaaacgatcaagctttaatttttttttgtccttttttttattttccctcgttagagaaatctgcatttttctgtttgactctctgatcattacgaatatgtattcttctgggtcttgtcaaggggcagtacttaagtataccgaggaaatgtcttgattttcaatgcattggttacacgtgccagcgcgagagagacggtgccttggaaagcacaaacttccctcaatcgagtgtttaacaactgttccaaggcactcacttacaaaacccttcttgtataatttatactggtggatagcttgttggatacttcctgcttttcattttacctatgaagatggatataggaaactcatgctgaagcactaagtgcgcaactagttctcatcttatctgtcatcattctctttccttatccattgtttttggtagttggcaactgggtagccttgttaaatttctttgcaaatttactattcttttttatgctcacattagatcaaggaaggggacccctgcacaaagcataggag

SEQ ID NO: 93641 - DNA, 528 bp, Eucalyptus grandis
  Intron number 2 from transcript Egrandis_v1_0.019215m (loc us Egrandis_v1_0.015038m.g) derived from phytozome v7.0 (c hr-ID scaffold_10; pos 8439037 to 8439564)
gcccgccggattgttctccaacacaaacatcggtacacaaaatctctctctgtctccatgaattattttctttcagttgcgtcgttttatctgttgggttcctttatacaagatgtagagaagcgaggaagttccaattttcttgggaaaggattttgcattgcaagttgacatttattattcggatttttacttttttttggctccttcctcgtactttaatttttccagtgctcttcccgtccagagccctgtttaagtacatcaatcaaattcgaaagagaacaacaacttggaactcgaaaaagtcctagaaaaagaaagggcaaaaaaaaaacataaaaaggcaaagtctcggcggcagttaatcaaaatctgttgaaagagatgtttggaagcttctatcgttctagattttgatctcgatgttactgaattcttcgaatgatttgtggacgggataagacagataacaaaccgatgcaaatagcaggatattctgcctcgagaagcatcgaggatttcgtc

SEQ ID NO: 93642 - DNA, 974 bp, Eucalyptus grandis
  Intron number 1 from transcript Egrandis_v1_0.002202m (loc us Egrandis_v1_0.002202m.g) derived from phytozome v7.0 (c hr-ID scaffold_10; pos 8809826 to 8810799)
cctcttggagcttgttagtgcagagcttgactacagtaagtattgagcattcaattttgaacttgaaattgttaacacaacttgtaacagaaagcagggcgagaaataggctgaatttgattgaaacgtgttcttctgctttttgaaaattttgctatgttcactatttgacttatatttgaagtgaaacatttgaagtttctcaaagttcaaaaaaagcgatattcagaattatatacgaatttttaccctcttttttttaaaatagccattttgggtttgaagaaaaagtcacaaaattagataagttgtttatgacttgcaacgaacaaggatgtatgattgtataattaataaccattccctatataaattctccgtggacgtaggtttgtactaaaagatctgatgcatgctatccaatttagcactctatatgtgagatataacatgttaatgaaggtgtaatttcttgtcttgttattaagccacagatatatagatatatatcatgatctttgccagaaaaaagtatttgcgagtaccgcacaggatatatgtgcaatcaaaaactaaaattgacgataaaagcatgaattttccccatattatcatggttcagcccaaaataagattccaaggcatcatatagaccatatggattttaatccttacgcttgttatgctcgaccttccacgtaaaaaagggaggagagagagagagagagagagagagagactatctcttgccagaaatattcagctccaagcccccaattcgacgatctttccttagattcgtcgcatttactgttcatggcttaatttcggcttcctaacacgaaatcctagccctcccgtagtgtgcgagagccaactgtaatttcgttcctgctatgatgttgaagattataacacggtcttgaacttcgtttacagagacgggacaagagaaggagaccataaaaggatat

SEQ ID NO: 93643 - DNA, 964 bp, Eucalyptus grandis
  Intron number 3 from transcript Egrandis_v1_0.032237m (loc us Egrandis_v1_0.029913m.g) derived from phytozome v7.0 (c hr-ID scaffold_8; pos 59048067 to 59049030)
ctcttcattttcaaataatccgtctcgaaaagcaggtttgttgagaaactctctcccctaatgttgctcatcttgctttacattgctgttgagtgagatggtaaagctacatacggtgattttgttggaggtttaaactgcatattttggttcagcttttcatttagatgttctttggaatttgtgaacttaacatagcccaatcaatttgcttgtggattggcgaaacttccaagcattcaatgtgctagacttagttattggtatggtaatatagaaaatctggccaaaggaattactgggaaaatgtgattttacaatcttcgtactagggtacgtctaccgcagggtacttggtaaaataatgagatgaatgcggtttcttgtttgatacttcagtagtgctcacttatcattctattggatgcaatgtattgggagtttcttaagacttctagtttgcaacatgcatagttcaggagattcgtctaactcaatgcgtgagactcttattcttctgctgggattagaaagtggaaaagcaaacttataatatctccatttatgatccgaattttagttgcggtgtacttgctgattgaacgaatttgaggttgatataataatcagcttcaacaactctgattttgtttgctagtagcattttttcggagctctctgttcatatgccatctcattctgatcaaagagaaaaaagaaggtccatcttgtatttgctacagtagaaaaggaagtttaaggttttctgtcagaagcatgcctgtgaaggcttaatttttcttcatctacggcagttgatggtgataatgcagtacgagcaacttcatttaagttgataataacattcgtgaactttgtttccaataggatttgctactagttctagctgcttgtcattgctctcattcattgaccattatgcctttgtcatgactgtagatct

SEQ ID NO: 93644 - DNA, 581 bp, Eucalyptus grandis
  Intron number 3 from transcript Egrandis_v1_0.007384m (loc us Egrandis_v1_0.007384m.g) derived from phytozome v7.0 (c hr-ID scaffold_8; pos 63424671 to 63425251)
tagacgtcgagcttcaggtcggattttatctctatcctatgtgtttgttttggatatacttatcatctgcagcaaatgagaaacagacttagtgttagagttataatgagatcttatccttgccagtttatgtttccataagcttggtttttaaaatgcagaaaatgccataattgtcttttaaatccatgcttgatttaggatagacttgatgagtaaagtgcatatgaaaagagcttctgccagtatgcttggtagccggccgcagaatgacagtcgactatttgaactgaataataatgatgatcacatttcttcctccaaaactgttgaaaatatggatttgtttgtgaagtctgaagcttcttatgatgagtttctagtgaattaccaattgcatctgtcacctaatttatgccgatagatgttcttcagcttctattttccgtatagtgctgactatcaacaatttgctcttttccaagtctttgattctgtggaagggtcatatttataccactgagagttttgctcatctgattgaaggttgcgcaagagttcttcagttccattcaagggaa

SEQ ID NO: 93645 - DNA, 900 bp, Eucalyptus grandis
  Intron number 2 from transcript Egrandis_v1_0.022647m (loc us Egrandis_v1_0.021682m.g) derived from phytozome v7.0 (c hr-ID scaffold_10; pos 20906258 to 20907157)
ctcggccttcttctttcaccattgccaaggcaagctcggatctgtggatgcttaactgagattctgatagtctcgtataatttcaaatataagaggatctattcgtgctatagaaaatgaataacaagatctcttctttcgcattagaaatgaaactcaagaggatctctgaacgtattatacgaggagcagccaaatttggtagatcattaatgtgctcttccgacctgttgctttcgaccagtgtgttattgatgacactaatagtgggatattgaggtttatgtgttgcggaatgtgcggcgaaactcttgctgaagtcttggttccacactacatagcgctttcaccaacttttctaagggaactttattgtgtattcttggaatggagctctacttagtaggatgacatcgcctatctgtcggcccagtcatcaatatgaacacatagatcaatttttgtgtagaattgatttactctttgacgaacggttgtttaaagggggagttatggattttcttgctatgcgtgcaacaatctcggtgcaagattcggtttccttccagtttatgggcttttgtgaaggagcttcctttcccttaacttcagaactggagcacctgtggcatagcgccaatccatatcatgtggtccacttcgatcattccctacatccatctgttggcttcatttgccgcttttgattgctggttgtttaagcattgtctaatggtttctcctccattaagagttagttttatttttgtggaatttctctcgtaatgaacttgaagaaggtgaattatctttggtcattggctgatgcattcctttgctccatttcgcttcctttttcatttgcattcatcagtctgctcgccgaacaaggaacttccc

SEQ ID NO: 93646 - DNA, 1004 bp, Eucalyptus grandis
  Intron number 1 from transcript Egrandis_v1_0.004790m (loc us Egrandis_v1_0.004790m.g) derived from phytozome v7.0 (c hr-ID scaffold_8; pos 48305473 to 48306476 reverse strand)
caagtgctctgagattcagaacgccatcgccgtcggtaaggtccccgtttcgatcttttaagaaaacttctcagggctctgttttgtctgtgaattgtctgtgagactctggagatagtgaattccgtttgctgatgtaaaatacaggtagccgatcgtgggatattttttcttttctgtatcaaggaattctcttattctttgtgtcgttttatttaagaggttctctcgcaaagttcacattccatgagatcattacggtgattgactacgtcagaagttctcgtatacattgtgtttgcctttagagatcttgctgctgtcatgatttttttagtcgctctctcgttatgtcatcttttgttgctaaaaatcatatgcatcagacaaactcactctgggcaggcaccatataaatttacccagcatctatcattatcaccatattctccataggtatacaaacaggggaaaatagaatagggcaaaacggatgtgcggaacaaatcaaaaaccaatcttttagccaaggaaatgctcaactgggcaggaaacatcgtcactagtcggacagcctggtgctgtccaaatttacatagaaaatatgatttgtgtaattcatatctaaattcaactgcttactggtgggcggagttcaataattggggtgactttctggaaacaactggtggtaatctagatttgcaaacgacttaggatcgtctgatcgaacaaccagaaaataactgcttatgttttggttaggattatcctatctccatctgtcaccgaagaaccgtctctccagaattttaccgtatgttataattcttagtactctacctaaagtgtgaaacttggcagaagagaagcaaaatggatatcctattagattctttttctgcagcattgcttgaacttgggaaattgatctttaactgcatagatgcttgaccatttttgttccaggtgcaacatctttcctatttaccgagtacaagtac

SEQ ID NO: 93647 - DNA, 471 bp, Eucalyptus grandis
  Intron number 1 from transcript Egrandis_v1_0.020263m (loc us Egrandis_v1_0.020263m.g) derived from phytozome v7.0 (c hr-ID scaffold_1; pos 31816109 to 31816579)
ctcatcctccgcctccaccgcctccttggaaacaggtaccctcgtccacgagctaagttccgctagcaaagtaacatgaaacattggttttttcaacgtagacaaatctagcgataattaatgaagttctactaatgtttcatttctagggtttcactgtagcattcttcaggtgacatgtaaagaagaaaatccaacagaacaggcttttagcgtgagaattcaaatagaataaatccagaacctgttttttgccctcttttcaagaattaaattttaaacaaatctagctaccaataggaagttgaacaagagtttcacatgccaactcgaaataaagactactcgatagatctagagcggcaacatcgagagatattggacaatgaggttgactatactttggtatctccgggttgcttaaacacgtgaacaggtggtctttgatagctggaagaatcccgggccgca

SEQ ID NO: 93648 - DNA, 551 bp, Eucalyptus grandis
  Intron number 1 from transcript Egrandis_v1_0.006469m (loc us Egrandis_v1_0.006469m.g) derived from phytozome v7.0 (c hr-ID scaffold_1; pos 36055588 to 36056138 reverse strand)
gatagacttcggattatcaatcttcttcaagccaggtatgctgcataaaaattgatagacttttcgggatgtgttttgataattttgagttcagacttctgacatcactttccatctcctccttatatatatgattccatttaataagctgatttacttccttttactgcaaccaaacaaaacagcttcggtgtttttttgcactagctcattcaagtcatcgcaatcagaaatttcagcaatatattatgatttcaagtccttggtgaaaaaaattagttccttgaatcttctgaatctgaactttgccatcaggtgaataatctcatcgtcatgcataaagtctttgaagttcgattctgattttctccatgtacttgtgcttacatggaagaataaatgcaattgataggctctttgaaatcaattttcctgcccaacaacttatgttagcactagtaaagtaatgtatcttatctagtctcttgaaacattatatataaaccctcagtgattaattcttctcaacattgcaggggagactttttctg

SEQ ID NO: 93649 - DNA, 405 bp, Eucalyptus grandis
  Intron number 1 from transcript Egrandis_v1_0.013064m (loc us Egrandis_v1_0.013064m.g) derived from phytozome v7.0 (c hr-ID scaffold_8; pos 67199418 to 67199822 reverse strand)
atcgtgaaccaggtatagctagagagaatcattctagacagccgaatggaggacatgagcttaagattagcgtcaatccatttttttttcagaaggattagtaagtgagcgcatgactaattcctttgaaaacttaagctatcggaaacattccatgcataatattttaatcttgatccttcgtgggattaagatgattctggattataagtgaagaataatgcattagtgctagctacaaagattgctttacaatacaaattccttttgcttatcatggacaacgtagcatatggaatgcttttgagtcttcctaatttatgcttgttttttgtcttctcttttctttttctattttttcgataacaaggtgagagaagcaataaaggaagtggacacgagcta

SEQ ID NO: 93650 - DNA, 608 bp, Eucalyptus grandis
  Intron number 1 from transcript Egrandis_v1_0.004886m (loc us Egrandis_v1_0.004886m.g) derived from phytozome v7.0 (c hr-ID scaffold_8; pos 64092618 to 64093225)
acctggattccggtgagctcctggccgtcaagcaggtactctttctcggcctccgagggtttggctgttttcggcggatcctgcttccacttgctcgagcttgattcgatgacttggccctgaatattcaccgattctgctcggtttcagttcgggaagagcgacttttgtgacgtcggtgaataaatttagtggagctttgggctctgaagttgtgcccgatctgtttaattgaaggatccttggtccacttctgattagatttacttgatggactgaatccgcatctgtttctaattgattttgcttgagagttaaatgttattgcttaagagttaaatattgttctttgcgcttacccttaatcgcttgccttcatttgctgatttcatgagaagttcatacccgatatttgattctcgctgttagtaggtttttcccaggctaagcttttgaattttgttaatgacgtatttattttctttaaatttggtgcttcttgaggttttttcttccatgcatctggggatttataatggatgtcacgtcttgtaatggtttgctttcctccaggttttgattgcagcaaatagcgcatcaaaggagaa

SEQ ID NO: 93651 - DNA, 853 bp, Eucalyptus grandis
  Intron number 1 from transcript Egrandis_v1_0.009422m (loc us Egrandis_v1_0.009117m.g) derived from phytozome v7.0 (c hr-ID scaffold_8; pos 58156080 to 58156932 reverse strand)
actactaccggatcgccgacaacctcctcaagcaggtgcctcccggcctctcctcgccgcgttcggcgcgcccgattccgcgcgcctttgttcgcgtcgaaatcggtttttgtcgcgattcggaatcggagagtttggggagggttttttttttgccttcttttcttctttttgattgcccttaggtcgagaacgagctgggctcgtgggtgcgtctttctcgtgcgaagaatgcctgccggtgtcgcgtgattcttcgatgaccgtgttagtagtagaggccgattcgcggagttgctgatttggtattttgtagcgtttttccgtgcagctatcgctgtatgatataggcatacgtgagtggtacatttgcttattaaataatggggattgcgcagagtttagtttagcatcaatccgtgtgggaagtctgaaggacagcgggtatgtttaagtgcctgtcgaagtctttgagatccaagaggtaatggaacttggaaaaaaaagattagcttcaatttgttggaatgacgggtcttaacaggggatgatgcaatttaaaatgagttggattagctcttagagaactttccccgccgtccttctttcagccggtcctaacttccttgatactccattcccctttcccaaaacattccttgtgctttattgctacttagaataggaaatagttccgccttcaggtttcctttggagtatcatgagcatcatattttgttgttgtctatgctatttttcctggggtatggtattcttagcactttcttattatctgtatcttctcatttaccgtctaggcaagtgtgtaccgggaggagaataatattgtgga

SEQ ID NO: 93652 - DNA, 956 bp, Eucalyptus grandis
  Intron number 2 from transcript Egrandis_v1_0.029912m (loc us Egrandis_v1_0.029885m.g) derived from phytozome v7.0 (c hr-ID scaffold_8; pos 47658273 to 47659228 reverse strand)
cacaccaggtatctgatcgtatctcgtgaaacttgttgactagtttatgaagtgccttttgcattttgagttttttttgcaagttatacttaatttcagtacattttctcagtggttggacttttctggaatggtatatcaattggtttgatgatactcctcaaaaagtaggatgtggtgagtttcatacttctgtgaatgagatctgtttctctgccagaaaaaaacaataaagtgtaaggcaaaaggacaataatcaccaatgattctaggtagagaatccagagaaggggattattagatgaaatcttacagggaaagcacatgagttggattatcaaaagcaacaaggtagaaccaaaatggagaacatattcatttttgacaaatggatttgagttgctcaatatattttaattctgagagattcttggaagatgtggtttttatgttcattttgaatttgttggatgaaaaatgctaagaggggacaacttactaggctcattgctattcctcaaacaagcatgaaatgcgtggctgcatattattccataactcaaatgaatatgcaataactggaataactatcgagtctcagatagtggttacgtgagcataaagattatatcccatgttgtctccatgaatgtaggaactagcttgcattgtattctttggtacttggattggactggtaatgcgtgagattattcaatttatacatgaaggatccttttttggctctctctttagcctttgtctgtttttcctagactttaaagttcttccttctttggaatctctctccatcctcgaccccactcccaaaaaagcccactccagcatcaccaatccaatgttttggtcaatagcaatatatatttagttataactgatcaccacatttaggttcttgagatttgtttcctcctttttaaaggataaagaagacg

SEQ ID NO: 93653 - DNA, 583 bp, Eucalyptus grandis
  Intron number 1 from transcript Egrandis_v1_0.004055m (loc us Egrandis_v1_0.004045m.g) derived from phytozome v7.0 (c hr-ID scaffold_10; pos 9221886 to 9222468 reverse strand)
gccctcctctggctcctccgccgtcggcagcataggtaaagcttcgatctttgcgtggattctcgattctcgattcttgattcgtttcgcgttgtacgagctcgtgtcgggtcttttttcgcgcgcgcttgatccgcctgtccggctgtgggccgcgaggttcgattcgtcgtcggttcgatcgtgtcgtcgtactccgatttttctggtaattaatgccgtcgttttttcttttttctttttttggctgttgaggaagattgcggaattgagatgcgctggttttgatttattttgtcgtaatattcattgttgtagttctgcaattgaatcatctagctatcttgaaccggatgttcatggtttctgtgtgtcgggttcgatgtgttggcacgttgttgtttgtattgttctctgtctttcttcctgctggctaaaactttgattaggaatccgtgttaatcttttgaaccattgccgtgatatttataagaatgctttttttttttttttttcttgcggacctcatgacttaaaagtgctttcttgatatctgtaggtttagacaactatttttgctgct

SEQ ID NO: 93654 - DNA, 627 bp, Eucalyptus grandis
  Intron number 2 from transcript Egrandis_v1_0.051536m (loc us Egrandis_v1_0.051536m.g) derived from phytozome v7.0 (c hr-ID scaffold_10; pos 5741695 to 5742321)
cccaagtttagggtaagcgcatgcttgaactaattgaatttgatcttcattttagttaattgcatgatcagtctggaacttttgtgagagatatcagactgtggaaaacattatttacacatgcattacttgatcgattaatgactatatatatatatatatatatatatatatttgacataaataactagattgttaagtgtacacatccatatgctcgtcatcccttcgtttagtcagtgcaattgaacttggcatttattagatgagtcacttgtttcttcattcttgattcgaggaaccaatattctgatcagtaagttacgttcgtggacatcaccaaattcatttgtagttaagtttgtcagtgagtgatgttcatatttataacacacctatcaaaaaattgatagaacaaaattttgaactatagcccttaataagaattagcgtcagtaaataaaaaaaattaggcacttagattagcttgccagagccatatactagcgtgtcagaaaacattcatcttcacattttttttttaatgtaattctcattctcagtttttttctgggtgcaacaaatttgttttcatgttttttccacttgaaacgttgtagttgaggc

SEQ ID NO: 93655 - DNA, 569 bp, Eucalyptus grandis
  Intron number 1 from transcript Egrandis_v1_0.003358m (loc us Egrandis_v1_0.002444m.g) derived from phytozome v7.0 (c hr-ID scaffold_1; pos 31603709 to 31604277)
gctaaattggcctatgtatgtataatatttgtaatcaactctatgtccatttgcggatcaagcatgtgaaaataatgtagtgtaaaaggtagcttctctgttgtttcattgaaatggattgtggagacaaaacaacccttgttttctctttctcttttccttttccttttgtctttttactcatgataactcaccttgacaaaggaattcctggtttatgtgtgtaaatgcacgtttttctctctgtgtggcatgtataaatgtgttttcgttgctatgttgtgggtaatgatgtgtatattcttgcagtttgctatgctttgtgtatttgattctccctgaactctgttttctggtagagcactttgagcattgttagtcactcatgtcattagggctctctctcactctctctctcgttttctgcgtatgatattgagttcatcttccattgtttcttgatatttgctttgtgtttgtatcatcttttgattgtttgtttctggacctcgagatggcaattaatatgtcttcttttgcttatatgttgacataggttagtgcctctt

SEQ ID NO: 93656 - DNA, 338 bp, Eucalyptus grandis
  Intron number 2 from transcript Egrandis_v1_0.049381m (loc us Egrandis_v1_0.049381m.g) derived from phytozome v7.0 (c hr-ID scaffold_8; pos 55877532 to 55877869 reverse strand)
gaaagacgaaagtaattcaatatgttttcatatgactttgttgctaaggtcgcatgaagaataaatcctcagtactaaatggccaattcttgagacaagattttgtgggcatatgctgtctcccgtctgtagcttctgaattggttattaatgccttttgatctgaaagcaggggtttgaagtcactaaattggtagttgacatccagcattgcttacaggtgtataattcgtcttgcagtggcctaccaatttgcaatgcttgcgatgcctctttgtttgaattgcatctaattgtttgtttctatctctaaaccaatatatattatttgtaggcat

SEQ ID NO: 93657 - DNA, 960 bp, Eucalyptus grandis
  Intron number 1 from transcript Egrandis_v1_0.000824m (loc us Egrandis_v1_0.000816m.g) derived from phytozome v7.0 (c hr-ID scaffold_10; pos 2031596 to 2032555)
aggaagaagaagaaggacaagcgtcagctcctcaggttcgccccaagcgattgtccgtgtgtttattttcctcaattcgtcgatcgagggggacgaattcgaaaggaaatcgcgatcgggtgatgatgtgatttggttttgggtggacagcattctcccgttagccgccgagaattattacgggagtattaatcccctggaccgagaactttgttggtgaacatttcgttgaaattagaagggaaggcaatggggaattagcttgtatcgataagtttgatgttttccatttgagaagtcaactgcttgacgcctgcaaaacttggacttggccatccgtgcctgattatccggatgtcacggcgaatggcgatggcaaggtcgctaatgccgagttctcgaacgtttctggttatggctgcttgttatgaccttgtgaaatgaggagcttccatgatgatgttgtgaactcatgccggtagtatcgatttcagaagagaaaaatgttggatgggtgaatttaccatgttgaggataatcgagtctgtgtgttgtagttccataaaccaggcaacttgcagggcatttcagtttttttggatgtgggagagtttgtccttagatggagttcgaaatttgaccattcccagaggcttgaataaagtgcaaagtcatctcgctatgcagacaaaaccgttcattagatggatttgccatttatagtataaaaaaaaaggtgttttctttagaggataagttctgacattcaaaatgccaaatgcatggagttcatccatgatctttgattgtaaaatttgaaactacgtctgaatcgtcgttcagtttgtaccctgtgggataaggggtgtatttgggtatgtaaaaattctcgtctgttctaatcttttatgtggaactttgatcagtcttttgcattactgctttcctttttgcagctta

SEQ ID NO: 93658 - DNA, 950 bp, Eucalyptus grandis
  Intron number 1 from transcript Egrandis_v1_0.009018m (loc us Egrandis_v1_0.009018m.g) derived from phytozome v7.0 (c hr-ID scaffold_8; pos 47006372 to 47007321 reverse strand)
ttattactggtatatcacactcacccttggcttccatatattgactaggaactaattaaactagttatttttcgtttacatcttttcatttaattgagaacattcaatgagcctatcatcatggtagacaacaatcgactgcaagtctcgtattgggctcattataagaaaacgagagaatcagattctacagtaaataaaattaggcatacactataagttatctaattaatatgagttaaatttaacattaacgctcaacacatgcattcggggaattaactcttttaattttttttattttaacattctatcttttgtttttaaaagctatgtactttgagtcttttatcgagaagttgagatttactatgatttactatatttatcccacgtcaacaacccaggacacctggaggttgaagactggaaatggaaggattaggtggaacggataagtcaactgggttaatgtaatacgtccagattaatctccgaggaacgaggattttgtttattctttgatctattcgaaaaaaacagctagactgcgaactctcgccagctaccaatttttctagtttatgcatgaacgtacacatggaaaaagacaatgatttcctctgcgaaaacaaatcttatttatgctatttatgttgttgccatagcgttctactaatacttatccaaaaaaaaaaagaaacaaattgtttttgtgttaacatatgaacaaggaatttgatcttaagtttccaaatatgttgactaggaaaatatatgactattttctgatgcacaagatactttcttgttctaaagtattaaattacgcaccatatatatttcatttccttatattttcttgcttgttcattagagaattttctttcttcctttttcatttattttttgtaggaactggggactttttgacttgctcccctgacaaa

SEQ ID NO: 93659 - DNA, 634 bp, Eucalyptus grandis
  Intron number 1 from transcript Egrandis_v1_0.008981m (loc us Egrandis_v1_0.008981m.g) derived from phytozome v7.0 (c hr-ID scaffold_1; pos 3129070 to 3129703)
ctggcaggttgtttccgaagttcctgtctgcgtggcctttatgatctgacttacttgcttcctggtagcagttgagtttgttaatcatctgatttgttgctgtccagttagtagttcctcttcaatttgaaggcccagggacagcggtgtagttggggcagtttatttccttctaggtgttatatatggtttcttgcattcaagaatgggtatagataagtgacttttctactccatctagaacacacaatgacatggttttttcatttgggaatagtgtactgctacatatactcatgagtgaatttgcagttgtgacctactatagcgaagatcgctcaatgttcagagcccttcaccaatcttataagaaacggctgtttcgttccctctcgcggtcgtttcgtacatttcctttccctgaggatatttgcagctgcatttcagtatttactgctgttggtgtcgctagcttttagtgacaggaatgctgctgcatgcacctcctatggtggatgaatatgattgattaatgggtcgtatgaagcttcagagtgttacgaaatcctatttgttctttgattttgatttttttaaccttgatttctaactagatcggagagagagtttctct

SEQ ID NO: 93660 - DNA, 852 bp, Eucalyptus grandis
  Intron number 7 from transcript Egrandis_v1_0.039615m (loc us Egrandis_v1_0.039615m.g) derived from phytozome v7.0 (c hr-ID scaffold_10; pos 17011997 to 17012848)
gaacattgcttcccgcattcgtggaccaaatgtaagtccaaattaaccttttttctgttcctgtctagcttttcttctctgtcaacgcattgagttggctttggatggagtgtttgacttacaattgtaccaaaacacttgaaatattcttcattcaagaagtcattgctagatatttattttaattgaacctgaagaaacttcatctttcatgcttaatctcaactttcgcaaaatgactctgtacaaaatgaacttgtgctgaatagaatgttaggatcgcttaattgagctaagtttgagctctgaaattaccttatacatgtgtacattattatgaactttctaaaaggctatgacatttggctgtggcttcttcacttccatgggtctttggttttagatttggcttgaatttagtgtttggaagttgtagtgttgataatcagtagcaggcaaatgcaggccggaaagtccaaggggaaaaagtgaacaatctttacaactaaaaggatattaactaaattaagggtacaatagaataatgacagttgtatatttgtgtttaggtgtggtaaatgtcaacatcaatgtagtagcattttgactcatactgttgccttttcagagtggaccactgcattgtcttgttgctaatttgcttatgttgctctttgctctgggttattatttttttttatcttttcattcaaagtttacactgaatattatgatgatgaaagattctaatgtctgaagctttctctgacttctccatgcaaatgggagagattgttttttgtgctggtggcggttcgtttgtatgtgcaggaccaatatataaatcacatt

SEQ ID NO: 93661 - DNA, 909 bp, Eucalyptus grandis
  Intron number 2 from transcript Egrandis_v1_0.012945m (loc us Egrandis_v1_0.012945m.g) derived from phytozome v7.0 (c hr-ID scaffold_10; pos 11332161 to 11333069)
tcggtgtcttttgcctcacttacgatctcaaagctgtatgtatttttaacagttttgcgtgactttctttacttgattagtgtatgtacccaattatcttgactttgattcaatgttgctgcttctttgtgatgagcaagtcgattggttttcctgtgctctctattgtacgctgacaagctttaatgagaaggtcatatagcatgaggattgcttgctgaaatgttcgattgagaagaatgaatagcgttggcccttgtggccgttatctgttactttgacagtctttcttttggctgttgtgcatctaatgttcttgcttttcactgtggttgatcagtcattagattctgaatgcttgatctcctcacctaattatgatggtgtccatgtctaatggtatgttttcttgagttacggaaattcaaaataaacatgttcaagtgagaaaatggatcctgttaaaaaaagaaactaaccatgagtcgacttattggagcacttcttgtttgacacctccaaagttaatggagatgtatacgtgttcagtttgtattattactcttctgactgattcacatacagttttgacataatttaattactatgtctcttgatgctggctccatcaaatgcctgtatggttacatagatcaatcgactgacttataagtgaaataagtgctaatcctagatttatggttaagaaattcttcagattcgctgcatgtcaagtatccatttactattctctctgaggacaaatatagtttctgctattgaggtggtttaatgccatcccaatttcagtttgaactgccagggactttttttccttcaataatttgtttcatgttgttgaatgtggtcgcaggaagaagagacaaaatcttggaagaagctaatcaa

SEQ ID NO: 93662 - DNA, 866 bp, Eucalyptus grandis
  Intron number 2 from transcript Egrandis_v1_0.031616m (loc us Egrandis_v1_0.025279m.g) derived from phytozome v7.0 (c hr-ID scaffold_8; pos 66631591 to 66632456 reverse strand)
tgccggaggatctcctcgtcttcgctgatcggaaggttagtagtctcccggaatcttttgcttgattcggttgctgtgatctgtctccgatcggccggagtcttctgctcgagatctctgttattcgatcggaaagtttcgatgtaggtttaggaagaatatagaagtcgcgcgttctcttctctttttactcagtccgttcccgtttccacgcgaggttttcaccttccttagatcgtcttccttgttaatcggaaggacagttggagaactttttcaggtaatgtttagcagctcgcggaccgtttgaccttctgattagcggtgtcgacacgttaagctattcgatagctgctcaagctgaccattgcgtttcgagttcatttgatatcgaaaatcgactatgaactcgaatagtcgagttttgttatcattttggagacctgaatcggcgcaactagtgagcttagcccggaactcttgagtccgtaacgactaataagccacgccattgcggattcatatgatttggtcagtccccgcttttgttttgagcgctgctgtgagattgagttgcgtttgttgtgtctttggaatggatttccatagtctcttcaaaggaagttgcattcatctgaagatgagattattgatgcgtacggaatttcgatgtttatcgcgtgatcgattgaacgctcaaactcttgctaacgtgtaagaatttcaaggtagtagtacttctaggacatatgaaaaggagaagttcgaatggccaacgaattggttagagcttttcgtattgaagaagggacgacagcattcgggataagctgaagtagtcaccggctgtttactgttgcaggtcg

SEQ ID NO: 93663 - DNA, 896 bp, Eucalyptus grandis
  Intron number 1 from transcript Egrandis_v1_0.031977m (loc us Egrandis_v1_0.031977m.g) derived from phytozome v7.0 (c hr-ID scaffold_8; pos 49138822 to 49139717 reverse strand)
aaaggaagaggaggattctgaagcagaggttgaaggttccgccggctttgaactagttcaccaagtctcttgacaagaacctgcgtgtggattctgttcttttcttggggttgttaatacaagatatgcggatggttaacatctttcgaagacctggcttgttgtttgtttgaatgtgatcattgtcagtacatgcatttgttctagggttgattgtgtctactgcatctgaaatgctacattgatatgttgcgctaatggttcaaggtttattttaactgaaattttgtgatgcgtaccaagagtttcttcatcagggatgaaagtttcatactgttttagaacttgtatcacagagtagcttgtgatattgggaactacgaaaatgcaatgcctagttaatgaatggcaatggtggttgcacttccatttcaatttgaataaaacttgtcatttgtcatggttgctttcacctgctctagtaatgtgattcttgagccaaataaatgaaaaatgtgagttctgcagttagtcttcagtcagatggcttgaagtttgtgttggtagatgttttcaattattgcttgggtctttccaagtttgtttgtaatctggttgttttacatctcactatttttctttttttctgtttagtctttctgctgatcactgttggcaagtgtggctttgatcagtatttgagtttgaactggtagctgatccatttgtcttaaaatacagcattcttttgcagcacgctttcaccatttggtttttttcttctcctctctgtttcactttttgttttagtatgcatgtatctgccattttgtttcattttgttcatggaattaattcatctattttaaattgctgcagtgacaaacctattcaag

SEQ ID NO: 93664 - DNA, 852 bp, Eucalyptus grandis
  Intron number 2 from transcript Egrandis_v1_0.031026m (loc us Egrandis_v1_0.031026m.g) derived from phytozome v7.0 (c hr-ID scaffold_10; pos 17031215 to 17032066 reverse strand )
gggtggcttcttgtgaattgcttaccacagctcacgtgagttgatttgaatcgattagttcagttccctttatgagcttattattaattttatgttgtctgtagaaataagatgttatcttgatctttcctcgaagttaaataggatctgtgctaccatttttattgagctgttgatatttttccactatttcttactggttttgaagggaagagaagatgacaatatagaaacaataaagaaaatgtttaaggtgttctcagagtctagccttttagttattgagtattacaattctaagggaaaagtcagaatggtgaggaaatctctaaatatgttgaaatcctgtacatttatttgcctgatcttatttcatttaattatttatctatattggcttttattcagattgatgctggaaagcttgttgaagaggtctttgaggtcgttaaagtaatacaatttttgcatgttgcgttcctgtgcaactttttctaacatcaatgtgtgcatttttgtttttttacgtcgtaattgactcgttcccaaatcctcaaagccctcacattttcctcatcaaaatcaatgtttcatggatctccatccattctcaatcttcatattgcttttgtagttgagcatgcatcagcctttggggttattattaatatgcaggacctcctcatggaggatcacgagtgagaactcgttgaggaaagtgctgaaaggacagatagttcctctgttatttcaaatgttacctgttctcttgtgcggctctctttccattgctgaccatggtttgatttttaaataggatttccggagtatttggggtggaggtcgtggcct

SEQ ID NO: 93665 - DNA, 262 bp, Eucalyptus grandis
  Intron number 2 from transcript Egrandis_v1_0.010682m (loc us Egrandis_v1_0.010682m.g) derived from phytozome v7.0 (c hr-ID scaffold_10; pos 29731252 to 29731513)
aggtgcgcagatatgcattaagaaattcttgtcttgaattcatggtgctcttacatcgtttttctgttccaatggctagataaccgaaacttgaagcagctcggatcgaactgaactgaaccaagctgaaatgactcgattcaaatgcgattagtttgatgttttttgagatgtcaggcgcggtttattaaagttcccatctttctgcgttgatgttgtgtttacagattacagtcaagtattgagagaaagtggaaaaacc

SEQ ID NO: 93666 - DNA, 763 bp, Eucalyptus grandis
  Intron number 3 from transcript Egrandis_v1_0.010682m (loc us Egrandis_v1_0.010682m.g) derived from phytozome v7.0 (c hr-ID scaffold_10; pos 29731778 to 29732540)
gacaagcgcaaacatctgtaagtccagttattgtctctggtgattctagctgcgtaatttatttatttttttaatagctcggggagtcccaaaccttttggcttgactaacacaagtgaatgtatctacataaatttgtttccacatcccgtattttctcaacccagctagttacaacaaagaagatctgtagtcatttcacttgtgttagtcaaaccaagaaagtatcttctttgttgtaactagctgggttgagcaatagataataccaaaatgaattgaaggccatgtgtttaagggtgatggaaattgtcaaacaatcctaattcttcattagtcatttcttcatacaggctgttgatgtatgcctgctttcaaagttactttttgctccggtcttttagccttgtttcatgtcgtgaaatctgtataaaaatacaattcgtccctgagagatatatgaggaatatgacaaactcataagtttcatatcaaagtggaggagagtagtaacatcgtgagaagaaggaacaatttggacgacactaaaaatcctgttgccttatggatccttctgtagatatttactctcatcccttctaatgagatgaaaccttgtttctttacattaaacatccatgaataaaaattcatagcaagaaaacagattgggaggtatctttacttctctctttttttcttttggtcaattttacttgtctttataggtacggcaaagtattcaagacacacatattgggaa

SEQ ID NO: 93667 - DNA, 964 bp, Eucalyptus grandis
  Intron number 1 from transcript Egrandis_v1_0.015929m (loc us Egrandis_v1_0.015929m.g) derived from phytozome v7.0 (c hr-ID scaffold_1; pos 23500852 to 23501815 reverse strand)
agccaagcagggctctcctcttgtgctgccttcaggtgggttgcccttctggttttttctcccttttttattttccgtgatttatttgggctttgattgcctctcgttttttcaccccgcgttggaaccacgacgccccagaatgggctcgccggttgtggctttctgggtttgatttttctttatcgtggtttgttttggtttagatctgttcatggttttttttcttttcttttccagttttgacgtttgaaagagaatgggattgggcatgtcatggatgggatttttcgggtgtgtggcttggttgtagctggagatgagagagggttgtgtggcttttgacgaactgactggagagaacaagcaccatagagatcacgacaagaatttgttctgaactaaatttgggcagacttttgagggaatttttttagtacagtgaacaatcagtcatatctttaatctgattatatctctgcttttgttcacggcttaattggcataaaatgtggggtcagaactccaaagtgccctgctttttggaagtagtcacaacatgtttaatttacttggttcagcttgtcttattttgtctaatattatcatttttgttgtcctacaataattatctacatgcgtatattgtgtcatatgttcctcgtactttcactgctgagaacgaaaagaaaaaaaaattgagctcgtggtgcgaagaatacctccgtacttggtactttggacatgggacccttgaaatggtattgaaattctccgaccaaaagatcctaattgttctgtgatcggtttctcttaggcttcttaactctggcatttttcctatctgaaagcaaagagcatccacaggtctaatgttccgatttcgtgcctgtgctgttaaattgcattctcatgggatttgatttcagggagtttcaccaaattgttggcggttttatttgtt

SEQ ID NO: 93668 - DNA, 487 bp, Eucalyptus grandis
  Intron number 3 from transcript Egrandis_v1_0.028690m (loc us Egrandis_v1_0.028678m.g) derived from phytozome v7.0 (c hr-ID scaffold_1; pos 18303603 to 18304089 reverse strand)
ttaagatttacctggccagatacagggaggtcggtgtttcgtttctgtttcgatggttgtttatgattgccttttctcgctgaaaaaaaggagtgcattgatgaggaggaaggagatttaggttggtggagtaatcataatgacaaagatgataatggatcttgtaattcatttggaaataattgccttctttctatccggtggttttgaattattgtgctgataaatcagcgctttaacttctcaataactgacttggtttttttttttttttcttttccccctctttttctgtctgttggatgggattctgctctgtttgcagatggaggtaaatgtcagactgttcccgactctccgtttgtttcttctagaatgctgtcctagtcctttggtgtagctactatagcatgttacaaatgcttgagttggtgaattattgttttgggtagggggataccaaggggtcagctaaagtgggggaagc

SEQ ID NO: 93669 - DNA, 852 bp, Eucalyptus grandis
  Intron number 1 from transcript Egrandis_v1_0.002018m (loc us Egrandis_v1_0.002018m.g) derived from phytozome v7.0 (c hr-ID scaffold_1; pos 21272514 to 21273365)
gtggcgctgctgacgaagtacgtagccaaactcctaatccctcttctttccatccatttttggggacttatcatcacatgttcattcgattttgttttactctctttaactcttggagatttgcgtttttctgagttaataaatcatcatggatcgccataaatctctgatatttatcggatgtgcacttgaaagttttacgtatatgttcttcattgcatgttgcatcattccctcattcatcacaattattttgtaatcaatatggaaggaggatacaagagagataataatattatctaattgaagtgtctatactggcagctcttgtttgaaggttgattatgatctaaaagtttaattatggttcatttcattgctcaataaatcaatatatattaatttatataggctaataacatttggtgggtctttgttaaatcgatagttggtggactagtagtctcttccacaagcatggctgatcgcattatattctcaaaaaaaaaaactacaaaaactaaatataacaggaaataaaaattcaaatttaaaatcatgtaatacattaaaaatagatcgatccaatcttgcatcgataaaaactatctaaataagtaggggcaaaaatttcgcaatatgtttcttttaaattatttcgttttcttctcaattttagaatttaatttattatggagaaattaattattattatgattatcgcatgtgcttataagtcgaaaaatggaaataatttaattcgaattatttgtttattaccttatttttctttttcatattcaatttttttttacagcaccgctctcctccccgccaaaacgcggccagaac

SEQ ID NO: 93670 - DNA, 915 bp, Eucalyptus grandis
  Intron number 1 from transcript Egrandis_v1_0.010546m (loc us Egrandis_v1_0.010546m.g) derived from phytozome v7.0 (c hr-ID scaffold_1; pos 33387284 to 33388198 reverse strand)
ccttcggcgtcgagcagctcgcattgctcactcaggtctcaattctcatatccttctcctctcgccctctctctctctctctctctccatcccctctctctctctctctctctctctctccccatcccctccccccgctagtgcgttgattggtatggccttttctggggaggtaagattagattttgctgttgaggatttggttgctgacgtttcttgttgatgattggaggggcttttgcttttctgtgcttcagttgggtttttcattttttggcttcactttctgtgtgattgagggacactgaaaacactcaccaaccagactctcctttgagacattgaaggaatcctaagtacttctaatgtctgtgtcttttaatccctcaaagaccaaattcctgtgacctttttttttctttttatgtaaggtgttcttgcttccccgcgagtttgattttatgtacgaacatggagtctcttcaaatggttcgccctaattccgttgttagaacttaagaattttcccatttttaggtttttggatcgatctcttcattgtcttgtcattccacacagttaaaagcttaccaaacccaacttttcccaaaacattcactttctctatttgggtgttcaaattctccattctgatataagtatttcaaaacaaaaggaaaaaaaaaagaaaaaaaaaaagaaaaaaaaagaaaaggaaaaggaaaaagttgtcaagcataattctgcacaatagctcccctataatcttccattgagcacaggttagataattagtcttatgtttttctttcacgttatgttgattagttcgatccaataaaatcatcaatctttgcgcatcatgtttattcgattcgtcgcttatttgattgtacgcagaagcaattggcaagc

SEQ ID NO: 93671 - DNA, 730 bp, Eucalyptus grandis
  Intron number 1 from transcript Egrandis_v1_0.023308m (loc us Egrandis_v1_0.023308m.g) derived from phytozome v7.0 (c hr-ID scaffold_1; pos 36977042 to 36977771 reverse strand)
agttccatccgtcggaccttccccgtatgtcccaatccttgacactgctcctcctcttcttcttcttcttcttcttcttcttcttcttcttcttcttcttcttcttcttcttcttcttcttaggcatttctatgggtatttgctatttgcccttttcgactttactgaaacagtggcctcagatgcttctcatttaagttttcttgcatttttatgaattataaaatggacactccttcgaaacgaagtctcttattaagtaatacgagtgtgggagaacatagtacgacggataatagatgatgggcttcactttttctgcccttgtctgagaagagacgaaccaacgaaaatttggagcatttaataaggaagttgtacctgttaggtcctaatttatggatataaatgtacggttttattctaaataagtttaatgcgatgggtttgacttttttgtagtattcaggatgtatggttttcttctaaataagttggaggatcattccataatttacgatttttatttccccaagcagtgttcatatgcatccacaatatttatggacggtatataatctcatgaacaattttgaacacatgctaatgtgttagaactatttaaaaaacagttacaattccaccaaagaaagattacagatctttgatccatgctctctattctatcatgaaacaaaattcttctggatccagaatttgcaggagatct

SEQ ID NO: 93672 - DNA, 678 bp, Eucalyptus grandis
  Intron number 1 from transcript Egrandis_v1_0.009550m (loc us Egrandis_v1_0.009506m.g) derived from phytozome v7.0 (c hr-ID scaffold_8; pos 53613680 to 53614357)
ccgttccctccaggtctcttttagctccccctagagctctggtttttccctcggttggggcgcgtgtgggttcgacctctcttgcgtgtgcccgttgtttcttttttcctgtttgttttttttaacgttggttctgtgaaatatctgtcatgtttttataatgtttgtgtaagagtactggcgcgcatgctgcagaagaagctagaataattacggtcataatgacgccgccgcccgaatgggcggcgtcggaggtttcttcttagcttaatcaaagtctcagcttcgtccaagatatgcgtgacgttcaagccccttgcgggacgaaaagttggcagaatgtgaagaaatcttgttaatcacattgcctttgcctaggcctttcttgtttcccgcaatttcctttcgtcctcctcctacctaaatggtttataggtggtccttgaacttctctagatcttttgtatgaaatcattgatatattcttctgtagatatttttttttaaaacaagttctttgtccgcttccaataaccttctccctagggcatatattgcgtttgttgggacttgccatcatgggttacttgggcttgttcttgactgcttttgtctcgattcgtcacatacccttttgttttctgtcattttcattgttggctttaaatcttgccagga

SEQ ID NO: 93673 - DNA, 597 bp, Eucalyptus grandis
  Intron number 1 from transcript Egrandis_v1_0.006765m (loc us Egrandis_v1_0.006765m.g) derived from phytozome v7.0 (c hr-ID scaffold_10; pos 37923417 to 37924013 reverse strand )
aaccttgataattgcaggtaaaatcctttaattcatccttatataccttttgaacttgtacactgctttccacaacatctggctgtctctgaataattccatctgtaactgttggcgtatgatcatgcattggcaagttgattgctattggtaggaagttattagtggacagcagacgtgaaactgccaaatactaaatgttatccctagtctgaagcaactacattgaatcttcaataaatctgcattgaaaaaactcaatagcgcttaggtcaagcatatttgcgttctcggtgctctatgtttttgcttgagctctatgtgcaccatttggattccaatggtcaatgctagctcaaaggttaaatagcgtggcatgggacactgattgagattgctttttgagttcttatctttgcctcttttctcctgaggttatgggatttcactgaaccaagattcttcatcctgcactctttcctaaattagcctcaatcttgattttctgttaatgcactgctgtcttaaatatttggacttgttatttgtggggacaattatactgatctgttgctttctgcaggtaccttactttag

SEQ ID NO: 93674 - DNA, 769 bp, Eucalyptus grandis
  Intron number 1 from transcript Egrandis_v1_0.053388m (loc us Egrandis_v1_0.053388m.g) derived from phytozome v7.0 (c hr-ID scaffold_8; pos 31892089 to 31892857)
tctccttgagctcgaaggccacctcaagatcttaggttatcaattatgatcttatcttatctaatctctttctttctgtgcatctttgagacgcaccactacgaagctcttgattttgcatcttgcggtgtttggttcctgtgttgttgctgtggttcttttgagcagttttggttaaggtttcggttttgtttttggagctgctatatttggtgacctaaactatgaaaggttgagctgtttgattagtttgagggataattaggccttgagatccaatctaggaactcagcgagggaagtaaaatgacatttgatttggattttgattagtggtcaggtttttgagttctctccttgatggcgggttagaatgtgaggcaatgtttgtcgagacagactttttggtcattgaagaaaaatgtctaatcctcctataactttaagccgatcgcatttcctaatgtatgaggtctattaaggttggggcatatataagcttcaccaaaagcaactaccctttttacctttgcagggttagatccatcttccttatatcattgtgctccatttggtatgaaatcatggggaaatattcacaattttcaagccttctgtcactgaggttaagaatgactgttggatgaagttttcatgttgtgcacagtacattccttttctgcactatgagactatttgtcaaccgtatttcatgtgtttttgcttgatcgagccatttactgcatactctctttttccaggtgacattc

SEQ ID NO: 93675 - DNA, 955 bp, Eucalyptus grandis
  Intron number 1 from transcript Egrandis_v1_0.035150m (loc us Egrandis_v1_0.035150m.g) derived from phytozome v7.0 (c hr-ID scaffold_10; pos 1010701 to 1011655)
caggtgaacagttcacaggagaatgtacaaccatcatggagtcagagaaaaccctggacagggtaatcttaggagctgacacgaaatccttcatattacttggggcaaatttgcgtctcaacacactccaactgctttctctagctggaagatgggtttcatgctcattttcagatgatgcaaagggaggcacaactcccccctttattgctttcttgaaaatttcaaaatctacatcatacaaatccacctttctcagtcctaaggaagttttcctggcaattagttccttagcagacactccattgccagatttatccatcaagggtaagaggttagagaaaacatcccagaagtatgatggttcttctccttcccggatcataaccactggacattgtactctctcatacctcataatctgacaaacagcccccctagcatccctttccattatgctttcacattcccttccaatccacatgtaaattgacgaaggtacctgtacaatgaaagctcctctggaatcgagtgccccaggagaaggatcggtcagcattttaggaaccagatgcaagggatcatatgacgaatgtggcgcaattctgtacatcctgagcaatgagcttggactcaaaggaaaagcatggactcttttttgacactgcaacaactgacaagcaaaacccatgttaggatcagctatccctcttgcagccttcacaaactgaaatgcatcatcaaaactctgcccctctctccacataagatatgctatcaccagagacgttgacctggagaccccttgacagcagtgcacaaaaaccctcccatgtgcttccctaacatcttcaaaatagtcaaagacatcgtagagaatactagtaatatcttctgacggactatcctgcaaccacaaggtcctatacacaaaatccgctttaaaatactcggg

SEQ ID NO: 93676 - DNA, 882 bp, Eucalyptus grandis
  Intron number 1 from transcript Egrandis_v1_0.047847m (loc us Egrandis_v1_0.047847m.g) derived from phytozome v7.0 (c hr-ID scaffold_10; pos 25849414 to 25850295 reverse strand )
ttggctccgaagggaaggttattttcccccaaaaggtatgttcaatcctcatatagacataataaaccatcagatatcagtatgcgcaataaacttctagttacctctgtgatgtagtttggcagtaatttcactagaaatcaagagtaacaagcatgcggcatcaattggatgttaagaatgcactttctatggtggaactccgatgaactggaagggcttctcatttgattgtgtttgtatcacagagaaatgcgacagcaaaatttagttgtatcacagagaaatgcgacagcaaaatttagggtctcttcaaaatttgaagacattgtttagccaagctaaatagagactcaactaatcattagtccatgatgacacattttgagtttggctcgtaattttctttttcttcaactcactaagtggtactttaacagggtatctttgtgttttcgtaaaaagcacttgctgcaaaaacaaggaaagcatactaggtcttcacggcgactcgttttccagaagacgaaccactcagtagacattagcccagctgtcaaaaccacctattacctcttcgtttaatcagagtagacggcacgtaagtgaagtcaacggcaccacacatgctgaaactgcttgtgaaagatcatattctcgcctttatgtagagcaatccgactgggaaggaagaaagaatgtccactaaatacaaaatagaataaaaggaccatctcttttttaacttgctggaatattcaaatttcggactagtttttatgttttcatcagactatgaaatcatagaaacaatacatgctaagcagcagtatttttgactttacagatcattcgtcgaaagatccagttccaggcgcttat

SEQ ID NO: 93677 - DNA, 544 bp, Eucalyptus grandis
  Intron number 1 from transcript Egrandis_v1_0.008790m (loc us Egrandis_v1_0.008790m.g) derived from phytozome v7.0 (c hr-ID scaffold_8; pos 41384177 to 41384720 reverse strand)
ttggtggtggacacaggaggtttggcataactagggttcatatggaagaggatgcaggaaagctacttcactctggaaatgggagttattctcaggaaattacttaactctttttgtactctttaattgtaagccttgctgtttacgttattttgaataactcttctcccaaaatccatctggccaagtatttgtcatgcctgtgagattctattacataagtcatggttcataatttggtttattttcgagtggaaaacattttgagcccctttggttggcaatatatgttcaattacttaggtcatggttcataaatttggtatgtttcacgtggagaacatttagaccccctttggttggcaatatgttgataattgtttagtaactgatttatgcacagtattctacccagatatagctattttgttgcccggggctatttgttcttctggatttgatgatgagtgggtggtatttatgctaagtgatattggtcttgcatgcaggttgatttaaatagagcaggagtaccattgcttga

SEQ ID NO: 93678 - DNA, 593 bp, Eucalyptus grandis
  Intron number 3 from transcript Egrandis_v1_0.022417m (loc us Egrandis_v1_0.022417m.g) derived from phytozome v7.0 (c hr-ID scaffold_1; pos 40066850 to 40067442 reverse strand)
atccccaaggagcagagactgctgttcttctgtcggtatgcattatgttttcacacattccagttaatttttctgttgctctgctttcgtattttagcaggaaaaaatcaaagcactatcctacttcaggaagtgtttgcagtttacactccacagccaactctgctatgaggagttctactagttctttcaatcatgcatgctttttggtagatatcgagtctaaatggtaacaggtggccacgtaagcgaggaaagtgcaatggtgaaagttaattatttacagccagcatgcacttctgagtgcagaacacctaatgcagtgggcgatgggtttgaaaacttgaaatcttttagtttattcttcgtattttttgcaacatgaaattcatgcctgcaagctcaattaggtgttttacttgagtagaatatattatcctataaatgagtgtttgatttgattgttaccagatgaaagtttcttaaaggtattttactagttgtgtaatcccctttttggtttcattcaaacttatcatgtattttgatctgatgcagggagcaacaatagttgatcagtctgttactattgc

SEQ ID NO: 93679 - DNA, 791 bp, Eucalyptus grandis
  Intron number 1 from transcript Egrandis_v1_0.014475m (loc us Egrandis_v1_0.014444m.g) derived from phytozome v7.0 (c hr-ID scaffold_1; pos 20540688 to 20541478)
caataggatcaaggccgagactcctactaacacaggtactagctactgatctgttcagcttattcggaagcttgttttgctgggtttttgctccataactttgacatggtttctgagcttatcttggctcattatgtaaagaagcaggctttgtggttggtgctatcttggtttttattggttttcttgagttttctgaaggatcctcctgtttgacacaaattgcgtaagatttgaatgttaagatttatgggtagtgggtgatgcttaaattgctgatgtcaggtctaaggggtgttgaatatgtgatcctagctagagcaaataaattacctcagcctgcggcaaatgcgtggtgtagattcccgctcactaattttcaatgagatatggatcttccaagatagaatggaaggatggttaagaatttcctctgaacttggatttgaattttataaagtgtcttgccggtggtagtgcccacggatcatactttcacgaatcagttcacttagatagcgagattctatactcggaatgattagttaatttgggcatgaatggtacaaactgggctgaaatactatgttgtttggtggaaggagactaaatgcgtgtaaggctcattgctaaccagcaattaagcattgtggattcacattaacttggactgaggaattagtctgccatagtcctaaactcaaatacacgaaatggaaccttttttttttgtcgtagacatactgagttgatgcttggaaatgatgtacgagcaggggtgagctctaaaa

SEQ ID NO: 93680 - DNA, 637 bp, Eucalyptus grandis
  Intron number 1 from transcript Egrandis_v1_0.000590m (loc us Egrandis_v1_0.000590m.g) derived from phytozome v7.0 (c hr-ID scaffold_10; pos 29850814 to 29851450 reverse strand )
cgatcgcaggtgatttcttttgaattattttttttctgggcttcgtgttttcgatcgtttggcggttagagtttgaaatttggcagtaaccagagaattggtggaaagaaggggggacgttctagagtgaataataatggtgctttctttggtaaattaggataggcattcgaagctaatatcataagtctctgcttggtttggatatcatttatgaggcgaacttgatgtctagtttcgtggcaagaacacgggaatgttttaatctgtgcaccagcttcgattagtgggcttaatcattccttcgccctcaccaagactgttggtgttcgagaaagcaaaatttgtctcgtttgtttcattcaatttttggtgtcttgcttgaagaagaaaaaactgcaaacttgtttagcaaggtcttcgagatgttctttaactcaatattagggccttttcctcatttatcccatgttggataggataacttaattttaatcttgtcttaagtgaataggcagtctcggtcgtcatgacgttatcggggtttcttgagggtttgtgtggtccgttatggttaatttgttgcaatttcttaactgtaggggttgccccaaggcataccatcctgcttgtgtca

SEQ ID NO: 93681 - DNA, 886 bp, Eucalyptus grandis
  Intron number 1 from transcript Egrandis_v1_0.021454m (loc us Egrandis_v1_0.021454m.g) derived from phytozome v7.0 (c hr-ID scaffold_8; pos 30916960 to 30917845)
cgcttacgtcaatagcaaggccgacggctccgaaggtatttggttggggtggggggatttcgattttgtggtggtggaggaatttgacgtcggaaattgatttcttttcttctctccccaagtgggaaatggcgatgcctccgtgaaaaaccgaagcttgacgctcctcgcgaggagaagtaggatcgtgttttgttttgtgaattagcacgttgtcggcgcgaaaccggtgaagccgtttgagatttcgggtgtatggaatcttgtcatggaatgtcgttttcgctgataggcaggtgatttattgttgaaatgtgaggggtgtgagaggtagatggatgtttcttcctgtggaaagtttggttgaaattgctgactaaaccgagcttaaaggtctttccacagcagctgcggctttatttcaaggaaaaaaaagatgcctttgctgttgatttagattttgcgtgtcctgtcgttgcgctttacagtctaggaaccttgtttatagctgcttttattccaattatcgtagaatgtctgtcaatcatcctaaatggacccttgtgttgaggaatcttgagactaattacattcttctgagatttctctgcagttgtggttgaccgatgtaatgattatgtttttggttttttgaatttgcttttaccgggcatagaggcattcgtagctcgaaatcccatcaacttgtcgatctgaattgattggaaattttagtaaactttgtacgattggaaatttgagtaaactttgtacttattgaaaatctggcccctccacttctctttttgactgcataagctgtgagattctcattttgactatctaactaggtgaaaatctccaccagatatctactgttggaaac

SEQ ID NO: 93682 - DNA, 518 bp, Eucalyptus grandis
  Intron number 1 from transcript Egrandis_v1_0.004280m (loc us Egrandis_v1_0.004108m.g) derived from phytozome v7.0 (c hr-ID scaffold_10; pos 4306803 to 4307320 reverse strand)
aagtacgagcttagagataatccgggcctcggtgagtctttgggttttttactcgtttcgttagctttgcgatcttttagcggcgcgtggttttaattaagatgtagttgaggagttccatctctttgaaaattcttgattctgtatctgtcgaatgtgcaattgctggtcgcaaccgcaatcatgtgcttcttaatgccattacaacaaaaaagtaatttaatttgtggacacaaacagtttgtcttcagttattttgacaatataagtcaaattgtatgtttttgtgcggttgtatttttcattcgatgatatcaggggcgtgatgcttcttgaaaaagatgaacttttttatcaatgatcttatagataggcctaattttgtatgatttcttcactggtgcaatatactgtttttgtgcgtattgctgtgcgaaaatatgtcgtatgtatgttttcacaatcggcattatttaatttctcttctgtggtgcaactttcagttccaattagcttct

SEQ ID NO: 93683 - DNA, 443 bp, Eucalyptus grandis
  Intron number 4 from transcript Egrandis_v1_0.015832m (loc us Egrandis_v1_0.015832m.g) derived from phytozome v7.0 (c hr-ID scaffold_8; pos 14721976 to 14722418 reverse strand)
atcaccatcgctttgaggaatttgggcttgcacaggtttgctttgtttagatttttaagatgaataattaggttgatgatcatgcaacttgacactgttattaaaaccggattcttattcttctattttggaaagatctaatagtttcaaccagaatcaaagttatttggtaatatgaatgaatctatttatcaatgagatattggcttaaaggacaagcaaaataattgatgagtaaaatcctaaatgcacttggcggatggggaaaaatacgtctttaagattgcccgggagatggacttgtcgaggtgagcgaaaattgatcctgacaccacttgactgtcaaaccaaataatttttaaaatgaattttcataaacataggaaaatataatcctcctttcttatcggctccaaaataattgatgcgcagggcgaggctgc

SEQ ID NO: 93684 - DNA, 523 bp, Eucalyptus grandis
  Intron number 1 from transcript Egrandis_v1_0.010284m (loc us Egrandis_v1_0.010276m.g) derived from phytozome v7.0 (c hr-ID scaffold_10; pos 37852028 to 37852550)
agattaaggccgcttaccgaaagttagctcgccaggttaaaagagtctctccgtattttcttcttcttcttttctgcttttgctttgtgcgagctgattgccgagagagctctgcgaagacagagcgatgaatggagcgtcgtttgtgagttttgggagacattgagatgaatgattggttagggattgcgaattttgaagactggctttgttaatcggataagtattggtagtagttcatactggctatcggagtaatttccaggacatgtttctttttggtaaaggtaagaaaatttccaggacatgttacttcgtagttttgtctctaattagttttagtgagatttagaagctatgaatgtggataacctagtgagccactcgggttggttgtttgtacggctgtaccagtattggcattcaagttatgcgcaagaagttgttgttgagacatgcgcaatattttgatccccctcctggaaactcaagttctgttgctatattttgcagtaccaccccg

SEQ ID NO: 93685 - DNA, 740 bp, Eucalyptus grandis
  Intron number 2 from transcript Egrandis_v1_0.010284m (loc us Egrandis_v1_0.010276m.g) derived from phytozome v7.0 (c hr-ID scaffold_10; pos 37852575 to 37853314)
cggagaagtttaaggaaatcagcgctgcatacgaggtatgcatcagctttgaggaacgagaatttcctgtgttctctcaaagttttcttttaaatgacacatactgaataaagtcatctcgcgatctagtggaaaagatgttctgcatgctagttggtaatgattgtagatttaaagtttggtccttggcttgttgtcaattgctaggaagaaaattggcatgctaagtcggttcatgttgggttgcaattttggctttggcttttgtagataagatagggaggaagaggcacttgtttaaagtggtgtggattagtaaattggtgacattttgatgctcaaactaggagttatgattttattgaaggcacgcctaatgaaagtggcaaagcaaaacttaagaagtcactggcatagacaataagaaacgtgctttggcaagtttatagtcataatgaagcttatggccgtacaaggattgtctttaccagatgatggcaaattggtcatgttgttatttcatggtttggcaaaacaaaaatatgcgtctgttctgtttcaaatgactgatatttgtggggttagaaaacattaattggagaatttcagtaatctttgattttctaagatgtatctctatagagctgacaactttgctattgttcagctgtcgatttcattctttgctgatgtagtattatttatgttgttgaatcattgccataatcaggtgctttccg

SEQ ID NO: 93686 - DNA, 816 bp, Eucalyptus grandis
  Intron number 1 from transcript Egrandis_v1_0.028482m (loc us Egrandis_v1_0.026915m.g) derived from phytozome v7.0 (c hr-ID scaffold_8; pos 530192 to 531007 reverse strand)
gcccccgccaagatcctgtggcgcaccatccgtgggtacggacgatgatctctctctctctctctctctctctctctcttgggttttcgctctcgcgtttgattgttccgccggtttggtaaagtttcgattttgatttgttcagttgcttaaagcttcggtttttatagtttgagggattggagggaaaggtattggttgaatgggagagggaatgttgatgtttgatcttggtggtttttagatttggagggcgcattggtcttgttgtcgttgtactaatttggtgatcagtgtttgtttattcttgtgagagaacgttactacctgttgcgttcttgttgttcattggcaaagacattgggactagggccctgcatgacaggacttggattaattctctcggattaggagtaaattgacaaattcacactcgagtgttatgacaaatttgcaaggacgaaatagcaaatgatgagataaagaccattgtttttgtgatgtgttatcgacttgattttagaacaagtcgggactgtctccatcctatatcgtctggctttgtctgaaatatgtatgatccttcgtcttttccccatctgtgttttttttttgcctatctacttctatttaaatatacaaatgtttcaattccttagtgacgaggatgataattggttttccatttagttggttgattggtttgctctccgtttgtcaacatttagtgtctgctcaagctgagactaccatcttctggaaaagctctcctttctttttacaaaattgcgcaaccttaattgaaccaaatgcagg

SEQ ID NO: 93687 - DNA, 551 bp, Eucalyptus grandis
  Intron number 1 from transcript Egrandis_v1_0.003595m (loc us Egrandis_v1_0.003595m.g) derived from phytozome v7.0 (c hr-ID scaffold_8; pos 46089932 to 46090482 reverse strand)
ggctttgttcgaaatctgggcacggcaattttttggtaggtttcaccggtactccctctctctctccctctctctctcttcgcctactttgcttccgttccgggggcgtttttttgtcctcctcaaggatgccttgtgcgtttttcattggtgggttccgtttcttttattctcttctggcctggcccggcgaccgcattaatttattcggatttttactgttcctttggtggggcgtttctggtcgtgacttcggagggttgctttgttttgttgtcatcgtggggggctattattttagtggaagaaatttcgtaatcactgtttgttctgatagattatggtttatctactcggtgatacaatgcatctgtgccagaatttgaggtctccccgtatagtaagtcgttgtaaagaaggaaaaaagctcgtgactattgggattttttattagtctgttgtttggtgcgtcggattctaggatcagtctctctataaggttggattttgcaggcactttgatttagtagggttctggttttcacaggata

SEQ ID NO: 93688 - DNA, 786 bp, Eucalyptus grandis
  Intron number 1 from transcript Egrandis_v1_0.003175m (loc us Egrandis_v1_0.003175m.g) derived from phytozome v7.0 (c hr-ID scaffold_8; pos 1087087 to 1087872)
ggaagcaggagcatctggaagctggcaagcgccgggtaaaatgacttttgcgggcgcggatttctctgaatttccgatcctttttgttcgaatttcggatcgctgtgccttttgagaacatttgtatagcttgaattgctcgcgcgtgtggtggttcttgatcttatttcgcgaagcgtggctgtttaatcattgatccgtgtcttgtcaatttagctgattagactctagagggagagagggtgttgtttctgcagagtcggttgacctagagaattttttttggagtctttttgctgcaaaataggagaaattttggttcttcatgcatcgcttttttccctcttccttcatatgttgtggtggccaacttaatgatagctgattttgcattcttggactgtctgtatagcaaacgtcttcacttgtttgacttgactggaattcatgtgttcccccacaagaggcattttttggatgttttctgacctttcagcagcctagggaaggataaagaggtttcccgagggtgctcttgccgagggtcattcttttcttctttcagaatgataaacaagacgccagaaagaagttttctctctaaagttttcttgtagatgtcgcagactttctggaataacatctctctttactaaccgacatgttttggtcttgttgcgcttactgtgttctgatttcaagcacgaagttttgtgtcaatgttttctaatgcgatctcaaactttctcagctagaagaattccgcaagaaaaaggctgcagatcg

SEQ ID NO: 93689 - DNA, 800 bp, Eucalyptus grandis
  Intron number 1 from transcript Egrandis_v1_0.000725m (loc us Egrandis_v1_0.000725m.g) derived from phytozome v7.0 (c hr-ID scaffold_8; pos 31950997 to 31951796)
ccaactagagttggttggaagctggaaggaaaagggtaagttttccgcaactctttcagagttactaattttaatatgatctgtccgggacttttttttcttttagctcttcacataacaagaaattctcccccccccctcccccccccttcaaaagaaaagaacaattctctcttgggtagtgatggagcttcacactgctcgatgcagcattcaagcttggcacgtcaccgttattttaacgtctcctcaaaatctagagggaggttcattagatgtggacgttttcacctctatgttgacagtgtctcgatgcagtctccctgatatcatagagatctccagagagatgcgacttggagacgcagtataaattgaaattttattaatgagcagtaaggcaaaatagtcatgaaggtttgattagattactttccactattctctccccttcaaccaactacgaaatgacccaaatttcttcattttctcttaatcactgtgtttaaacccagtcaatgagagtctggcagcaggttagtgttaaatccaatcaatgggaatatggacaacgacaacagctaatacgaggccttttattataatttgattttcattgtaacttgaaattattatgtttaaacggattcaattttttttttgaaaaaccgccaccatttgtaaaacaatccttatgtttttcatatatgttattcaaatagcttatgcttgaaagttaggaatagtgcattgccattattttctcagtctgaatcgtccaccatcactgtttggcaggt

SEQ ID NO: 93690 - DNA, 965 bp, Eucalyptus grandis
  Intron number 2 from transcript Egrandis_v1_0.052921m (loc us Egrandis_v1_0.052921m.g) derived from phytozome v7.0 (c hr-ID scaffold_8; pos 57862280 to 57863244 reverse strand)
attagtgaatatcacgctaagggggatgtagagattgagatagctagtataagcgcctagaggggggggggggggaataggtgcacaaacaatttatcgagatacagaagcgattcttggcaaatgatagaaaggaagtttgttatgaagtgcgatcaagctaaagagagtaaggaagagaaaattaaacacagagtttatagtggttcgacttattccaagcctacgtccactcttccgcactgacagcccaccggctggatttcactataatcaaaagagaagttacagcacagctttgccttgattccacagtatagatgttctaccacacctcctcaaggtttctcacaaatatagactctcttttgtatacaagtattcgctcaaagtgattgtctaaacaaaaaggagcttcagactttggaattcttctatcgcgcactcttcaaacaactaagatcttcttccttatatactcctttatgccatcatacccgttgacactttccaaaggaattcctccaatttacccgttggacggaatcaattaggaagattgttcgagctattaaaggaacgtgttgatagcctatcaatcctattcgcccatacaatcagaatctcggtttccataagtaaaaccttccaagaatatttaggcaatcatcgaatcttcaatcatcgaatcaatctcgatcaatcaaaggattctgttacgtcttctccagccacgagatcttctccagtttataagattaaatccttgacggaacatccagttctggataacctttcttcaacgaattagagactgtcaatgaggatagactttgagtcttgagtctggctgtccgaaggtcttcagactttaaatagcagagtctgcaagccttcagactagactgatggaaacgttttgtcaacttcaaaacacttcaagaagatttctccaacagagatca

SEQ ID NO: 93691 - DNA, 781 bp, Eucalyptus grandis
  Intron number 1 from transcript Egrandis_v1_0.024581m (loc us Egrandis_v1_0.016402m.g) derived from phytozome v7.0 (c hr-ID scaffold_10; pos 443802 to 444582)
tctccggcctcgacatcctcgacgccctcgatcgcgtacctcgtccttccccacctttttctctcgcttgctttgagaattgactttgactctgatttcgtcacccgacctcaccttgaatctgccgttgtaagatgaggtcgggtgacgatcgaatcggctcaagtgaagttccagcgctggctgcgaacctgagctttgctgaatttcgaaattaatcgccttctctcttgtgcgaggtgttggggggttttataaaaatttgagctttcagctctacgtggctggatttcataatgtgaattctaatttaagccgttaagcttttactccatcttgggtatggaaatttcctttaaagatgagatttttttagttttttttttatcaagtagttaagcttgttcgatgttttgattcgagtatgttcatttaatatctacctctagtgggttccaattcagtgctagagccactcatgctcagggggggaagagagccaagtttttatagaatgcaagctagtttatttgactcacggccatgcttttttgcggcttaaatttttctgtggcactggactaggcatagtctattggtaattatgaagttgagatgattaagggtggtgatatacaatgctaatatacaatctatatctcctactcagatttctttcagagggaaggtgtgggtaatgcttcatacagacgtctgcgatgtgtttatttatggtacacaaaagtgctcacgtatcaatccaaattttaggtacacaaag

SEQ ID NO: 93692 - DNA, 346 bp, Eucalyptus grandis
  Intron number 1 from transcript Egrandis_v1_0.030782m (loc us Egrandis_v1_0.030782m.g) derived from phytozome v7.0 (c hr-ID scaffold_108; pos 81314 to 81659)
tccaagagcatccaatccctggataacggtaaggatgcttctggcaacaagctcttccgagacgtcggcctgtggatctcccagaagattaaggtgggcatagtgtttgagtttgcattttgacttctttcctctccaatttcttgaatccaaaacgggtttgacgaacacatttcccgctttttctttctgcaggatcatttttcccagcggggtaagatgggcataaccctcaaatacataggtcagtatcttggtttgtgctatcgtagtagtatgcctatgtgggtaagcaacggaaggatctaactgtgatcaaatgtttgttttgacagaccctacgtat

SEQ ID NO: 93693 - DNA, 679 bp, Eucalyptus grandis
  Intron number 2 from transcript Egrandis_v1_0.045429m (loc us Egrandis_v1_0.045429m.g) derived from phytozome v7.0 (c hr-ID scaffold_8; pos 32617777 to 32618455 reverse strand)
ttgctctctctgctatcattcctggccttaaaaaggtaaatcttcttgaaagaacttcttacttttctttggaaagattccctattactaagaatacttcgtcatcacattaaagtacatatcagattatcaaaatgttgatgaatccacgttaggaagtcctgacgattgtttgccccaatttgttactgtcggtgattgttgtgaatttcctgaagtctggctcaaaacaatttaagagatctaatcatattagcaacacaattatccccatagctattgaaatagtcaacagcacagcacttcatttcatgcataacatgatctcatccaatcacaattcattcaactggaaagaggtgttagttaggagtctcattttataaagtaaggattaatgttaaaatgatgtatctctacgtgcattagtgacctgcttacaattgcttaaacttcaatatcacactccgagcgaatcttctggtttatcaccaggcatttcactcccatgggaaacaataaagttaggatgagcaaggtatgtttactttgccaaatcatcaacaaagatcggatactggttttccttcaagttcatcaaagttgaaatttcaaatgtgtagctactaaacaacgatatactcaaagcaattttcttgtgtgctgttgtgtttttcag

SEQ ID NO: 93694 - DNA, 845 bp, Eucalyptus grandis
  Intron number 1 from transcript Egrandis_v1_0.044494m (loc us Egrandis_v1_0.044494m.g) derived from phytozome v7.0 (c hr-ID scaffold_10; pos 25778225 to 25779069 reverse strand )
tcatatagtaacagacaataaactatcagatatcagtatgcgcaataaccttctagtcacctctgtgatgtagtttgacagtaatttcactagaaatcaagagtaacaagcatgcggcatcaattggatgttaagaatgcactttctttggtggaactccgataaactggaagggcttctgatttgattgtgtttgtatcacaaagaaatgcgacagcaaaatttagggtctcttcaaaattcgaagagattgtttagccaagctaaatagagagtgaactaatcaatgtggttcaaatataattttcccttgacagatcgcaccattagtccatgttgacacattttgagttcggctcgtaattttctttttcttcgacaaagtagtactttaacagggtacctttgtgtcttcgtaaaaagcacttgctgcaaagaggaggtaagcatactaggtcttcacagcgactcggtttccagaagacgaaacactcactagatgttagcccagctgtccaaaccacctattacctctttaatcagagtagacagcatggaaatgaagtcaacagcaccacacatgctgaaactgcttgtgaaagatcatattctggccttaatgcagagcaatctgactagggaggaagaaagaatgtccactaaatacaaaataggaaaaaaaggaccaccgcttttttatcttgctggaatattcaaatctcggactagtttttatgtttttatcagactatgaaatcgtataagcaatacatgccaagcagcagtttttatgactttacagatcgttcgtcgaaagatccagttccaggcgcttatcccttgag

SEQ ID NO: 93695 - DNA, 724 bp, Eucalyptus grandis
  Intron number 1 from transcript Egrandis_v1_0.025072m (loc us Egrandis_v1_0.025072m.g) derived from phytozome v7.0 (c hr-ID scaffold_1; pos 7593641 to 7594364 reverse strand)
gccattgggatcgatcaattcgcacgtccgaagaggtcagtgacgtctcctgtttactgcgagttcgagcgcttctgatcgaagcgtttccggtttaggggacgtgaaatcgccctcgctgttgatatgattatgggtcatcgattgtcaacttcgcttgttattgcacatgggtcgatgccgagtcggtttgtgttttgtcgaatgtatcttcggcgtttgggtatgaatcgtcgttgttctttgctcgttattagatgtggaggtcgatgtcgaattcgttggcgtcttcgtggatgattttcgggaatttcggttgctgggtcgttatttatttggcttgcggatgttgatttgcaatctcggcagggatttctggtgctagcatttgcttgggttgaggagatcgatatgcctgagccttcagagggattgattttttttagcaggcttcttgatgaatgcttaatctaaaatggtttgagttgatttttgtagaagatgattgctttcaagctgtgcgtctagtagttacgaaattttaggaagatttatagttgccaggtcaaccaatggtcttcttgaattagcttcaagccttgtttgaaacttcataatgtgcggtataatgaaaaccatcacttcatgtttttcatccgatcttaacgagggttgtgacttatgattgggtgtataggcaattgtatactgagttatctcaaga

SEQ ID NO: 93696 - DNA, 836 bp, Eucalyptus grandis
  Intron number 1 from transcript Egrandis_v1_0.012317m (loc us Egrandis_v1_0.012317m.g) derived from phytozome v7.0 (c hr-ID scaffold_8; pos 903010 to 903845)
ggagcagcgatcgcccgcgacttgtctcgatccgagtacttcttcttcttcttcttcttcttcttctacattcccgcatgtgcatgtagaaacagggcatttcacggtctgcgctccggcagtttgatttcctgatagaaatatcggagtagttcatctgcattacttacgttttcgtggatgaggggaagctttgaaaaaccagcgaagaaacccggattttctcggttcctaaaccccttttgacaggagaacaatgtcttgctctgttttaacacacagttcagtcccgacgcgacttgatcatacgatttgggattgctgaagagagagatctgcgacgcgtttgatcaagaacccgagatctacacgactcgacaaaagcaaattatcacgacttcaaaccgaatttgttctgtttttcattaactagactaatggatgccaatgagatcactctaaccggtatccctgttcctttttcaagaaaacgttttctgttttttcagtgttcaggcctcctcattcttgctcgagcgactccattaatggctctctggcgagcttcaacagggcaccttgccttccctttagtgctctctttccttattttcttcctctggaccacctgagattttttccttttttttcctctcccccctgtcgatgcgaaactagccatgaaatgacttgcattgcattgtgctttaatggcggcctctagctcccaacgaatcctcaatcggtgaaaactcggattccggaaaacttaatttttcttttcgaatttctgaattgcaggaaccttgaaacgggagtgctccggagctcgagct

SEQ ID NO: 93697 - DNA, 519 bp, Eucalyptus grandis
  Intron number 1 from transcript Egrandis_v1_0.053328m (loc us Egrandis_v1_0.053328m.g) derived from phytozome v7.0 (c hr-ID scaffold_8; pos 22647580 to 22648098)
gccattttggttccttgtgaaaggttaaaccagtttctttgaatttgctgtttcttttttttttcttgaataattggctaaatgtgttggttgtttgccgggcctcagtcgaagtttataataacaacatatggattttgcattatctttcctttgtttgttctttccttctttttagtagtgcttcctttctccttatgcacgcttaacaaatgtctcatgctactttttaacataactgtctcatgacaactctgtatttctttccacgctagcaccatcactgcctatgtggcgtggcaataagaaattgtctccaaaaatttgtgcttgtgcccttttgcacgggcatcttcatgatctctttttcttaaaccaaattgttattgcttgcttcattcaattcgacagcttgggcagcttatattatcctaatctctatcatttgtcatgttagaaagtcagaggccacattagtcaaaaagatcgttgaaaagatctctgacctgaaaaggtttg

SEQ ID NO: 93698 - DNA, 869 bp, Eucalyptus grandis
  Intron number 2 from transcript Egrandis_v1_0.028165m (loc us Egrandis_v1_0.028165m.g) derived from phytozome v7.0 (c hr-ID scaffold_1; pos 31587740 to 31588608 reverse strand)
gattcaaccgtacgtgatgtgaatgccctgttctctctgtttcccttgcttccttatcccgtttgttggctaggtggattcgattgattctgcgagcaattgatgtgatccgattcgtgatgtgaattcacatgctaatgtactcagggggaccatggcttttccgtgaattcaggggagtcgtgtgtcctaggttttatcagtattgtcagtttcgcttagaaacacggtttctttagcttctgtttgttgtcagctggtagctgatacccacgtgccaatcgtagtcacttcgacctagcaatttcgcctactcgatccttctcctgtattggggaaggacatctttatggcagtcttcttctatggtaattttgagttctggccaattatttgtaatgagagcactgttatgtttagacaagtttggaaaaagttgcctctttatgactttgggagaagtcctccaacctgtttggttttcttctgatatttccagaaagtgaagctgcataatttactttatggaatacataaaaagaggaccttcctcattgcctccccagccttgcccttttgtaacaacctcgattcctgaatctgatgttccagtggatgctctttattgcaacttcataacatctcgcagttgacgaggtctgagtttaagagatgaaagcttctatgaattgcctatatcatatctactttgcttcaagttattttcctaataaggagatggtaaaatgtgtggttgacttgcgatgttgaatgttgactagtgatattgaatgtatggtaaggcaagcgtcctgtcttatcttttgtttcctaaccgtttattcgtttatgtgtttgccattgtagtg

SEQ ID NO: 93699 - DNA, 1015 bp, Eucalyptus grandis
  Intron number 1 from transcript Egrandis_v1_0.007271m (loc us Egrandis_v1_0.007271m.g) derived from phytozome v7.0 (c hr-ID scaffold_1; pos 1379210 to 1380224 reverse strand)
cctcgacgtccgcgacagatcgtcggtgctcggaggtgagcggtctcttgctttcgcgcctgtgcatgtgattggacgtgagaaatgcggaacggcgagggtgtgcggatgagaaagtgtgaggccggaaatggttgatgtacggcgtttcggctgtgttgtcctgcgtgttgcgtctggtgacgtagctactttacttttttggaaacgggaaaatcgttggaaagattaggagagatcgctgttgaatcgagctgtttaccgttgttcggctttgttcgtttgagaatcccagagagattgctggcggttcatgcagtcgtgatttactgagcattctgcagctgatcaacaaattttagccctgcagttccattcgacagttgcgtttacatacttgtaatgtaggaaccagaattttatccttgccatgtaggcaatagtcgtcgtcgttcttgcatactgttatgaagaaactttgcatttcaattttatctcaaatttaaaaatgaggagcgctatattctcaggtttgaaggtgtttgacagcaaaatggcaggttattgtatgataattgccattttaaagaaaaggaacaaaagaaatgtttgatgtagaataataatttgaatggttattatctccatcgctgctaactggcatgagtaactttcagttgtgcttgttcacctggaattggaaatttcatgctgctcaatttgcaatctggtggtttgctctggttgaacttaaaaatgaaatttccgagtattctattctcacaatgtgttatagatgcaatctttctggttcagggtcgagagtgaaagagaggtaccaactgctgtgtttagcatgatatataacttttcaaatctttttttccccttttatcccgattttcgcgcttcatggtcatattcttccaacatagtataggaatgactcatacatttttgtttttatattaccttcacagttattaaaggttcacaggctgtgttctatacggat

SEQ ID NO: 93700 - DNA, 993 bp, Eucalyptus grandis
  Intron number 1 from transcript Egrandis_v1_0.022390m (loc us Egrandis_v1_0.022390m.g) derived from phytozome v7.0 (c hr-ID scaffold_10; pos 26080367 to 26081359 reverse strand )
actgctcttgtcaccggtggaaccaaaggaatcgggtctctctctctctctctctctctgacccttaccgaacacctcgttgttttctatcgatgatttcgatgattgattatctgttatgatttaggttggtagagaaaacatcatgaattaagtatatgaaaaccgtcaaccttgaaatcccgtttctttgttataatttgaatgatagtaggattatgcactaattggggcaatctaggatcaagatacttcttgtcctagccagaatatacagggcctacgatttctaggccaagcccagacctactcaaaataaattgagcgaggatttaagcactttaagtggaattttccgtcatatctagcctagaaaaacttgttccaaccaaagcatgtcaaactggctcccgaccaacaaaatttttgaatcgctcgagtgatagtagatgcttttgaatccaataagcttcgatccctcggataaaaagctagataattgatattatcgccacttaaaattctatatgacgagagacttgattagagagctcaattactttgagaatgatgttcctgggtgactgattcatgcacaacctttttgaaagtatgtggcctttagacgttggtaaatcatttgcgtctttgtgatatcattagcccatagaatttttttgctccttttgtaatttccccaaaaaaattccaatgcattcaaaggctttaattattggtttgacttccattagccaatagaatttttttttctccttttgtaatttcccaaataaaaatccagtgcattcaaaggcttcaattattggtttgacttccattgcaatgccgcagccaaatcttccgtacattcttgggtatcacaagtactgatgtcttgtcacgtagaatttttcctagtggaaatgaataatctgttcttcttcaaaatcacaaagttggtgaacaatcatattgtttataccatgattagac

SEQ ID NO: 93701 - DNA, 1003 bp, Eucalyptus grandis
  Intron number 4 from transcript Egrandis_v1_0.003100m (loc us Egrandis_v1_0.003100m.g) derived from phytozome v7.0 (c hr-ID scaffold_8; pos 56929386 to 56930388 reverse strand)
acacagagcttttgtctgaggtatgattctcatcatgtgctagatagaagtgtatatctagaagatatgaaaatatattagtgtcatgtgctttaagttggagagagttatcgggttaaatttccatcaaagttctcaaattttcatgattcatctataataattacatttacagcatacccaatatatgaaggaaaataacagctttagaagccatttatagcaatggagttcaagctttattaatgtatctaaccagaaagcagcattccactgtgcctgactccaaaagtttgataatgcatagtcttctgattctctaacctcaacagaaactatactaatccatagtttgattatagtgttttaaacagcacaatgactaatggcacagtttcctgcattactgataaccctaattattctcttttcattatataatttttatcaattgccatctagcagttagttgccatctatatcatccttctcgctgttcctgcaattcccagaacaagaatttccctttggcataatttatctaatctcagtgtttctgtgtgtaaattcttgttcgtattactggaaaagaaccattttcaatacttaagggagtacttggggtgtccaacagaaaaatcatgaatgaaatttatcgtgagctgatttttctctgcattcctgaaaggggttcatttaatttgctctctctatgtctccatacttgagttggggatagatgtctatagagtgatgttttgactgtctgttttatccttcaagcatggggtaatggctgtggatctgtgacacctgtttctagtttcatgccccacggaatttgccttgtttccccaataaaatggaccaaccataagctgctggctttctcataatgctcatgatgattctgcacttgccattctctgattttgtatctcatccaatacttttcctattcatgttacccaataaaagatgtttatttgatctctttttcagc

SEQ ID NO: 93702 - DNA, 855 bp, Eucalyptus grandis
  Intron number 1 from transcript Egrandis_v1_0.040949m (loc us Egrandis_v1_0.040949m.g) derived from phytozome v7.0 (c hr-ID scaffold_10; pos 25797128 to 25797982 reverse strand )
tcggctccaaaaggaaggttattttccagcgaaaggtatgttcaatcctcatatagtaacagatacaataaaccatcagatatcagtatgcgcaataaacttctagttacctctgtgatgtagtttgacagtaatttcactagaaatcaagagtaacaagcacgcggcatcaattggatgttaaggatacactttctttggtggaacttcgataaactggaagggcttctgattcaattgtgtttttatcacaaagaaatgtgacagcaaaatttagggtctcttcaaaatttgaggagatcgtttagccaagctaaatagagagtcaactaatcattagtccatgttgacacattttgagcttggctcgtaattttctttttcttcgactcaccaagtagtactttaacagggaatctttgtgttttcgtaaaaagcacttgctgcaaaaacaaggtaagcatactaggtcttcacggcgactcagtttccagaagacgaaccactcagtagacgttagcccagctgtcaaaaccacctattacctcttcgtttaatcagagtagacggcttggaagtgaagtcaacggcaccacacatgctgaaactgcttgtgaaagatcatattctcacctttatgtagagcaatccgactaggaaggaagaaagaatgtccactgagtacaaaataggaataaaaggaccatctcttttttaacttgctggaatattcaaatttcggactagttttaatgttttcatcagactacgaaatcgtagaagcaacacatgctaagcagcagtatttttgactttacagatcattcgtcgaaagatccagttccaggcgcttat

SEQ ID NO: 93703 - DNA, 1066 bp, Eucalyptus grandis
  Intron number 1 from transcript Egrandis_v1_0.023355m (loc us Egrandis_v1_0.023355m.g) derived from phytozome v7.0 (c hr-ID scaffold_1; pos 18895506 to 18896571)
gcgttgcttggatcttcttggcttacattttcgtttgcaatctctccctcctcttatcagctctgtatttttttcttttgttcataaagtttcggtcttttttctttcaatttcgcaaacgctcggtcggttttgttttagttagtggttgttgatgtgggagtttttcaaacggccgacactcgaaagcaaggctttccttttcccccagttatagaaacttatctgtatgtttgagattcgtgcctctgtgtcgtcctgtgcttagcagaatgttataaggaaacttctcttatctacgagtgtcgatccagccgaattctatgcagtctcgacaaactgacgtcgcccaggaaatgcaacgatgtttgttttcgatcagtagaattgcacggtactttgaactctgtcagaggcgcagattttaccattcctaacaggtagaaatttgagacaagaaatcccatttgactcaagcacaaacatggataattccattcctttcatgtacctgaagatttcgagagcttgggttgcatcgaacataaatgaaaaatgccacaggaatcaaatcaaggaatctccctcctgttttgcttttcgagtccatgtaatattatgtgaaaattaaggccaccgattggagtactctgtaatggatacggtatgatgtgttcgtagagaggtaatgtaagctatacaggtacggaacggtcagggttctttttctgaaaagtcgacaagttgaaggagaattttgattgaaccataaatgctcattctataatttgcttcttctaaaccttacatttgaagtcatgcaaaggcagtttatcataagatttcagtggcagctgcgattcatgtcgattttttgattaatctcctcttgcaagtacatacgtgaagcagtttatgtatggtgttctccttgtcgagtaattttttaggaattgataagggaaaccacgcataggaagtgaaaacaggacttctgttgatctttctcttcccttctccattgagtgcaggtttctatcgccggtcacacagcaggacagcgagc

SEQ ID NO: 93704 - DNA, 685 bp, Eucalyptus grandis
  Intron number 1 from transcript Egrandis_v1_0.011298m (loc us Egrandis_v1_0.011270m.g) derived from phytozome v7.0 (c hr-ID scaffold_1; pos 39995647 to 39996331)
cgagcatatcaggcagactctcggcgccagcctaggtattgaagtaatttatgggggcaagtactgtgttatagttcaccaagggcctgcctgtttggtaaaaattatttttgttccccaaaataattatttatgtttttttattccagccaaaaaaaaaaagaatagaattatgtttggtaaaaattttatttccgagaattgatttggattagaaacaaaaagtaaaaaaaaaaattaaattcttgttctcggaaataattttttcttttttcttatcttttcttctctttcctttccttcttcttcctttgatcggtcgccaacctcggccatggccaacgactggctaactagggccagcgacctcgtcaaagcgtcaccgaccggcgcgaggctcggcctggcccaaatctggcaaggccgagcctcacggtggccaagtgagccttcggcgagttaccaaacgtgttcttatatttggaaattattttagaaaacataaacaaataaaaccatcaaaaattgttcctagaaataaaattattacttaacgcgccccaactcttacttgatatcacgatatgacgtgcgatatcatccgatcacataccgaagtccttgtcccttcgtttcattccactcaattagctagtgaagtgaaattcctttcgaatttgcagga

SEQ ID NO: 93705 - DNA, 918 bp, Eucalyptus grandis
  Intron number 2 from transcript Egrandis_v1_0.005811m (loc us Egrandis_v1_0.005811m.g) derived from phytozome v7.0 (c hr-ID scaffold_8; pos 70208129 to 70209046)
aatctcgagatcaaacacaggttgtcattgtcaaagtgagtttcttcttcattcaaatatcagatttggtttcattaatccatggaggaactacttacagggaaagcttcatttaaaaagttgaggtccctgcaacctgaatttaaacagtaacaagcaacgcgatcttagtttttacatcttgatcaaatacttgaattggtagtgctctgtaaattcctacatgatctgctcgcgatcgctaagtcaacatgaatttctatgcagtcatagaaaaagcctcctcataacagttctgcttctttatacttacgaagcagatcaatgtcatcttcataaagaatgtgcattgaaatgtatcccagatgaacactgctgcatagctttgcacgatgtatatatcagtatggcatcaccaaaaacccgatctcatgctcaaggattttcttccgtgaactatttagtcagaccaattgatcaacaatcaagagaagcagctggtgcagcaatttgctcctcatctgcaaagagttcagctttaggattagaaaacaaatgcagtcttgaataatcagtaaaaattcagaacttctacaggttcatacttcaagggacacaacttgaaacgagcacttgtctgccgattcacttagtatccctcgtgacggttgagggttttattgtgtcctctgttctgactaaagatagactactaacatttgaatttactttatgaatatcttccattttatggttggtttgctacatctatcgctcatattacgaataattctgttaagctgcttggaatcatcgacgactttcatgtactttctcatttcttttgtttgctgacccattcgccaatgtccacttgaatcagtgaagatatacacaagcggaaactgcagcggagta

SEQ ID NO: 93706 - DNA, 975 bp, Eucalyptus grandis
  Intron number 2 from transcript Egrandis_v1_0.026665m (loc us Egrandis_v1_0.026665m.g) derived from phytozome v7.0 (c hr-ID scaffold_1; pos 3423494 to 3424468 reverse strand)
gaggtacaatcactttcttgcatatctattctgaaatgttccattgaaacatttgctcaaaaaattatgatgatgtagccagtagttctttcaagatttaactaacaatctttataccatttgatttgctgcatgagcaatttctctgtaaatttattgtcagaggcataaagatcttagattaatgggaagattcctcttagtactttcgctctttttctaataaaaaagtccttcaactttcacggatattctagtccagaacctctaacatcatatgataccaaatttaactgacatgattgttggacaacaccaaattctgatgagaatacaatatgcggatgcccatgttaacgtatgtggaataatttacccaatcttgacaacgttgaagtgtgatgtggataaaatttagccaatgtgaacggccacatggccatccatattagaaaatatttatcaacattacactatgaaatgttagttagatttggccggatttggtgttggatggacttaattagaaaattttgaaagtggaaggactttattagattaattaaaggtacacggctttattataaaaaaggtttgaaagcacatggctgaaaagtgaagtttttcctagtttaaaataggggcagtgctgaatgcaaatgaaatggttggacatggatgcagaaacatctcaaaagtgctattttttaaagttaagcttgttgtgcgttccttagatatagtcctgctcacttgtgctctccctagcggcatctgatctttggaggtatctactctctactatgtcctttacatttaggtgaaacggctgtgagatcgaacatattcttctgtttaggcctctttatatttaagctaagcctaatatttgtctagaaacatggaaagtgacgcgtctcatatgtttctgtatccccagaggaagagaagtttaggatccaagattcaggtccg

SEQ ID NO: 93707 - DNA, 801 bp, Eucalyptus grandis
  Intron number 3 from transcript Egrandis_v1_0.001663m (loc us Egrandis_v1_0.001663m.g) derived from phytozome v7.0 (c hr-ID scaffold_1; pos 34317588 to 34318388 reverse strand)
cggaggaggatagttttgacaaatacacatctcaggtaccgctgctgaccctacgaggcttcttttattttagctgctagtctacatttttctttcgcaagttaatcgtggagcttaaaaggacaactagatttggacagacttcacaacatttttaaaggctgcactcacatttctagcatgtaggcacatctatgcttttctcctgtataatccgtttcgtgataattaaggatatgtgacttccaaagtcatttcaatttggaagcagagatctagatttgataagttgtacttccataattactcttgtacctgttctacctggtaaatgcaggttagccttttcaaatggatgctacatgataacaattagtgtacatgctgagacatctctctgtttttccttcaagaaatggataagaacctcattcagatatagttcttatagctctggtccttactatgaaggagagtctcaagtgtccttagcctgctcaatgcattctggtgcaatcagaccaccctgcctgtgcctttgaggaatgtcagaagttcttttactttagaagattagtagatacatctgtgctggcaactcaaaatgcatacgaagtatgtgcaaaatttagatcctgtgccaactgccaaggacttctgctagatttaaagttgttttcaattttatgtattcaattagcttactttaccttaagtagatcttctaagtatttcttgttgtgtactcttgatcccaatctgcatattttgtggttcattttcctattcaatatgcatagc

SEQ ID NO: 93708 - DNA, 814 bp, Eucalyptus grandis
  Intron number 1 from transcript Egrandis_v1_0.019536m (loc us Egrandis_v1_0.019536m.g) derived from phytozome v7.0 (c hr-ID scaffold_8; pos 63159920 to 63160733 reverse strand)
cgcacccgagctcaacagctcgaagatcttaaccagtaaatttgcttctcttctctactgttgctgttgcagtgtgctgagtgattgttcgtgtcaatgcgggtggcaattcatgttccgtgctaccgtctcgtagctagagtgactgaagtctcgacccttatggtcaaaatttgatttttctgatgcacgggtatgtcgcgctgagttcgaacgatggtgcgcggtgtcatgtcgggtatgacgactctctcagcgattattttggagctgcagatgtagtgtttggagctgcagatgtagtgttggctcgtgtcatcatttcgcatctcaaattggcagcctttagtttatgtgaatgaatctgggtaccaccttttgctgagatttgtagaattatgtcgggagcctgtcttctgttgcatttggttgcttattctttatgctttggctccattttgactgtatattcttccttgatgctcgatcttgaacagagattgatgtattgtagattgttcagtacttgttgttgatttgtgataaacttgatgagagattagatgagtttttatctgaaactttgaagtagattgtcatctccacggagtatgtcgcgtaccattaggatacccattatagtgtaagtacgcattttttcacttagtaatctcttgcacctggttgttatgttttttttttggtaaagcacctggttgttatgttacaatgcatcttctttgatttgtatgattgtgctttcaaagatataaccagtgtcttcttatatccagattcaagggcatatcccatt

SEQ ID NO: 93709 - DNA, 894 bp, Eucalyptus grandis
  Intron number 1 from transcript Egrandis_v1_0.014348m (loc us Egrandis_v1_0.014391m.g) derived from phytozome v7.0 (c hr-ID scaffold_8; pos 15908262 to 15909155 reverse strand)
cactagtccttggccacctccaggtagctcagctggttcgtacgatgtaactgtctcgtcccttttacccatttctaactttttctccagcgagtttcaagctttgagcttgggattggatcgggctggctttctttgtaacgcttttttggaaacgggtgtgggggcattttgctcttggatgcgggcttgtcattgggttttggtttcaatgcttagtcttgctgtgcttggtcaaaagttgtgtgctttcattctctggtatttttaagtttttttttttttttttgaagtattcttttcgtgggagcggctggcatccctcttctgggcatattgagcttcagaagaagcgtaaaagcattgggtttcattttgtttgctttagcgtttcgtgtcatttccgtggtgttggcgttctgatctgctgcagtagtctggagtacccatgacaggagccccctgatctcaataactcaaaaagttcacaaattggcgaatttgatggatgtttgctccccattaaataaaaacatgtaaagttgcttaaagggttgtcctttgcactttggagttatttttaatcattccatgttagatttagcttcctattagtaatattcttgtgttcgcgatagactcaagtcctgtttggttagaaagctgcggaaatgcacttgttttcagtagcgatcaattagggttgagttgcaaattccaagggtatggacactggaaatagtttctcattactcagctagaaaagtacgttgtcgtttagcagggatgaagagggttaagggatggtgcatgttcattgctttctttctctatgagttcctctataagactagatatctttgttgatcttgttgttccaattttagcaggtca

SEQ ID NO: 93710 - DNA, 860 bp, Eucalyptus grandis
  Intron number 1 from transcript Egrandis_v1_0.028272m (loc us Egrandis_v1_0.023557m.g) derived from phytozome v7.0 (c hr-ID scaffold_10; pos 23067248 to 23068107)
tccagcaacgcggcgtcaaggtccgcggatccgacgtaagttccccttttttcccgcgcgcattgcgcacgctagcgacaacactcgttcggcagattacttgacgcgctagctcggcttgcgtagttcccgtcctgctgggtcggcgtcggaattcgcgatagtttcggttcattcgatgcacgaaaagtttcgcgcaatggtctttttttttttggttacgtgaaagcctagttgagcgtcttgtaatgctcggaatatgcggccgtgagttgtggagataagcgggtgggagagcgcatgatgtgtttgattttatgcttcatccagtggagacgcgaatagggcttcctgggtagttacgtgtacggccttgctgtttggataattcttctgtcgataaattgttcttgttctcaaggatttctccgtgctggctgcactgtggtcattggtcgaatttcgtgctctggacatgcttactaacaagattagtgagtcgaccatctttaaatgggttcgtaggttttactttagagcgtaagtctctggttgctgaacttgacatttcacgtctcgaaatttgagataattagattcgagatacggcaggataagtttggtgtgactgtaagagattctgccaaatattaggatacggatattcagcaaacattaaacggcatacagggcagccagttagatgagtatcagctgtctcataattggacttgactataaagtagtaaatgaggattgcacattgagtgtgtttatcaggttgttcagtttggtatttttcatacagtcatatatttattaatttctcgcatcttaaatattgcaggtaagacctggca

SEQ ID NO: 93711 - DNA, 796 bp, Eucalyptus grandis
  Intron number 3 from transcript Egrandis_v1_0.028016m (loc us Egrandis_v1_0.027989m.g) derived from phytozome v7.0 (c hr-ID scaffold_8; pos 42294961 to 42295756 reverse strand)
ctattcgttcattgggtcggtaaaaagatccttttcttttcccctctttgtatgacgtcttctttgacctgccttcgtctctggctcagatctctcaaattttcttccattgtatgcactcacaagttgttaatttcatatggcaattgttttctgtgatctttactgggatagtttgtacaggtgactggtatagactttttcatttgggggagtagctgtattttccggcgaattaaacaagctgcagctgaagtgtctgtttagagaactgtggttgaaatgctactaccaccatgcttaaaaaataaaacctttttgacaagaaaatctgagcatgtataaatgatctatgaatgaaagcttggttacagacattagtctagttacgatggctcagacattgtttatttagttgactgctgttttagaaatgttatttgcatactcaaatcttatactgggagagccttttcaataaaccatctctgtctccatcatgcattgatctgtgatttattgttcttcacttcttcatatagtcaaggagctggtaatttttgggcattttaaatattagagcgtgtcattggactcgctttgaaacagactaaggaggaattgataaattcagcaatgcatatttaattaatttactaaggaaaagtgaagttgagcatgatggacatcctttggtgattctacagtttaatcttacttacattattatcccacttatgacatgcttgtgtcttttgagaatctccatgtattaatgctgtatatacaggaaaga

SEQ ID NO: 93712 - DNA, 835 bp, Eucalyptus grandis
  Intron number 1 from transcript Egrandis_v1_0.012527m (loc us Egrandis_v1_0.012527m.g) derived from phytozome v7.0 (c hr-ID scaffold_8; pos 52679653 to 52680487 reverse strand)
gcaacccaaagggtgtaacttgcccaggttcgtgtttgtgtgcaactcatccccttttcttttctgttcatggagaatatgtgggattgcaatgaagcaagttcggaacatctatgttgggctggggctgggattggtgaaaatagccttacatctacatgtctaaatctgtacgtatacacagtttcatgattgcatgttggttattggaagcacgaacagagcattagaaatccgaaggattgcccatagctttttcttagagagtgggttatggtagtgagggcctgaggcacctgctaagcatgcatcaggaaaatttcaaaattttcaaggcactaactacatgtatcaaaaaaagaatccttttgttagtcagttgatctgctacgtgcagtttgtttggtctttctggcattagaaacaggatcagtctgaattgagttattagagctctctgcaagttactagcgttatttgcagcatgatctgtttcagtgcttaatgattgcttcaatgtggccattgctgcaattctgcagtattgattgttagatggttcaacgttgactatgcccttgtttcgaaaatctggctttgctttattggcaaatgcaattatttttctatgcaaattttaacaaattctagctcaggattgctgctgcctgaaactcttctgttttcacctggatggatgacagactaatctgctggtgatctgatttggatttgggtgaattagtgttggctacgtagttgccaattattttttccgccaaccttatgtgttcattctatatcatactgagcttgttggactatgacagattta

SEQ ID NO: 93713 - DNA, 634 bp, Eucalyptus grandis
  Intron number 3 from transcript Egrandis_v1_0.021431m (loc us Egrandis_v1_0.021109m.g) derived from phytozome v7.0 (c hr-ID scaffold_8; pos 30996233 to 30996866 reverse strand)
aaaaggttgcaggcattctgacaattattgctgtctctggttgatatctttgaagctagtggcaattagtggtacttgaatttttccattttccagagtagacatggacatgaagaacaatgcatgttaaataacataaaaagttgatatatagattggataatgtgcataagtactttgtatgaatcaatgtatagagtttggagctgtttcaagattacgttgtttcctgaattacagtcaaccgcatggtgctgattccttgagagttattggacattttcgatccacgtgtagtttcagtatgattgtaacggaaatgttaatatcatatcagtattagagtgagtctctttttgatcagtcagatataaaattgtttttttacccgtcataaatgtatatatttatgaattaaaagtagaatatctatactagtctttcatattggttacgatgtggtatacttgtctgtccagcatcaaacattatctgattttcatgtgggagctggaagccttgattagcttctttagccttcattccccaccgtcaactcattaaaggttttgttctttttggcctgctttcctttgcagtcggttggataatctaataatagaagcccttacaa

SEQ ID NO: 93714 - DNA, 541 bp, Eucalyptus grandis
  Intron number 2 from transcript Egrandis_v1_0.050813m (loc us Egrandis_v1_0.050813m.g) derived from phytozome v7.0 (c hr-ID scaffold_10; pos 23421570 to 23422110)
ataatctaactactgtgaaagaagccccgggagtagttgatttacagcgcttggagcttcttttttaatttgatctttctacgtctcatcttcttgtcgcatatgctctttttttttttctttttttcttttttcagctaaataccgacataaattgtacgtttgtcatactgcagtgcatgtgcgagatgatgaagtaaatgatttgcgctctttagataacagctgccttaataatttgacccaattaaggggaaattccagcgtctactctttacaggcaacagttattgcatcgatactttttctcggtcatgttatttcgcttgatgtgaatactacagtctgtctccttattagtgtcccaattctatccgcgatagaatgcttgaagtgtcacttgtttcttagagtgcccaatatgtcgtacaaccgaacttgcatgcttttcttgttaatttggagttcttgacatagtttgtttcaccacctgttgattcttccaggttcttgctggaagctacttttctgtggcaggagc

SEQ ID NO: 93715 - DNA, 919 bp, Eucalyptus grandis
  Intron number 1 from transcript Egrandis_v1_0.042487m (loc us Egrandis_v1_0.042487m.g) derived from phytozome v7.0 (c hr-ID scaffold_8; pos 69148759 to 69149677 reverse strand)
ctgcttgcagattcgtcacggggttcgaccccggcagcttctccatctaggggtgtgcaaccggaccgggtatacccaggaaccggaccggcccacccagaaaatagggtcgggaaccggttcccgttgaaaccggttcccaaaattcggaacccgtttaaaccggttcgagaactgcgtccgattgattacccacctagggaccggttcctggactggttttggaaccggtttgagaactgattttgtaagtataggttcaaaaccttttttttttcctttatttttattcttactcccgtaatcacatggcgtttttcttcttgattctctcaaacacacatgacactcctccttcgtcattcctcttcctcacttgcttccctccctcatcggctccctcctacactgtctaacggatggtgttcgtcgccaccaaatttttttgtaccacatggattggcttgcctaatttctcgaggagttatgcttgcataaatgagtagttttatgtagtaattgtgggaataaaactagtattggactcatgtttattgctaattctttgctttatgattttatttattataattagtcttgtgaatccttaattttttgtttagtcaaaaaagttcatgtatttatttattacaaatgcttaatattttgatacaaattaggaaaattacgttattttctcacgtataaatacaaaattcaaagttgtataagatatcggaagattgcaagataggttccagtgaaaataaggttgaccttggaactggaccgaaataacaaggtaggtcgggtacagggtcgggtgcagggtccaaaaaagaagaccccgttataatagggtcgggtacagggtccacgtctagaccccacccatcctagacctgatcacccctatctc

SEQ ID NO: 93716 - DNA, 567 bp, Eucalyptus grandis
  Intron number 1 from transcript Egrandis_v1_0.005107m (loc us Egrandis_v1_0.005107m.g) derived from phytozome v7.0 (c hr-ID scaffold_10; pos 28825711 to 28826277)
cagctgcgagcaaaggacaggttgaggtgagttggtcaaattatattttgaaatctcgtgccctggcttttggatgttttagcttgtaatcctccatgaaacgtgatgaagttgtgagtttatgatgttcaaatataagtttgacgtagtagcctgtgataaatcttgcttgactctgctttgcctctgcaaatctttaagttctgagattggcaatggactcatagatgtcactttcagaaggacagacgttaggttaagccccctaatattctagtttttttctgtaagctattgatattcttatcctttaacagcaagaattttccctcatttccttgtccaacaccgatatcttggcagattcgagaatggattttaccgtgtgttttactttgttggagatcaaagtttatgaaatgaaacatccctttcagatgtcgatagctttgattgttctccatgttcactcggttggaacgacctcatcatttgtcaatctgttaatcgattctcccgaattttactgcaggtggttaagtaccttacggaatcctttgatatcgg

SEQ ID NO: 93717 - DNA, 956 bp, Eucalyptus grandis
  Intron number 2 from transcript Egrandis_v1_0.054021m (loc us Egrandis_v1_0.054021m.g) derived from phytozome v7.0 (c hr-ID scaffold_10; pos 17691217 to 17692172)
gggaccaatcaagttcaggtagaaatactgaaagttcagtaccgatggcattctcaaactgtgtggcctcacttgaatgcaaatttgattgtaatgtgcgttgacctttataagtaagatataggttaaaggatgctgttgtttctatctttcatgttgaaaaaattggaaaagcaggggcaggcctctttttattagggaaaattataaaaattacactaagctttctcttggttggcattacaacctctaccccacactttgtgtcataaggtgtcatcagcttagactttttaccttgaagttaacaccattccaaaaagtacgaaaactggagggtgcaaagatcttgaaacctcaagatatgtcatgtgaggtgttgaaattagagggtgcaaggtgtaggatttgaagttagctgccaaggtgtaactatgaaaaatttgagggtggtttttgtcttttgtcttttttattgtttcaggtggtcttgtacctgtgatctattcaatgcatgtatgcagatatgctgcactatgctcagggaagagatgtatgaggagaaggcttaaaagaaaagtgggtctttcagaaaagaaattatgagtgaacaatcaaggattgagaaagggcaaagccttagaagatgtaaagtcggcttgctggatttccttatgaaagctttgattcatggtcactaaaattagcaaatagatctagaactgtaaggtcctcactctgatagaggggagcttcaaatcacagttagggttgatgtataaaatgctcattaatgtcgataatcttgtgtaagtagctgttgtggtataagtggtcacttagcaggtagtttcctgagaactaatgattgttcctcagtcccactcgaaagaactagcttgctctgctctatttccattttgagcaatttactgtcatagaattaagagtttgta

SEQ ID NO: 93718 - DNA, 932 bp, Eucalyptus grandis
  Intron number 1 from transcript Egrandis_v1_0.023140m (loc us Egrandis_v1_0.023140m.g) derived from phytozome v7.0 (c hr-ID scaffold_10; pos 29894772 to 29895703)
caccctccactttgctctctccaatcgcaatctgggtatggtcactctgttccttcctgaatcgaattttgttttcatcagttctgcttgcttgctcattccatgctcaacccgaaagttgtcctttttcatctcttcgttccttaggacgaaatgggtttcggtttttctttttcccttttgcccgcccttaggtcttttcttgattgtgggtagattgctgagggctttgttggtcggcagagttgcagttaaccatcatgaacaagaaagctcgctgtatggttacttctgaaattttctcgttgggaaaagattcatcaagagatgaacatggttttaatttgagctgggaattccttatttttggaacgaagcactgtagaagaacagcgagacccgctgaagtggcggcggactttcttggccgtctgaggtcatatgtcgtccgcgagctgtgattgttgaggctgtccatgatccctcgggatagaacattgggagtgtatgctgcaaaaatgcaagttattcaatctggacaaacaaagctagagttttgtgtattctttaggcatagtttgggcgcagcatatgatcattgtagagatcattgtagagaatttgatgaatgagagaagtccatgcttggtgccgtcaggtcaacactttttttattaagtgcaatcagtataaatggatgatgtcaaccgacaatctttatgaattgagagtgttgtaacaaagccatttcttgactgtccgtgtataaatggctaaatgaagggggatggggtatttgtgatttaggtaccgttaataagtgcagcgaaatgctacgctactcatgttacatatttgaatctgttaattatatgcactctgaatttgaactctgcacacagattgtcgatagctaacaaactgaatcaaag

SEQ ID NO: 93719 - DNA, 908 bp, Eucalyptus grandis
  Intron number 3 from transcript Egrandis_v1_0.023140m (loc us Egrandis_v1_0.023140m.g) derived from phytozome v7.0 (c hr-ID scaffold_10; pos 29895989 to 29896896)
cttcatatagtgacccaactggtatcaaatgctttatcttttgtcaacaaaaagttaatagttggatgagttttcttctctcctgttctagagctattggagtattaaggtgttattttgacagaagcaaaatagttagaaacacaatcttggaaaagcttgtgaaagctggtgactattgttaaaacagaggtgtactttgaagtgattagaagattttatgaatgaggtgtactttaaagtgattagaagattttatgaataaccttttgttccttactgtatctaatgttttgggtcaatttttgatcatttgatctggctttcaacttttggatagaggttgctgctacgttgttttcatttgttcaaaatgaattaggcaatgagctacttcaagaaagcaagatatatgcctactttactaccatctttcatctaagctctcatacctgttggcattcttttattcctcaaagtggaatttgcgttggggaacattttccaggtcatttgttcctcatactatatgtttcctgatatttaatatttaccctttcctgagttctgtcgaactattgagtcatggcattatagtataaaaacatgaaaataggcatgtcattgaactcccatgcagtatgcagcttatgatggtggttcaccatgtcaaacccactaggactaataggtcattctgaaaggatctatagtacttaaaaccatttgcccgttgaaatgctgattttcacattgagttagttgattttttgtcatggctaaaaaaaattgatgttttatcaagaaaaagttgagctaattaatgatacggtgtgttgttttgttcttcacatcacttcattctgtttgactggcctcttcaggttcaaccatttttcctagaataa

SEQ ID NO: 93720 - DNA, 858 bp, Eucalyptus grandis
  Intron number 1 from transcript Egrandis_v1_0.046256m (loc us Egrandis_v1_0.046256m.g) derived from phytozome v7.0 (c hr-ID scaffold_8; pos 65095013 to 65095870 reverse strand)
cctccaccgaagagaaggtctctccctctccctctctcacttttgtgcttaagagtatagcaaaccattgtccctttgttatctggaccatgcgttgttcattcgtttgcatttgagtgtcaagcaaaatcatgacaggctgccaagcctggccataggggcaaaaactattctcaactcgttacctattttgcatttacgagcaaacaatggtcgagattgtaatgggtattcccattgttattgtgcgaagtttgtgttttcacctattcaccggatagctaaagctttgtaacaaccttacatgctagcccttcatcaaaatttagggaaatttactaaaagaaagtcttaacttattataattatgccaattcaattataaacctcaccgaacaaaatgaaaaaacaaaaaaagggaaaaaaagaaagataaaaataaaaaataacaataagaaattcataagaaattataaaaattgtccccgtccgtggtgccacataggataattgatgtctattttagtgatttccagtcaaaattgactaaatgaattgaattggcaaattatcaaaatgtttatgactaaattgatcaaattaaaaggtttatgactgaattaacacaattataatatattttagattttttttgataattttctctcaaaatttaggtaattaatgcatttaagaagacatgcaaaaagaaaaaaagaaatcaattcgtaggaaatttatgtgacggtgaataaaaatgaaaaacttttaggagattacaatttctctcatttgacgctataatctaaggaaatttgtgtgaatcaccaatttgcgcagatatacacagcaaagttg

SEQ ID NO: 93721 - DNA, 661 bp, Eucalyptus grandis
  Intron number 2 from transcript Egrandis_v1_0.009849m (loc us Egrandis_v1_0.009849m.g) derived from phytozome v7.0 (c hr-ID scaffold_8; pos 25404842 to 25405502)
acgcgagccatattgtacaggttgttcctttaatcgcttttcgacccttgttttaatctgctttgcttcagctactaatttgcatcttctgtagattacggtattcttatggcttaggatttgaaggaattatgggtttttaaagtcggactcttcctcaaagagcctgtacggttactgttcttttgaatgtgttgagagaagtcttcaagttttacttttgatagaatgtgatggagcattagatgttcatagtctatttggtgttttgtaaccattatttgattgactcatcgtctcagttgcttattgctgaaccgttgaggggaaaaagattgattgggtatatggtcaaagaatccgtgtttgacttgctgttgctaagtcgccggggaaacaaattggaatttaaatggaaaaaaaaataattatttctccctcttaagaaacaagagacaagggaatacttgggtattgcgcatgatgttttcgctctagtacctctgttgttaccagtgcaccatggtttagtttacggatgttccatttgagctatcgatatccatgacataagatctacttctttttcattaaaaacattctaattttaaaagatctttccactatgtgtgactaggagcttggtggaatcagcacctct

SEQ ID NO: 93722 - DNA, 791 bp, Eucalyptus grandis
  Intron number 1 from transcript Egrandis_v1_0.037679m (loc us Egrandis_v1_0.037679m.g) derived from phytozome v7.0 (c hr-ID scaffold_8; pos 24286717 to 24287507)
gatttgaaacttgtctctcaagattccttatattagtctctgtttcaattacatcaagaatttcatagaccaataaagacgcctctcttgcaagagcttttatccactcttttttatctatatactcattttcttgagcgagaaattttgtcaagagagtttttacttcattatgtaagccattatgcataggagaaagaaatgcctatcatttttttttttttaatgaagaaagaatgatcagctaggttttttctctttaaagaaaatacaggccttatggcatttttctaaatacttgaaactgtaaagagcaaaaaggtcataacaactgacagtatgctatatttgtccaaacggccgaagataatgtctttatttgtccacttttaaaagtgggcctaaaatcgtcccaaagggtgaactagttgatttttataaggatttaccccattggtatcacagaaacatgccagataaatggctaggcatttagaaaatcgaaggaaaaacaagcccatttcaatgaaccttgtaaagattttaggataatgctgatcaacattcagcagatccaataattaacttgaattattaataaatgcaaataaattaacacacagcatgtagaatcacatgaaaaaacgtgcttcttgctgattgaaaatatttcaacattcatctcctcaaatattgcgtacaagtctcttactcactgattctctttgaatctttattcatttctttggattgctttaaaagcagtttcaactatttttcccttctcaggt

SEQ ID NO: 93723 - DNA, 692 bp, Eucalyptus grandis
  Intron number 1 from transcript Egrandis_v1_0.007949m (loc us Egrandis_v1_0.007949m.g) derived from phytozome v7.0 (c hr-ID scaffold_10; pos 27335529 to 27336220 reverse strand )
cgcctcggaggagccttacctcttcagcatttcaggtacatgggaggccgaggatcgaatatggctttcgattcgttttctggtctgatttgttcttgttttaaagtttttattttagatttgattttaagaaacccgattctacaaatttgtgatttaccagtgctgttattgatgagaagaaaactgaaaaattaccaacatgaaattgctaacgcatttgaaaaatttaccggcatgtcttgcaaatcaccaatcatatcttgaaagtgaggaatttccagctccttgttctagaattttcgtccgtagttttgataaaacctacccagtcaaacaagtcttgccaacctcatctacaagcttgggcaatgatgacttcagtttaccaagctaaaattggtattcttttcccccttaaaaaattgattctaaataaacaattcccttcttgatcccgacttgttagtcaaactcgattaggcccgatcgattgctcgagagtattttataatttccaaccacggcgcttagataatgatttcagggcccatatcgggatcgaaaactttattgatcatcagttttttccatgatttttctgcaaaataaccagcaagtcgagcttatatggttctggttttggtcatacaaaaggcaagaaagtggtgcaatcaagtccccaatccaag

SEQ ID NO: 93724 - DNA, 705 bp, Eucalyptus grandis
  Intron number 2 from transcript Egrandis_v1_0.013255m (loc us Egrandis_v1_0.012097m.g) derived from phytozome v7.0 (c hr-ID scaffold_8; pos 33721592 to 33722296 reverse strand)
cgaggatcgccgataattatcgctccttggacgaggttagagtctaaatcagaccgcattctctccctctctctctcgtttgaactgtgttttgtgcgtcttttggggctctgttttcgcgaagcgttaaagtttttttttttgggggggtgaatgttctgtttggtgcttctacactggccattgaaattcagtttattttcggtcgtgactatcgtcaataattaaaaatctgcatataattcacgatgaaattggtgttaggaagcatgacgcttgcagtttacgaaactaagaactttgattagcaacgaaaagggccatagcagagaaatcttcgagaaaggtcatattttccgaggtctttttgctagggaggcccttaagttacagggctagtgggttgcttccgtattctgccaggaacttgagattgcaaactcgggataggatgagaggtttcttgctaactatactgagccatcaatgtttttgctaatattttgtgtggagaggattcgggagttcatattcgcggattatccatgtggcagcattcaggcccgatatttggactgctggttaatctttattactccgtgtgcaagctatgccttgctttacaagtctctgatgttgtgatgttaatttgatcatggttcaatcacaggttactgctgccctttctgaagctggccttgagtc

SEQ ID NO: 93725 - DNA, 805 bp, Eucalyptus grandis
  Intron number 1 from transcript Egrandis_v1_0.009035m (loc us Egrandis_v1_0.009035m.g) derived from phytozome v7.0 (c hr-ID scaffold_10; pos 28468173 to 28468977)
ggacggtggttttgataaacaaacccaaaggtgggtctttaactgaataactgaacttttttttttcctaaaaaactgattaactaagttgattgtctagaagtgtgggtgaaagctttgcccgtactgttttagagactaacttgaaatggcaacccaaatgagattttggtttaactatcgtgggagcgactactgatgggtgcacatttagtatctggtgattgctgaactctgaagtggcctactttatgttgtgcaccggtctgatgtagcagcaagcatcctcttgtgtttatgtgcaaagtaaaagtggatgaggtgtcaatcgagtcctttagccattctcgaaagattctcagttggctgtgcccatgaaatagcgtgtgaaaatagcgggtagagatatataaagttcaagatgctgaattgactgactgtgggcctgtggcctctcttcttagagaatgaagggcctttcttcgatgttgggttatatttcattccgtttatttggatgagcaattcccgtagctcctagactgtatatgctgctgaagaagtattctaactaaataattagctctgtgagaggatttttctggattcatttggttatatactacgcttgttgcacattgtttttgttgtcgttcctgtgcatcttggaatttactaagtatcttgagtcatttccacattaagtgcaagacgctagcccttcagttcctagaaatattcaatcttttgattgttcatttgcaatacaggttggacttcattcacagtttgtggaaagcttcga

SEQ ID NO: 93726 - DNA, 883 bp, Eucalyptus grandis
  Intron number 2 from transcript Egrandis_v1_0.030935m (loc us Egrandis_v1_0.030935m.g) derived from phytozome v7.0 (c hr-ID scaffold_8; pos 1260804 to 1261686)
tactttgaaggtgatgcattgacttgtgatgttgggataatgtttttgactatttcttctgataccggttaccatgtctctgagtgttggtatgaagtctggtcccattaccattagtctttcctgtcatcccttcatgtttctggaaggaagcaaaagaaaattgatcaaaccacactttttatgcatcattaatcctttccacgtgttcaaatgaatgaatccgagagaagtggaaggaattcaataaaactgagagatctgaatgactttcgattctgtcagagaagattctctgtttactctatgcaccatcttggactggacctgttatattgacagcctcatcttatccctatactagttttttgagtgtctgattgctcttttcaatgttggtgctcttttaatgttggtgctcttttactgacatggtcctcaagtattgggttaactataaacttctgatttcagtaaggattttatgaggattttagaggcctgaggtatttttccagacataagtccaggtatctgccttggtttggtggttgataccattacgagtctgggtaaagtaaaagagagtccttcttcacagatgtttggcttcttatgaggttgcatctgctctatcttgggcccacatgtttctccatatgtgttgctgtagttagcattctctagctagatcattgcctcctgactccgcttaagattctctctatccttagtgttttttctcttgcaattgtttctttattacctcagtgaaataattttattctttttaataaataatatctaactttagttgccgccctctaattttctgaagcaagataatgtttcctaagtggaaatctgctcttctttgcagata

SEQ ID NO: 93727 - DNA, 794 bp, Eucalyptus grandis
  Intron number 1 from transcript Egrandis_v1_0.013724m (loc us Egrandis_v1_0.013724m.g) derived from phytozome v7.0 (c hr-ID scaffold_8; pos 16680550 to 16681343)
aggttggttgaggcttaactggcaactatttggactataagtatcctttttattaatattggggttggattttgctatataaattatgaaagctttctttcacctttgagttgagttagctttcaaattttcatgtaggccgaaagtacatccttgtcattgattattgtaacattctgacaatgtgtaatgcttacatctcctgaggtatcgcagatcatattttgtgtttggatgaatttattccataagtcaatttatgtatcttagagatatttaatctagacaactactcattcttagaatgtgagtgaaggcatagctgctgactagagggagaggttgaatcaatgaagctttattgattgatctagtaatgggtgttatgaataggccacattagtcgttgttaataataaactggggccaaggcttatccttctgtcatattatcatggacctttcatcgaagccttcacagatcacatgcatcttgatgtgtggatcattagcagcaaatgtcctgcgtaccacaaggaaccttgcaacaggttatggacctcattttacctcaatgagaagcatttttagataccaagatgctttcctaacgaaactatatgatatggtcctaatttatatgttactctgtgatgagtctgtaaaaagctgtacaatctcaatggtatttctctctagcttaaaactaacgaagaaattttgctggtagattcttctgagattcttaccttttcttttacatttgcaggtcttaaagcaaacgctaattcgac

SEQ ID NO: 93728 - DNA, 959 bp, Eucalyptus grandis
  Intron number 1 from transcript Egrandis_v1_0.002410m (loc us Egrandis_v1_0.002413m.g) derived from phytozome v7.0 (c hr-ID scaffold_8; pos 12385984 to 12386942 reverse strand)
gagcggtgccggtctcggctattacgaggacgaaggtagaccgacgttgtccggaactgaattctcgtccgtttgctttgttttactacgttcgagtgggtcggtgcgtccgatgagagcgaattgcgtgtggactatggtctgatagctgttgacggcggaggtttcgggagttgaaattgcgatccgtgcgggaggggaattagccgaggtgggaagagagtagaggcgttcggcaattgtctgtttcgaatggaaagctaattccattccgtgccttttggtttagaggaagtgaggtctgaaggatgtcggcagttgactgtgttcaattctacatcaaaaccttgtagtagggcttaagtctagtctgttgagaaaagatcaagaagagcattttcctttgtttcggttctagagtctaggcttgaggacaatagccaaagattggatttttcttaactcattgagttgattttaagcttacaagagaaaggcggttgcctagacatcgaagtggcaagagcaaactccatttgagtaccaatccactatgtagtaccaatccatttggagagctttatttcttcccctatacagtaaaatattacattatcagtaggtcacttcaattgagaaagtgttgcctggcaatatgttaagcttgtttgtttgccttcatcaataagaactacttagaaatattactctctgtcgtagagtggcaaccctctgatcttccattggcagactgaagtttccccttgaaattaattatttgcattttaggcctattgtttttaacattctgaatacataaatttttcttttatgcgcttgaatgatcttggatttaattttttgggttattgttgctgtacaattcccagtagcagaatactcattatgaattacctattgcaggttcggcactgggtggcacatatcgtcttcctccg

SEQ ID NO: 93729 - DNA, 929 bp, Eucalyptus grandis
  Intron number 1 from transcript Egrandis_v1_0.007136m (loc us Egrandis_v1_0.007130m.g) derived from phytozome v7.0 (c hr-ID scaffold_1; pos 14513814 to 14514742 reverse strand)
tcctacgctgctgggccgaggggaccttgtatccggtattgtttgaacgctgcttgagcagaaccgccggctaacttccatttcttctcgtttgttgtttcgtctagttctgtgtgcttgttttggctttggagaagctcttgtgtggtgtgcggtgatgggtctttgaaatttttgccagctgagtggagggtgcgaagttcaagtttaaagttctgggcgagtgcaagaactgtcaattagtttctgagtgtcgcttagccttttgaatcgtggcttaatggtattgaatattgaaattctcatgctgaagtgaaaccttcaggaaacaaatcgtgtggcttctaaaaagtgatgaagctgtaggtgatgaagacccaattttttatttattttttaatcttctccctgcctttttgcaagaaaactgaaagagagagaaaactgtgtttccatcagtttggctatgggctaatgtacggtccagggagtgttctgtttgaaagagtttgaattcagggaatggataactacctcgagagatacaaaaagagtgcttggtttttttgggacttaggttaatgccaatttgatttatatcttaagaaaacacgcccacagattttttttgacttgaggcagagtcttgggtgaaaatgtttaaatggaaactgtagcgtagtcctattggtctgtaatagagatgtctgtgattgtccagtcattttagagtatggagtctccttttagttcatacaaactcattggagttggaaagttccaccatttcctcattctgctcgtattgacataaactaattctaaattaccaaataaagagaaatggttccatgttttttgtactgccagcattgcatgattgattgagcttcactttgaatgtttattatcaatacttttaatgacag

SEQ ID NO: 93730 - DNA, 937 bp, Eucalyptus grandis
  Intron number 1 from transcript Egrandis_v1_0.020615m (loc us Egrandis_v1_0.013150m.g) derived from phytozome v7.0 (c hr-ID scaffold_8; pos 52696115 to 52697051)
gaccagcagcagcttcaacagttgaaccagcacatggatgcgttcccagatagtggggacttttcggtaccaaattgcgacttcttttattttttggtcgaagattttgggacttaatgtgttacaatttgggtgtgtgctctgttttggcctgtgaactaatctctctttccaggcttggtaatgacctttcggaatgaaactccgcataggaagcttcgtttcattcgttttttttttccatctgttattcttttgttgcggtgagaggaattgttctttacacctgtttttgttctctgggtttgcttgtgcatgcagatttgtgttctaaaagtgaacatacactgtaatggctgtaagcagaaagtgaagaaaatcttgcagaaaattgacggtattactcctttttcagttccagtcctctttattcaatctttttttttcaagcccctctctctctctctctctctctctctctattttagttagattttattattaaaaaaaaaaagtagttccttcccgtcctattttagaaaatctcagttgatgtatacttatcacattcaattaaaaaaaaaatgcttggttgatttttccccttgtttcttttcttttggattggtgtgttacaggggtgtacaccatcaaaatagatgcagaacagggcaaagtgaccgtttccgggaacgtagacccagctccactcatcaagaagctcatgaaatcaggcaaacatgcagagctttggggcgctcagaagtccaacgaccagctcaagaacatgcgaattgataatggcaaaggtggaaacaagggccaaaagggcggtggcggagttgaaggaaacaaccagcctaaggttggtcagaacctcccgaaccagcagcagcttcaacatctgaaccagcagcagcttcagcagctccagcag

SEQ ID NO: 93731 - DNA, 997 bp, Eucalyptus grandis
  Intron number 4 from transcript Egrandis_v1_0.003960m (loc us Egrandis_v1_0.003960m.g) derived from phytozome v7.0 (c hr-ID scaffold_8; pos 58910980 to 58911976 reverse strand)
taccgccgcagaccatctatccgaggcatacgggggtacggccttgcggttacgaatatgtttcaccctgcacctgtttcatttgccattttgctgctgctcatctttattcttctacgcatttctaggaatctattttggtatatatctccagcattaaagttcccctgcacttctaggactctgttttggtacatatctccagcattaaagttcccctgaactgagctgaaattttttgtcgaggaaatgcactgtagtagcatacttttttttttttggtaaggtactgcggtagcatacttttgttgagtcctaaatgaaaaatataagtacgatggaatgtgaaacttctatttgattgtgaccatgtcaaattttctggttgctgctaatgcagctccttccccaagggattgtcagggttaaaggcctaaaaccataaatggccttcttctctctttcctcctagccccttctatactaggtgttgaaatattgtcccacatcactttacaacgggtcctaaatgctctttatattcatgtggtctctctccacctataagttaagcttttgagtgggaatttctaacatggtatcagagctagttatcctttacatgaaagtgtgtggttaaaaagaaaaatttcacgtgaatgtgcgtagtcaaaattccacgtgcatagcttgtaacctgatttgcatgtgaggggatgtgttgaaatattgtcccacatcgcttgacaacgggtcctaaatgttctttatattcatgtggtctctttccacttataagctaaagcttttgggttggaatttctagcgctaggactacactgaggtcaatctctgtcaataaacaatattatagttcttcagtttctattttatccactgtattgtttaccagatcttcttacgttttcaacttcttcattatctgctagccttgctgtactgggattgatgatttctctctacttatggtgacaga

SEQ ID NO: 93732 - DNA, 980 bp, Eucalyptus grandis
  Intron number 1 from transcript Egrandis_v1_0.038301m (loc us Egrandis_v1_0.038301m.g) derived from phytozome v7.0 (c hr-ID scaffold_8; pos 71590807 to 71591786 reverse strand)
cttgccggtggccagaccaacgaccgcaaggtttttcctctcctatgtctgtgaaagtcgaataaagaaatcaagatcatagctagagatagtcagcatagtttcagatgactgtaaagttccaaacttcaagtgggacttggaagtgttacaatttttttggatgtgtgcgttgcggaagttggtattagttatagtttttggttagtgatgtgtgcaagtgtatgaaatagtttgtagaggatagacaagggataaactaggataattaaaggataaagaacatggaatatgggatattttgagaaggtttatgggacaaaaatagtttcattagttggataaaataattttacaataattgaaggaggtgttggtgagggagctacatgatgtggattttatgcttagctcccctcactcttttacatttgttgctctactatgctctcccctctttcctatttatagggtgctctgccaacattctagatttgtgtagaatgttgtccactttggcttaatctagagagttctagattgtagtttatcctctcttcttctagagagatctacacatgtgcttctacaattttctctttcttccaaaaacttcatctagggaattctagaagtttagcaactctaggaaattctagaaaatggatcaccatttccaacaggaagctgatttttgtttgcctttgcgaaaagaacattcatgtgcttcggcacatcctgaggagtttcataattccgaaaaaaagaatgtttgagagatgagagataccgtcggttcgcatcgattgcgtaaagttttcttgctcggctgtctgcgacaggagtcgttgctagtttgatcctgctcttgcctgaatatcttaacgtttaacatggcacaacgactggcaaaggcacatacacacaactccaactcggctcaggaactcatgtttcttactgtaggcgttcgaggcagc

SEQ ID NO: 93733 - DNA, 791 bp, Eucalyptus grandis
  Intron number 1 from transcript Egrandis_v1_0.013501m (loc us Egrandis_v1_0.013501m.g) derived from phytozome v7.0 (c hr-ID scaffold_10; pos 24861616 to 24862406 reverse strand )
tgaacaacacggtcacttcccggttgatttgtctggtaagctcagtctccgtttcgtgtcattttaatcaatgtgaagccagtttaggactgtagatagcccattattcttgctaaaatttctgttttctaaggggtctcctgtttcttgacctgggattagcgtaatccattatgtaagaatatagacaacgagtttcactatagttactcaagcttttcaattggccattgagatctcagaaggcgtggttggtagcttctgcggcatctgaaatttgagattgaatttttagtgtattgacggaaaagatgagcaaccgataaagatggctagcttgaaatgctttcagtcaagttcgggtgaattcgaattgtgtacagtgatgactgcttatgcaaaagatagagcgtgcctgatatgtctgaatcccaggttatcgaagaaatgttatgattaggtgtacaaacacaatgaaatagagagtaaatgcgagaaagagaaatcaaaatataaagtttatcctagtctatcctttaaattagggctacatccactataattaactcatctcatctctctgttacaactctcaattacaagagatatggattatatataggcggcacaagtcagttgatattcacgttatgctaatacttctttatgaaggggagtatgaaccactacccaattagaaaccagtggaagcggccttcgctatatgtgcacgaagatcaggtctgattgatctcctctgctttgtctttgttctgtcacagaaaaagggg

SEQ ID NO: 93734 - DNA, 199 bp, Eucalyptus grandis
  Intron number 2 from transcript Egrandis_v1_0.025549m (loc us Egrandis_v1_0.025549m.g) derived from phytozome v7.0 (c hr-ID scaffold_1; pos 39868243 to 39868441)
aatttggccaaatagtaagttttcaacaaaaaaaagatattaatcataaagccttgtaatactaaattgtcctttataatttcttttgcgtctgacaaagaaacaccaattcattactttgatgtttttatgccaatcttcttgttttgaatgttttgcaacagttaaccccaaaggaagctttccgattgctttccca

SEQ ID NO: 93735 - DNA, 624 bp, Eucalyptus grandis
  Intron number 2 from transcript Egrandis_v1_0.018759m (loc us Egrandis_v1_0.012799m.g) derived from phytozome v7.0 (c hr-ID scaffold_8; pos 20712920 to 20713543)
gtaattgctttttcaggtccgtcttccttgttagaaaaagatcaccgtattgttcatgattttttattgaatttttccaggaattggtttgttttgtaagataacagtattcctctctgttttggaagatttttggtatgctcattgcattaccactctatcgtctgaacacaacacagagtgcgttttatggtacactggttctggaacactatcatcgatgtactagaaattcctcagttggaaaaattattgcatttcgtacaatgtatcattctgcttgagacactgcatctagaaatatttctcgaagaacagctctatttgtcagggaatgtagctcttttaacttagtctcgaagatattagattgactcttccgttatccaactaagtaacttcgtaaatttctatcactattgtatcgctattgtacaacgcctagagaaactaaccacgtgcctcattcctgttttcattccacatatttgaattatccatcgtccaggtaatcttacagccttgtatggagcttttgtttatagaaacgcctttgctatggttggaattttcatagttgtccactcttgttaatcagggcccttgcagatcagttggaaggca

SEQ ID NO: 93736 - DNA, 612 bp, Eucalyptus grandis
  Intron number 1 from transcript Egrandis_v1_0.016482m (loc us Egrandis_v1_0.013991m.g) derived from phytozome v7.0 (c hr-ID scaffold_10; pos 17042566 to 17043177 reverse strand )
gaattctggagttcgctgaggttcgaggattaccggtaggtttttgcccatacctataatcagatcttgagttcgagagtcgtgtttgcgtagctctttatttttgggcttgaatgctgataagagtattcatgaggtctgaattggagatgtccggaggaatagcgtcaactttcatctgaaaagctgttttatttcggttttgtttttgctttgcacattgtctgcaacggtgtccgatggatgttactggcattatggatgttgtctgcaacggtgtctgattgctgttaccggcattatggatgttctatgttgtgtcaaggtgagatttttaatctcgcgatttagttacatgtacagcggtccctgcggactcggcattactgggagttgcttcatgggttggttttgagtcttcatctgctaaagctcgtttgctttgttcagaacctcgagtcctgtatctctaatttccactttttatgccataagttgacgtgcttatcggttgaaacttcaagtttgtctgtattcagttctcctacttcagtttgtcctgaaccaaactgttttgacaacttcatttgtcttaaatttcaggtcccctcc

SEQ ID NO: 93737 - DNA, 273 bp, Eucalyptus grandis
  Intron number 1 from transcript Egrandis_v1_0.010464m (loc us Egrandis_v1_0.010464m.g) derived from phytozome v7.0 (c hr-ID scaffold_8; pos 72861876 to 72862148)
acgctctgacgacgaaggcagccgcaaaagaaccggtaatcaaccttatcttcttatactatattgtctagttctttgatacttgtttacttcaagtttgttacatcagccttacaaaatatacattttttgtactatgagtaagagtttgatatgttttaattcaagtgtaattccttcattaattattggataactaacttaagagacaatcgaagttttccaattgtaaagagttaatcagactttatcggttgaccgatcagggaacgt

SEQ ID NO: 93738 - DNA, 943 bp, Eucalyptus grandis
  Intron number 1 from transcript Egrandis_v1_0.020979m (loc us Egrandis_v1_0.020979m.g) derived from phytozome v7.0 (c hr-ID scaffold_10; pos 2026989 to 2027931 reverse strand)
gctccttgatcgtttcgatcggtgacattgctcaggtgagtcctgattaccgctttcattttcataatctatttaattcgatcatccagccaattttgggctagggtggattcaataaaaccaatggttcattcacgggaaaaatgcaaaaaccctttttcaattttggcccacatgtcatatttatgatggatttcatctcgtataggctctgctacaactcgagctcatatcgaaacttataaggtccaaaataatggataaatttaggcaggttagatgatgtatacatcttggtttttgttcaaatatagcctgctatagtgataagaagggaagacaagcttcaatattaaatgataggtagaggccgtttgtcaagatggtgggtttagtgaataagaaatgagaccccacgggggagaggaattcctgcttgatggacgctggaatttgaaattcttggcaatccgctgattagaacttgtcaatttttggacaagcattagtacaaccttaaataattggagcttagtgcatcggctggttggagcgatttcattcgtccgaatagagagaagaatcacgaccatataaatgcccattcgggacgtcattttttttttttcatatttaattcattttcttggccaaaagatctttccaacattaattaagctggcaagtaatcattttctaacgaagtcatactcttcatggcaccaataattatcgtgatttcaacatctcaaaaggtaaagtacgatattagtttttggacaacactatgtgatgttattagttagttttcgtgcatccgatcaattagtctttatcgggatgcgggtaatccctctcgatgacatgaatatgatatgaaatcacggcttgatcagacaagttttcaccatacgcaagtacatcaaatggcaggtgtggagca

SEQ ID NO: 93739 - DNA, 890 bp, Eucalyptus grandis
  Intron number 1 from transcript Egrandis_v1_0.026913m (loc us Egrandis_v1_0.024746m.g) derived from phytozome v7.0 (c hr-ID scaffold_8; pos 10147317 to 10148206 reverse strand)
gcccccgccaagatcttctggcgcaccgtccgcgggtactccctacgccgtcgtttttcgtcattgccttcccttattgagttttcagtttttccgcctgtcgatcggcgcgcgaggatgaccgaaatgatcgtttgttgccttgaactgacgttcccgagctggagttgcgaacggcgggagatgatgatgttgcgatagctagttgattcttttagcttccgcgagttttgtgtgtagtggtggatgaagttcttgcttaggttgctcgaactactgaggctggagtctggagctggaactaagagttgcagaatgatggttacttcgtaggcggtagattcttaggttttttttggggatttggaatgatgtagtgaatgctggacctgcgcgtttgtttcggattgagattttgagtttttgttggtccgtgtgattttgagtcttctggcgcaccgtcagcgggtacgtcgttgttttctgcctgtttgtttgattcttcgagctctcgtttcgactattgatcggcgcgaggacgcttgagatggttgtttattggctggattgcgatttcgatgtgttggtggggattgtgaatggcgggaaatgatgtttcgatagctagttgcttcttttggcttccttgagttttgtgtatagtggcggatgcatcaatgcgatgatgagttcttgcttaggttgctcgagctactgatgctggactctagagctggacaatggttgcagaataatagttatttcataggtgatggattcttagggtttttttttttctcggaatttggaataatgtggtgaatgctggacctgcaagcttgctttggattgagattttgagtctttgttggttcgtgtgaatttgcaga

SEQ ID NO: 93740 - DNA, 655 bp, Eucalyptus grandis
  Intron number 2 from transcript Egrandis_v1_0.045993m (loc us Egrandis_v1_0.045993m.g) derived from phytozome v7.0 (c hr-ID scaffold_1; pos 15395945 to 15396599 reverse strand)
gtgtggttttggctcttcattaacgcattaaccgggtgagatggctcctctctcttttcttgaatttctttgtctttttccacttcaatgcatcttcttgttttttcaggaagatatttattttatgcaatcgactaagatcaaaatgcatcgtatgcttactgtttatttatttatttatttttgataactttgagtgattgatgtcccgtttagttttgaaactctgattcttgaggactgtaatctgaaacggcttggaaatctgttcttctgcattgcaatgggcatcgagttttatggcaaaaatatgtatattatatacaacattgatagatgatacagtagattacgtaaaacgtgaatcatttaacgattttcatctttatagcttttcatattcccagagcaagttctagtcaagtcctcgtgattattcaagatcaatcaaatttgaaaagttagaaccatggtgaccttggactaatttttcccgattttatcactagtaagacataaactgaatctacaaaaagaaatatataatatgaaaaagactttgctttttctttatcactttgtaaagagtgttagggaaaaaaaaaggtttttctaattgttatatcattcctaatgttgcagagtatcattgtct

SEQ ID NO: 93741 - DNA, 278 bp, Eucalyptus grandis
  Intron number 2 from transcript Egrandis_v1_0.022365m (loc us Egrandis_v1_0.022365m.g) derived from phytozome v7.0 (c hr-ID scaffold_10; pos 35809694 to 35809971)
tcagatcgtggggtgctggtacggcatcccgccttcccttttaagcgtcttctttgatatgagcacgtttctcttctttggttttccttggcatgattgcaattatcgatgaattaaagagtttcctaacaaagtcaatttggtgcattccttcgttgtatggtgccacttctgcttttgctgttatgttttgtgtattttgatccaacataatctaactgtctcggtttgtggtgccttcaggtggaggaccatacgggaggaaatttaaccctggg

SEQ ID NO: 93742 - DNA, 829 bp, Eucalyptus grandis
  Intron number 2 from transcript Egrandis_v1_0.005389m (loc us Egrandis_v1_0.005389m.g) derived from phytozome v7.0 (c hr-ID scaffold_8; pos 37509774 to 37510602)
taaatacaataacctcagtaaatataaataccccggtaagttgactttctctgaagcttttcttcctttactctcttactatctttcttcttcttctttatcctcatcctttttctcaagtgttagctctactgagggatcttatcaaaatttacttactgagtgatgtggcatgtttcaattggatattgtaatacgttggttcgatttatttagtcattaatttctttaatacccaataaaaaaagttggtgatttttttaaacaaaacaaaattcgaggcaaatctaggactgcacctaaagtttggcgtttcttcttaaacaaaaaaagtttgggccaaaattggactagaacttgaggattttttttagggaattaggccttttttggggaaaattatttgatttgatcatagcttgtgtcccttgaatcgatgttattgttatggggaacttatgaacatttggtacatttaggagaacaaaagcgcaaacgtgtttcttcaaaagaaaagatcatgcaacgataacatggatttcatgagtgaatagaataaagttggatctaagtgttatctagaaaagtgaaactcattctctctttttttcattctagacatctccacttgcaaatttcaattaacaaaagtgtgtctttgcactttgcagtgactatatgaagttatccttcacttggggtatattgtaatgtgaattgcttttataatttaactactaaaacaatggatctagttctttattgattggtcgttaattctaattaaccaaatttagtaatctctcacgaattctcttacaatccacag

SEQ ID NO: 93743 - DNA, 677 bp, Eucalyptus grandis
  Intron number 1 from transcript Egrandis_v1_0.013749m (loc us Egrandis_v1_0.013749m.g) derived from phytozome v7.0 (c hr-ID scaffold_1; pos 15112924 to 15113600 reverse strand)
tctctctgcactgcgtcttcctctcggcaagcaaggtacgccccctttctctcccttcccctcctcctccgcccctcctccaatgtcgcagatcggcttgttcttgtttccccacgttcctcgagcctctgcacgagctcgttgtgggcgtgtgctgcctgattgcgccgttttccgcttggtttgggcttgatttcgttgtggtagcttcgttttcagatcagggagagttaagggaaaaaagacaagtgtgtgtctgacatttctggtctaatgatgttttgggactcgcccttttctgggttttttgtaagctcggttgctgtgctctgtttgccgcatgatgctgaatttttttgtgggtcgatgatattttcaagttgtgattttgacctagttgtcaaccttgacatggattgcaaatctagaagcttgtttacataatagggctgcgtagactttttgagagaactgtgcttaatgaggaccaatttggaaactttatgcaaacaacatgatacaggccaactcattcacagtcattgtgtttttcttacttgtggtgatgatgatgatgatgatgcaagaacatattgatacgttagttaaattggtgtcttttctttttttcttctttttgaatttaagctgtctgaagtactccactggaagtagct

SEQ ID NO: 93744 - DNA, 374 bp, Eucalyptus grandis
  Intron number 4 from transcript Egrandis_v1_0.026977m (loc us Egrandis_v1_0.026529m.g) derived from phytozome v7.0 (c hr-ID scaffold_1; pos 22977006 to 22977379)
ggaacagaaataagaggaatctcttcgctgacagggtctgtgtgctgtctcattttttttctttatgattcttcaaacttaagtttgtatgttgttgacaacgaaaatgatgtatcccctgaaatgagtacaaaagaaatgaatagatggctaatggtatactattaatatctcatttgctgcatttgaattgagtgctagattttagaggaagtgtagtttgacgtggctgcagttttaacttggtcttggcttcctgcgtttgatttgttagacgtggggttatgtacgtgacacacgtgttctatctctatctaaagacattcatattgatgatattttccagatttttgatctatttgatgtgaagcgaa

SEQ ID NO: 93745 - DNA, 515 bp, Eucalyptus grandis
  Intron number 2 from transcript Egrandis_v1_0.015558m (loc us Egrandis_v1_0.015558m.g) derived from phytozome v7.0 (c hr-ID scaffold_8; pos 14803318 to 14803832 reverse strand)
ctactccacatatcaactggtttgtgattgtcgattggggtccttcttgatactgcaactcagctctatacgcacgtcattgagaacaccaaatcaaattatcatcatcatcagcagcagcagcatcattatcattttgctttagtgtacatcaaattaaagaaaattccattaacgaagctcgatggataaatattacatacaatcgccaatgggaggaaacccttaatcactatttctggttgtcgtcaattatagtccatgtttatccaggaaagcgggatatgtataaccgaaacaccatgattcgttatctttcttccggttttgtttttatacactgagggtgcaaaagaaacccttatacatgataagctcaaatgcttacacgtattcccttttcatattttagctactaagtttattccattagcaggtaacagatttgttttttttttttcccaaaagtactttacactgacagtgtatcttatataattgtttattttcagcat

SEQ ID NO: 93746 - DNA, 709 bp, Eucalyptus grandis
  Intron number 1 from transcript Egrandis_v1_0.011290m (loc us Egrandis_v1_0.009974m.g) derived from phytozome v7.0 (c hr-ID scaffold_10; pos 12697642 to 12698350 reverse strand )
gctcagggacaacatcaagaccttcaatctagcaggtactggggatagtttgactccaaaaacacaatagataggaaacgcctaatgactctaaactcaaaaatgaaaaggacccgattcaatttggttgaatctagtttaacggattttgtgcccaaacgaaggcatgtttatatgtctaaatctcccatcatttatctttgcaattttcatatgcctgatgtgaacagttaagggtccctttttagctactgtttatgcaaaaacaccgttccctcatttggacatgcttcgttgagaagaacaatatacgtagttaacacaattgttaaatcaagttccaatattattggtttgttgggataattgattagagttttcttactttatgattagagcccaagtcgaggcccgaacataatttgagttaattttgttcaagtagatctatctgatttgagattgtttatttctcgccatacaatccatgagtttagtggatttataaatagatagatacttaaataaattggcaaaaataaatttgaaagacaaaagaagtagacataattttacaaagtctagtttagataaataaaaaatcaattttattatccaatgggattttgattctttaacgatgttcttgtttatgattcaatgtttcttttccctctccttccaaatgcctaaacggactcgcgcaggc

SEQ ID NO: 93747 - DNA, 747 bp, Eucalyptus grandis
  Intron number 1 from transcript Egrandis_v1_0.013456m (loc us Egrandis_v1_0.013447m.g) derived from phytozome v7.0 (c hr-ID scaffold_8; pos 8775842 to 8776588)
cgtgcgggacttcttcatttgggaagtggaaaagggtaaggtgtaaatgattgtgatttggtcctccgattcgcgaaaacttgcgttgctttgttctcgtttgagatactattgaatttctccaggaacgccgaaaaaggaaggttttttcgagctgctaattcgaatgcagattctgaaattttgctttgcaatgttgtcaggagctgatcaaatatgtgtcgctttgctttcccgctaactttaggatatgagtgacttgggttctgtttaactggcgaatctggagtgattagctgaatttcgggggggctctttttcttgaatttgcattgttgggtaccgtccaattcttctcattgatcgagtttgagcaaagtcgagaaaagggcaatggtgctttgattgtttcttgcttgtttggatggggcatgattggagatgctttactcgcaagtgttgttgtgattgggtttgggttgccttctgtttcttttcttttaagacatcgtcaagaatgctgactcttcttggacttgacttctttggctttcacattttgctcgtgacgaaactttaatggctgaggaatgggcggcttgtggtgaatttggtcatgcttttggttcaagttgggagtcacgtataactgtcatacttcatgcctttcttgtgatcttttaccactgtacgagctctttttgtttcctttttcaggtttttagctatatttgaggagcgaattta

SEQ ID NO: 93748 - DNA, 723 bp, Eucalyptus grandis
  Intron number 2 from transcript Egrandis_v1_0.010242m (loc us Egrandis_v1_0.010242m.g) derived from phytozome v7.0 (c hr-ID scaffold_1; pos 17098929 to 17099651 reverse strand)
gccgagccgaaaatcaaatacgatcgccagctccggtactccgcttgcagcttcctgtctatcgagtgcttttgttgtagctcgatgtttcctggattattcccgtcctgactcgataaaaattagaatatggcagatttgatttagcgagagtggaagagaactttcgcagacctaattttgttttgacgagagtccgaggttgcacttggcaacgcgttgagtggaaagttctgtgtgtttgaagtttttagctacgcttctgatattggcaattcatccattcgattgcacctagggccttagatacggagaaattcacattttatcgattacttcattttgttggaattgcattacagtttgcctgagagtgctgaagtgttcattgaaagaggagtttagttttttcggtattgatcgacttaatgcaacatggttcgcttaaagaggtggaggtcaacttgatagagaaacctttgccatttctttgttaaatgtcgatggtctttaacttgcatgtagatcctttggtcactgtaaagtactctgtcgtgtttccacatgtttttatgtgaatatattgatacctcaggatctggggtgagcaaggtcaggctgctctcgagaaagccagtatatgtttgcttaattgtggtcctactggctctgagacgttaaaaaatcttgttcttggaggggtcgggagcatcactgtggttg

SEQ ID NO: 93749 - DNA, 239 bp, Eucalyptus grandis
  Intron number 1 from transcript Egrandis_v1_0.017831m (loc us Egrandis_v1_0.017387m.g) derived from phytozome v7.0 (c hr-ID scaffold_8; pos 62799255 to 62799493 reverse strand)
ttccgcgagtgaaagtcggagctcagggtcttgaggtttgtattgaaaactactttttagttcgttaagtttaatggtgttcatacatggtcaaaactttatcatgtcgtttcattgttcgtggttgattaaattcttgtggattaatttaagctgcttcttgccaagatgtttgagttgtggtttcttcttctattgtttttgaataattgcaggtttcaaagttgggttttggctgc

SEQ ID NO: 93750 - DNA, 917 bp, Eucalyptus grandis
  Intron number 3 from transcript Egrandis_v1_0.028496m (loc us Egrandis_v1_0.028496m.g) derived from phytozome v7.0 (c hr-ID scaffold_8; pos 28081127 to 28082043)
aactggtacagataactttaagcatgtagaatttgccatgatttgggttctatgacaatggtgtacaacggattgtgtggtctttccactttcaagaaacaagactgttttatgttacttacttactaggttggacatagatagtcctatttgggcatgcttttatcagcagtacgagatatttgatggcctaaagggctatcatatatggtgtaacctttggaccttctaaaatcaaccaatcgactgcatacaggagttccacagttatgtcctttctgtagttaaatttggaatccttggaatttcttaatagatggatatgcttgttcttgctatcgtatggttagtgcattcacatattttctctggaggagatccaataatgctaaattggatgatttgtctagaggataatgatgtcacccatgtcagtttgaagtttgaacatacagcaattctaaatgtgtcatttattttttcttattttaggaaaaatactaagtttagccactgcaattctccttttgatttatttatgcatgttgattcgaaaggcaaacctggacggtggacttaccaagaatatgatcttccagtgcatatggcagtgcttggttgttataaggctgttggacgattatttgtttatttatttaagttcatagagtactattgggaatcaagaattctcggagctgttttcccatcacaaacatgctctccttttattgaaaaattggtggccctctttacttcagctgtaatgtagtttatgtagatacttttcttaacagcctctggtgtgacttccagaaggagcgcccatgtgtgcacagagacatgcgtttgacattcttacatctgtttttgttgctacagtgtgaccagaaactactttgacaacctcgtgagag

SEQ ID NO: 93751 - DNA, 715 bp, Eucalyptus grandis
  Intron number 1 from transcript Egrandis_v1_0.053450m (loc us Egrandis_v1_0.053450m.g) derived from phytozome v7.0 (c hr-ID scaffold_10; pos 30788920 to 30789634)
cacaggtacatattcctgattatcgtgttctctctttaaaattgtgatttcgttaattaacattcttgaatacaattacagttaaacttaaatgctcctctggaacagcgttaaacttaacattcaggttgaagtagctattaaacagatattcatctaagtcaaagccatgagttggctcacagagatgtgattacaaaagtaaattatctccatattctcctcttcttcaatataagcaaatgttattaaaattgaagacaaagcaacaatctctctaacatggtgcaatagttttcttgcacatctgtgatccttctatgccaatccctcagtagttttttcggttaatatcagtctccagtgatgagaatcaaacctcaaactcacaagaggccttaatgaagttttcaaagtgctcatagaagttccctataggataatgtgaagcagagattatgcaacatcctgatgaatttggtttttgataaacaagccaaggccacaaacaaacttttactgcaaagcactgagctttaattccacaaggtcaatattttattaaatggccaagagaaaaaacactattgtgctagcgagaagactcttacttgtgtaaatcatcatcttcattgagcactcacattgagattgtacctctcctttaacactatgtttccccctagtaaattgaagtttttgtttcttctctaga

SEQ ID NO: 93752 - DNA, 718 bp, Eucalyptus grandis
  Intron number 2 from transcript Egrandis_v1_0.004119m (loc us Egrandis_v1_0.004119m.g) derived from phytozome v7.0 (c hr-ID scaffold_10; pos 8653335 to 8654052)
ataacccacaaaagcgggtcttcttcaccgataaggttagatcatacccatagctaatagttttctatctagggttattttctcatttatcatgaggctattacatataagaaaagatcaagaccattatttaggattatcacttgaatagatagtatacatatgcgaaacttgaaaattggttttttttttcccaagactgctaaatacttaaggaggagaggattgtcataaaacgagagtattcgtgcagaaagcgggtgaatcaattagcttacgtgtcatgaaatgaaactttaatcacatttgattagctataatcgccaacggtactaaacggtagtagcaaagttatctcaagacatggacagcgtcctcttgaagggactttacttcaagaactggtgaaactaacgtaccatgcacgtgaacgaacagcccccacattcatgtaaatctttttactctctctccccctcgcggtccccttttgacccacccaatattattagggcacggagggcaaaatgaagctggtgtcacttctttgagtggagagaccataaagtgcaacgcccaacagcaactagggaaattaacgtacgatgcacgtgaatgaaaagcgtccacattcatttaagtccttttaagtctcttcatgcccacagcgtccttttaaaaaagcaaattgaagacagcttgtgtgacagcctgacag

SEQ ID NO: 93753 - DNA, 536 bp, Eucalyptus grandis
  Intron number 1 from transcript Egrandis_v1_0.022147m (loc us Egrandis_v1_0.022147m.g) derived from phytozome v7.0 (c hr-ID scaffold_10; pos 25563057 to 25563592)
aagaggagggcgaggagggttagtcttctttgcctttttgcttaggttctgtacagacacttgactcttttgattttggtgggattctttgattgaaattatggaattttttatggcgtttcgtttcatatgcttttggttaaggactgatgagggtgttaagttttgctttgggaattctgttcatttgcatcacggagatcttacatctgtgtactgagttaagcacaccatgttccatgtctagcatttaagcttttcttgcctggacttttggtcgttgcccttgtagtgtcatcgtatatcgctatttcatgcttttgtcagggatgtcaaggtgatcaacaatgaaattctagtccttgtagttttgggtaatcgtatgcagactcggaatgtaagtaactgtggacagtcgttgtttgcaaagacggtgaaaaggaatgtataaatccacttctgttgttctgtgtaattgggttttttcgttcattaatcttactggttacccactgctgatgcaggaggcgagtctg

SEQ ID NO: 93754 - DNA, 585 bp, Eucalyptus grandis
  Intron number 1 from transcript Egrandis_v1_0.024346m (loc us Egrandis_v1_0.023945m.g) derived from phytozome v7.0 (c hr-ID scaffold_10; pos 175338 to 175922 reverse strand)
cgtgagtctgctactgtttctgcttctccggtgccttttccggttcccatcgatgtgcatttggattgtctgatttcggctttgatttgatctctgctttgattgctccgggggaaggttggaatcgggtttatctgttttgaagctcgtttcgtttggaaaaacgatgggatcgtgggatcgaatcgatctgtcttttggatcgcgctagcgtttcttcgatcgcggacggcgcatcggttttgtcgcaccgattgatcgttttttttttttttttttgcttttatctccgattgtcggtggagtgggatgattaggtagctggtggtggtcatggtatgaattagtttggaaagatttaatggctgacgaaattttgttcatgcctggggaaatgatattgctcgtatacgtgcactgctttctcttcatatgccgtttgagccgttctgcttgcgatgctgaatgtgttgataagcatggtgatgcttagcttgcttttgagactgtctgttttgatttttttcttttttttttgggtacactttctgagtctatcgtgtttgtacataaaaatgatgcaga

SEQ ID NO: 93755 - DNA, 923 bp, Eucalyptus grandis
  Intron number 1 from transcript Egrandis_v1_0.010886m (loc us Egrandis_v1_0.010726m.g) derived from phytozome v7.0 (c hr-ID scaffold_10; pos 29904470 to 29905392 reverse strand )
ggttcaaccaaaccctcgatcacttctctccatatgtactctctctctctctctctctctctctctgggtggacgatcttggtttttggtttcgctcgattccatgtggattggcgcgtaattggtcgcttgatgtttggtggttggtgtcctcggggatgagttgcttgagatgcaaaccccaacagttttttccctattcctgcttcccttttgaaggttaatccgattgaatttgaactgattgagtttggaggacgcgatcgatttgcttgtgaatttgggtaacgattgattggatactttgaattaaaaaaaatttggcctcgcaaaattgtgcatattgtttaattacatccgccaattaatttattactgaattttattggcaacccacttattataaactcgaactatatattttctctgtctaaatacatgcgagaattcgaagattccattacttgaaacgagtgatgacaccatattgttagtggaaaaataagtacagaaggccaatagttgacaaaatatctaaactagtgctcttgaccctgttttgcaccggtttgatgtttaagtattgttaatatttgttaattgctaaaactcatattacaattttacagattctactattgtgattacgataacggattctacattgtgtttctggacatacaccgaagttgttccgcccttttttatcttttagtcttcgaactttgaagttgaagttgaagttgttatgtcatggttatgattgtggattctcgtgaagtgactcaacatgtaatgtagggttgggcgcactataactgattttttcatagcaatcctcagaaaagggcatcatgctattgctaactcttggatattggattttcattctcaggatcatcgtcaatttgcgcagcgctact

SEQ ID NO: 93756 - DNA, 891 bp, Eucalyptus grandis
  Intron number 1 from transcript Egrandis_v1_0.000775m (loc us Egrandis_v1_0.000775m.g) derived from phytozome v7.0 (c hr-ID scaffold_10; pos 12965782 to 12966672 reverse strand )
gagcgtaatccgccagattcacgcgctgtcaagtaagtgcttgaatgtaatggcacgggtggtccgggctgtggtggatggccacggggagacgagagtcgtagtcttggtcgatgtttacctaccactggcagttctgtccggatggcagttcccacgttcgagatccatagcgggtgctcttttccgacatttgaggtttctacctggattactttatgtttcttagagaactcataggtgcctcggaaacgagtagactcagtcaagagaaaagctgctaaagctgttagtttctttttttggcattgcattttgattcattcatgcatacgcttgtctatcttttaatcaataatttagcatctcgttagcaaaaattaaagatgcctttgtgcaggtgtgactggggagagaggagtaccttgctttgtaatggagattactctgacggggcctgttcgcacgacaagagcatctggaatctccccgattgtcatgttcttggatgcaacctgcatactcttatccctgaatcttcaaagaaaaggctatttgatcttcatgaaattttcaagagtttgcctagtctggccaaaagaggaggtcttgattcttcaaggatacaaccagaaaattcttctcttggatctggtatttgggaattgcctgatgacgttattgttggtatattgacagtattagccccgttagaccttattagggccgctgcaacttgccgacatttgaggtccttggccatgtctatcatgccatgtgcaaaacttaaactctttccccatcagcaggctgcagttgagtggatgttacagcgtgaacggaatgcagagtccctgccgcatcctctgtacaaagaattttcaacagaag

SEQ ID NO: 93757 - DNA, 411 bp, Eucalyptus grandis
  Intron number 1 from transcript Egrandis_v1_0.054170m (loc us Egrandis_v1_0.054170m.g) derived from phytozome v7.0 (c hr-ID scaffold_545; pos 1195 to 1605)
ggtataggggtaacccctatcttactgaaggatgccaaggtaacaaacttcatgctaacccattccgtttttaagggcactaaacggacaagtggcttgttcgttcccacaattttctctgaaaagaacgcattgaaactgtttgatgatcacgtatatgcttatctgccttctttttcttgttttgctgctcaatattacacaaagtgaatttcaaacaaaattgcatgaattataatgataataatttactggaaacaaaggggagagtccgttcgttacaagcataatatttcggctatggagtaaacaattcaagaggaaataagacctactaatctctctaattttactcaaggacatgggtttcgctgctaatatgtttgttttatcacctgtcatcagatatta

SEQ ID NO: 93758 - DNA, 824 bp, Eucalyptus grandis
  Intron number 3 from transcript Egrandis_v1_0.021199m (loc us Egrandis_v1_0.021199m.g) derived from phytozome v7.0 (c hr-ID scaffold_10; pos 38105662 to 38106485 reverse strand )
tggtcgtcactgcagtggctaccgacactagagctgtaagggactcttcatgtttgaattactctcttttgttttgtccgaaaacagccctcacaaaaaagccatcccaactccgaaagaacaagtaatcggactcattgccatcactttgtccagtcagtccttatttcggttcgaagtgaaggattctgtgaagatgaccatcttactgcactgcacattatctttacattcatgaatagctccctcatggcacaaaagtgactatagcatcatttatggggatggatattatttccttataggtgtgcagatccgtgattagagatacaacgtgcattgtcctcgatgcaattatcttcttagtttaatccgaggaaaaggagacatcttctgtgtttccatttttaatttcctcgaaatccaccgacaatggtcagatgcaaggtgccactttggcaaggtaataccgcaaagaaattaaaaatcaaaccagtgcagagattgacctctcgggctctcacgtgcccatggtaaagaaatcaggtatctaaacaaaaggcttgctctttcctccctctacaaacgaggtcattgaacagtaatagatgcagccatgcatgatcacttgcactttcaatattcctcatctcaagttctcttgtctgctgcttgcttcgcaagtaaaacaaacacatgcacatatgaacaagatgaaatggaatgaaagttccatttacctacccattggcatgcttaatcgattttcaattgaaaatgtacacacaggttggagagttggcgggaatcgcagtgggagctac

SEQ ID NO: 93759 - DNA, 661 bp, Eucalyptus grandis
  Intron number 1 from transcript Egrandis_v1_0.008907m (loc us Egrandis_v1_0.008907m.g) derived from phytozome v7.0 (c hr-ID scaffold_1; pos 34537916 to 34538576 reverse strand)
ctgcagtgatcaagactatcgtcgaagttattcaggtttgtgtctttcttgtgttttatcaatggattttgggctacttctttgttctttagattgatggttagatctgatctgtgggtttctgtctgcctttttagattgtgaattcaaattatcacgtcttgtgtgtgattgttattacttgatctagcgggtagatgaaatcctgcttcaggcctgttgaatgatcgcctcactaggtgggttaggtggcacttggcaggctactaggtggacacatgtatcaaattcgttcgattaaatcagagtgtgactagaggaaagactgtaagctagttatttaaacggattgacaaattatggtgctaataagttcttgaaatctggaaatttggagaagtgttattgaacttcttcctgttgggagtgtcaaagatgttcaggaaaagcgtttgaattcgatcaggcgataccccccaactatttttttgctttttttaatgatttaaagactatgtgctaatgttatgatgccatttcctatgtatcttgacattcccagttggcgtactactagattactattaatttcactataggagaagagaaagagtgacccagcattcattattgtttgtgacgctgcaggtttgccacaagc

SEQ ID NO: 93760 - DNA, 627 bp, Eucalyptus grandis
  Intron number 2 from transcript Egrandis_v1_0.046241m (loc us Egrandis_v1_0.046241m.g) derived from phytozome v7.0 (c hr-ID scaffold_10; pos 27241652 to 27242278 reverse strand )
attactcgtggaacttgggtaaattttttctcgctcactgtgatcatctgtctatgagcaagtgcaattgacttggctggcttcctagtttcttgttttgatgttaagtgagtgatgatcagaatcaaacatgctatacgtcgagtaactcatcggtgtcggattctcatactccaacacgagctcagactacatgaattggaatgttacccggaacagtacgcctttatgcatcttttcccaatgattttcaatttaattatgatcctcccttcctttttggctgtgacgcgacacttcacagatggactggcccattcgcagcggaagacaacttgaggtttctcataaaccggcttgaggaattcccgatgtttaaggactctcagtttttttaactggtgaaaaagctatgcaggtgatgacagttcaaaatcgatccttgctttcatcttgtccacaacaatcgacctcatttttccttgatgataagctaaactagattatttaatgacatttcgcttgtcgacaagaagttaagagtattcttcttaacaattataccattaacaattataccatctttttgtaggtcactatatacctcaatttgcaaaactgttgatc

SEQ ID NO: 93761 - DNA, 945 bp, Eucalyptus grandis
  Intron number 4 from transcript Egrandis_v1_0.028192m (loc us Egrandis_v1_0.028192m.g) derived from phytozome v7.0 (c hr-ID scaffold_8; pos 44135534 to 44136478 reverse strand)
gcttggtggtcgaaggtatgctcatatatcagatatttttttgttaatcttgatgttgtcgatgcatccctagttgcttcaagtattgtttcttcacaatttattgtaactttcacaatccatgctctcaatcatggctttggctatttttaaagctgcaatatgttgaaaaaggtatctgtgcctactgattagggatccaccatccctgagtgtactaccgtattcaagcatccagtccccttggagttgagagtttcttctattttcttatgcatttgttttcctgcaattttattgttgagaagtaataaaggtcgacatttcattctaagtacattcaggcagtgtttgcagctacataaaattagaaaatgaagcatttatagataagctccatggaggatgctatgatcatacaaagtcgccccaaagggatatactaccttgttcattttgaatgcatgtggtgatttgctctgccacagaccagatgatatattattctctaatttaggtgtgcgtgctgactcagctaagctactttgaatgatttatctaaagattaatctgcttttagagttgatattgtaagtggtggagctatcaacatatggaaataagaatttgaattcttataatcaacgtctttgtttttgttatgagattactgtttatcttttgggggaactttacttagtagtagttcttcatttggcatgtcagtttctctttgtgaagtgctcccttgttgcaagtcttgtgtgttgctctttagtcatgaatctctggaaacaattagcttgacaaaggatatcaaaattgcccaaagttatctgattttcactttccctttccattacatagtttctgtatttgagtaccctgtctgtgctgcatacccgaaattttgttaagcatatactttgtgaacgcaggaagacc

SEQ ID NO: 93762 - DNA, 395 bp, Eucalyptus grandis
  Intron number 1 from transcript Egrandis_v1_0.051189m (loc us Egrandis_v1_0.051189m.g) derived from phytozome v7.0 (c hr-ID scaffold_10; pos 4042929 to 4043323)
gaggaagtaagtgcagtgggtgtcatattctttcaatattttaagagcataaaccgtggaatatttgaattttttaccggtttctgccccccttttcattcgaatatgaaagagttcaatctcattccgaacttatcgttgtgtgtgtacgggagaaagaaaaaataaagaagataccaccgaaacatgtgtgtatgtatgtgagaattttgacaggttttgatacctgttctaagttgcgtatgtgaaaaatcaatggtaattcagaataagctgtcactaccctatactttcaacgaaaataataattctttttttacacgaaaacgatatatctccttgttattttaagttattaaattctaatagctagtgcgaatttcagtgcttgcttc

SEQ ID NO: 93763 - DNA, 693 bp, Eucalyptus grandis
  Intron number 2 from transcript Egrandis_v1_0.009053m (loc us Egrandis_v1_0.008504m.g) derived from phytozome v7.0 (c hr-ID scaffold_8; pos 735078 to 735770 reverse strand)
gaagaggtaaccctttgatatgcagcgttctgtgaatttgtttgttattcatcggatcagtccatgtatctagttcagtttagttgttgtatctaacataattgttttgagctactcctttctttgttggtaatgttgggaatcagtctacctaggtggcatgagtgtccatttaatcttttatcagatatttctgctgtctaaatctgaactgattcgtggaaaatgaatgtgggaaatattctcctaaaaatgattgcttgtctcactttcaaaaatgaataaaggaaaaatatttcatcgtccatgaaagtgtttaacatgatttgttgtcgataatgaaaatatttttaattaactaattatttcaagcgatataagcgatgatttttaggaaaacggtttccaaatcattcatttttcgcgaaacaaacgaagcctaataaagggtgcttatacttggcattgcaatagaatatagtaatagttggtaagggaactgcagttccttctcagcttttttaactggctttgaacttgtcgtgaggcgttgtcatttgttattagttgcctcattagccttgagcattctaatgctgagagtctctctcacaatgatgctttctttgcagtaagtttgtctctttaaatgctgtaggttgaaggccaaactgaggaggtgatatttgatca

SEQ ID NO: 93764 - DNA, 975 bp, Eucalyptus grandis
  Intron number 1 from transcript Egrandis_v1_0.009349m (loc us Egrandis_v1_0.009349m.g) derived from phytozome v7.0 (c hr-ID scaffold_8; pos 69349592 to 69350566 reverse strand)
tcatcaagccacacgtcatcaaaaatatcgtcgtaaggcctaatttcattaataatttcactaagtatctactttgcttatatcttacttacaacggctttcattctgcctgagcttttatatatgcatgggctatgtctacacccatagattttctactctatgtgaagggatggaagaggctactagctctagttagtagtccttttaagcatgttaacataaggatttcatactcgctacaaaatatttagtttgagtcatttaattacctatttaaattagcaaaaaaggagctcttattaatcagtatacagttggcctccaagaatttcaacggcaaaatggatcgtctaaagtgcattcatgatagaaaagatgatgatcagatccatgaaaccctaatattctcaagatgtatcccaggaatttatcacatggtggatgaaagagatctccccttgttaattttttttactattcccaggtcaagagtttgcattgaagtttccgcgagattcgaagtgatcccatatatagtttttctcagaaaaatataatattttgtgtatacacacacacactgattcaaatctccaaagaaccttcgagtccaagtttgaccatctcgatgaggcgacactaccatacatgtctgttgcgacatcttgatcaaatgcaaccacatatagatacggccgaggattcgtcattctaaacacactatcatcttatttaaatgtccaatatcatgtgaaatgtaaacctatatttcagttaacaccaattgtgtcttgtcgtatcattcggtataaactgatttttatgtgatattgctacgttacaggcttaatatcatgtggcacttttatctttcacgtactttttaaggacatccttctgaaatataaaatcaatccgttctttgttttttgtgtaggaattattttgtgctggttcagacacatcctcgac

SEQ ID NO: 93765 - DNA, 651 bp, Eucalyptus grandis
  Intron number 2 from transcript Egrandis_v1_0.018015m (loc us Egrandis_v1_0.018015m.g) derived from phytozome v7.0 (c hr-ID scaffold_8; pos 6284036 to 6284686)
accgtatcgacactcgcgtccccattgaagtcactgtatggatcccttatcaaactttcacctcgcttgagactttctctgagccatatgatgcatcgtcatgttgttacaagtttgttgaattttgttaaatgacacttaagttcagctgatagcagagttcaagatgcggcacggtgttgttcaagggttgtggaatttagtagtttagtggcttgagttttcgttttgtgggaatcttttacaagttaagggtcaacaagcatggaaattattcgaaatcttcctttgagatgaaagtgctccggggttcatcctgaatttatatacgggaatcacatataaagttgttcctggactttatacggagacatttgattcttgacatattgtgaaatatgacaagtacttggaatacttcttttatttgctctcttctgtgagagattcaagaaatctacctccgttaactcaataccttgtgggttttttgtcgcattgagatgcatgataattgagggatctagacaaataaaaagctaatgacaaaaataattttctggatcttaacatgtaagatcttgatgttgttgttctgtcatgtgaatatgcacagatcggagagctaaagaagctcgttgaagagggtaa

SEQ ID NO: 93766 - DNA, 858 bp, Eucalyptus grandis
  Intron number 3 from transcript Egrandis_v1_0.007878m (loc us Egrandis_v1_0.005146m.g) derived from phytozome v7.0 (c hr-ID scaffold_1; pos 2207845 to 2208702)
gtttgtgtcggctgttaatcagctcggaatcgacagtatgaactcattactttgaccccttctaaagttattttactaactggtcccgttatgcgcatccatcgtccatacttggctacttagggtcatcatttagttaaaataatatcaaggtgaatgacccttcaatgtttacaaaaaagagacgatgcatcatggtgcttatcctcacatttagctatgggagcatttagaattcagcatgggcattgaaacacccaaacacggattaatttggttctttgggtataagactatgctagattgtattaccatatctctggtctagggaaagcaatactttttaccatatgtgtcatatccaaaccacccaatttattatagcctatgcagaaatggaacttttcatgttcaatgaaaatcacattcatgtgatatggcaaatgaatgacttgtggaaaaatagtttgacatcaatgagacttttatttttaacaaaccacaactgatctcaagaaaactccaagttgatgaaatccctccaaggaagctgtttgatctgtaaatttttcattctctttcacaaaatgtttcccagagtacaatgagccattttgcaagatataagagttgctggtttagtgggtgtagttgtgaattaatttcctttgagctcttatatgatccctgtcaccacctcatgtccttgaaatatttataatcaactttaactggagtcttggatttaccatttacccctgtttttttcttcttcttttttcctttgtcatcccttccattctgaaaatgtcttgactcatgaatgcagaggctgttccgaagaaaatactggagttg

SEQ ID NO: 93767 - DNA, 1039 bp, Eucalyptus grandis
  Intron number 1 from transcript Egrandis_v1_0.000800m (loc us Egrandis_v1_0.000800m.g) derived from phytozome v7.0 (c hr-ID scaffold_10; pos 27710233 to 27711271)
acattctggacacgatcgtcgagtctctgtcgaaggtgcgatttttggttagggttttgggttgaagtgaatttggtgaagtccttcgggtgaattcgtgcaggttttgtgcgctctttttggtgtgtgggatgcgaaatcagttgattcaattcggcgtttttgagataacgaatagttcttgttctggaaatgcatttgatgctgctatacctggtcgagattccttctagttttagagattgtctgtgactaggtgagagcatcttggttttacttcctagagttagtgaaggcattatggttagttagggaaaggcgatctcgatcacacaaaagggtctcgactcttgcgattagattttggacttaccatagagctagatcctctgtagagatgccttggcaaaattacctgtattagatgactgccggagcttcatggttctcgaaactgaataacttgatggaaaaaggccaagtcacaatgcatagactcttgtgaaatctagtagatttagagcgcttgtgattggattttcatcttacctaagtttactatgtgatgaaatcctatggtttgatagaattgttgctgaaagcctcaattgcgatccctgacacttctattttcaatgcaattcatatgttatcttgtgcttttggagaagctttgcaagatggttctgttgaaccagggtacacaagatttcagtgcatactaaggattagctgtgacttgatcattgcggtcttcttgcctggaaatttatctatactcacgggattccaaattttggatctttgaaaacaaaagtttcacttctcgtgagaagctcattagtgacgtgagttagttttttagcttcaattgatgttaatgggattatttggttgcttgggtggaagaaagtgaagggaaaaagacagagatggcttcttttgtcaattttagctagcaagttgaatagacagagatctactaatttggaaaagtatggatttgcaggatactcgccgaaagtttatctgggaagaa

SEQ ID NO: 93768 - DNA, 810 bp, Eucalyptus grandis
  Intron number 1 from transcript Egrandis_v1_0.014731m (loc us Egrandis_v1_0.014731m.g) derived from phytozome v7.0 (c hr-ID scaffold_1; pos 23230008 to 23230817 reverse strand)
aggagcgggagcatcgacttgctcccgaagatgattagtatgatgggcgaggttaatttggtctgggaaaagccggactgcgggctatgcacgaagaacgggtcgttgtgtcgggggaacgagaacggcatccgctgcatcaatcctcctggcggatacaaaggtattgctttaatcctagccgagggcgcatgtgtttatcgattcccaaacttttttatgtttcatgagactttgcttgactcttgtgtcatttcactttcttagtttaagcgattgttaatgctcgagctcttttgtttcggccgttcgttccgaagcttttaaaatctggtgatggatatagcaaaattgctttctgacttatgtttgttgaaatttatcaagtccctctttcgtaaatataagatccacggagcgcagaggaaggagaatcatagtttctaagcaagaaatagggcttctgcaaaactaagattgcttttacatgtgcaattccgccggatggatgcatttccacaacttagtcttgtttatcagatgatactttctgtaatttaaattgaaggtattctgaatcctgattgcccagtttttatagaaaatatctgtgacgacctgaaatgaaggtcagtcacggtcttaagtaaagctgatataactggttttgggggcctttgttctggttgttttatcattcctacgaacttcggcagaagctcaagtactgacttctttgaatctgcagaaagaagaaagctagagatcgcgggaggagtggtgggtttttttctctttcttgttgtatta

SEQ ID NO: 93769 - DNA, 822 bp, Eucalyptus grandis
  Intron number 1 from transcript Egrandis_v1_0.004745m (loc us Egrandis_v1_0.004510m.g) derived from phytozome v7.0 (c hr-ID scaffold_1; pos 37936646 to 37937467 reverse strand)
tcttcctccgggagctcatcagcaactcgtccgacgtacgtctctctctctctctgcttccccctgtttgttttgcgagtgtttgtccgcgattgtgtgtgcgctgcttgcatcgcgttgtgctcgcttagggaacgagttgaaaaggctgaaagatggtgaaatggtcatgcctagaatcgacagcttgtagatcggtcaattttcgctataggtttgattcacttgcattgatgctgggaggccgttatattcattaattgtcccctgcatcttcgagctgctgaatactcaaaactggtacttctgtgacaaatgcgggcttgggacaaaattttaagcttaagctatcagatccaatttttgtaagcagtactaggtatggaaatattcaattgtgaggtttggaaaaattcaaactcagaatcttctgatctataggtattcgaattatgagttttctgctttatgcattgtgagaaagtctaagtcgttagataaaatgcggtatttattaatttaaatattttggcacagtgatagactaagacacagttgtcccctgcatcttcgagccgttgagctaatctccgagttgttatatagctatcggctagtactttgaaggctgttcttatactaggccttgaatgatctcttaataatatgtagtaacagaaggttcagggggttgatttggatggtttgatatgcccgtctgttgtggaatatgaccggtaactgtcggaacagaactgaaattggctttgtcgcgaaaataatgcaggctttggacaaaatccgttacgagggtctcacgga

SEQ ID NO: 93770 - DNA, 623 bp, Eucalyptus grandis
  Intron number 2 from transcript Egrandis_v1_0.020998m (loc us Egrandis_v1_0.020998m.g) derived from phytozome v7.0 (c hr-ID scaffold_8; pos 20903646 to 20904268)
gtaattgctttttcaggtctgtgttccttgttagaaaaagatcaccgtattgttcatgattttttattgaatttttccaggaattggtttgttttgtaagataacagtattcctctctgttatggaagattattggtatgctcattgcattaccactctatcgtcagaacacaacacaaagtgcgttttatggtacactggttctggaactctatcatcgatgtactggaaattcctcagttggaaaaagtattgcatttcgtataatgtatcattctgcttgagacactgcatgtggaaatatatcttgaagaatagctctatttgtcagggaatgtagctcttttaacttagtctcgaggatattagattgactcttccgttatccaactaagtaactttgtaaatttatgtcactattgtattgctattgtacaatgcctagagaaactaaccatgtgcctcattcctgtttcattccacatatttgaattatccatcatccaggtaatcttacagccttgtatggagcttttgtttatagaaacgcctttgctatggttggaattttcatagttgtccactcttgttaatcagggcccttgcagatcagttggaaggca

SEQ ID NO: 93771 - DNA, 874 bp, Eucalyptus grandis
  Intron number 1 from transcript Egrandis_v1_0.047255m (loc us Egrandis_v1_0.047255m.g) derived from phytozome v7.0 (c hr-ID scaffold_8; pos 52789187 to 52790060)
acgtccatcggacttggcgaggacgtcctggtcttgcactcccggaaaaggaacaagtacacgtccaagagtaaattcgtaagtcgaatatcttctttcgtttactttgtcttttcgaggtgttggccaaactctaaacacaatagataattttatataaaaatctattgcattcatacttacttttttgacattttgactgatcttgtttctgcaaatgagggggcatgtctagtcgccacttatagctcaagtgtgtcttggttatatcttctaaatgagaacatcaataaggtatattagcctggattcccaaacaaaggcaaaaattacaaatccaccctggaattttccctcacttaccctttgcatcctgtgatgccaaaattctgacttttgcatcccatgattcaatagaaacacaaccgcttttcactttgtgtctaacacaagaaaaaagttcaacacaatacagaaattagagggcccgaaagttgttactacttggtccgaacctcattgtgccaatagaactaataatttgtccggtgtgcgataatagcatttgcaatttgtatagattcgtgctaactagattgaacttataattactatttaacagttgaagtgattgaatcatcgtatcgagataaaaggtgttgattcatataaacaagcggactatttcatgtcatcgtgcattaaccgtaacacttcaaaaaatgagataattgggagaaatcttgccgaacggagataattatctttttactaattctctctctctctctctctctctcaattccagcaacaatttcccttcacttgtgcggaatcgtactgggcggagaatctgccggaatcagccaaaggc

SEQ ID NO: 93772 - DNA, 870 bp, Eucalyptus grandis
  Intron number 1 from transcript Egrandis_v1_0.006624m (loc us Egrandis_v1_0.006624m.g) derived from phytozome v7.0 (c hr-ID scaffold_10; pos 3316980 to 3317849 reverse strand)
tcttcagcaggtccagtaaccccatcactctcaaggtacgcaaagcgtcagattttcaagatcctcgtgtatcccaaggtcgcttcgtaccgtgttgctggatttgatgtgcacggattctttgtcagatacaaatagctaagatttaggaaagaagggagaaaaagattgcgcagggtttggtttggtcgatcgatcgggcgtgcgtatcctgcgtgaagccatcgaacaggttgagatggccgtggcctgacaagaaaaaagaaacgatgatggggacattgaccatattcagttctttctccatgttttagaaatctttaagcgtccggcgatctaatgtcgtcactctctgacatcgcattgtgttgatatcgcgcccgtcaggggttccgatttgattcgacttgagccggcgagttagcactctcgagcttagagaattggattctcgttagatacgtaatctcggttgaagaagattctttcgaaaccgctcttatctggattggattttgaatgtttactccatttaaatgttgcgtactgaccatgtttgatcccagagagggcttgtggataaaaaagaatagtctacgcaacgattttgagaatgctttctgattataactgcattcaagttataatagtcaaggaagggctccttatatataggttaagtcgttccaatcccccataaatttaaatttcacgcgcattaaattctgtttcatttccaattcaaattaaaaacatgcatgcgattgtttgagctttgatctttgtagataacaggactgatggttttgctcgctttcctcccaactacgcacagtttcacgacgttgtttacaaaataaagatccgaag

SEQ ID NO: 93773 - DNA, 558 bp, Eucalyptus grandis
  Intron number 1 from transcript Egrandis_v1_0.000482m (loc us Egrandis_v1_0.000482m.g) derived from phytozome v7.0 (c hr-ID scaffold_8; pos 68372073 to 68372630 reverse strand)
gtcggggtcttctggcttcccgaaggtaatgcctcgctctcgtttattgagtaagggcgagagcaagagctcgcggactttgatagtcaattacttgtagttgctttggattttgcggctgtgatcggtcaatggtgtatgggccaatgccttgaagatagcctgttttagtgtctggttgttttatggtttcttttgaaagatgtcctctgtgagtttcaccttctcaatcatgtgcactcgcgccgttatgctgcctgcttttgagttaatggtttctattctgttctgcttggttctctctgacgactagtgtactcgaaggaatgtggttctgtagtctgttgaagttagaaaagcgtgttattgaacgactcttgctatgaataatgtgtccgtttatttgtggtttgcaattggtctcgctagctttttagttgctgccaactactttctcatgcgcaaatggcagtttccatttgatagtcaccctgtttgtaaattgtgttaactcttcctgcaggaaatcccttcttcttgccactggcatcttagttg

SEQ ID NO: 93774 - DNA, 946 bp, Eucalyptus grandis
  Intron number 3 from transcript Egrandis_v1_0.011932m (loc us Egrandis_v1_0.011932m.g) derived from phytozome v7.0 (c hr-ID scaffold_8; pos 70566460 to 70567405 reverse strand)
tgcagaagaagatcagaaaggaaaaaatttcatcggtaaatcaccaaactgtaagcatttattatgaacattcaatcgaatgcacacacagaggttctcatctcttcaataatatggtgaatgagtgaagcatatgtaaaagaatgtcttcagcttgttcccactctccatttgatttagtataagtctcttttagtttgaagagacgtacactcatcaagatctcttttaggctatctagtgttgctggagttggagtagcgaatcattgaacctgttcacctttttgcaccataaccacttcacgcttttctttctgctagcaatgtatttcattatatgtctaaaagttacgtatataaattttacgatatataattgagtggttcctgtaatttgtctgttatgggcatctatccttcagttatgcaatttttccaacggcaagggaccatctactcatagactgctctttctctaagggtacatgggcatctattcttctgttatgcaatttgtctagaatgtctggctcgtaggaagaagatttggagtggtcatcagctctttataaaggcaaatcctctagttgtattttgtataacctagcttggaatgccttttattatcttatatggagagctaggagtaacaggatccataaatctcacagctattcaatctgtgaggttactattgctatcaaatgtgacgtgagacatagattgtctaaggaaagtaaacttgctgtttgttctagtgctcacaattctcttcgtttgtattggggaattcctaggtagtagttttctgtgagggtttgtatgcaggatcggaccaccttctagtgtgtttaatgcaacaataatttcttacttatcaaaccaaaatgtcacacatatataatcaagtgattccattatttttctgttaaatttttcactag

SEQ ID NO: 93775 - DNA, 852 bp, Eucalyptus grandis
  Intron number 1 from transcript Egrandis_v1_0.009946m (loc us Egrandis_v1_0.009946m.g) derived from phytozome v7.0 (c hr-ID scaffold_8; pos 25052593 to 25053444 reverse strand)
gccgccgagtgcttcagccgtgccctagagatcaggttcgcttttttttccttttttttttctccatttttttggcgcatttttcgtggcttttttgcttggtagctgctcgtgttctgtcatttgggttttctgtgtttcgattcacttcgctccgtaatgctggtcgagcactgctgctttgtaggcgatttggcgagtattgatgcatgttctcgttagctagagttgctgctctgttctgaaacccaggccgaaaagcttttcttttgtgtggtttttatttccttttctgttactcttacgtttatgtagatgttcaggaactgaatttgggcatgccctttatcgtctagtcgtagaagtagttgggtgaagatttggtttgtatgcaccgttcgccccgtctttggatttgcgcatcggcttgtattgtctcgtgaattatggatgattatggatgcggacctttgggccctatctagaatggtagctacttttagaatttctctctgctatgtgaaggtgcggcgtatagtgtttgacttctgccttgattatatggactcgggacaaaagaatgggagacctaattgtaatgtgtagcacaagtaactgcctttggtgacttgtgtagcgttcgatctatttaaaacttgtgagtatgggtcactctgatcacgatgattgtatacctgtcaatgtgtatctcttttggcatcgaggattgactatatcttcagttttgggggcctgtagcttgttgattcattgcttcatctttttgttttctgcccttcatgtgaatactctgtcatcaactttttatgaaaaaaattagggtggcgcatc

SEQ ID NO: 93776 - DNA, 614 bp, Eucalyptus grandis
  Intron number 3 from transcript Egrandis_v1_0.017097m (loc us Egrandis_v1_0.017097m.g) derived from phytozome v7.0 (c hr-ID scaffold_8; pos 4931186 to 4931799)
aacatctgtgcgctctgttaagattttgtcaccaggtttgaccctctgtgcacaatgttttcagctgcccgaaagtttgcgcatttgcctgatagcctgtggatgggcttggaaactcagtttcattttgcttattcgttgaatgcgtgacgtattagcgtttcatttccttgttctgctgtgtcagaggtaggctgagtttgttctttatgcctgtattgaaagccagtgaggtcagtctcatttagaagggcaattcttgaatgtcttctatgaattttagatggtccattggcttgattgcttgccttactaaacgcatcagatgaccttatatcaagctgaaatttgaactcagcttactgttggtgagtcatgggtgtttttatcttaagttgttgcgttcatttgtcaagccttaatctatctgcgcgccgatgtcatacaagttttcatgaaatgttgctctttggccttgcatgtatttcttatttgcgttcctttttatgattctattattttcggcttcagattggtgtttccctgacttgtttttgtttttggtttaacaattatggatccaggaatcacgcatatttgagcatttaagggta

SEQ ID NO: 93777 - DNA, 702 bp, Eucalyptus grandis
  Intron number 3 from transcript Egrandis_v1_0.040451m (loc us Egrandis_v1_0.040451m.g) derived from phytozome v7.0 (c hr-ID scaffold_1; pos 14542828 to 14543529)
acccaatttagttggtaaaacttccactcttaaatttctgcagacactgcctgtaagctgttctcaaaatagtaatggaataatcatgcataggcttcttctacttttggtgcatgatttcttgaagtgaaatagctgcagagccattaccctttagctttagatatttgtgactcaaatttattctttgaactggatttttattctattgagatcaggtgcttgagagttatatgtcttcgggatatctaaagatcaaatattttattcatatctagtgcagcatcttcattaactgctcccatccgggttcccttgaccatgtggctgtcttttctgtgcacccagatagctaagatataatgcagatcttctaatgtgctcaaaaaataaaacgtccacatgacattcaagaaatataattggtcgtcaagacaaacaagtgcgacttttcaggatttcatatgttcagagaaaagcttattagtttagtgacttctcaataagttgcccctttgatatggtgctcggtcttatacttgtgacgtgaatatagcactataattttcgcatgaaaaaaagtatagagcaaatgaatttttgtttgtcctgtggggcatttgatgccacgatcttgctttcagtttgtttcatagtgaaaaatgattatgtatgccaaattgatatacaggggacttgtga

SEQ ID NO: 93778 - DNA, 696 bp, Eucalyptus grandis
  Intron number 3 from transcript Egrandis_v1_0.032700m (loc us Egrandis_v1_0.032700m.g) derived from phytozome v7.0 (c hr-ID scaffold_10; pos 6927173 to 6927868)
ggagtaagtccgtcaactccagatgatctgctgtttatcagttgaatccctacagttcaatttttcgattggattggtatgctagctttaagttagtctagacctgggcctgtgtgtaaagcttattctaatgtagattggtttgccattttgttccccttctcgagttttggaatcttttaagctgtttccttttcttccttttcaggatttagtacaattgaacaaaaacaagttagtcttttggctttgatcatttggtttgatgctatagctgtctttatgtttagatgcatatatttccacttgatcatcaattatcaatcgattccttctgtactctgagccgaatccgtatcatcacctgagccttttccttcttaatggattttggcaacttaattaggctggggcaaaactgtgtgtttctatatggctatacatagcgaccctctcctaccaagtgcaggtggaaagtctcggaaaaacccagtcgacctgatgctgtcaattatgattaggatttcgagatgatgaatttgcatacgcttgtttttcgtcaaacaaactttgatctaggaattttgattgcttcatggattgactgttgctcatatgattgtcacttgaactccttttttcttaaaccatgaaaggatttaaaattgaatatgtctccattttatgtgccagaca

SEQ ID NO: 93779 - DNA, 237 bp, Eucalyptus grandis
  Intron number 2 from transcript Egrandis_v1_0.045238m (loc us Egrandis_v1_0.045238m.g) derived from phytozome v7.0 (c hr-ID scaffold_8; pos 26072504 to 26072740)
ggcatcggtaattcaaagatcttcatcttcttcaactttttcatcttgagatgttttttccaatgatcttttgcatttgctttctcgatcactttctagaccaatttgttattttgattcccagatatagcatgtgtcttccctattatttccttgccctatccattgtgatgtattatctatcctgattgatgcgctgctttatttgattttgaatgtgaaggttgggaagcaaac

SEQ ID NO: 93780 - DNA, 969 bp, Eucalyptus grandis
  Intron number 1 from transcript Egrandis_v1_0.022182m (loc us Egrandis_v1_0.022182m.g) derived from phytozome v7.0 (c hr-ID scaffold_10; pos 26203764 to 26204732)
accgccctcgtcactggcggtagcaaaggaattgggtctctctctttctcctactcaacgaacacttcgtttttttatgttgttcatttagatgatcgatcaactcttatggtttaggttaagaaaaaaacatcataatttaggcatttgaagacagccaatcttgtgcctatggcaatcaaactaattttatatctattaactaacgacaaacctagaagcaaatctcaaccgtccacataaaattagtgaattgatcttgtaatgacccatggatgaagttgggaggaaggtaaggttgcatttgtgttttagagtatgtgcttaaacttatatgactactgattagggtgcttaaaataaattatttgtttttacaatttccattttgtgtgtgtgtgtttttaattttggaatatctattatagcaaaatgggtatagttgcccaacttaggactatccgggccagaaaaattcaagtcaggcatgttagatagggctttcaactatagcaggtgcttttgaatctgattatattcgatttcatagataaaatgctagacaactaatttcatgatcactcaaaactttatatgacaaagatgatgagagatcaattacttcgaggatttgtagctggataggctggtttatgcatttttgtttttttatttaaagttttgttgtctttagatgttaatagctcatagacatgtcgctagctagtagaatttgcattctccgattgtcatgatccagtgcatttaaaggctttaatcatctgttagacttcaattgcctgtgtaatcaaatgttccgcacattccaatgtatcacctgtcaacttcttctattggcaaagaagaagggcttgatctgttctcgtttgcaattacaagttggtaaatggtcataatgtcgtcccgtgcttaggcgtgctattgttgaggaattagcggggcttgggg

SEQ ID NO: 93781 - DNA, 361 bp, Eucalyptus grandis
  Intron number 2 from transcript Egrandis_v1_0.019701m (loc us Egrandis_v1_0.012428m.g) derived from phytozome v7.0 (c hr-ID scaffold_8; pos 33436369 to 33436729)
tggtaagaccccatttgcacgactaaagattcacgtttctgttttttcaagtactgtgtagctggaagcatcttcggaataataacctatttgattctattcttggagcataagattgtcaatttgtatcgtaacatgaatacgttctgcagaattttgactaaagtatctacaagttatcaagtcagttattcatcatttattatgcttttgccgctagccccgtgcaattcatttccgggatcatgggatccctctaaattaatctttgacttgtccattcagattcaatcatttgtttgaccatggggtatgtccattcaattcgcatgacattctgctgggacattttctaggtgac

SEQ ID NO: 93782 - DNA, 1058 bp, Eucalyptus grandis
  Intron number 1 from transcript Egrandis_v1_0.012141m (loc us Egrandis_v1_0.012141m.g) derived from phytozome v7.0 (c hr-ID scaffold_8; pos 62367884 to 62368941 reverse strand)
tcgagttggcttgcgctgccgttgctctgtctcaggtgactctctccatctctccgtctctctctgtcttgacgtgtaggcaagagtgcaaatgctcgtgcttgtgtaggcatgcgcgggtgcttgtttttgctctctctttgattttgagatggtggtggaaggtaaagtttcaatttttctcttgttcaatggggtcattagtgcagctgtaatgttttcttgacaagaaagagaaaaggaggctagtcagcttctatagcgaaattataagaatacccttttcttctggttggactttgctgtgtggtgttataagaaaatgattaagttcatgaacttagctcgttttttggtcaattccgtgagtgtcttatttccttgcaacccacgagtcgcagagttcatgtgctagtggtggaattcaatctccatcttctggttgtgctttctctatgtgaatttgaatggatcattgcctagattaaatcaactcttcatgggttgcctacgtgtgttgatttctaaggatggtttgaggctggagagttcatgagagagaacttgtcttttctgatgatgggtgtctagagatgctagctggtttgaatgcaaaggaatattttccagccgatgttatatccttggaaaaataaaatagggaaagaatacagttaggcctggagagcagtttgaagagtagaaagacatgaaccctgttggaggagctgatgtagactcttagaacgcctttaagttgccaaaatgacttactagaagcatatagtttcctcgctaaggataatttgttaatactaactttgaacgtgataaaacgtttgagccctgtgagaaggatgatacgaacaaagtttggtcaaaagaaactgatcatcctttaattttgaatcttggactgtgaaaatgttttcatcttccgctacatgattattgcattagttattgtgagcctattgtcttttcgagttccctgtgctaatttcagttcttaatttacttaaggcaccgtttgtcataaatcaagattctggaactcc

SEQ ID NO: 93783 - DNA, 936 bp, Eucalyptus grandis
  Intron number 2 from transcript Egrandis_v1_0.048614m (loc us Egrandis_v1_0.048614m.g) derived from phytozome v7.0 (c hr-ID scaffold_10; pos 3656838 to 3657773)
agaagatcgttcgcgacacatgctgagggattgggttcacctaggctgatgtcgatctcgacgccaacaaatacaaagtcctagtcaatatcaaacatcagagccctgacactgctcaaggagttcacggattccgaccaaaaaaaaaaaggagttcacggaaatatgaccaagaaacctgaggagattggtgctggagaccaggggcacatgttcggttatgctacgatgaaactcccgagcttatgacattgactcacgtcctagccaccaagctgactgaagtgaggaagaacaaaacatgcccgtgctgagacctcatggaaagacccaactgacggtggaataccgtaatgatgggggagccatggtccttttgtgttgtggaaagcaaacaatcgaacaatccatagacaaaacaaaaaaataaattagacaccagattcatatggttcaatcataaagacttctgtccatgaggaaaacaatgacgaatccattgtaaataaagcgatataactaagattacacacttgaatcacccaataatatacgcggtgcttaatcccaaaaaaaaaaattgtgaaataatctctcaatcacactaaacatattgaatgaaaatatggtcaacaaagcccacaaacttgactttccttttttctgtcttctttcttcaccaagtcaaactcgtaaaaggaaataaattacgctattgatcacaacaccaatatggatgaagtttccacattatggaagattcaatcttgaactttgatctaccaagttaatacacaaataaacttggatcgtgttcgttcaataggcttaaactcaatatatattttaacactatgagggttcatacagtcctaatctcaactcagcataatgagagcattaccaattagcagattgcgaaggatttaaaagaac

SEQ ID NO: 93784 - DNA, 540 bp, Eucalyptus grandis
  Intron number 1 from transcript Egrandis_v1_0.026481m (loc us Egrandis_v1_0.022611m.g) derived from phytozome v7.0 (c hr-ID scaffold_8; pos 10964936 to 10965475)
ggataaggtcattagttagttagcaaaagaatcaggttagtaccatcaatattgtttattgaactttgaatatcatttgagctttgcattttgtttgacaagatgttcgacatatctactcctttgcttgaggtccttcctttgcaaacctttcggtgatttgttacttgtcttatagggaagaaataagtatgctcaattggtcacttttgcatgttgttttctattgctctgttcttttctgcgagtatcgggtgatttatcattacaacaacgtatatgaagcagggtgatctgcaccagaaaaccatcacctaatttttaagtctctacatcaagaagaatgtgtatattaagtcaaagtcactctcctgcatagcgtgttgctagggagaaatgctggaatttgccttcctctaggtcattaatgcctgtaacttttgaggtctcctaaagagtaaggatgcatatttcccacattgaaagaaagaactgattattttaggccccggcggttccttttcgcaagcctgctgattt

SEQ ID NO: 93785 - DNA, 738 bp, Eucalyptus grandis
  Intron number 1 from transcript Egrandis_v1_0.010295m (loc us Egrandis_v1_0.010295m.g) derived from phytozome v7.0 (c hr-ID scaffold_10; pos 21474224 to 21474961 reverse strand )
ggaatcattattgtcatcgatccctttgctcgacggtgggtcctttaaattcgtgctccattggaacttgtgatcttttgtcgatcttattggtttgctttttgcttgattccagcaatcgatccttgatagatcgtgcggtcaaattgagcatattcttgaattacgctattggcttgtcgaaatgcctataagaaatcgctctttctgatttagcaattgctgcaaataaaaaattagtcctcttcttttctccctggcttgtggtttgtttccatagaacttataaatgtggaatcataggattactatataaacatatatttatgcaaatgggtcggaggaaaaaccaaattttgaaaccagtctggttctgtggaaactgtagctatgacatagaacgtagcaatttgtaatctgcatagtcccttgtattatcgccttaaattttgtcgatgtacacttgttgataatcttcttctagcaacagatatgtccctttggtgttattctgttattctgatagcaattattgaagaaatatagtatagtcccgggagatctttcgttcgttttaaggcaccttaaaatcctatataagacacatagtatgaaggcactgaatttaacaggcgtggactttgagtttgttactcattcattagacaatatattgatcaatagttattcttctggtgagcaggcaccatattttctcattttgagagagaacaagct

SEQ ID NO: 93786 - DNA, 932 bp, Eucalyptus grandis
  Intron number 3 from transcript Egrandis_v1_0.008671m (loc us Egrandis_v1_0.004084m.g) derived from phytozome v7.0 (c hr-ID scaffold_8; pos 11816958 to 11817889)
ttgaggcgttattgggttcttgctctcagcttcaggtgggcagctctttgtatacttaccttattgattttattagcatgtttgttgctatgaatagaacacagcatcttgccatcaccaccgctgctgctatgatgacattgcttctaccaccttttcccttatctatctgtattgactctatttctcacaaaattgaacttaaatgaagattacttatgtatttgaaaacgagtttactgttgtgagactggcatagggttcctggtcgattatttcagtgtagcagtcatactattacagtttccatgagacttgcctgaacatccagatcttttagccagtaaaaacaactattgcataggaagatcaaagtatcactaaattggatgggaagcttgccagctttgcaattgggggctagttctatcagaactttgaattcactgatgagtatcagatttcctttcaactggctctttggcagtgcgaaattgtcagtatcaatttacatgctcattttaagatacaaaaaaatttcctttcaaactggctctttattactgccaaattgcaaatattatttacagctcatcttaagatataaaacagtggatcttggaaaaacgatggcttatttatttgttctctaaaagaaagagaaacttgacctctcctgtggtcatcctgcactgagcagtatactttcaagtttttcctttcctttcctttccaactgatattatgcagggctgtgtggtagagcttctcataagtaggtatttgtcatcttcaagaacccattagtacgatataattaatgctgctagtcgttgaagaaagataaactgatagatcccgtagagatttgaacttttattctttcattcatctgacttagttttgatactcagccaactgttgacgtcaag

SEQ ID NO: 93787 - DNA, 895 bp, Eucalyptus grandis
  Intron number 3 from transcript Egrandis_v1_0.017738m (loc us Egrandis_v1_0.017685m.g) derived from phytozome v7.0 (c hr-ID scaffold_10; pos 10412938 to 10413832)
ccgtgccgtgcgaacaattcgacaccgctttccaggtgcgtctttcgtatataattttttttttatttttttgggaaatagagcacgttttttttggaaatagctcgccggttactgcgatgctgatggcgtgcggaggggctggtgttagttgatgaagataagaaattatgatgaattgttttctgaaccaataatgaagaattctgcgtacagattcgtcttgaaacaggaaatggcgaagaaatggtgttagggatggatgggttatggttatgcattttcctatgggctctccggtttgactttttcaagaaagactactcttttacgccaagatgccattttaaatcaacgacaggtagatcattaggaactttccatcagaagtcttcccggtagataaaagttaactctttgaaagggtcttctggttttgttggtgcttgaaacaggttcttacaaacaatgtaaaaatttgaattagatgaatatctaatagaggactagacagatttccccatggtgggatgctcgtgtggtgttgctagtttaatcccatccactagtgcagattttgaattaacccaagagaatcctgatggatttgcttggtgccaggggttggggctctcctggcacttcttagggattttacccacacaatcctacaatcagcacaaacaaggactgtgcgggcttaccctgcagccatcagaaaatgaaagaacttgacagattttgcagatttaggtgtctcttacttgtcgtggtataatattgcacgagagttggtaaacctttgtgaacagccagggtcatggaccaaaaacactgcttttcttgcgtatagattcctcagttttttccttcttctatttcaggctgttgaaaa

SEQ ID NO: 93788 - DNA, 668 bp, Eucalyptus grandis
  Intron number 2 from transcript Egrandis_v1_0.019392m (loc us Egrandis_v1_0.019392m.g) derived from phytozome v7.0 (c hr-ID scaffold_1; pos 37132332 to 37132999 reverse strand)
tctctcgttggagaattggagatcaggtgattctcgattttgccaacgaattttgcttttagtactgggatcctgtctgtttgttcaatgagagcttactctggcctgtttgggtgattcatgaaattttaattgttcccaaaggatgatgaatgttttaaaagatgcttaatcgtgtacagtgtctgtgaggaaaagttatctccgtaggtgacgtttgatgcattcaatagatgattgatccagaggtgttgctcataaaatcacgactgctgaaatggtgatgtcattcttttttctgacccgaagtctagaaaaattacgagcagaaacccaaaagccggaaaaagatctgcaatttttcctgcgttattaatctgaggatgaggcaaaagttcattagaaaggattgaagacaaattaaaagatgatatgagcaagacatgagcaatgacactaatcatgatattgatcaggatgcggggatcatgggtttgattccaatttgagtgcgaaattttgttctttaagatgaatatgtgaaagtttgatcccctgcgttttagttcattccggaatttgtgacccggtattgttcgttcgatgagtgatgtgatttatttggatggcttaactacaggtttgtgctcttctcagcgggggaggat

SEQ ID NO: 93789 - DNA, 725 bp, Eucalyptus grandis
  Intron number 3 from transcript Egrandis_v1_0.016675m (loc us Egrandis_v1_0.016698m.g) derived from phytozome v7.0 (c hr-ID scaffold_10; pos 12893618 to 12894342 reverse strand )
ttgttgtggatcctctacctgcgggcttggatagagtaagctttgctgtgctcttcagattgcatggccaatgatatgctatttctgttatttaattttggatttatcataaggttctcacttgctgtagtggggattgaggaatgaaattaatttgggaaaacaacacatttgggggattggttgcagaagctttgccgttattttttcttgatatcacaggtttaggcaagtttttgtctgataagtgacttactactgaaggtctgagaaagttcattattttggttttatgaagtatatttagatatgctcagtttacttgtaagtctgaattcttcatgagccaggagataataaatgcaatgtcctctttcacaatgggaaaacaacagcctggaacttcaactttttaaatcaactgccaagttccaatgttagaagttgaaaaataacctttaagacctgcaatttcctgtactcttgattccagatcctagtctacccgaactgcaattgtacttggaagtatactaagttgatagctttagccttccaagtcttgatgctcaaatgcttttcttttctttttggacattttctgaccttacattttagagtagtctgtttttgagtttccagtcattctttgagttcacatcttaaatgggtctcaaatggtatacacagggatacattgtattaaatagaccgtgggcctttgt

SEQ ID NO: 93790 - DNA, 1004 bp, Eucalyptus grandis
  Intron number 2 from transcript Egrandis_v1_0.041951m (loc us Egrandis_v1_0.041951m.g) derived from phytozome v7.0 (c hr-ID scaffold_1; pos 21135927 to 21136930 reverse strand)
aagtagttggatttgggaaaaaaggttggtttgtgatttcttatgggagttgagggacagttttgcctcttgatatctgctgtgagtggtgggctttcgctataatttgaagtaactaatttggcctgcgactgtagtgattgcagaggaaaagaaagcatgggggctcgttggtagtttttggagcaggcaggggtgatgtcctagcacttaatgagcaagtgactgtcaccctgagtgagttacctgccaagtattatggaatctcttgcttgttgttggccgtgaaagacccttatgtcatttttcctaggatagttgtttctaaaagattttctaatcttaattttttgtggtttgttgcttttccgccgactaacattcttttgacattgtcggtagagtagtgtaaatccaacaactgtacattaaattagatatcatcttgccaatggagtgctcagttttatgctgaattgggattgtcattgtggtcgctaatgcggtgtatgttggatatatctgcccattgttgggggtatagaatgagaatgcttgattaaggattggcattgcctgctccaggatttacagccaaaaagcattttcttgtgactttcaagtagtcgaaaactccctttttttggcaaatcgataacttgtggaatggtatgggcttaatagtttttaaagaatttgagtttctcatattgagattgagacatttctgaagtcctctcatggagtgagaaaacatgaagaggatgtcttatcatgaacagatatgaggattttaggattatcatgattgcaacttttgggagtgatgatgaatggttcatttttcttcatgaggtttagcagcactcttttttcattgtttctttaagtgttagaggggatgatcattaatattctgtcggcattaacactctagaaagtttcctatattctacttcttatgtgcaggggtgttgctgccatctcgttttctgaaaaggggt

SEQ ID NO: 93791 - DNA, 503 bp, Eucalyptus grandis
  Intron number 1 from transcript Egrandis_v1_0.039796m (loc us Egrandis_v1_0.039796m.g) derived from phytozome v7.0 (c hr-ID scaffold_1; pos 20185977 to 20186479)
gataacggtgggggattaagggacgaaaaataaatccacttggccatcattctatttggtttgcacaagccaaaaataattccaatggtctgcaagaagatcaataaatacgaaattgtataaagaattattaacaaaaaaaatgagaatatcctctggtgtggagggaattgcacgcatagaaattcaaaaaagaattgatctgattcaagtcataatttatatgggattcccaaagtttttactagaaggcaagacgcgaagaatcgaagaattacagatgaatgtacaaaaagaacttaattgtgtgaatcaaaaactcaacattgttattacaagaattacaaacccttatgggcaccttaatattcttgcataatttatagccggatagttaaataatagagtttcacttcgcaaagcaataaaaaaaggctatttaatttaccgaacaggtaaatacaaaaggaattcaagaacaaattgtaggtcgcctcgacgga

SEQ ID NO: 93792 - DNA, 888 bp, Eucalyptus grandis
  Intron number 1 from transcript Egrandis_v1_0.006868m (loc us Egrandis_v1_0.006877m.g) derived from phytozome v7.0 (c hr-ID scaffold_10; pos 6521476 to 6522363 reverse strand)
gacccctcctcccgccccgacctgcctatcagattgtacggccccacggctttcgtttcctccgcttgcttgagctcttgaatgagtgatttttatcatcgtattggagctgcatgttgctttttttttttttttcttttcttttcttccgttttggattaggttgtttaggtgtttgttgtgaatatggggtttccgtcagcgtttatcatttctgatcgagcttgagatggatgttgtattgagttgtgtagtttggctcgggttccacctgtgaaaggtgttcttttgctaatcgatgctgttctgtcgggcgggcgaatgtgcattgcgggactcgaaaatctgaacgggaagcgaaactgcggtcgcctgacctagcaagttctagcaatcaaattcgtaatctacagtcaaaacactattttatctgttggtttttgtcttgaggatatattgtagtttcttgatggttgattgtatggaggattgagccctatctgatagtcagaattttcgtttttatgtatatatcttgcgaagtgcgattacatgttacttaagaaaaaaaaccttgtatggtgattagaagcatcgaaattttgatgtacctgcatgtcaagggtaattgtcaaaccactcaacctattgaattcgttttgatttctgggtattactgttactgttaacttctgattctctttgagattgagaactcatctgactggcgaatttgttcatgtccttcctctcggttgccacaagatatgcataactttgaggcaattgctaatgctcatgggtagttattaatgaatcacgtgttctattgatgctgacgctttgtgagttccgtttgatagggactctggttctagcagcattggt

SEQ ID NO: 93793 - DNA, 1063 bp, Eucalyptus grandis
  Intron number 1 from transcript Egrandis_v1_0.025414m (loc us Egrandis_v1_0.025414m.g) derived from phytozome v7.0 (c hr-ID scaffold_10; pos 15209154 to 15210216)
gcgatttcgggaaagccctcttctacttcactcaggtgcgtctgccatttttcatctctcgaaactctcttcttgttcttgttgaattgagctgcatttgttcccgttagtgttaagacttggctgaaatgcgtttccaacgagtgactaataatcctgttatacagaaaaaagtagctatcatgcctttttctgacgaatcatatatcactataactgactccattgagttccccaccatagaactcaacagttacacccacttgttcaacactataaggtcaaaatgtaatatgtgtttatgtagctattggtcaaaaagcatcttctgtggcttaggtagtgaatgctctcaaggaaaggggagctatggaatacactattgtttgcgagagcgtcgaggtatggtgaggtcgaatcgtgcgctcaagcttttagagcagttcgcaacagggttaacgtgatttttaaatctcgatattcacccgggttcttgatttgctcctgcggaattccaagctgctgggtagttcattgaaaggcgcctgctttttggtttgtgagtggtgttttttattggattctgagaagctgaattgagtgtataaccgcaaaagaggaactcaatccaatcatcatcagttagatgtgcttggtactcctctgttatccttgaccatgcgggaagcgttgactgtgtttaagtttacgcggaagtcctgctcctgtggcgagaatcttcttcacgtatgtgaaattaaacttcctgctagtttaagcggaaggaaatgatacatacaataacctgtatgagaagggattatcaaggaagactgaactgttatcaatgtgaaccggtgatatctgtgacttccttcatccctcaatgcaggaggctcatgcattggcctgcttttgtttttgttttgaatcatggtgttgatatctagtcaacactctgtttgtacttgagcattgcgaaaacattcgaagttcctagtttgactttgtttttcttctaattcaaggtgattgaaggttataaagactttgcgttatcgga

SEQ ID NO: 93794 - DNA, 756 bp, Eucalyptus grandis
  Intron number 1 from transcript Egrandis_v1_0.007865m (loc us Egrandis_v1_0.007865m.g) derived from phytozome v7.0 (c hr-ID scaffold_1; pos 11277301 to 11278056)
agccctctcatcttctcaagtgccctgagtctcaggtcctccctctctctctctctctctctctctctgtgggcttactttgggcttgatttggggaatgtagttgatatgtactctgtttttgctgttgttggttgatgtgggcgcgaatggttttggggtaatgtgtggaaagtgtttgtttttaggagccacgagatcatggttggactggacttgaacggttgactagctcctgagttggagttgatgagtgtgtatgtaaaatggcttgaatgcgaccgatttcgtcaagacatagatgcacattgatcagtttcatcgtttcaagttggctgtgattgtgggaactgcctgctcagagctttttgcatgtcgtggcttgacttagttcccagtttgcctgcgagtttctatcgagtaatcgggttgctttttttagtgttggagtgaatatggtgttcttcgtgtctggatttttgctccggttggcctttttctttcaattctgcaggatgcttatcccttcgttttggcctgtagtatgtgcaaataagcttccttgttttgtgttttctgatttgggaatgtgcatcgcatgtctgcttgttgccttaatgaacggatacatgcatgtccaatcgtgtcttccatgttgggtgttgtccattagtacttttgagacagggaaaacaagggtggttgataaattggctagtcttctttcttattttgaacagaacggggaagagtttg

SEQ ID NO: 93795 - DNA, 860 bp, Eucalyptus grandis
  Intron number 1 from transcript Egrandis_v1_0.025333m (loc us Egrandis_v1_0.021682m.g) derived from phytozome v7.0 (c hr-ID scaffold_10; pos 20905281 to 20906140)
tggtcgccgccggtcaccgtcggatcggtttccaggtactttctggtggtttcgtctggttcctagggttccgcgcgtccttttttttttgggctcgttctggaagtttagtgtcgatgaggaccagagatctggaacttgtggtggatttcggggcttcttgcttttcgagggtgtttgttcgatacgaatgccatgtcgagcgtgtgctaggtttcgtttagggcttgcgagtttactcgcgggggttcgacgcgttaaccgacaggctgtgtgtctgaatctagggaaagttatgtggtgttgatcttgttgctgagatgcggaagtggagtgattttgtgggggtgctttggttgaacgtgcaatgtgtggggggactgcttttgatttcgcttgccactaattgtggacagcaggtttcgttttcctgtgtgatgatgctcaataagtgaaaggctaacgaagatgataggttgttatcgctgtatgttgtgatttctgcagtcttgaataatgcaatctcgtgcacatacatctttttgaccatcacctcggttgacttgaagtttgcggtagttggagactgtccgcaggcttaccctgcgcaacttgagcttttctgatgcatggttttgactgtcgtccctcctaggcgactgtgaattcgagctaatagcgtttctttattttagggcttgttcgtcttaacatgttggggtcttaattgatgtattctttctggttttcctttgcagttcttgatagttggtattctcggggaaggtttcgcactactatttacatggctactggagttgacatgtcgcttgatgatatcattaagaacaggagaaaca

SEQ ID NO: 93796 - DNA, 951 bp, Eucalyptus grandis
  Intron number 5 from transcript Egrandis_v1_0.055252m (loc us Egrandis_v1_0.055252m.g) derived from phytozome v7.0 (c hr-ID scaffold_10; pos 31402838 to 31403788 reverse strand )
gcggtatgttcccttccttgtatgtttaaatcatttatcaaatgaaaattggcttctagtaaaagcataccagggatgggtagtaaatctgtttgccgttttcaacatgatcaatgatcaatgtgttggctgggtccaccttcatgtggggcccagctagcattaaaaagagagagagaggagttgaaaagaaagtggtgccttcacgcgtttgtgcatgtgtccaaagtgagaagagagaaagagaaaagaaaatgggtgttgctttgtgcaaactaaaagggagagaaaaaagaaaaagtagaaaaagagagagacctaccagggaaaagtgcacaaaggagaagagatgaccgaatctttgtgacccagattcaaaggccaaacgctgatggaattagtttaaatttgagtatgttgttcgtgagaccaagtgctataagttgatggttttcgtttgtcgagaaccgcctccgaattttccaattacggtcagagttttttttctacgaatttatttatctacctatgtggtaataaaataagattgtaatattaatgttatgcctctagtatatgactagagaaaaatactttgtgtatcctactatttttggtgattagtaaatgttttgggcggtccgtgattttttccatatcgggttttccacgttgagtcattggtgtcgttatttgctttacctacttatcatattgtgaggttatatattgctggtgtgttgctgggggttaagagaatttcagttgatttagttttaggagagaaattgattctagattgtgtttggatcgtgaattattcctcaaattcatgtttctggttttagctgcattgagtctataatgctccggtgtgcggctattggacccaagtgtactttcttctctgttgtcaaagcagcttggtggtttctacatctggacttacac

SEQ ID NO: 93797 - DNA, 563 bp, Eucalyptus grandis
  Intron number 2 from transcript Egrandis_v1_0.026442m (loc us Egrandis_v1_0.026151m.g) derived from phytozome v7.0 (c hr-ID scaffold_10; pos 23032671 to 23033233)
tcgtcccaccactcacctcaccgaggtctcagcaggtagggccaaaataactcctgggaaaacggaaaaacattaaaagaaaaaaaaaaaaacaatgaacagaacaaggggaaaaaaatccaaaatctgggtgcgttgttgttgctttattggaatttgttaaagtttttccctttgcattgtttctccttgccgttctgttgtctttcttctgtaaagattgtgagggatatctccattttcctttttttacctttttttatttatttggtttttgatatgagtatttatggggaatactattagggcacggtgttaggttgttaattaatggtgagaagatgcagaagtttatgaatcacttggcagatgcctttgatctactaccactgtttgccatacattggcagttacacactgtttgaccctgaatttactccatcggtccaaatctctttaactttcaagtaaagatttgattaaaaagcaagagagcaaaattcaacgcactggtgatttttcgtggtatacgctgattgatcagtaggaactcggaggcgcac

SEQ ID NO: 93798 - DNA, 723 bp, Eucalyptus grandis
  Intron number 2 from transcript Egrandis_v1_0.000505m (loc us Egrandis_v1_0.000505m.g) derived from phytozome v7.0 (c hr-ID scaffold_1; pos 13719014 to 13719736)
cctgaagattttcccacaaaggcttccagagataagtaagttttagttcctcaaattcaaattttaccaagtggaatactcgatttattgccttcattcatgatgtgcacattttataagatttacaactttcagtgaacttgtccctttttaaagtgtttactagtgtttagataaagggcgtatggtttctctatgtccctttttgcagcactccaagttggagacatcgaaatggctttggcacactttcttgattattacgatggaagttggcacttgaagtgttttcttggtcatgctgataataattatgctttgagtttcttcatcgcatggatatgcaaatgaagagaatctctggattgtacatgaaagtgatccttcacaaaacagctgactcttttcctcagcatagtctccttagtttttctgcttctaatattaaagactggaaggagaatgtggaactagataatgattgtaccttgtagtacgaggtgcctaatataaccattttactttctagccatttctgaataaattgattgggagggtcctgcacagagcaaaatcattgtcttctagccttgttttaccgcttgtcatcagctcactttgtgtttgactttttaaagtagtgccaaattatagtgcttatttggtgcatggaaaatgctaacagaatacctatgaaagtatgcaggattgtaagagctatcg

SEQ ID NO: 93799 - DNA, 355 bp, Eucalyptus grandis
  Intron number 1 from transcript Egrandis_v1_0.051883m (loc us Egrandis_v1_0.051883m.g) derived from phytozome v7.0 (c hr-ID scaffold_10; pos 29591675 to 29592029)
gaagacgttgaagctatacactccgtgctccgacggtaattatctttaaatatgttcaattctaccattagaagtggaaaaggagtgatactaaattcacaaaaaacttttcagctcaatcagactagtcagaagtatcacataaattgtaaacatacaatttaaaaagtacagccaaaaataactacttgctacagaaaagtccataagtaaaatcctaaagaacattaaagtcaaaattcactagaaccagtcttgcaccttcttataaatgattctgccgacaatttcttcaacagaaaactgaattatgtatgtccatctttgtttcctccacagatccattcctgagccc

SEQ ID NO: 93800 - DNA, 940 bp, Eucalyptus grandis
  Intron number 2 from transcript Egrandis_v1_0.008906m (loc us Egrandis_v1_0.008906m.g) derived from phytozome v7.0 (c hr-ID scaffold_1; pos 30500369 to 30501308)
aggtaattaaaaagtgtaatggttgacatatcctttcttggccatgtctttagaagtttgaagaggttatttgtgtgaaggtttggacattcttaagatgtctgattgacatttgtctttcatattaagattgatttaagatggtatttacttgtatttggcttggtttaatgcctttcatactcttggttttcctgccttttgaccctcttgacaaacagtcacttgatggacatctttcttaggtctgtgatacactcgtgactgaacatctgagccagtaaacttccttttctgttcaagcatccttttcttcatactagtttgttttcttggtgctcagtttgctgctttcattgcactgagagtaggcaggaaaaagatagctcggtaaatgccagtctactataatgactaaataggcaatacaatgccacaagaggtttgtatcctcctattcacctttaatagatccttgtagaataagcaagtagaaaataattggtgtattacagaattttcagccctgttttcggataatgtagtgtaagattggtagttaggctgccaagattacaatccattcttgcctaggtaatgtgaacatttaaacatgttaaggtaaagcttctattacagtggaaagagactggaaattctgacctaatcaaggtagagtacagaccaggtgggatgtcaaattcacaatgagtttcatatgtcactgcagatttgaagaataataactcaggcgtcaagagtagtagaccatagatcaaaaagactttagtgtcatggaaacaagcacaaatagacttgccgtttttttccaccttctctgctacataatttgttaaggcctcaaatgcataatgtactgcaattttgacttcatttcctaacaggttccagttagagttgctggtggccttctatttga

SEQ ID NO: 93801 - DNA, 616 bp, Eucalyptus grandis
  Intron number 1 from transcript Egrandis_v1_0.038925m (loc us Egrandis_v1_0.038925m.g) derived from phytozome v7.0 (c hr-ID scaffold_8; pos 33754864 to 33755479 reverse strand)
aacgctctcctcaattgaaaaaagtagagtttcaggtgagtatgaaatttagaatttttttaaactattatcacaagtcttatttattaattggtgtgatttttctcaccttttatttatttattattagatatggattttacttactaagttgtattttataacatgtcataatgaaacaaattgagtacccttttctatctagagaattttttttctaaagaaagataaatgggtataagaagagtgatgctttttttaatcaagttttagaatatatgtttgatataatttgattcgaattgatattcggtgattactagcttttactcattgaatttgatgaaaaatagggctaatctataatttatagtgactaaattatgcattttcggaatgaacgtccgtcctgttttagccaaaaaaaaaaaaagaaaaaaaagaaaataaattgtaatgtagggatcataattcataaagggaagggacaaatcaggctttcagccaatctagttcaaatcaccagattaagctcactctctacgcatctttatattaaagtcgctctttgatcgttgaagacgcaggatcccaagaatcaaccgactacaagaac

SEQ ID NO: 93802 - DNA, 1015 bp, Eucalyptus grandis
  Intron number 1 from transcript Egrandis_v1_0.046063m (loc us Egrandis_v1_0.046063m.g) derived from phytozome v7.0 (c hr-ID scaffold_40; pos 35096 to 36110)
gtagcggcaacggaggtggaggtgagcgatggttgcagacttggtaatattaatccgagagagagagagagagagagagaaaaagagaggggggggggggggggggctgtgtctttatggtggcgagggcagtggcaacagaggtggaggtgggcggtggttgcataattggtaatattaatgcaaagcatatagataagggttttatttgtttaatgaaaaacgaataatttggaaaatattttcctaaaattaattgcttgaaataattaatcaatagaaattttttttcatcatttacaacattttatgtccaaatattttcatggacaatgaaaatacatttcattttctcatttcatttttagtaaaatgtttatgaaatcaattattattcgcaaccagagcccaaacaaacaacaatttgtccatctgcttcgtgggcttatcttttgtagctattgtaggcccgatcaaccagcccataaagtccatgatcccctcaaaagtgtttgtccatgtccccctcaagtcttaaagccccatgcagtataataattactagcaagttacacacgtgaatcatgaaatgcaatcttcacatctaaccaagaaaatcatgattgcgctctgctgagaaagtcgtgctttctccacggacggattcttcaagccattggaatttcggttaggtcgacccttgacttgtagaccaacaattttccacgaaaagtggaatgataatgagggcctctttttgcctttcctagcgctttagcagctggcaagcctcaaagccttcttcagttttgtgccaattttgcctagaccagagccactggatgccccctctccatcaccaatacatctcctattctgcctccttcccaaggaatcaaaggtgggtattagagcggaggattttccgccctcggcgattcaaacttcctacttcactcattttctacgcttttgtccagctcgacctgtcgagttacgaagttgtaatcacaga

SEQ ID NO: 93803 - DNA, 659 bp, Eucalyptus grandis
  Intron number 2 from transcript Egrandis_v1_0.026649m (loc us Egrandis_v1_0.026649m.g) derived from phytozome v7.0 (c hr-ID scaffold_239; pos 74021 to 74679 reverse strand)
tccatcttggtcaacaatctccacagtacgtgttgtgcttactttttattgtttttgcatgttactttggtattatcttatgtttctagtattctctcgaggagcaatatcacgcctgcttgagatttgctttttttgacttgtgtccatggtggattctcatttagaatagcttttcctgtttgtatgatgaatttcatttttgtgcctaatctcccaaattagtagaaagatcaaatggaggcctgtattttcatagttgctgttgcttaacttaattctgactctttttattggaagaaaataagcttcttgaaatgttgtccggaaagttcatttagcgagacattctgtgtcatcttcctagattttaatgctacttcatcgaatgtggatgttgttgagaaacctgatacaagatctataatcaaaatggatgctctcactcaatttttccatactgagacaccttaggcatcagcccttcaccttactagcaacgtatggtgataacaaatgtacatgttatttacttttgtactgaagcaccttttagtatcttacgagatacctaagatgacggaatgcttatatcatcttctatttgcgttacgttcttttaccatgagttctgtacctattacaggagtgcagccaat

SEQ ID NO: 93804 - DNA, 946 bp, Eucalyptus grandis
  Intron number 1 from transcript Egrandis_v1_0.026649m (loc us Egrandis_v1_0.026649m.g) derived from phytozome v7.0 (c hr-ID scaffold_239; pos 74821 to 75766 reverse strand)
attctctcttccttaaattctcaggtgagtggtgatgatgtgctttgtctgggtgcattgaaagggttgtaaggaaatctgacaaaagtttttctgtcatatttattgctatcattatgtcaaattctcctctttatttttaaaatttttgcatttatataagggttaataccttgaaaaaccccaagctggtacacctgtgacaaatttaccccaaactatttttttgaccaccaaaaaccccaaactggtatacctttgacaaatttaccctaaactagtacacttgtgacaaatttaccctctgttagttttagttaaattttcttgttaaattataaagttaaataacacgtgacaattgaccggtatatcaatttgagattttacactctgtttgtcacagtttataatttttgtgatttttttgtggtattaatctaatttttcggaggatatattagtcacaaatttaccagtttggggttttttgtagtcgaataaattagtttgtggtaaatttgtcataaatgtaccagtttagggttttttatagttagtcggggtaaatttgtcacaggtgtatcagtttggggttttttatggtaaaaaaaatagtttggggtaaatttgtcataagtgtaccagtttggggttttttaaggtattaaccctttatataaaggtatttctttgatgccccatcttaatcaatttctgtgtagagagaaggaacaattttcttctcaaagagaaaggatagattttcttgtttgataatcaacaaaatccatattactcgagattgaacagaacagaatttctttagttgatgacttgtattcagaacagatgtttgcagatgttgctccttttttgtagctttatcactttactaatgtgctacctctgtttgtgggtgaagctgtttgagagctcggcgctg

SEQ ID NO: 93805 - DNA, 998 bp, Eucalyptus grandis
  Intron number 1 from transcript Egrandis_v1_0.001613m (loc us Egrandis_v1_0.001613m.g) derived from phytozome v7.0 (c hr-ID scaffold_8; pos 48193798 to 48194795)
cggcgactgcggcgaatcggcggcctcgaccgacggtaagaccagcgagctccgctagctcgatcctctgcacgttcgccgcgccgtttttccggattttttttttcttttttccccccttttcttttcgacgaagagttttgatgcggattcgcctcgggttctagccgtttggggataggtttcgtcgcggtagattcgagcggtgatccagatcttgggcgagagtttgagaatcctcctctggttttagattcgcgatacgcaggttttgaaatactcggcaatcgtcgatgcagctggtaaatcttgatcctagggttgatggagatgcgttcgtttgcgtgaaaacatcaccgagaaacggcacttcttgtgtacttttatggagtttctccggcttatggaccgaaataagttcttagaacgagccaattttcgcgattccgtgcacgtgtcggctaccggtttccgattgattttactccgctacgcttgttgtggctttagaaggaatggagtgatgtaaatgattgtgttctgcttcggaattttctgttggggtcactcgtgcatgtatggtacgtgcattggaggttctagcgttggtgggcagttttgtttgttcgaatggatatgggagtgtgaatcttgaacttttgcttgtgctttacttagttgcggtggtttgctgggtattggtggatgggctgacgtaatagcgtactgggatatggagtattaggtgtttgatttaatgaaaaaggtaggtccttcctagatttcttatcgctatcatctatgttgttttcctgtttattatggttttttcattgtttccttgcaaaaagaaaataaaattttcgaaccaattgtttgtaatttgggacgatacccagcttaaggtgccaccaattgtgcaacttcatatgttatgcttctggcatcaacattttatgttttctcgtattttgacaggctgaaagaagagctggaac

SEQ ID NO: 93806 - DNA, 502 bp, Eucalyptus grandis
  Intron number 3 from transcript Egrandis_v1_0.001613m (loc us Egrandis_v1_0.001613m.g) derived from phytozome v7.0 (c hr-ID scaffold_8; pos 48195507 to 48196008)
cggtaatttctttgggacagtcaaagcatgttgttaattatatgtatttgtagaaaggcagtttgaagttgtcgatctatgtagtctctctagcaatatatggttgtgatagtgttctatatttatactgaagttcttatactgtaggcctcttctacctgttttaaaatttttaatgcgaatgtccttatcgttgcattttatgggacatccaggtggatgataaatggatattgccagctcatttctctctagtcagattatgcaaaaaattttagaccacgaggcaacttcttgatgatcctcatagacgaatttggttttttttcttgattggtaatgtgagcttttataggatcaggacgataaaagagaactatttatggtaacataaaggggaatttgttgctgaattcaagtgtggtgtatctgcaattatcacgacaatcagctttctagcagaagtctgcattttataacgtgtatcttgtgtcatggacag

SEQ ID NO: 93807 - DNA, 786 bp, Eucalyptus grandis
  Intron number 1 from transcript Egrandis_v1_0.037591m (loc us Egrandis_v1_0.037577m.g) derived from phytozome v7.0 (c hr-ID scaffold_1; pos 31839566 to 31840351 reverse strand)
cgctcgcttctcgcctcgtttccaagtcccggcaggtgaggagcccccctcaagatccacgcgccttcccccctctcgccgctcctcaaatgccgtcccgaatttctgctcgatggcgctcaacattggccgtggagattgggaattttgtgtttcgcaaagttgccgctttctgctcgggcgattgttgatgattgtctgttgctcttcgttgcggggcgatttgatttggcgattgtattgggtcgaatgtgtttttttatggttcaattttgatgtcggattggggctaagttgtcggcatgactttgagttctctagctcggctgcttctgtttcttcgaaatctatttctctttctgggtttctttcttttaaaatttctttagccagtttagttattgtttcataccctgctgcccaaaatttattctacttgtttgctggagacatgttctttacccaatttttagtttagtttaatatcatgtgaaaaatatatgttgtgtttcgcatgggacttctttgtaaatgaacgaggcctcatagatggtataggctctgtttatagataaaagctgaagcattaaatggagatagatttagttgttcagcaaggttttacttagacatgttcactcttgtgtacttatcagttgatattggaaacaaagatagtctttctgtggtctttgaatcattggcaattctgggtttgcattgattacttatgataaaattgcatgtgcagtgtctttgctttctggaacacacgagcggcgagcc

SEQ ID NO: 93808 - DNA, 787 bp, Eucalyptus grandis
  Intron number 1 from transcript Egrandis_v1_0.010983m (loc us Egrandis_v1_0.010983m.g) derived from phytozome v7.0 (c hr-ID scaffold_10; pos 28105819 to 28106605 reverse strand )
cccccggtgaactctgcatcatctccgaagagcctgtacaatctctttctctctctctctctctctctctctctctctctctctctagatgtctctgctcaatttggcgacttgtgctcttggaagcttccgtttcgcgatcgcttcgtgatttctgctcgtgggtcgtttgctggtcagctcaaatttgagtcggagtcggtccttatacccgggattcggttaaattcgggaacttgactcgtttggcgaattgggttagctggaaagaagcatctctgtccgtcgtgactcgctgattggcttgactagcgggaggtttttatgtgattgctgtttttagatgagatagctgacttatgaaccattgcgtatcgcaaccttcatttatctttttcagcatttgaatccccttctcgacgctaagtacattcggacgattgttggattgaattggtagcggttcaaattagcatcttttgtgtggttcggcttgattgttgtggaatttgaaataggctttgcagtttaacgtgtggcatttacggcatcgtcgagtttatgcttcaatgctggcctaaggcgagaatgggtccttaatgaaaatcttagcacttgtcggtactctgtacattaatgtacttcatccccattgcaaaaatgtaaagtggtgtgcctttgcggttgtctgtttgatacttctctatcctttcccttggaattgcatcacaatttcctaactcttcttccaggtcgcgccatacgagagacctgcattaagcaaagg

SEQ ID NO: 93809 - DNA, 1035 bp, Eucalyptus grandis
  Intron number 2 from transcript Egrandis_v1_0.024112m (loc us Egrandis_v1_0.024112m.g) derived from phytozome v7.0 (c hr-ID scaffold_8; pos 1731003 to 1732037)
ccgagaagccggggcttttcattcttggcaagcaggtttgggtttcttgccctgttgttgatgttgttgttgttgttttttggagatcgaaaggaagtggaaattgagaggtggagggtgctcgttgaagatgaacgactgtgctaaaagcttgtatcgtattgaattaagaaatttttttgatagattgctagaatgacatggttctgggtaggaaagatggtatgctttgatatgatgatgcgttggataggaatgggtctaagtctaacgtccatttcaaatgttctttattctgtgtgtgtgtgtgagagagagagagatagagagagagagagattgctttcatgtttcgcgcagggtgttcatgagaaaggaaattagtccgaggctctcagttggtattctacagtttttagcacggttcgtggaatggtgtctgacagacaacttagcaagcgaaagcttcaatcttctgtcttagaagacaaaataatgtttggaaagcattttcaaccactcacaagttcttcgctttatctagaaatcgaggctaagattatgaatgggatgttgtttggctttcgtggctcttatttggttttgctgaggtccttgatgtttggagttgctgttagctttagttcctaaaatttgtatatcatcatggatttgagatcttcctccagcttttgaagaggttatgtagaagggagtcaggttcagctttcaattgtctgaatgattgtcatgaagcgttccccacaactattatgatgatgtttcttggggcattaatttaaattgagatgcaattctcactgcttcatcttgactaagttgcaaaaatttggagatatcaagtactttatgttgtttttgatccaaatttgattttataagattatctgttaaaatgaccaatttagagttaagtctcaagccattgacctatttgacatacttccttcactgtgtatataatgctttctattctgtatgagctaatgatgttgatttgtgagtaggccattg

SEQ ID NO: 93810 - DNA, 240 bp, Eucalyptus grandis
  Intron number 1 from transcript Egrandis_v1_0.043856m (loc us Egrandis_v1_0.043856m.g) derived from phytozome v7.0 (c hr-ID scaffold_10; pos 35188309 to 35188548 reverse strand )
ctggtactgtatcgtctttcttttttatttctttggtatagtttcccttctttaatttgacggataaagcatttgcttgagagtgcatagttggtacgaattcaaagtcacatcggtgcatctcccttttctgtttttgggttcatttctttcttcaaaatgtgagtttattcaagaaagttcatttctttcttaatcttgattttgaatcttgtgatatttcttggaaggtttgaatag

SEQ ID NO: 93811 - DNA, 586 bp, Eucalyptus grandis
  Intron number 1 from transcript Egrandis_v1_0.042588m (loc us Egrandis_v1_0.042588m.g) derived from phytozome v7.0 (c hr-ID scaffold_8; pos 52037423 to 52038008 reverse strand)
tatcaagccatcgaccatcgatcgtctccaaggaggttttgttggaaaattcaatttggcctcccttgcgtttaattcatttatcgatttcatgattaagattcaatttggcctcccttgcatttttctttggaaaatgatattgcataagaccttcgagcttgacgtatgataagcaaaacaatcaaccgtctcgaaaaataaggttccaaattctttttcaagcacgtggtccaatgcgacccatgtaattaacttcatctattagaatcggactttatgtcaatatgcggtcactactttgaataatggatttgctaattgcatctaaatagtattcccggctcattttctttcatgtcttttttcattatgggcgcatgcatgaacattgcttgctgcaatctttttcatcttcttactcctccttaatttctccccctccaaatcagttatctagactcattctacttgatcgaaccaatcacttaattgctttatgcattagtttagatggatcaatcaaattattttcttctttttcttgagtcatgacaaacttaatatgcttgcaaacaggtttacc

SEQ ID NO: 93812 - DNA, 732 bp, Eucalyptus grandis
  Intron number 2 from transcript Egrandis_v1_0.022077m (loc us Egrandis_v1_0.014641m.g) derived from phytozome v7.0 (c hr-ID scaffold_1; pos 28366653 to 28367384)
cgtgaagcgcctcatcattgtcggttccattacaggtactcctccacacagagctagctagttgtgtagaccaagtaaattgtgcatgttcagtttgttcctttgaaaagaagatcactttggaacagaaggttcaaaatctaaatccctgtcgcttgggaaatgcatttgtttccagacgcttcctggtagattggtagtactgtttaagaaatcatggcagatgaatttggggacatatgtgtttacctttacaatggtttgctcatatttaactagttactcaaattcggaaatattttgcatatttatactgcatcaaacaattgtgttagtaacactaggtcaatcatttgacatgtattagcaaccttcttcaggaagtggaaaaatcacactggttgctagaatgtcgagcacgtgcattgattgtgatactttgtataatcaaattgaatctggaagattaagataagttcaaaatatagtgtttttaggatttaaactagctccatgatgtctgggcttatgatgtggaaattgaagtctaatttttatctgcaccgaagaactatatctgatgatagaatctacataggcacccatattgctgtgaatcctcaaatcctgcagttagctatagcgacaataaggtagaaactacttatactcagggtcattttcttttggttttcagggaacacaaacacattagctggaaatataccacca

SEQ ID NO: 93813 - DNA, 818 bp, Eucalyptus grandis
  Intron number 2 from transcript Egrandis_v1_0.024747m (loc us Egrandis_v1_0.015631m.g) derived from phytozome v7.0 (c hr-ID scaffold_1; pos 7960267 to 7961084)
aagaaatagcagcccagctcaggccgagggaggtaagtataccaaaagttcttgcgcttccaaattgtcaaatgcaggatgattaaatctcactcttttcctttttttaaatcttgggctgtttctttctctctttttctctttaacatggggtttcttgagcaaagaattccgatgaaagccgattgatgtctgttcgatgtctaattggcatcgtcatcagcatctctgagagttgctgaggatatgaaaaattggtttatgtgaaaattttcggacaaagaaagaaattttttgctcaccctcacattatcagaacattcattctgatgtttcttgagggtaatttatgcaacaaccgtgttcttgcttaataagcacgattctggttctgagttcttgataccgaaaggcaagctttggtcaaaaccgtagtctttatgattatggcttcagttacaggtttcgagtaggtatgcgtgtacctaagtcgagtcaccggccaaaattaatggcattttcccttttgaagcataagcagactggctgcaaaagtaattcagattagttcaacttccaatttgcagcattctatgcttagcaaagctcaaataagaaacgacctatgctcgtagaggagcatgccaactgaatccagatactcacgaaagcaagttttgatatttcttaactgtatcctaaaatataccatgtcacgaaatgatgtcgaagtcagcctactgttttctactgttcctctgtaatttgttttgcctgtcacagagattccgaccaacaacgtaaggcttttctcttat

SEQ ID NO: 93814 - DNA, 464 bp, Eucalyptus grandis
  Intron number 5 from transcript Egrandis_v1_0.018234m (loc us Egrandis_v1_0.017684m.g) derived from phytozome v7.0 (c hr-ID scaffold_8; pos 704575 to 705038 reverse strand)
ggtgcatcaaggtgcttatgctctgattgtcccttcaatgttctctttgattcaaatttcttgtacagttttaccagagctatgcaggaaggtgctgattattgggcttcatgtagagtgccatagtctgagttataaattttagaatcaaggaaagcttttctcttccataaatgcatatattgtgattgttaagcttccttctccatcgtttttctgttgatttacttttgttcaagcctcttgtggaaaagtgcccttaagaaacagtgatgagaataaataagtaacataagaatagtgtgtcctacttcagaattggcatatttgtagctatcacatcctagaagcgcatgcttcaaaattatagtgtctagtgttagctctagcttattattaccaacatttcgatggatcacttggttgtaggtttgggacaccagacaacgttcttgctgcaacac

SEQ ID NO: 93815 - DNA, 708 bp, Eucalyptus grandis
  Intron number 1 from transcript Egrandis_v1_0.003958m (loc us Egrandis_v1_0.003958m.g) derived from phytozome v7.0 (c hr-ID scaffold_458; pos 113 to 820)
cttggttagtgtctttgcagtttacattatatcattttggtatcatgcatgcctcttattttgctctacatggttgtggattcattgtgcgaaaaaatcattccctgaattttaattaatagtgggtaaataaggatttgtttcatcattgaacgtgtttacttttagtgttgtggctttatttgggagaataaatgaattgtcaactttttggaaatattgatttacatgtctgaataatcaatattacacacacagtatatttttcaccatggagactttcttatcttgaatatgatggcagattatttcgagcattagcatgtgtgcttcttgttgcttggtaaatacacaacagaagaaaatcaaactataataagacaaggatcattttctagtttcatttcgtttctttccccaattttcactgggggcatgttattgcttgcttgaagcctggtttgtgctgccctaggtgtccactttactactttgaagaaaatatggtacatgatggacctctagattctgttttatactcatagggttttgctctgtgctgtacaatatatctggcatatttcattaaagtgaataattattttgtcatgatcaacttacttcagtaataacatttgagtttccgtacatttaacttgcgatgctcctccttctatcacagtctcagctatcgagcaactccagata

SEQ ID NO: 93816 - DNA, 870 bp, Eucalyptus grandis
  Intron number 2 from transcript Egrandis_v1_0.020126m (loc us Egrandis_v1_0.013510m.g) derived from phytozome v7.0 (c hr-ID scaffold_10; pos 1815079 to 1815948 reverse strand)
gctgtaatcttcccaggtaaattcctttactcaaaagatacatgcctaaaaaagtccatagaactcaagcaatgattaatcgagaaggtgcaatctcaccttgtttgatttgttcatagtccacaaaaaccaaattcgggtttgcagtttcccagctaattaatttgtttggcgaccttgttttgttcaacttactactctaaaaggaaaaatgtgagggggggtctctcacgaaattgaccatttcccttcgcttgacatctccagattccagattcttcttaactttcacatactttctactttctttattgttttgaacttctttctaataattatctaccctcgcgagaaaattttacaaaagttccacgtacaacatttgtaagaatcatcaaacacgcgtgcctacgtgcgtggcgcacctagttcttgttttaattaattggcgcattggacccaaagagagtattgagatctccaggctgagcacactgcacgtctaggcatctcttgttttatttttgtttttcgtataaataattacaactattttttgcttacctttttcgatccgtttgcgagggtcaaagtcctcgcttataaggaaagaaagtctcgacttttttgaggcctcgacttttgctttttggaaagctttagccctggagttttcctgcataaactcgatcaatttcaattgtagtccaggccaaggtcttaggcattgattgcaacttgtctactgtggcactacatcatgctacggttgagagcacttgattcgtgaatagaaatatccactatcatcttatgattccgaggatcaaattccatgactttgtcgaaaaaataatgattgcagcttta

SEQ ID NO: 93817 - DNA, 914 bp, Eucalyptus grandis
  Intron number 1 from transcript Egrandis_v1_0.022560m (loc us Egrandis_v1_0.021194m.g) derived from phytozome v7.0 (c hr-ID scaffold_1; pos 20724120 to 20725033 reverse strand)
tgcctaaactgtcaacatttgccagttcaatcttggtgagtcgattttccgatgcgaactcatttcacatgcggattttctttctggcattttacctttatgacacccttcttcaatatttttgattccttgtatgataaagcacgacaaacctgatacagagggagctctgtttctcctctcaaagagtacccagatgtcattaaagggaggtgatggagactatacgtctaacttgacatcgtaaatgatcttcagattgggaaatgcaagttctgatctttgtcgaatcattttgctctagttcgatggttatgaccctcaaattgtttacttttatttgtcgggtcaggcaagttctggttgttagtcactgacggtttgatatgctgcagttggtttcatttgatttgagcggcgcttttttcacttaattggttgatttgattccttttaatggaaagtgaaacttggagatatatgataaagcaagacaaatctgatacagagtgagctctgtttctcctttcaaagagtacccagatggcattaaaaggcggtgattgagagtatatgcctaacttgatgtcataaatgatcttcaaattggaaaatgcaagttctgatctttgtcaaatcattttgctctagttcgatagttatgaccctcaaattgtttgcttttatgttgggtcagacaagtttcggttgttagaaactgatattttgatatgctgcagctagtttcatttgatttcagcggtgttcttttctcttcgtttgttgattatgaagaggatgagagaattagaatatatgaatcttagcacaagctggaagctttttcggtcttcaactttaagctaattgcttactccttactgtctattgaaggccctttggagacgattgaa

SEQ ID NO: 93818 - DNA, 732 bp, Eucalyptus grandis
  Intron number 1 from transcript Egrandis_v1_0.009828m (loc us Egrandis_v1_0.009828m.g) derived from phytozome v7.0 (c hr-ID scaffold_10; pos 24502308 to 24503039 reverse strand )
cagctcttcaaggactacttcgtcgacgagaggaagtaagcaatctcgtcccccttcatccattcattcattcttccatatcgtctgactacctcagatcatagctagtttcatttactcttttttttttttttttaatttacgttttttctttagtaaaataagttatatttattttcgttaaatagccagggtcgcaggctactgtcctcagccttgatgagtgcacgtggatctctttttgtctttgatttcgccgttgtcggcgtagttattacgtgaaaatgagaggatggctaagttgacccacttagatggttattagatggctccatcggtgacaaagcaaccacatggctcatgccctatagaccatgacgataatcttattttcttctgttttttagcaattagttcagaaaataaggaatgcaaaacgtagtgacggggggcagagctggaaacggcaaatcgagcttcccactttaaagctgcattaaatttaaatccgtgggggttattgtctgcaaatttatgacttttctgagtgctgacgtggaatggtggaaaccggaagtcccgccaagtgccgccagcgacggcggaccggtaacccgtcggtgctcgaattgaattttggagtttctgggggtttgtgaaagagttagtttttgatggcccgaaactgaaaatgtcaagaacttctgcagaaaactggccagcgtgaagcgg

SEQ ID NO: 93819 - DNA, 864 bp, Eucalyptus grandis
  Intron number 2 from transcript Egrandis_v1_0.011054m (loc us Egrandis_v1_0.011054m.g) derived from phytozome v7.0 (c hr-ID scaffold_1; pos 22937464 to 22938327 reverse strand)
cttctccttctcccagggagttgcctccgaagagggtaattcgaattttcctccgtttaaatctctcgacgtgctctgtttcttccatccatcgcggtcggcgagcaaagcttagaaaaccatatgatctccttctcgcgcttgaactgtcactggttgtgctttcgctttcgaaaaccgtcctcctgctgcaacacggcagtccgacagtgcggaaggaaattctatcgttctcttacaatcttgtggagtgagttaacgttttttttaacgcattcatgccgattagtccttccacaaaacaatccaaaaacaagaaatcctacagctcctggcagtttcacggactaggaaactgttcggatgtcggaatcaggcctctgctctaaaacagaaactttgtatcttttaaaacggcatgtctcccaattataaaccatattaacatctaataatcgaatcgattagcccatgatctgcttaatagtcgatgatgctagggagattttttttttgtcgggtgtcttttcttttttttttgatcgtggttcggatcatcaatgactatcttgcagaagcagcatttaaccatatcacctaccatgacacagtcttttgaggtcatgggagcatgatacctcccatggtccccctgccatgaagctttgctgtcacaccacctaaaagcaatcccaaaaaaaaaaaaaaatcatctttttccatctttcatgtgcttcctcacgttagatcgccatcgacccgctatcaatcttgcatcctttggaagtaatttggaactttagttgagtcgcggccgatggaaatagttgtctgtgacaatggttttttcggttttgcagaaag

SEQ ID NO: 93820 - DNA, 1046 bp, Eucalyptus grandis
  Intron number 1 from transcript Egrandis_v1_0.004769m (loc us Egrandis_v1_0.004769m.g) derived from phytozome v7.0 (c hr-ID scaffold_10; pos 28578429 to 28579474 reverse strand )
agccgacatcccaagactggtgattggtaagattcttacggtgccttggtctttctccaatgttactgagttggtcttggttgcgtttctttcctttccatgctttgatcagctttgtgtccttgttcagttgactattactcctggatggataaatgctaatggaatggtctgagtgagtttgtctatgtttataagcttggccagtcagtgttactatctgtttccaggttttccttttgttcgttctttatttttcccccttaaaagaacgtcctagaattcgcatcagttaaaggctatatctagcacagacttgcatttggcaacatcttttgacatctttccagttgctactggtcctgctgatatgcggcattagagttcattgtctggtcaatgcttgaccacatgaaccttcgctctgatgtagttttgcgcgtttgtcttgcttctgctcatttctcctcttcatcatgccgaaaagaatggtgctggagtgtggaagaaaagataaatttttcatgctgagaaagcaaaaataaagagaagcatacatgtgaagagaaatgaagattaatagtatacatcgacccagagattgcagtctttttattttaactaattaatgaaaaatcccacctagtggtgacatacttgagatgatctctctaatggtttgttgtcccgcttttgagtcaaatagaatctatgtgaaaggagtgaatgcctgaacaggctttgcaacagtgagatgttcagaacaattgaacatctcctttctaagacaagggccacagtatttgaccatttttccctttaccaatttcatcgacgacagttctcagctatcctgtaaacaaggtctggtctgaccacgcatgttctctatctttcctttcaattagttataaattatatgacaactgcccgcccattgcctttcgactattactatggtcttttctttctttctagaaaatctgctaagtcttttctgagaatttgtaggtaccctgcaatcaataagcctgccggcattgtcc

SEQ ID NO: 93821 - DNA, 442 bp, Eucalyptus grandis
  Intron number 1 from transcript Egrandis_v1_0.019606m (loc us Egrandis_v1_0.019606m.g) derived from phytozome v7.0 (c hr-ID scaffold_1; pos 32128708 to 32129149)
cattttcacgattgtttcgtgagggtaagttactggcgtcttctgccgaatgaacatgtaactttgatatgttatagattaaggaaaatgacaatgttaactaagtagctagtttatatatcaatatgtgaaagctatgtgacatgctttattgttaccattcatccagagtctagtagctaacgcagcaattgatatatcaattccataataactagcattagtcttaatcatattgagtcgcatcaactcaaacctgttaaagctcaacaaacattatgtgaaaattactagacgtttaagaagaatgatgttgtgctcgattgatggtgtcagataggtctgtcacctccatttaaccataaaagcatgccgctcacattttttttgcctcgttttctttatagggctgtgaggcatccatcctcatcgactccaccgc

SEQ ID NO: 93822 - DNA, 941 bp, Eucalyptus grandis
  Intron number 1 from transcript Egrandis_v1_0.008389m (loc us Egrandis_v1_0.008389m.g) derived from phytozome v7.0 (c hr-ID scaffold_8; pos 67815615 to 67816555 reverse strand)
cgtcacccttcttcctccgtcttctcgagctcccagtacgctctctctctctctctctctctctttttctctctctttcgtgaaccagcgtgcaaagtgcggtgattatagaattcgcttccgttggcatgtagtgcttacctgccctgtttctttattttatgcgacccggaatcgtgtcttgtgtcctccgctcttaaagcgacgtcctttgctcgcgtcgggaaattccggatgatgggttgacaccgattccgatgggaattctgaaagttctgggatttagagcattcgattcatttaatttttgtgggtggtgggtggtgaaaactgggggaggtgttgagatctgggatcagctgggttctcctcgttctcagtgatatgaatatcaggtgtagatggtggctcttggcttgattgtttcgcttctcttataaattgaattgggctgatcccataaggagaggaagagacggttccgccgataatttgtgctggactctggcttttgtggtgaggatacgatttgttcctgcagccagtttgcgggttcatttcaggcatgcctgactaaaaaacagaattcttaactagtgtgtattgttaactagcggccgtagcgtttgaattctgaagcaccaaatacagaggacctgagaaaaagcaatgtatttgaaactgcaaactgtcctcttttgttcattaaggagtgccctttgtattataagctttgcaacttgtgataaagagaatgaacctcttatggactatgctgtggggtattttgacttgcaacctaagttgttttcaagaagacaatgtataattttgggaattcaattgcaatgtgtcggtagttttgatatcccaagcacactttatgatgaatgaggaggatgactaattctttcttttctctggacaacatagttgtaagc

SEQ ID NO: 93823 - DNA, 677 bp, Eucalyptus grandis
  Intron number 2 from transcript Egrandis_v1_0.006534m (loc us Egrandis_v1_0.006534m.g) derived from phytozome v7.0 (c hr-ID scaffold_10; pos 1441242 to 1441918 reverse strand)
cgggatttggaatccgtgttgcgtcgcggaggtagagtcttgttctctctttattttgttatgtacttgttctttgaattcggtggagagatggggattcaaatttaggtctccatttgaatgaaaaatctcgtctttctctcttcttttttccttttttttttcttccagtagtagtttaatttaatcctcaacatacctaatggttcaagctattcttataatgagtttcaaaattacaggatgcaaattttgcgcttaaactcgtagattgattatgaaatgctgcagaccctgagttcaactgaattgcatctcctcatttaatttatatagaattgaaattttctttcttttttcctctgtcgaagagggtaaatgcttaccaacccaaaaaaccaaaataaccaggttaaatgcttaggcctgtgcattttgaagtgtcatgacatgactgactatattagagatgtgaggcgatgttcatacttatgacagcatatggaacccactgacgttctttgcattttcctctatatcaaatgtagagatgtggaaattgacagtgttgttacttttttgggaggtttttttaaattttgtgtgcatgatagtgtacttgatcttcaaaatttgatccaggaactaacaaccattctccaaaatctgtgaaagat

SEQ ID NO: 93824 - DNA, 601 bp, Eucalyptus grandis
  Intron number 2 from transcript Egrandis_v1_0.010167m (loc us Egrandis_v1_0.010167m.g) derived from phytozome v7.0 (c hr-ID scaffold_8; pos 13119277 to 13119877)
gagctttcggggtcctgaagaagtgtgctgccaaggtcgtgtgttcttcgactgatcccctttttttggcttttccggcggattcgtttcgggattactttgtatcgttgagttatgcgaatgggcttgtcgttttcaggccctgttcttgttttgtgccgacaccgtcgtgccgttcggatgctagtgaaccagatagttacactttagcttgccgtttttccctcttcccccttgtattgattagattaagttttatctaacttcaaatcctattaccgatgtcgaattgttacaacagtatgagtcggagtgctttggagctctatattagtttatctttttagaaatcctgcactctgaacaataagatgtaatcatagtatggatttttttttttttaatctactgattaacgtcttgaactttgaagctgtattatctaggaaaatcagtttaacttttatgaagcaggatgtgttatcaaagtccatacgccaatttaattgtcatcagcatcgaacgtcatatttacttaaaaaacaaattatagaaggttactgattgtgtcaatgctataattctcaggttaacttggaat

SEQ ID NO: 93825 - DNA, 727 bp, Eucalyptus grandis
  Intron number 2 from transcript Egrandis_v1_0.021883m (loc us Egrandis_v1_0.018225m.g) derived from phytozome v7.0 (c hr-ID scaffold_10; pos 30344885 to 30345611 reverse strand )
tgttgaattccctagattatgtgagttgacttgtatgtttattgctctttagctgcttctacacttcttattatgagagttgatgaatgttataaaatggtcaatctcgtcatggttcttacacactttacaatgtaattccgatatcttgtcagatatcttgatttttcaaatcaatttgttaatcttgtagttttatagtacttttaactttgaactgtcctaaggttcaattttatagcctttatccctggtgacctagaatgcacagaacctggaaaattttacagttccaggattttctgtttgttgaatcttctagctgatcgaggttagatttttctttgttaggtagatttgtatgtcaaaatatttcctttcggataggaaatatatgtgcttgaagttttaataggtgttaactgagaagctagtgctgatattgaagtccagttacatctgtgccatggtgcttgattctgtcagctggtcttttgcacatcacggttgtggatcttttatctttgatttcctatgcaaattcattttgtatagagatgatgttactaggagatagatgtgtaatttctttccttcgtgtatgcttctcatggaagtgatttgtgtagttacctccattttatctcttatgatcacaagatggtttctagcattcagaccctgagatttctggttttgcttgctcttttaagtctctgaagtcgag

SEQ ID NO: 93826 - DNA, 912 bp, Eucalyptus grandis
  Intron number 1 from transcript Egrandis_v1_0.021883m (loc us Egrandis_v1_0.018225m.g) derived from phytozome v7.0 (c hr-ID scaffold_10; pos 30345633 to 30346544 reverse strand )
ttcttttcttctgccgaattggccattctctcttggtaagctctgggatcgtttctcgatcaccctggggtcattgggttccgcgtggtttcgtgggtcgccccaaagtttcgattttgattgcgcttccgtcgtgatcggcggtatctagggtttgggaagtccgaggaggttttctctttgccttgtcgggtcagtgaatagtgatcgccgcgtgggagctcatcgacagtggatggtgctgcggtttgtgggtaattagggggtttctgggtacgatctgcaatttccttggatgcccgtttgttgaattggttgttgtgtctcacggaatgtgtggctgcgtgccgagttggagtcttgagcttgaagttgaactttcattttgtgctgtggatggtctgtgtgatctctagcttattttggtcgattcgccagctttagcagtgcaatggaagtgtgggtagtatgagaattcttgcagtttgtagtatatccttgtgcagtcagccataagatgttcatttttgagggtgatttacgccgtcacaattgtcaagtggagttgctttgctcgtataggatagatttagcttacttcaatctttgttcttccccttttcattttttctgctggttaaaagttgtttcatcattcagttgtgacattggctaaatacaggcactatctgatttagaggtatattctttgtatagtttctacagcttggtagctgatatgtggtggtttaatgtgagcctgtaaggaatggtcacttaatattagtcttcaatctgtatttgacacatttgagaaatttttttcatctattattttcatcaaatgtgtctttacacctacgaaatagtcaacgtcacgttattttgactggatattttgcaggcaatctc

SEQ ID NO: 93827 - DNA, 984 bp, Eucalyptus grandis
  Intron number 2 from transcript Egrandis_v1_0.023439m (loc us Egrandis_v1_0.022611m.g) derived from phytozome v7.0 (c hr-ID scaffold_8; pos 10964492 to 10965475)
gtgcaagtcacgtttatcccgagcaatcggtacgagcacctccttgtagcgctttactgtttgaacccatttgcatgctcacttcgggatccagtgattatctattaattgcgcctttctttctttttgggttgtgttcttcttcctttagagaattcggggaatcttcaaattggcttatcttgcatgttgtgtttcctggatttcatgcctagcaggttggaaaaaattggctgttcatccctgtcgagggtaaattgatagattgttagtttttcatctactgactcgacagcagcggatgcctctactgaggttcatacatagaaaggagatctcctctcttgaactcctctctagagggccaatcactgcatatatcgcttgcgaggaagctttcctattccttttgcagataggatagatagagtcgttcgttgtgacggataaggtcattagttagttagcaaaagaatcaggttagtaccatcaatattgtttattgaactttgaatatcatttgagctttgcattttgtttgacaagatgttcgacatatctactcctttgcttgaggtccttcctttgcaaacctttcggtgatttgttacttgtcttatagggaagaaataagtatgctcaattggtcacttttgcatgttgttttctattgctctgttcttttctgcgagtatcgggtgatttatcattacaacaacgtatatgaagcagggtgatctgcaccagaaaaccatcacctaatttttaagtctctacatcaagaagaatgtgtatattaagtcaaagtcactctcctgcatagcgtgttgctagggagaaatgctggaatttgccttcctctaggtcattaatgcctgtaacttttgaggtctcctaaagagtaaggatgcatatttcccacattgaaagaaagaactgattattttaggccccggcggttccttttcgcaagcctgctgattt

SEQ ID NO: 93828 - DNA, 567 bp, Eucalyptus grandis
  Intron number 1 from transcript Egrandis_v1_0.016519m (loc us Egrandis_v1_0.016519m.g) derived from phytozome v7.0 (c hr-ID scaffold_10; pos 17036290 to 17036856)
cgggtgcgggtcgcagggttctgaggatttcgaaggtgagagcgaccaactagttgactttgctttctttctcgagctccttcatgctcgcttttgcgggtttcgcttttccggagtgtggggacattagggtttgcgtcgtgacgctgttggttcgctgattcctgccttgctttatggtaaagattgacgcgcgagttgggcttgtcctgtgtggttgctggtgtgcgtaggttgaggttttggtctgtaggagcctcgaggactgagcttggtttgacttctttcagttgtggaatacatgatgagaggagaaagaaaagagaattttggagaatatgcgtgtaaatgaagggctatgttttccttatatatctttcttgttgaaaattctcacgttcttcgtgagggttttgacagaattgtgcttgaatcgccggttaattaaattagttaattttcttgctttgtcagaatatcggttttacagatggaattggaattttgaagtttgttactgagtttgttatttttctagcaggttaataattgcattactgggaaaca

SEQ ID NO: 93829 - DNA, 979 bp, Eucalyptus grandis
  Intron number 1 from transcript Egrandis_v1_0.017708m (loc us Egrandis_v1_0.011188m.g) derived from phytozome v7.0 (c hr-ID scaffold_10; pos 13929834 to 13930812)
cggtacccactgtcggaactgtaaacagagctccggtaatccaacatccccctcccccccttccctttccctccctctctctctctctctctctctctctctctctctctctctctctcgtgcaaataacttgtagagatagaaattaatattacaagatcgtcacgtgctaccttgtgtttatttttgtcaaggcattttctttagtcctttcttttctaatgatttggcaaagaaatccgacttagggatggaagtttatctctggttgaggtagacactacacgcgtatgtcgatcgtacgtacaggacattacgtagcactagttttagagtaggtcattctcaccattgagcattgatgaagttgataagcaacgtgatttggttgggagtttttatcatctctttcatacaaatcatatttaaccttaaacctttcctttctgaaactcaattgcttgggactcatcaattaatttcacattttctgtgatgaccctattcatatcctttgataaagtgaactttttacttatgaaaagtggatatatctttcacttgacttagatattaacttaggataccattcccgatcttcgcgtgacatcttcggctttggttatgccagaagccacagctccaacgaagtgacacttatgcctgctgtgtagctttaaatagtttgatcctatttctaacgacttgatccaaacgcacataggctatttctctaacccaatattgaagtcatgaaaattgccttggggattataatgttagaattgaatagtactactgtgtaataaaaacagtaggaactcttaccttctaactttaactaatcaattataccaattttatgttcaacattgttgaggggaaagagacctctgtcacgttgatagtcatgaatgggttgacaaggagtttgtggattcatcttttgatgagtggatgccaatgcagctcaacctaa

SEQ ID NO: 93830 - DNA, 575 bp, Eucalyptus grandis
  Intron number 4 from transcript Egrandis_v1_0.007266m (loc us Egrandis_v1_0.007266m.g) derived from phytozome v7.0 (c hr-ID scaffold_8; pos 57296696 to 57297270 reverse strand)
agaactgcagcttgggattcttcctggattgggaggtacgtaattgctcaagtgttgcctatgtgatttttctcctaatctattcagtaagctttgctgttggaagtttacatatgtatcttaattctagattatatagcagtagcattaaaattgtgaagaaaaggggtttctcaagaaaagatgttgtcatacactggaggtcagaaatccctgtgaggtgtcgacatagaagcagcatggaaattgtatataagctttcaaatgcatagtggacataagccttgaatggttttctctggctggtttttattttccatcatacatgcatgtgacaacttatctttgatttaacattaagcgatggatagaaacggataaccaatactttaagacaaaaagttcctgcttatatgttcatcttgcaatggcctgagttcaatcataagtttctatttttgtgcaaggacattatggcattgtctatgtgttatttgtaattctgtagcttccttttcttatgcatgtaagctggttcaggaacacagcggcttccacgtcttgttggtctatcc

SEQ ID NO: 93831 - DNA, 827 bp, Eucalyptus grandis
  Intron number 1 from transcript Egrandis_v1_0.015128m (loc us Egrandis_v1_0.015128m.g) derived from phytozome v7.0 (c hr-ID scaffold_1; pos 16468726 to 16469552 reverse strand)
gcaaggtcacgcctgccacgagacagattgatcatgtgagtgagaaagtttggattttgaatgggcttgtgaaattgtctgtgcagatttcggttggatttggtttcgacggatcgcctttgagaaatttaatttgggcggcagatggatttgcatttctgaattactttctcctttgtgaggagtggcatgctaaccatgcctatagaaatggtttaatttgaaagagaaagatcgctgtatgtctaaatatatgtccttttgcctgtgaaagaattgctatgtgattgctttcattctccgtctagatttggttaattaggtgacatcttcaatttctaatttgctttagtttattcttatagaagtctttcgataccggaatctggcatttaccagaaataagagaattttgatctgattaatgagactactgatcttcattgggatacgatggaatgccatatgaattgctggattaatagtcagagtctagtgtcatattagatcacccggattagtaaaagaggatacctaagataaggcataagtttggtgttctgctgctgcattttgttggttcttgcatgttctagaatttacacgttcacttgttcatttgaacaggaattttcttgatgtgtagttagctgtgtgtagaggaaaatacaccttgacagtttgaattcttctagttttctcatgctcgaaatcaaaacttcatcacaagaaaaagaaaactttctattattgtttgcagttttggttggaaattagtccatatgcttatgcgtgcaggatctaccacgaaccttccctggtcactc

SEQ ID NO: 93832 - DNA, 578 bp, Eucalyptus grandis
  Intron number 2 from transcript Egrandis_v1_0.027520m (loc us Egrandis_v1_0.027520m.g) derived from phytozome v7.0 (c hr-ID scaffold_10; pos 20180044 to 20180621 reverse strand )
aggtatgtgcacaacaatccgatgccaatgtacactaatcactgtttcatgttcttcgcacgcgtgattttcatttttcttgaatgtaaataagaacttgtacgatgttcatgcagcacaagttcgaaattttcccagtccatggaaaggtcggcgtccttcgtttctgttgccaaagcatgaatttcgaaaaccgcatttttttacatgcgccgtctcttttcgcatgttcttttttgtgtgtcgaattgattgtccgtttctggtgtctggcttgtgttctgatacgtcttcttttcatggggaattttcccttatgtttttatgacgtcccgagaggtttatctacacatgaacataagctcgatcaagttccagaaatagttggtcagggtcatgaagaagagaaaggaaaggtcaaacctagcgaaaagattagtgattacattccttaattagctgtattagcggcaagactcgcacgtgcaacgttagacgacaatggctttttgctaaaaattatttagtcatttgactattcatcctgttttgttgatgcgagaagattgaagccgcac

SEQ ID NO: 93833 - DNA, 1015 bp, Eucalyptus grandis
  Intron number 1 from transcript Egrandis_v1_0.022529m (loc us Egrandis_v1_0.019319m.g) derived from phytozome v7.0 (c hr-ID scaffold_8; pos 44905576 to 44906590 reverse strand)
tctcttggagcttgaagcacccatcaaagtttgtggtactttactcttcgttctaattcttgtgatattcatgtttgtggttcgtaatcaagttcaaggactggctgcatgtcaaaaattactgtcagtctttcttgtaaatttaagcatgctttaacatcgtatttggagaacaggtatataatgatggccaagtttcttctccttttgtgttaatatatgtttaagaaaacagaagtagatcttttgctagatttgaataataattataataaaaaaaaagacagatattacgttaaactactggattgaatgatgagcttgagaagcagtccaaagcaagtttcagttgtctggtatgtgaaatcggtgggtttctgggccacagttgttttgagtataagaatatgtttggttggattgattacttcactcgaaagagattggcatggccaacgatctgttgcatggaagaatgaagcaacaattgctgagcttatattccataagaaatggagctaattagaaggactatattgctgttgggctaaaaataatagggagagttcacatgctaaattgcgtgatttgtcggaaaacgatgacaggtgacagttttctgagatagtgcagatttccggatgatgattctgaaaacgtgatcttttgaattccttctttctagttgatcatccttatttctgcaaatgactggcacttgttatggtcagcgtaagtacatgaggcatcataatcatttgtgtacctgatactgtgatacaatgttgttggttcatttcccaatatgctttcccaacgttgttttgttgctatgttctcactcgtcaatttcataagtcttgacactctgaagttttgcattatttaaactgaaggtcagctagcatcagtaatatatatatgtccacgtctttttgtccttggaagatgtgagtttccagccatcttattctcaaataccataacttgtactgcttgtactatcctgcagctg

SEQ ID NO: 93834 - DNA, 371 bp, Eucalyptus grandis
  Intron number 1 from transcript Egrandis_v1_0.023440m (loc us Egrandis_v1_0.023440m.g) derived from phytozome v7.0 (c hr-ID scaffold_1; pos 36623867 to 36624237 reverse strand)
agagggcttcattagaagtcgctaaagttgggaaggtctttccctgctctaatcttagtgcattggttttgaacttaggctgccaatcatctgtctttcttaatttcccccttctccattagttttatccattgtacagttcatctgtttgtcagaaccgtgagtcgtgactttgatgcttacagatcaacttaatcttcgcttgcagtggtacgagagatctgtgaatttctgatacttttcggtttttgatatggttatacgtatagaataaaagtgtatgtttgtatcctcgtctttcttggttgtcttcttgcttctcattaaactaagcgacttacatctgcagacctatcagatcttgaattcag

SEQ ID NO: 93835 - DNA, 989 bp, Eucalyptus grandis
  Intron number 1 from transcript Egrandis_v1_0.012551m (loc us Egrandis_v1_0.012551m.g) derived from phytozome v7.0 (c hr-ID scaffold_8; pos 14025406 to 14026394 reverse strand)
tcaacaccggtctcgagctcttctctaaagggcgggtatgaagaattgctccgtttcgtggttttcgagatgggtttttgtcgggaagggcctgtggtctgtcaagtttgtagcttttgcttgttctttgttgctgaataggaatgtgaagtgcaagagttgttattggtgtgatattcggtagttttggatttcacgattggtctttctgggtgatgactgtatgagacgaggagggtgttgagagtgatggggtaaagggtcttgattgggatgctatgaaatgagttcctaggtgaattgaatttggagtttcaggccgtgacatggacatactgatgtttgcctgggtttaatgctccagaattgcccaggatttattggattagggaagattagtcaagggaaaagagagaaatggtacattgaacaacagtatgcatcagttcaatgcaagtgttatgctaaaagtagcatggctgacgagtctttgttgcagcaggacgagtgcacggttcctcactctcccataaataagaagaacaatgtgcattgtgactgcgactttatggctttttttgtaatgtaggtcttgacttcattatattattgacgtatgtggttgttttgaaggggaatcttgatcccataaaatgttgattcaatgaaggatgagaatagcctaattaattctagttctgatagggcaatctatgtggatgataggcttctatggtttagtcgaatttgaaaagcaacaatgggctgccaacacgtatttgttggatgaactcttctctaaccaaccttggtcatgcttgatagaggataatgtctcattttatgctttgattacttggtcatatatgttcaatttcctagtgtgcgtgctattgaggtggggaataagcaacattcaactttttctcatgccaatatcgccatgactttcaggttaaagaggcactgtccctgtttgatacagccct

SEQ ID NO: 93836 - DNA, 889 bp, Eucalyptus grandis
  Intron number 2 from transcript Egrandis_v1_0.042508m (loc us Egrandis_v1_0.042508m.g) derived from phytozome v7.0 (c hr-ID scaffold_10; pos 3051212 to 3052100)
caggagttccctcgctgaggtgaccccgccggcgggtggtcgaattgcagctcagattctagaatcaaacaaaatgcactgtaaattaattgaggtttttcgtgcatgggttcgaggtgttgactgaaatcgatcgattttgcgccattttttatgcttcttttacctttttaattttctttggttgctcaggctcgtcgaaacgcagagagacgtcgcgttcggcgggtgggtcggtggttcgccgccagataagtgcagcgaatgtacagccaaaaacttgagacgattatgaagtgatcggtcaaatataatagaataagaacaaagcagatgctacctgctgttatggggagagagagagagagagatttgtgttctgtttgttctgttcgctgaaattaatgtaatgaactcccgagcaagtcatgatcatgtcgaactctctccctctccatctctctctctctctctctgcatctcttggttgacgatgattctacggcaagcattttgctgtgatgacgctcctgtagtttgcgcaatgctttcggtcgaatgaaacgggcgcttgtgtcggaacgaaactggagaattgacgggaaaaaaaaacgtgggatttactttagatgatcttgaagaaagaaagaaaagaagaaagcaaatcttgttggaaattaatccagagaagacacaaactgtttgttgcaatcagaacatcaatgtaaagaagacgataatagttatataatattcttctttttatgtaaacttacaactcttgaagaagaataaaataagatatcattgaaaaataacataaaattggaggtgaggtacggataaccgaatctccttaaggcgattagttcctgtgctctgcagattc

SEQ ID NO: 93837 - DNA, 439 bp, Eucalyptus grandis
  Intron number 1 from transcript Egrandis_v1_0.042746m (loc us Egrandis_v1_0.042746m.g) derived from phytozome v7.0 (c hr-ID scaffold_1253; pos 3589 to 4027)
ttccgcccccacaatacaggcagaagaccagaaaagtcttctcaaatgcgctttcgaatagaagaaaagagctaaaaaaaaaaaagaaagaaaagaaaagaaaaaccctacaaaaagctgtcccgaagaattcctcctctttgcaaatctcttctcaatttccattagtactgatcgtgcctcttgtttcttcctgcttggctttcatatccacccgcttccttgagctttgagtcatgaaactcgtggggcattagttttgcagagtttcaagcatgccgtttgcttctttgtattgctcttgcactcggttttaaccaagtctccaccaccaatgaaacagacagatttgtgcttctccaattcaaggctggcataatcaaagatccttttggtgtgctcaactcatggaataatagcattgggctttgccagtggt

SEQ ID NO: 93838 - DNA, 755 bp, Eucalyptus grandis
  Intron number 1 from transcript Egrandis_v1_0.019331m (loc us Egrandis_v1_0.019331m.g) derived from phytozome v7.0 (c hr-ID scaffold_8; pos 65117668 to 65118422 reverse strand)
ctcccattagaatcggcggtacgggctctctctctctctctctctctctctctctctctctctctcatgttgtcatgctctcatcccactctctccctcatgttgtcaagctctcatcccaggattgattcgaaggtggttttggttgtgcagcaggtgggttagtctgtggcaaagagggttatatggcaaattgctaggaaccaataatcttgagggcttgtgtgttatggttttctttatcagagctctctttcgtttctgcagtccacctcattagcacgtggttgacattttcgtctgtttctcgtttctgctgcataaacaacggcggttttttttgctgtctttctctaacgttggaggcagttgatttgatgaaacaataactcgtgtttgctagtggaactattcgattgtgtgttcgttcctgcttagcaaatggacaaagagcaggctgccgaagtaagaatcttgagatgttaaaaatttaatttatgcgcattgaagcattggtgaatcttttaatgtttgatgatggagttgggaggatagatacttcaaggatggggttctcagtagaacttgaagggactgctaattagtttcaggctctttgattgaggggaaagtggtacaaattcatttgaactgaatgcaagcttctgtcttctagcttgtcagcgcattctttacaatcaagttagcatgcatcaagtaattctaatgttgcaggtctcttacaggtgatatac

SEQ ID NO: 93839 - DNA, 631 bp, Eucalyptus grandis
  Intron number 1 from transcript Egrandis_v1_0.033442m (loc us Egrandis_v1_0.030639m.g) derived from phytozome v7.0 (c hr-ID scaffold_10; pos 27754754 to 27755384)
gaagacgagctctgcagtttcactgtttatctctggttagagtaactgaattcataacattggccttatggctcgaggatttgaagttttttctttgttttcccttggttgatgtataggctgattggatttttttagtcccgtttagctgtaaaattcgatctttattgcgctgatgtgttagctgggggctgtgagatgtttgctcattgtcgattttgtatgtgttccggttgcggcttcgaaagtgtgaaatttggtcggaattgggaaatgagttagtaatgcaatttctatttaggagtttcttacattgtttttaattctcttgtttgggaaaaggagaagagattcacaggggtgagagagagagaggggaagagatctaatcccgatcgaaaaaagccacctttttctcataagttcaatgagtacttgctgtgactaattgattctcattctctcgtagtaactccaaactaatgcacatgtctcggcttcaatagtcaaaaatcaaaatttgctgcttttctccattctagtttgtcgcttcttgcgcttatttatttgcatgtgatggaactttaatggtttgtttccagtggagccgtcagagaaatctgttgagata

SEQ ID NO: 93840 - DNA, 1030 bp, Eucalyptus grandis
  Intron number 2 from transcript Egrandis_v1_0.021849m (loc us Egrandis_v1_0.021849m.g) derived from phytozome v7.0 (c hr-ID scaffold_10; pos 22098738 to 22099767 reverse strand )
agattgcggtgatcgagaacttgggggccactgaggttcgttctcttgttctttttttgtaattagggtttcgcgtgctgagaatgaatgcgtgagtgcccctggttggttgccaatttttgggagtcttgtgaggaatgattggacgcaatgaggaggctggttatcgtttatgctgcaaagaaggggtttttatgcgtatgtgattgtggggtattggggttttgatattttttttgctaatgtgagttgcaagcatgagatgttaggagaatttagtgtttcttgagtggagttcttggtgacctattattcatgttatgctcaggaaaagcgtctagtggggttaatttttgggtactcctggcttaggttagcccaatgcccattctgcttggtgtgcggattgggctaacatagctcgggagcatgtgggacctgcatgatacaacggctcatgtgaaatgggctaacatgagctgggagtgcctaataattcctccatctggtgtcttattttaaactcagcaattgcaagatgcacacgttgatgacaatctggtgcattgttagtgaaactctcttgacacttagagcatcttgttcactgttgtttgatggagcttatgtgttatttgttttgtcaagtggagagacacctttgatagtatactgcttattatctggtcaatcattgctcagaacctgccgactcctgtaatttctaacttcatcaaaaggatctagaccatacaatggaattctcgtcatctctctctctctctctctctctctctctctctctctctctctctctcacacacacacacacacacaggttgtgatatggtaaaacaaagacattagttttcattgtttgctatttgtcattacatggttttctcttaattttatattactagtatgctgatgcacttaatcaaataatgtatgtggcatatcttcggaagagcagcttcatgcttttatttggtgcaggaccaatttgacactattgatttgtccgaca

SEQ ID NO: 93841 - DNA, 772 bp, Eucalyptus grandis
  Intron number 1 from transcript Egrandis_v1_0.044385m (loc us Egrandis_v1_0.044385m.g) derived from phytozome v7.0 (c hr-ID scaffold_8; pos 25532328 to 25533099)
tctcttccaagttgtatcaactgtccccacctgaggttggtgcccggaccttcttttgcttttcgtttctttttttcttctttttttctgagtttctctacagaaatcactgaattgctccgtcacttagcaaatgtatggtgacatgaaacatgtatgcacgacaatattgcctaaattggggtttgctctgtgtcgaggttaggagttggacatgaatagaggtggcaaaatggtactttccaatgagccgatttgtatgccgataaaagaaattctattaaataggtcgaaatgggttcatagaagatgaaagactaatttcatgcgggtgctaaatgggtttagaatgaacccagcttcgaaccactcttaacaatgcaaaaagaatggcgtgattatataaaagtccgcctcaacaaagtgcaatgtgtcgactataagtaatcaaatagagtaggcactaatcactgtacgtagtttttaacgaatttaattgcttaaattaggacaaagaaattggctacaaatgctagaattacttatgcatatgttggtcttaattaattagtatgtaaagggatcgtttggatcagtacacttggcaatccagaacataaatgtacgcttcttaaaggagttatcaatggccgcgggaaaagtgataccattttttttatcacaatcaaattcaatattttgattcgctcacgattaataaattgcaaatgtcgtaggatttgactttggcgtcctacttaataaggccatt

SEQ ID NO: 93842 - DNA, 1001 bp, Eucalyptus grandis
  Intron number 1 from transcript Egrandis_v1_0.000501m (loc us Egrandis_v1_0.000501m.g) derived from phytozome v7.0 (c hr-ID scaffold_10; pos 716978 to 717978)
accgcgtctacgccgctcacctctcttcgttccaggtaaaggtcgcgaggggctctctcgtcgtcttctgctgctgctgctaacaatggacgtgtagctacgcagttccgtcggctggcggcgtagggattaggccggccggagtgggggcgaaggcgggattcttttgggatcgttcgagtcgggatttgtcgaaaattacggggctcgtaggtgtctgagtttgtttttattctgattttttttttttttttgcgttatcaattacttgcgtatcaatattttctgaaaagtaatagtttgtatcgcttacaaaaatgaatgaatggaaaatcctttcattaaccacgaaaaattagttaggtatggattgtttttgatgatggaaaattttctggagactaatttttctaagcgatttaagcaattatttttcgaaaaatgttttctaaatcactcattttttctcgaaatgaacgcaccctatgtgagagaatttcagaagttgtgtattcaatttactgatggatttacagtgcaatgaactaagagaagttcaaatttatttaaatttgccggtgcatcgagaatttggatcttaatctaactgttatgatgttatttatgcatctttctggtttttacttctttctattcaattcagtaaactctttttgggatcctaaatctatagcctttgagattattgcactgtccaaaggtaaacatgttgatgattttaaagtattctgcatctggattccatgtagtttcttattcttgaatttttgttcgataaggtcattagctttggaatcatagttcttgaccctccatttaatgtttttagtaaggacttggtgttttctgggatagtttttgattcacgtgatgggaatttggccaaacacaaaacgagtacattgagtacaaagaatgaagattactcttttacatttgttatccctcttttttttctaaacttaagtgcttgtgccaga

SEQ ID NO: 93843 - DNA, 658 bp, Eucalyptus grandis
  Intron number 1 from transcript Egrandis_v1_0.031861m (loc us Egrandis_v1_0.031861m.g) derived from phytozome v7.0 (c hr-ID scaffold_1; pos 37114484 to 37115141)
agtccttccacggagggaataacaattagtatattcacattgtgagcagaaaatgataattgctacctgaacatccctgagctgttgttttttaagcttgactagaacttctttcacaagcgagcaatctcaccaatcgagattctagcatctcttgttaggaacatcaacatgagatcaacctagctagataacatttacatcagtgccatgagaacccatctgtttgaatcctaaacagtggctccgcaaatacattataagaaaaaaatgacattaggggaggaaagcatggtatctgaatcctcacaagtttctaaaagcattttgaaatctctcttttaattatgctacaaaatgaattgaaatgcattctggagagccaaccaaagtattttgacaacttcacttctatcatgctcctcaagcaacgaatttaaatgcttttcaaggaatttttttcctctgatttctgttacctctctttttctggggatgaaactacatccaaggagaagaagtcgtagacgtgcagaaagtcaaatgatcagttaccaataatctccacaagaacaagcaccttcctcgaagtgatgaaacctgtttgcatcccggactacaatcaccctctcagtgactgctgatacaatcttaataa

SEQ ID NO: 93844 - DNA, 506 bp, Eucalyptus grandis
  Intron number 1 from transcript Egrandis_v1_0.041929m (loc us Egrandis_v1_0.041929m.g) derived from phytozome v7.0 (c hr-ID scaffold_10; pos 20625691 to 20626196 reverse strand )
ggcaagcaggtactggattttcgtgctcttttctttcttcttttcgcccgctgtttcagcgaaatctcttttctgggtgtgttctttggcttatgaggatgctgattttcagatgttagtcagattgagcccgtggttagtacagtggtgcttgttgtggttgttttgaattgacacggcgatcttgagcacaaatcgtgatagttgttgtcatagatggaaggatgactgcagttgtgttcttgccccaaaaataatcaatagtccatggcaagaaagctgaaactaatccaattcttatcaacgccagaggaaatctactatgccttcaattaatgctcgattcgatctgatttattactgcttttcttgtcgacatgaatgaaatcatggtgcggtaactaagatcaaagcccgaggccctcggtttcgttcacttgaactgatgaccctgttgtctatgtattgcagaaactgaagactcgtgttgtgaggaagaatctcaa

SEQ ID NO: 93845 - DNA, 751 bp, Eucalyptus grandis
  Intron number 1 from transcript Egrandis_v1_0.004592m (loc us Egrandis_v1_0.004592m.g) derived from phytozome v7.0 (c hr-ID scaffold_10; pos 14237499 to 14238249 reverse strand )
ttcctgggtcggaaaggtcccctcggcaccgtctggtgcgccgctcatctgcaacatcgcctcaagaaatctcattatacctccaccgatatccccaaaaccgttggtttgtaatcccattccttttcttgtggtgcttgattctcaagttttttttcttttttccgatttccccgagctatggtgatttgccatttctttgccccctgctttgttcggttcccccgtcgaaaggaggggacttgatgcagtcagactccggtctagatctaaatgacgaatgtcgcttgtaaattggcgcgaaagtttcttcctttcttcgcttcgtcgcaggaagattcttcttttcctccctccatctccattttttggggccggttttcctgttagtttccctttgcgattgcgttcgaactagctacgagttaattaatgggtttgaagacgcggaagcatcttacaaggaaaatgcttacgagaagtcattattttgtccaccagttcgtctgtagacgtaggatttttagcttggaaattatcgttctcgggtccttttaatttccgctttggcggcagaaatatacttttgagtccagtcgcattgactttcttatccggtggtcgctcaattcatgttgttttggctgacctttgagtgttcgttcctcctattgccctgtcttagtaaactgtattagtgccttatttttcactagtctccacatctccacaatcctcccaatttgctgtg

SEQ ID NO: 93846 - DNA, 678 bp, Eucalyptus grandis
  Intron number 1 from transcript Egrandis_v1_0.011746m (loc us Egrandis_v1_0.011746m.g) derived from phytozome v7.0 (c hr-ID scaffold_8; pos 877702 to 878379 reverse strand)
catcttcgctctccgtgagtcgctgaactctgtttttttttttttttttttttcgtttggaatttcgctcgttcgattgcggaattcgagttcttcccgcgctcccgttcgatccgatcgcgagcggcgcgaggttttgtccgctgtgcggtttgctctgaatcggtcggcctcggtcgaatcgccggatttcgtgatttgcgccggcctccagctcggtcgtcggcgtcgtcctctagttccgcttggaattcgcgatttcgttgctttcctttgctttgtgttgtgtttttttttttttttttagaaggctgatcctttgagctctgctgcgcttgtgttgctttaccggtgttgctagctcgtaaagcgagcgagctttttgactttaccgtttgggtgtcggtgattgtgcgaaattcaagacgaaggtcgaattttgaggtgtagatcggttcgcttgtagtatctcattcttgcttgctccgtcgttatgcatctatttggcttatcttgccggataagtaaggcctgcatatgtcgaaaatatgatgctgtctatcatagtaattttatttttggttattcgactgtgattgttattatgtttcttcttgttagcgtccttaagatttttctgacttttttgggttttgtgattggaatgtaggcatctat

SEQ ID NO: 93847 - DNA, 996 bp, Eucalyptus grandis
  Intron number 1 from transcript Egrandis_v1_0.053807m (loc us Egrandis_v1_0.053807m.g) derived from phytozome v7.0 (c hr-ID scaffold_8; pos 54138507 to 54139502 reverse strand)
atcaagaccggcttctgtgtgaggaccctccatctctttcttgctcttccttcgccgttcctgcaattcttttcgtttcgactttttccgcttctcgtttgggtagctcgtaccccaaaaaaaaggcgcgacggaacttcgaaatcgatagttttcaggcactattaagcagttggagtcaattttatctgatgggagtggattttacggtgatgggtcgtgttcaaattcgtctcttcggatgagaaaagcatcgtttagtcagttcctttgtgactgaagttgggggtaggacggaaattcatgatttcagtggtatgtcgtagtcgcttggtatgttgcagtcgcttgcttgtgaaagaggagggcttagatttggaccgtcgtgttatgccgatgaactgaacattctcgttgttctgcacgaaaagcatgatgcgaaaaaatgttgtctcaggtgatgaatggcgatacctatgaatgcgaagtgttacaccgtctgtggagaatggatggcttgtgcagctaatcatctgttcattgataccatctgtgggagaaacttctgaaaagttttaggagactggttttaaaattgaacttacgactgtgatgcacatctcaggaaaacattgagcggattgttctgcagctataacatatctttcagggtataatcaaagagttaaaatttctgaaggaacacaattagatgaagtgatttgtagtcccgttgaaattgcagttcctttgtgatcttattgaagactgatgagctttcatcacttgcatttttctgaatggactttggtatagactaaagattgtgagaatgttgtttggttgccttgccttcataactacctatactcttgtgagcatcttcatgaagaagattatcagattctttcccatgccattggttgcttattttactaccaaagcgtctgtctttctgtattaaccaagaactattgtggtggttgtatgttgcag

SEQ ID NO: 93848 - DNA, 271 bp, Eucalyptus grandis
  Intron number 1 from transcript Egrandis_v1_0.039984m (loc us Egrandis_v1_0.039984m.g) derived from phytozome v7.0 (c hr-ID scaffold_8; pos 55044921 to 55045191)
agctggaagcatcaggcaaatcaatttcgctgaaggtgaatctttctcgagggttttcaagtattgatgctgccaatcttgcgtaatggaattgcaagttttcatttaaaaaaaaaaagcgataagatgacccatcaaaaagaaaaacatggcgatcgttaaaatgttgattagagaaattttcctagagatgttatatgtcttctgtgattaattcaaatctaagtagtacgtttgtcccatttcatatgtaggtagccaactcagctgc

SEQ ID NO: 93849 - DNA, 731 bp, Eucalyptus grandis
  Intron number 1 from transcript Egrandis_v1_0.002215m (loc us Egrandis_v1_0.002215m.g) derived from phytozome v7.0 (c hr-ID scaffold_10; pos 37976546 to 37977276 reverse strand )
ttgtccacctccaatctacaagaccgcatctcaaagtaagtgaacattcattgtgcttttagggaattggttttctatgttcagtcaagttgtatctgatgcttgattgtgctagtttttcaacctttttgttcccaagtacatgttgcaacttcactaatgcatgtttttctgatcctcaaatctcaaggataatatgggttaaacattctggattttcttgcaccatggaattttacgaaagacttgaatgatatgcatttgtttttcctacttgctcagatgaagggaaattgtccaaaacatcaggacattagttttgattgctggttgtgggatgctaggtgcttgttgctctgaatttatttgatattggtgcaaaacttgattattgaaatgttgtagggagaaacaattcacctatatcatgtctcatgaagcaagttcagcagctaaatttaagttatgaacttattatctggaacacaacttgcattatgatatgttgctgaatttcatttacataatagagggttactttgcaaatatttccttatatcatgaatttggactttgaatatattgcaaaactgataccatttgcttttacccattaacatgtaaagtcacattcttttttgaactgctctatttctgtgatgtgaagaaagaagttgagtatatgtcttctattagggcaaaagaagagagactgaaaagacagcccgagt

SEQ ID NO: 93850 - DNA, 721 bp, Eucalyptus grandis
  Intron number 3 from transcript Egrandis_v1_0.007746m (loc us Egrandis_v1_0.007746m.g) derived from phytozome v7.0 (c hr-ID scaffold_8; pos 14552592 to 14553312)
ctgggtaggttggagtttgcactttttttagagactggagttactaacaaccaaccatcctatttgcctaatagcttgtatagtcttaggaaacaagtgtaaactttacacttgtaaatacttatagcttgcgaccaggcaatcgtttgtgattttgattgggtgctgttgcagtcattttgcatgaagtttagaagcctattaacttttagttttctctttgcaaacattttacaagaaactagaaagtctggctgactgtttcggttgagtggtataatgctgactggtagattttgtttggtattttaaattctttaatgcgacttttgacatggaatggctgcagcattgagtagaatatgatcaacttgaaattgaaagagttattttgtttgtttgaagaactgttttacattcctctaagattgccaaggtgtactgttgtatgctctctctctctctctctctctctctctctctgtggtgtctgtgtgtgtgcctgtgtgttttttgcttggcacatcatgcgcatattaccgttgtcttggatgctgatctattgtttacagaagtcatcataatttgtgtacttgtaagcactttgcatcatttcgggataggatgatatataatttaatttcactttatttccaatgctttatttgcaattttcattttcccaggtttcaagttaaaaagaagcagttcttcagaaatt

SEQ ID NO: 93851 - DNA, 882 bp, Eucalyptus grandis
  Intron number 1 from transcript Egrandis_v1_0.031107m (loc us Egrandis_v1_0.031107m.g) derived from phytozome v7.0 (c hr-ID scaffold_10; pos 8970101 to 8970982 reverse strand)
tccgaaagagggtggcgagtcttatctcgtatcgggttagttccgttcccgtttatatatgtgtggtgtgaattcggtgtgaagacgagcttcgtcttgttatatgtttctgttttggtggactttttttttttgggatgatgtatatgtgtttgtagctgtagttgtctgattttggaggattcttcagctgcattagctttgctgttatggagcgaatctgccctcttgtggatcttcagttgcatgtcttgttttgacttttgtttcttgttttaaagagttcaatttctttcttgctttgcccttagccgtatttttcatttatgggcacttgcttaattgagtttgagaatttccttaagcatcgagttccttgaatcgaagatgatttccgtggatgtttgtttgagtgatgaggctgcctatcttatggatctagaatgaacattctagtttagcgttgattttgtacggtggtgtgttgcctttgcaaattcttttctctatgcttttatttgattgttaataggattaattgggcttggtggtatcaatgagctgagaaggcaaatacacacttgaatcatctaatcacaccataaaatttaactgaagatttttgtgaaataacggtgcagtgcttgtttgtctaactctaaatgaagatcttattgccacactcagtaactctggtaggaagggaatgcctttttatggcaaattcgatcatccaaagcagtgatatgaatctgcaatgtgggcgaaggcctcagaagaaatatcctcatattcttgatttgactttaatgcggttaagctttttgtctggcagaaacatcctgtgtccccatgaaattccttgattggagtctttgaatt

SEQ ID NO: 93852 - DNA, 738 bp, Eucalyptus grandis
  Intron number 2 from transcript Egrandis_v1_0.001868m (loc us Egrandis_v1_0.001612m.g) derived from phytozome v7.0 (c hr-ID scaffold_10; pos 8327953 to 8328690 reverse strand)
ctgcagtgacatatattcccgagctaattaatgtaagtctgctgtgacgttaaacccaagctgttctccgtacagtgaaaccttagggcacagtctttgttacagtcctttgtccaactagattatgtgtgagttatttgcaatcccttctcgcagtgttgttttttcaaattattaagttgaacatgatctaagtttcactagaaatgatagcattatttctcttcttaggtgacttgggatactaagtctagatcatccccattttttagcaccaaaataatattgaagagcaagaaattgcggagattgcgttcatctatcgagagtgtagtggatcaagtctgtggcagtgcacacgcagagaatgcgcgcgcacgtgtttaatgacacttctttgagaatgtttttagtttatcctgtgtgtcttaattttatgataacaagttctggagatggatttgtggtgagaagaaatgaactttttgatctctttgcaatttttttcccaaaaccttacagaaaccagagaaagtcgcatcaatgaaaataaagtacctatttatctatctgtctgtctgtctttctatctggctctcttctctttaattgtgcttttataaaaagttctctctattttgcttgtgatccattcattctgccttgttaatgagaaacagcaaatttatggctctattattaggcaagaaagattaaggagtgcatcgaggaagcagg

SEQ ID NO: 93853 - DNA, 989 bp, Eucalyptus grandis
  Intron number 1 from transcript Egrandis_v1_0.001868m (loc us Egrandis_v1_0.001612m.g) derived from phytozome v7.0 (c hr-ID scaffold_10; pos 8328915 to 8329903 reverse strand)
gagagcaggcggaaggacgcggggccgtcgttccggtacgtgtgctctacgcgcgctcttttatatatatggggctccctgtttgattgcgcttgctgcccccgtgctctgctccgctccgctcccggattctctgatggcggtgcggcagcgtccggcgttgctattactggagacgcttctccggcgacgaggccgccggttttgacttagcctgatcgctcggttgagcctagcgcggacgctcgtttgtgccggtctgtttggcctgatcgatgactcatcgctgatgcgaactcgttcccctggctgctttgaatcccgcgtctcttcttgtcccctccctcttttcttcttctcatagcgttaagcggacgcgtgttccttctgttgtgtgtacgggcttcgcggccgctctatcgctcgttgctctgaagagctgcgtcagctctccaatgatcgttctctggttttctatttttcgtagcgttgctttcttttttcttttctttttccgatgagattgtgagaggtccgttaatctgcactccgtgctttaattcgttcttttgattttcgctcacgaagttgacctcacacagcatttttcttgctctgtttgtcttgatcattgtgctttacagagttgatgcgctccaatttgtttcatgatttagtactgcagtcgaaaacgtgcatgttccagtgtcgtgtacttgtcaaatgtctgtcgccgatttatttttgaagatcacctggaattggagctccttgctgcagcaattttgctatatatatatattggtgacagataaaatctgttagcaatattctttcacattttgtaatcgctgcatgatggacgaactgcaattttcatctagctatagaaaggctggattgtgtaactccagtattttgttaaattttcttttcttttcttttcttttgcaggattaggcagtattaaaactctgaaaaattaaaat

SEQ ID NO: 93854 - DNA, 808 bp, Eucalyptus grandis
  Intron number 1 from transcript Egrandis_v1_0.001183m (loc us Egrandis_v1_0.001183m.g) derived from phytozome v7.0 (c hr-ID scaffold_8; pos 8335545 to 8336352)
ggtctggtattaatctctaggccgtgatcgtcaatggcgttgagtttttcaattttcttcgtaaagttcgtttcttttctgggtatttggtcgaggcggctctagaatccgctgaattttactccatgtccggcttcgctcttttatttttttttgcctgctcttcacgtgatgagcgtggccaaattttttctgggtcttcgtgtttgtgacaagtggagattaggacttttaagttttttgtttctctcttcgtgaatcgtcgtatgttcttcgctttgcggcgatgtgggtgtcgggattgactggaaactctctttttgccactgtacatgtttggacttgtattacgattgttgtgtcttgtgacgtcgtgggttccttgggacgagccttgagtccagtattattctcgaatctgggctgtgtttgctttccctgttcttgttagcccggtaaagttaatttctttttgggaaatttttaggtttgaagggccattcactctccgggtgctcgtttctctatcgatttgataatcttatcagtggtcttttcgttctagattttacgttcttgctttccattaccttcgctggatctgaacttgaagtgcattgaagccatgttggccaccgcttagttgtcccttcctacccctcaatttatgtttgattgttcaactatctccctgataatgatctgcatagtgttggattcaatggcacgtgtttttatcctccctcggccttagaattacctgaatggtgtactagtgtcatgtggttttcccttttcagctgtcgtc

SEQ ID NO: 93855 - DNA, 775 bp, Eucalyptus grandis
  Intron number 2 from transcript Egrandis_v1_0.024216m (loc us Egrandis_v1_0.022698m.g) derived from phytozome v7.0 (c hr-ID scaffold_1; pos 31638994 to 31639768 reverse strand)
gagaaggttgtaataaaaatggctcattcgagtgtttcagctgagagtaatgcataattgctaggttaaggccacgatggttgatcacatgcttttactagttatgaacgattaggtcgttagagcatgctggcttgcattatttgcagatcgaagtctaatagaagcagaaaatggaaaatctccctttggagtaagttaaagaagaggccaccactccgcataccttgaatgacaatatcatgcttttgaaaaatgggcagatgcaaattagcttggaattggatatatatgtagctgttggagcataaacattcctttcgaacatgacaaccctgctttgaattttgacattaaaatattgccgtatgtctttggctgtcttgacatgttgaaagataccatttagtaatttgatgactatatgatttaaaaataatggagactcctttcaattttacgttctcggtttctatttgttccaggctgatgtactagaatattatgatcagacagtgaactctcctagtggatcattctacataccagcagttctaagggtatgcactgaaggcacatttgttgccggggctctaaaaaattttccactgctctatgattgtgtgaatatctcatgttcttcttgctcattcccaaagcccttattcaggatttttatctgatcaatgctctgttttcagtttctgcctaaccattgatgcccatctgcttccctccaggtgccacatttactgcaggttgttaagaggagaag

SEQ ID NO: 93856 - DNA, 380 bp, Eucalyptus grandis
  Intron number 2 from transcript Egrandis_v1_0.039855m (loc us Egrandis_v1_0.039855m.g) derived from phytozome v7.0 (c hr-ID scaffold_8; pos 24103435 to 24103814 reverse strand)
ttgctagaggtactttgtacaagaactctcgtagaaaagaaagcatttatattcttttacaaatatatatatatatatatatacacacacacattaacattttatgaattcctagaccactcattatgtgaaaaaattgataaaataatcagcctaaagtacaataagtaagctaagtgggttttgagaaataactatcacaattagggttttttcttcttgtcaatcaaatgtgctctcttttgcgacaattatgtttgactttgtggttatttcacacacaaataatattcttttattcttaattatttgtttttgggtgcatgcacacgatcgacactttagacaatactcttcagcaactcaaggaacattgtggt

SEQ ID NO: 93857 - DNA, 987 bp, Eucalyptus grandis
  Intron number 1 from transcript Egrandis_v1_0.005982m (loc us Egrandis_v1_0.004572m.g) derived from phytozome v7.0 (c hr-ID scaffold_1; pos 31214365 to 31215351 reverse strand)
gcgatcgccgtcttcctcggggatcacccgctcaggtcagacccgtgcttcgattttgggaaagtccggcccgcgcggcctcaattgcgatccgtcgggtcgttcccgatggcttcgtgggatttgaatttggaattcgcgagaaagcccgtttctttttggccggaggagcgggggatttgactttctagctctggggggaaaaaagttgaaatctttttgtgttttttttttttttttttttgtgttcgtaacgtgattggatctggagaagcgatttcctattcgtgtgtcgggtgcattgtcgatgttgctggagaagaacgggaaatgggatttgattcgtgtttagttggaagcaatggctgatttcggtttgctattccggttgagcggtgaatttttcgatggtttcggttgaatagaaattgaacgtcctctgtcatgacttattccttgaaggttttgttcgcgagccctcgaggcactagttgaacatggataactacagaaattgatgatttttttagacaagcgtttcgtgtcactggaaaccaaaacatgcaaaattttaccttttggcctttggaatgcttattaaatgaagctgaatttgccccccttggggactctttcagaaatgcaagccgatttcattccatattgacatggaagccatgctagatgttcgtggatttgaattagaagtttggtgcatgtaagcaaatttaaattttgtatgttactgccaatgcctgcctggcctggcctgggctttagctatgtgcctaatgattctgttttatgactcaataatcatggtgccattatggatatgtgtgtctagttcatttgcaagcaacgctgattgagctttctgcatcattagctattgtcttaggttattgagtatatttgagctgaaattcctcaattctttgtatgtgaaaagagaagaagaagcttcatcgaagctaaatttctagg

SEQ ID NO: 93858 - DNA, 597 bp, Eucalyptus grandis
  Intron number 1 from transcript Egrandis_v1_0.012319m (loc us Egrandis_v1_0.012319m.g) derived from phytozome v7.0 (c hr-ID scaffold_10; pos 20878152 to 20878748)
cgctgtgcgtgctcgaagctggtgtcctcgcacgggtgagttgacgatcacccccaactcgtttcgccctgctttgcaaaattgcggcagtcccctcttgtggctacgcgacatgatcaagggatgtgatgcaaatgtaccatctttatgcactgtatcggctaaacttggttcagtccgagaaactggtctctctttcaaaatcttgactaggctccaagaattcgtcccttcttcttcttcttcccataaggctgataaattatgatgggtaccactcgttttcaacggtagttcagtctggtttgatgattctgttcatgttaaagtgacgtggtaagagtcccattattcttgatccacacccgtattatgtgaacttagtttacccgctagtccagtctatccggatcgaattaatgcgctttttgttcatgccgatacttggatcaagccttcggtatttgtcttagcctatatccgtttgactgttgcgtaagtttctccgccgatcttggacagcgtatatatatatattttgttctaacttcgagctgaacagggtttcaggcaaatcccggcctttgatcagttggc

SEQ ID NO: 93859 - DNA, 731 bp, Eucalyptus grandis
  Intron number 1 from transcript Egrandis_v1_0.031758m (loc us Egrandis_v1_0.031758m.g) derived from phytozome v7.0 (c hr-ID scaffold_10; pos 15353639 to 15354369)
aacaaaatccgtgcaagtaagttcataagtgcaatcaaccatagtcgcactgagtactcccacgtttcttgtggtaaaaccaatcatgccttgccacgagagcgtgtaagtgtattcttatgtcgacatcatcaggaagtagaactcttccggaggattacctctccttaattgtatttatcccttcatcactattattgatttctgaccatttccatactagagatgagttgattctgcaaatactctacactcttttgctttgacgtttctcgaatgtcagcaaggaagcaatggcaattaaaaccatctcaaaatttattgtagacaatttcggcaagtgtcatctttccaacaccacccattccataaattctgatcatgcttgtttcattcgtgcgagcgccaatcatcctcatgacttcatttacataactatccactgcaaccaagaaatctgatattaccagtaggcctttttcaactccatcaaaacccccaaccaaaaaacaaaaaacaaaaaaaaaaactcaatgaactccatcaaaaccttcctgacaacttcctttcagaacttaccttccctctgatggcgttcaatgcaaaagaaccaagatgttgaaatgagttaaacaaagttccttccaggaaacaaacaagtcataagggatgaatttagttaccttttgggattgttttggaagtcccttccctttattgctttaacctca

SEQ ID NO: 93860 - DNA, 986 bp, Eucalyptus grandis
  Intron number 2 from transcript Egrandis_v1_0.029102m (loc us Egrandis_v1_0.027710m.g) derived from phytozome v7.0 (c hr-ID scaffold_1; pos 39989302 to 39990287 reverse strand)
ggagaagtactatcgactgtccctaccattggtaggtccatcttctttgttcacgcttttggatggccgtttcatttggaattagcctcgaaactaccctttacaatttcctgcaggcagtgcccattgttgctatgatattctatccacgtgatttgaaccgtgtactctatttcttaaagactcatccaccccccggtgcatgaaagagcaggaattttcttccatctgatcactttgttgtgcttgagacctcacttttgcttcttcggaggagtgaccttctattttgaaaaccagcggtcaccattcacaacaggctttgattgaactgttgcaacttttacctctttcatcaattgaatctgagtcttccacctttgcttagaaatgaaattttcctggacatgcactagtccctacacttggaaattcgtctttattgtcacgttgcaaatgtttgcacctttttgggtttttgccaatttagtgtagaaatcgtgtttgtattcgagtcatatatggataagttttagtgaaggaagaaaacctgcttagcttgctctcaaaatgggattaactctttaccccaatgtctctgttcttaaggatgtcattatcacacctctgaattaaagagaaaatctccttcaagttgtttcagggaatgaaaactcttatttctgttgttttggcacctgagatgtctataaagtagcaaatatgtcaactgctttgttgccatctagattcatttattgggttcatggagtatgccccttaactattccattgagattctgtgtatctgcttctttggaactttcatctaggcaaacttgcctgttttctaggacttacaaaagtgccctctgtcctggcttgttgagagtttctaccatgccatgtttacatcattgacatataaatggtgttctggatggaacgggataagtgctgattgtcttttctatgtgtaggtttca

SEQ ID NO: 93861 - DNA, 496 bp, Eucalyptus grandis
  Intron number 1 from transcript Egrandis_v1_0.029102m (loc us Egrandis_v1_0.027710m.g) derived from phytozome v7.0 (c hr-ID scaffold_1; pos 39990342 to 39990837 reverse strand)
cgggtactctctactcttccccgcctcttcttcatttcgccttctctcctgtgctgcacttgtcgtcgcgaatgatttctctacccgattcttttctctgcttatcagaagaaaaggggaattcggactttgttttgctacccatagatgtagtctaccaacacggaaactccagaatccccctgtttttcgcatctcgactttgcctacaatggacacgattacagaaaaatcgtgctttagtggtgatgacaatttttttacttgctccagtttcagtttggtcgtgcatcagctcaggttctacagatatcgtatctgaaatcggtttggttatcgtatctgaatgcatattcccgtttgattgccgtctcgagttatatagattgatttcgtgctactgggtggggcaagtcatgtttttgtttctttatctgcatttcccgattaagtatgttgggtaatagccctgttctttgagttggcttaggttgtg

SEQ ID NO: 93862 - DNA, 881 bp, Eucalyptus grandis
  Intron number 1 from transcript Egrandis_v1_0.047596m (loc us Egrandis_v1_0.047596m.g) derived from phytozome v7.0 (c hr-ID scaffold_10; pos 38439043 to 38439923)
ttgagccgtactttgataaaaaggttagttgttgatttaaagagttttcctttcgataactagagcatccaaatcttttttgggtttcaagcaacaatgaagctccttttgagaacagtttacatctatgcaattgaattttgtgatttctgtgtctcctttcaccttctccacctttttttagttcctaatgctttttttttttatcattatttatggagtttttgcttttgccgccatcgatcaaaggaggtgtctatttcttcaaagccattaaatttgcagaaatatcatgctcggctaagaactattaaactcatttcatatttttattgtgccctgtttactactcccctaatttgcatttgataaatggcaacgtgttatggcctgtttatccggcagtgctaatgtaaatttgtataatttacatgttctcaaatgtgtttttacatcaagttgcgtttgcaattttattcccgagcttccccatgggataattctaatagattgttttttactgtcaatttttttttttcgattttggattggtaaataattcaattggaatcttccttatcaattttcgatatctttcttgctcgctttacatatcagtcagacactttttacataaatactaagaagatgatttcatccatgacattcgtctatttacaaagttgagatacttgaagcaattgcgcaagcgcgtagagcatgcgtgagtgcttgtaatgaacattttctatagtcatcacatttccaagccaaaaccaagaaattggcatattgtatgtaagttcttgtaccctcttattctataacttcagtcattgtaatcacttgcatgacttttttttttttttcaacaaggtttt

SEQ ID NO: 93863 - DNA, 634 bp, Eucalyptus grandis
  Intron number 2 from transcript Egrandis_v1_0.019566m (loc us Egrandis_v1_0.019566m.g) derived from phytozome v7.0 (c hr-ID scaffold_1; pos 22105201 to 22105834 reverse strand)
atcagcatatccatactcctaatcagacgctaaaagtaagaacattgtcctagtctatactttatttttttatttccagatttggtttttgagttttaaattttgaccagctaaaaccactctagctttactggggcgtctacaatatgtgcaccatcctggtacttttgagtttgatttgtctcagaaactaacagtagaatggaagtgtctctggtcgcatgtagcagccatctgctgcagctatatgcagtattacatgctctagtttaggagcagcttatgagatgataaaatgcatatagtggatgatggatgtctgttgctaagattgcattttatgaacaacaatgtataattccacaattgactggttgatgtgaattacgcatctgtttctcatccatgttggctaggctatctgcctgtctgcttccctttattttgtttttctggtcttctgcctaaaattcagtgaaggccatgctgggatttttccagatcaattttaagcttctggtttcttatacttgctctctatacaataatctgaacattttctgggaataaatggaccatagtttgggatgaagcttttaattctcctccttgcagcttgggcctgtatttcaac

SEQ ID NO: 93864 - DNA, 910 bp, Eucalyptus grandis
  Intron number 4 from transcript Egrandis_v1_0.049166m (loc us Egrandis_v1_0.049166m.g) derived from phytozome v7.0 (c hr-ID scaffold_10; pos 29125041 to 29125950)
tctgcacaagaaattgttatacctggaaaatagaggtgactttcttgtttccctgttgtcttcaatgtaaacatgcacaccagtgatcattgggaatgtttctgtatatgcatgtatggacacatcatcacatattcatgtcgcatttgagctgttgttacttgctagagagctgtttgggttgcataagaaaatcacccaaaatttacacatgatggcgtcaatacatgtgtaacctcaagaaaaaaattgaacaaagtaacttggtttaagatgtatatctttgattgggtaatatagtatgtgccaaaaacataaacaattttgattttcttcgacataactttgctggtaaatcataataacctcatttatgtgaccctgtcttggatgcacaaacatctgatgttagacaaattctaaggtttatgaattagttgcagtatcctagcctgcatgttgcaggaaacatgatcaattagtcgaatgatatctgttttgaattacaaaattaagtgactaagaagcaggcaagatattagcaatagccaggttatactttgttcacttactcttactttttgctagaaattggttgatcaatgtagtttgtgcggtctatgagagcaggctaatagtggaaagaatgaatccgggaagggtcattacaaagtatacaagatatgaggttcatcaagcacttaataaggcatgggaaatgaatgaagagtactactttttctattttcattgggttttaattctgaaggcattataataaagcaaggtgaggaaatttcgggtacttttgatgtatcctattcttatgttgtttgaaagtctgatggtgattcttacccatgttcatttgtcagttgcattggctaagctcctctttccaatagaagct

SEQ ID NO: 93865 - DNA, 719 bp, Eucalyptus grandis
  Intron number 1 from transcript Egrandis_v1_0.015982m (loc us Egrandis_v1_0.015982m.g) derived from phytozome v7.0 (c hr-ID scaffold_8; pos 10130950 to 10131668)
gcgacgtcgggttttgacagaggttcgagtctcaggtgagcttttttagtttggatagaggaaaatctgaagtgggttctcttgcttggatgcgggtgtgcgtccttgttggttctctggtaccttcagcttcaccgtggcgtgtgtgcttaagcgtggacgcgttctagtacgattgctgcagtttttagttcattttgaacttatgagcgtgtcttggagcagttatatatatatggttcgttgagggaagactggtcaggttcttgagcttctttgattttagcttatcacttaatgatgatatgatatggctcagctgagttgattggatgcgaggggaatgtactggttcattgtgtctgatgaagctataggctgtgcccggggttgcattccttacgaagtggcagttgtgttctgtacaaaggagaaatgggatacgattcttttttttttcccttgttagctttgcatcctttctggtaatgcctctcatggataaatttgtcacctttccaagatgcattaatcatcttatatgttggatgttctgcctacacattaagatttggcactaattgtcagctagcggttggatgggctggcattatcagtttaactctatgcattatcagtttaactctatggcatttgttggactgatgcgtggttttttttttttttactgtgcagtgctcgaagcttgcaacgggggg

SEQ ID NO: 93866 - DNA, 558 bp, Eucalyptus grandis
  Intron number 2 from transcript Egrandis_v1_0.049400m (loc us Egrandis_v1_0.049400m.g) derived from phytozome v7.0 (c hr-ID scaffold_1; pos 20474628 to 20475185 reverse strand)
caggttggtcctgtaatttttgacgaaaagtttagcttttgagtttttgttgtgacttagaccgctgaattttattattgcacgaaaacagaagtaagtactgagttcccaagttgatctgggcgcttctgaagctgattgggggaaattgaattgaatactgggctcatattgatatgcagcttgagcttttgagaaaaacattcggacgatcatcgttctgttgttcaatttcgtttgactttgtatgtcgttagtctccgcttgggttttgggagaattggtaggaaggaaggaggaaagttttctgcagcgaacagaattcgcagtgctagagacttctatgctcctcacgatgaatgcagtgatgctcgaaatactaatagaatgtcgtcacgaatgagcatgtttggggggtggattattggttttcaaatctcttcttcttgttggatttggactttaatggtgacagaattcgtttccttcgcttggattgtgctattagtgtttttgccgagagagaattgatgaaatgattaatgatttagggtacca

SEQ ID NO: 93867 - DNA, 401 bp, Eucalyptus grandis
  Intron number 2 from transcript Egrandis_v1_0.010458m (loc us Egrandis_v1_0.010458m.g) derived from phytozome v7.0 (c hr-ID scaffold_1; pos 32221329 to 32221729)
gaataatagtaagcattcatctcaccttttttccgttaaagtccaaagccattattttggggtctatagttaacggactccacactatttttacattaatacttctgcactgataagtcccagatgtgctatggcagcttttgctagcaaatctctcatggtgactaaatcgtccgatgaatatggaccagtgtcaatcgcatttccaagaaactatgcaaaatttacgactttttttaactttctggaaaatctggaaaatgggctattgagagaagagcttgacttgaatgttgaatattagggtgcataggccatgtgaatccatcaaattcgacaaggcgttatcgagaaaatttaaccgaactttgtaaataaactttttgatcctgcagttgggc

SEQ ID NO: 93868 - DNA, 900 bp, Eucalyptus grandis
  Intron number 1 from transcript Egrandis_v1_0.019805m (loc us Egrandis_v1_0.019589m.g) derived from phytozome v7.0 (c hr-ID scaffold_1; pos 36870348 to 36871247)
ttcgcagggccccgtcccgactccgtcttccggtggtacgtcaggtgctggggtttttcttgacttgcttgtatggtctctcctttcgaaccgcccgcgactgctgttcttgatctgcttcggggattgggaagatggaattgcgacgtgggagatatgggtttttttcttcgtcgattgtcctgatgatctcgtggcgaaaatctggtttaccgactgagcaaagctagcgtcgattcttggctttctttagaaagagaattgagatgagggtggattagttttgagtgtggagtgagatgtttgctgtggctaattagacataaacaaatggtgggagggatcgaattcgtttgccaagaaggtttgattggtgcaatgtagtgggttcctgtttccgggcaagacttctttgcattggagagttaaatgagactgtggtggaaacccaaaacttatctttgtaagatgagaattgtgttggtatttgtggttcggtaggctgcttagttagcggttcgttcttaggtttcattatgttaattatgctaggtatactaatgcgggtacaaaaaattatagccagtgatggggcaaacttttagtgacagtggttattacctacttgtttaaatgctcgtttgccaatgtgagactgttagcctcattgtcaagtcttcctggtggtttctcaacttaacaaacttccttgcatcatttgtaaagcttcattttgaaacttctagtgtcatgatattagatcgcctgctttagatgtgttcatgtcatttatttgtatgtgcccatttatggattagagatggacttttgtgaaaatatcttgatttcgaacggattgcaacagatatcccaatttccaacacagaacggaggtctaga

SEQ ID NO: 93869 - DNA, 1026 bp, Eucalyptus grandis
  Intron number 2 from transcript Egrandis_v1_0.029327m (loc us Egrandis_v1_0.029327m.g) derived from phytozome v7.0 (c hr-ID scaffold_10; pos 6896143 to 6897168 reverse strand)
cgacgtcgtcactccgcccacgaacttgtgtgcaggttcttgttgctgcttaactgcactccttggtcttgtcgatctttatttagggatgggcgaaaaatggcttcaagcttttgatttgtgacatttcaatacacgatcttccttctctaggcgcggcataacttcttcactagttcttgaaatggttcgatggtataaagggcaaacaaaatattgagattacataaattatcgaaattattatttacagctcgtgcttccgaaccgaattggggggataataattataggaagtctagagtcataattcaccctctattcatgatgaaatatttttactttactcatgctttggaaaaaaatttaaagagaaccatcatgagcaatcagtgaagttgtcgattcctaaagaaaatcttattcgcaaaaatatgtaatcatgtgatctggaggtgcttttccgacagatcacgtgatctcatgtaggatttataatataaacttttatttcttctgcgtaagggcatttcgtgtttcgaaatgtgaaattaattattattggaatctgtaatctgctcctctaattgttgcctttttttccccttctttttcctgtttttctttcagaaaaagcgaccaaaaactataaattatgccaattataacaaatttatcccaaacttatattgttgtgacatatttaccttaataaaaatccccaacttatatcatgtgagtacaagtttgtgggtttttgacaataagggtataagtttaaggttttttgtggtacatgagtacaagtttgagattttttgtgttttaaaaaaagtttgggtaaatgtctaacaataggcataatttaggatatttggtggttttttttgctttttatttttaatttttggatgagcataacccatgtgtaattagatttgccacggatggtctggtcattgttgatcctttttcatcttttgacatgtagccgctggagtccccatttctagcgacgtccctggc

SEQ ID NO: 93870 - DNA, 418 bp, Eucalyptus grandis
  Intron number 2 from transcript Egrandis_v1_0.000751m (loc us Egrandis_v1_0.000751m.g) derived from phytozome v7.0 (c hr-ID scaffold_8; pos 54914538 to 54914955 reverse strand)
cccaataggtgattgcctctatcattcctttgatgtgccttgtactattaaaactcgaagtggttcaattggtttcttttctagatttgtgttagccttgttgaaattgaattttatgctattgaaattatactgtaaaagcacataaaataatggtacgatcccaattttgtccttcttcattccaaaaaaccttttttttttttggttttagtttaggtcattcattaatcatatgtatcgatgctaattcatctacaccggagtaaatccttgtagaaagcatttcgaataggtctttagttttcactttggtcttgtgagaacatagtttggtttaatatagttttctaactcattgccatttgacctccaacaaacactagggaagaaggtgagatcgtgaaaacagttaccc

SEQ ID NO: 93871 - DNA, 852 bp, Eucalyptus grandis
  Intron number 1 from transcript Egrandis_v1_0.000751m (loc us Egrandis_v1_0.000751m.g) derived from phytozome v7.0 (c hr-ID scaffold_8; pos 54915517 to 54916368 reverse strand)
ttggaagaagaagacaatcctgagaggggccttgagtatggctcagttcgtctaagtttctgtcttcttttgaggtctccattttgatgtgaatagagtttagagtaaaaaaatggtgaagtgctctagtttgtattttgtataaaagtttgattataagtttcaatatgaaaaatatggccctgcttttctatctcatcgttttattgtctggagattttaactgcttctgcatgtgcttaataaataaaagggtcggcgatacatagtcctgggatatcgcattataaaatcgaccaaaagttaaaggatgtgtgcgtgcccaagtatcggggcgtgacaatttatgttgtagaaattcgagaaatgtggaacttttctttttaaaaagaatgctctgcattgtgttatgacaaatgagaacatgttcacgttctcccttaagatttaaaactcctaggaaataatttatgttattgagatttgaaaagagtgagccgttttatttaaaattaaaactttgcactgtgctatgccaacgttctccttgggagattcaaaacttcttaaggtgttaaaacaccccttagatttaatactcctatgttcacatgcattgtcaactttgataggctggagtgatactacaatggatcattcttattaaacaattgtagcaaactagcccacgactctctgcatatttagcttatcttggctactaagtttaatgacctacagagatcttcatcatttgcaagttaggcttctaaacattttccatctctagctgccactgcttttgctgatatactatttggtatttcttgaagatcagatcgagtgaaatca

SEQ ID NO: 93872 - DNA, 923 bp, Eucalyptus grandis
  Intron number 1 from transcript Egrandis_v1_0.004608m (loc us Egrandis_v1_0.004608m.g) derived from phytozome v7.0 (c hr-ID scaffold_10; pos 12769458 to 12770380 reverse strand )
gttgattgctgtcctccaaggagttcggagatagggtgagttgttgcttttcatttttgtttgtttgctctttttggttggtcgtgtgtagattctttttttgttttttgtttttttgggtatctattgagcaagaggtttatggggttattacttattagagttgattgttgagttcttttgcgtgtgcttttgtcaaggatgaattctatcaaatagagatttaactgggatcatgcgttttagtggcgtttttaaagtaatatcgctccttttcatgattatggagtggttgatacttgagctattatttgaaatgatgccactttttgccatagtgtcctctcgaatggtgatgggtgtttattgttggttagttgcctagcaggaaagttattgtaatcatttggtttcctgcatgtttcgatcgatttgattggagaaattaggatctgttcatgggggtctccgaaaatcttttacttcatcggcatccttagtatcggtctggaatatgatttacctgccttgtacttacctatcctttttctatgctcgaaaagtttgcttctttatgtttcctgatttgttccttgtttctccttttacgttttctgaagccctttgggtattcatagaatttagacttcgcactacacaagtaggaagagggttagacacttgtttgtacttctgttttgttacttaatcaggtttctatgatggcagtcgtgatgtgtgtggtttctgttgtttcatcgttgttgggattggctagttcaagtggtttttctcgttaatctttgaaattagtttgttaccagatgataaatattgacagcagctgatgagaaatatgaaagttgttttgattttcttctgggtatgttatttccatgcagacgaaatttctcattctctag

SEQ ID NO: 93873 - DNA, 816 bp, Eucalyptus grandis
  Intron number 2 from transcript Egrandis_v1_0.001698m (loc us Egrandis_v1_0.001698m.g) derived from phytozome v7.0 (c hr-ID scaffold_1; pos 34336386 to 34337201 reverse strand)
ccctgaagggctcgagggtctcgcgcattttctcggtaatagttcgtatttttaattggtcgaatatgtagaaactacaatctctgtcaagagcggtgcccgtggaagtatcttttgcatctttgtcgatttttgtatgtgcggggagaaggaaaaagaccaagaatcttaagttcagtaaattttaagtcaaaattgttgataatcttcacatcatccagaccagaattcttatgtttgaaggtgaagagaatcatttattcaaggcaaaattcactgctcacggatgtattagcgacagatcaggttgaaaaaaaaggtgtataacaaatataggtggtttccccaaatataattttaacatcaagttcaaataggtgctgattgttttattgcaaaaccttgtttcgacatctcgcgccttggattcttaattcacggcatgaaccaccctcgaaagaaaagcgagaaccgagatgtgtggtttctttttgtttcgaaaggtcatctcacttgttgattttacaacactcgttctttaggcataaaaccttgctcacctgaaagcgacatcttcagtaacggattttgatcagcacggtcaacttataataccttagtcattgatccaccagctgtaattatttcctgatcgcctaaactagtaagctggctgcttggagtttctcttctctatttgggttctagggttctgaactgcatcatgcgcgttttttcgcctcaaaaggcgcttctttttctatcagatgcatttgagtcctgcctgcttatttttgatatgttgttgcagagcac

SEQ ID NO: 93874 - DNA, 912 bp, Eucalyptus grandis
  Intron number 1 from transcript Egrandis_v1_0.014369m (loc us Egrandis_v1_0.014391m.g) derived from phytozome v7.0 (c hr-ID scaffold_8; pos 15908233 to 15909144 reverse strand)
ggccacctccaggtagctcagctggttcgtacgatgtaactgtctcgtcccttttacccatttctaactttttctccagcgagtttcaagctttgagcttgggattggatcgggctggctttctttgtaacgcttttttggaaacgggtgtgggggcattttgctcttggatgcgggcttgtcattgggttttggtttcaatgcttagtcttgctgtgcttggtcaaaagttgtgtgctttcattctctggtatttttaagtttttttttttttttttgaagtattcttttcgtgggagcggctggcatccctcttctgggcatattgagcttcagaagaagcgtaaaagcattgggtttcattttgtttgctttagcgtttcgtgtcatttccgtggtgttggcgttctgatctgctgcagtagtctggagtacccatgacaggagccccctgatctcaataactcaaaaagttcacaaattggcgaatttgatggatgtttgctccccattaaataaaaacatgtaaagttgcttaaagggttgtcctttgcactttggagttatttttaatcattccatgttagatttagcttcctattagtaatattcttgtgttcgcgatagactcaagtcctgtttggttagaaagctgcggaaatgcacttgttttcagtagcgatcaattagggttgagttgcaaattccaagggtatggacactggaaatagtttctcattactcagctagaaaagtacgttgtcgtttagcagggatgaagagggttaagggatggtgcatgttcattgctttctttctctatgagttcctctataagactagatatctttgttgatcttgttgttccaattttagcaggtcaatgaacaaagctgctttgtacaggtagaa

SEQ ID NO: 93875 - DNA, 577 bp, Eucalyptus grandis
  Intron number 1 from transcript Egrandis_v1_0.043493m (loc us Egrandis_v1_0.043493m.g) derived from phytozome v7.0 (c hr-ID scaffold_10; pos 37077169 to 37077745)
ttccatttcctcgttaatctcctccgctgcttctggtacttcccattaacctcgatcctccttttgtcctcatcgtcgctattgcctgactcacaagctctttctatgcatttttctgtcttcccttttcctggatcatgctttattttggtttgattttcgagttcatcttgcacgatcggtagtgccgggaaacaaaagaagcactaactcgcggcgagatgtattttgtgaaccttcaacgatcggggcgctaattccattagaatccgcaccgagcaccaggtgctaattcgccgcgcacgagagaccatatcgataagcggtttacctgtcaatcctgactagaagtctcattatgttcattccttttgcggggttcacgcgaatcttgcatagcttgactcgagaaatccggtcccgtttcgagtataaacgtattgctggcaacgtttcttttgtcggttcatgcgttaatgcagagtccagaggaaaatgacagtgttgttcttggtcttgcattgcagaattctcctagatccttcccccggtaatttaaccagctcagagagtttat

SEQ ID NO: 93876 - DNA, 579 bp, Eucalyptus grandis
  Intron number 2 from transcript Egrandis_v1_0.000164m (loc us Egrandis_v1_0.000164m.g) derived from phytozome v7.0 (c hr-ID scaffold_8; pos 50126788 to 50127366 reverse strand)
aaattcaaagcttcaagttccttttattttactcggtaagttttattgcttgatgtttggagtaaactccttctgctgcaccatgaagcattctggatttactttctcattttggatttcttttgctatgtgtctactgattgatctatgtgcataaagtttaaaactttttttaatacgtcaaaaatgttttgttttggacaaatcattcattcactgattttttcacctaccgcgttattaacttccactttttattttccggatttcgttgtctgaatttgagcttatccttggtataaacaatttatgacccttcactcttacccccagattaagcagcacccggttttggatgaggcattgccatttcttcttcctattctttccatacgtgctttgatttccctattggtagaaaggagtctagagcgacaaacgcaaattggtttggaaatctccagtttatcaaaaatcctcagtgttttcttgtggttgacagtcaaaattccatacgctatctctgttatgctcacatttgcttacgtcttatttctcagttcacagataaagactcat

SEQ ID NO: 93877 - DNA, 930 bp, Eucalyptus grandis
  Intron number 3 from transcript Egrandis_v1_0.019658m (loc us Egrandis_v1_0.019658m.g) derived from phytozome v7.0 (c hr-ID scaffold_1; pos 36211398 to 36212327 reverse strand)
acagagcctggagcgccggtgttgatcggatcgtcgtgagtatatcgctcgcctttcctgagatgaatttgaatgtgttggcaatcggagttcaattctgtgtgggtactgtccattagggttggttgggttagatggaaagttcttggcagttgtggaggttattattgagccagattagtcaaattgatgtcctcttggacttcgaagatctaatcggcattggagttgggaaggctgtaccatctggagtttggatagctctctctttttgacattttgctgggaaagtatcccattgaatagttgagcaaggagtttggcaggtgatttcctatgtggttaatggcaaagcaaagacctagttaaggtcattgttgcttcttccttgtgaggctactttcaacgaaatcttaagcattgtaaacttgtgacaatgttgtcttcctaaattgcatgaaaaataaattgtttagtgcccagcgtaattttctttcttcagataaatgactgcctctttgtaaaaatgatttagatgctttcattggttggtttgtcgtggatgaatttggtgacttcaggtgctcatgctagttaagagattgtagggttgtgttttctgaatgggaaggactgttctcattgtcctttttaggtcagtattggggtcccggagaggattgttcattggaaatagtttaggttcaaggtcagcggtttcctacttaacccacacggttccatgaacaggacttggactggttatgctgttatatacagtacataaaacgtattaaatcactggcacagattgctccctctataaaaagttcatcttcttttctatcagataattaagaagttacaaaatagctgaaacttattattgttgcaggtgactggtgggtcgcttaaagaatcaaaggaagc

SEQ ID NO: 93878 - DNA, 875 bp, Eucalyptus grandis
  Intron number 1 from transcript Egrandis_v1_0.015366m (loc us Egrandis_v1_0.013386m.g) derived from phytozome v7.0 (c hr-ID scaffold_8; pos 33807710 to 33808584)
agaggccgaggttagcttgggagcctcttccgaaggtacagggattgtttttttccgtgttttttttggagaattttagctgctggcttggtgggttttgttcgttactgtgtttttttttaatgggttttgaggaatttgactggtggagtttcgatgcggcggtggaaatgaattcgagttctttggtgtccttgggggattcgtctttctcttgggggggtttttggggatgtttgagtattgggttttctgtgggtagacctgaatcttgctgggcgtggatgttttggccttcgcgtgaggttgatagtgttttctgtgtagaaggttcgtggtggaattgtgggttaagattctaatgaatttcgcgtctgaaagtctgaatcttgtcatggtgaagtgagtttcgtggagtcggaggtatattgccgaaagatctggagtttgattggaattttacgttgaaaagtgtagttcattgtatggaggagttgaattcatcatcttggttaagaatttctgaacgtgtgtttatgtaggtgtgcatttatgtataaattactgatatatgcagatttgcagtgggataattgaaggcttggtctttggtttgtttagtttgtagctttttggaatagatttgattggaatagtggaagataggaatatttggctggtcaagagatgacttacgtttttgtatgtctcactgattgtatatttttcctgttatcaatatttgatggtgcaatatgttgacgggttatgtttttgggaagggtgagtttacggtgtcatgtttgtttagtgtgagtgtgaatggatcgctgtgtgtaggctcagtcaggagttttttgtgggcaagagcttgg

SEQ ID NO: 93879 - DNA, 414 bp, Eucalyptus grandis
  Intron number 1 from transcript Egrandis_v1_0.033934m (loc us Egrandis_v1_0.033934m.g) derived from phytozome v7.0 (c hr-ID scaffold_10; pos 1991104 to 1991517)
caagagcctcgaggctcaggagcacctcgctgaaggtacatcaatagacgtcgcttctaataaacttcaatcttgactctcccttttctttccgtagacaagaatatgacgcttttgggacaccgcgatcacggtgtcttcaagtttaagtttctgtcaagtgaagttatcgcgtggtccactacgacatgatttatatagcatgcaatagtctttcattcaacagtacaaagttcgagtcttttgatgagctaaaagatggcttttgaactggcagaaagtaggacatgtccataaggtccaaccgaataatgctaataaacaaagttaacactgatcacatgtacatgggtttttttgattaatttatttacgacagggaggagcaaaggagggcaaaaaggagggcagacg

SEQ ID NO: 93880 - DNA, 767 bp, Eucalyptus grandis
  Intron number 1 from transcript Egrandis_v1_0.007387m (loc us Egrandis_v1_0.006997m.g) derived from phytozome v7.0 (c hr-ID scaffold_8; pos 34739740 to 34740506 reverse strand)
ggctttcaaggtcctggacaccatcctgagatcaggtcagcggctcccgcattcgtggtgattttccgttgaattccggttgcatgcatggtctgctttcgatgattggagtgttcttgacggtgatggatggattaagctgtctgaatgaatcgtggttatctggagtctagactggatgcagatttttgtcttttcgtaactcatcctaaagtgactggcttctttcactgagttagccgtatttaaggtgattttcgtgttttgtttttagattattgagtagtatcataatttgttattactaaggcaaaggatttcagggaggtgatcaaatcagtctgtttcttttacccaagtcaacgtacattttgatagccagggtaaggcctgcatgctgggttcttgccctggactggaggctggtttcctatgagcaactgatatcccttttgctatctctcgccctccatgtgttttttgaaatgacatgctaaatgttggatttttaactcctcaaaagcctgtcagatcttgggatggtgagttttcatgcctatcattagtgcatattcttttggtttagaagaccgttagtgattgtttcccttatcatcatgtcacataaaaaggaaaatggttcctatctatgtggagaaatctagtacaatttcggggagaattactttcatataaattacatatcatcacctgtagctgcttattgtcattttttaatgcattgtcagccaaaggagaacttaaaa

SEQ ID NO: 93881 - DNA, 842 bp, Eucalyptus grandis
  Intron number 1 from transcript Egrandis_v1_0.031584m (loc us Egrandis_v1_0.030514m.g) derived from phytozome v7.0 (c hr-ID scaffold_1; pos 91800 to 92641 reverse strand)
caagtgagcccttctctctctttctctctagattttatttattaagtgttcgtactactattttggagcaaaattaaagaaaattgtgactgcttccgtgggctatttgacccttgtgctgagtgacttgatatgtcatagtaatggtcaggtcagagtatagcattccatgcaagtagcttaccttactgcgtctattgagattgtgtggtctatcgtcatatttacctgggggaactttctttcatgtttattattttgctctttctgactcattttgcctaaccttcgatgcccctctacttcgatctagctgaagctatgaaaagcaactaaaaataattgtgcattgctgtgtttcattcaataaatcgttgagctttatcccttcagttgctagaaaggctcagcggtgttatcaatggtctctaactaaaaagcccaaatttaagtacacagctttgtgctttctggcttaacaagctgatgggaacagcttatctgattctttttcataaatgagtagatagataagaatgttagcacatgcaactggacaaaaaggccatttgagttgctgctgacctatttcaatggcagctggggctttttgatggtggatgtaactctttgaggccatgaaaacattgtaatcgaagtgttctgtatgttatttaggtttgaccctaaatgtcatctgttttatggaagtaggtgttttgatttcatatattgactttagctgtgagaagtgtcttgcttagtgattactttcaaccaaaaagtacctgcaaactataatgagtttttgaattgccagctgagagtggatctgactggcg

SEQ ID NO: 93882 - DNA, 909 bp, Eucalyptus grandis
  Intron number 1 from transcript Egrandis_v1_0.004044m (loc us Egrandis_v1_0.004048m.g) derived from phytozome v7.0 (c hr-ID scaffold_10; pos 22904265 to 22905173)
ctcgtcttcctacgtccccccggttcacgcgactggtacgtgggggtgatcagaccccggcgtctcgcaatcggcgcaaattgtttcccctgtttctgcattgttgccgccgtcgtcgtttgttgcttctttctgccattcgcttggtcttcgtaccctgttcttggtctcccgttctttcgtgcattgtgaggatcgttgtcctttcgtctgatcgtggagattcttttctgggtttttgcggaattgaccctttttgcgtaatgtctgttcgggttggattagtggtcttgtttagatagtttaatgtactagacgtgaaaaacgaggagacaagccccgtgggggcggcatattcccatgatgatccaaatggcttcgaatttttcgtattagtcttggctatctttactggggtctgggttccttgtgccttttgaggcacattttgtcgctaaacgctgattgcgtacatgggtgaccaggctaatgcgagttctagtcatctgttggtttgatgtcaggacaactgttccaaagagatcgatttcacgtaaaggacttctggttgtgttattatttctggatttcatgaccacactggagattgctatcatccatatgggaacgtttagaatagtggattctgtcatttgaacatattgttgatgccgaccactttctttacattgcttaagacataggtctggtgcttcaattccatgattgtcggtatttatctgcacagatgtctcagaagtctctttgcatttatgggttgctgatgcatgtttgttctagctaatcattgacaatttagctgaattttgggataagaacggtttactaacctcattcttttgtttggtggaaggttcttattgaggagtgcatttgtcagtggagctt

SEQ ID NO: 93883 - DNA, 843 bp, Eucalyptus grandis
  Intron number 1 from transcript Egrandis_v1_0.014072m (loc us Egrandis_v1_0.014072m.g) derived from phytozome v7.0 (c hr-ID scaffold_8; pos 8964049 to 8964891)
gggtatgagattgtactactcatttctctctggttaaccttcttgtgatggaactgattgatccaatggatagaactaatcataattcgaacatgaagaaagaagatacgaacctttctgctcttcggcccggattagtatagtcataacataagtgggaaaatgttctcgtttccataacttatgcgagacccgcatgagactttttctcagtttttcacttaacttttatgtcaagtaggatttcatttgcaacgagaagtagaaacagaaaattagagagctaataattagatttgcacactaattgatcactggaattgcagttcattggcttctcgtgatgatcatgcaacagatgattaagggtcaccaatgtcagggagcagttgagagctctaataaccaaaaacagatcttgcaagctgttgtttcaatatagtttgtttcaatatggtttattttagccgacacattacatttaaattcctggctttcaactttgggacatcaaatgagaaaaaaggtttcacgtgatccatgactcttgcatgcgtaaaccttccatgcccttcattaattagttttgtacgatgcatttggactttggagtgtactatattgttattgtattgtttagagaatccgatcatggtgtgacgtctttttcgccattatcttgcaacaagaagaaaaaatgctattccttgcattagcaaattgttgtgtccaacacatttatatgcttctatggattcccaagtggcatttcacaccagatgaaatgggatactgattttctagctgatgtttgatctgatctggacaatttgattccgacag

SEQ ID NO: 93884 - DNA, 883 bp, Eucalyptus grandis
  Intron number 3 from transcript Egrandis_v1_0.032319m (loc us Egrandis_v1_0.029581m.g) derived from phytozome v7.0 (c hr-ID scaffold_8; pos 11467911 to 11468793)
tgttgtgcgtcctcctgtttcagacaaaaagagtaaaataaattttatgcgttctctgtttaactttaagtgaattttctcagcgcctgtgacatgtttctataaagaatatgtctacaattataacaccccaagtcccgcaccaaatagaagataggtggtgatgtaattcttaagtataaacccttgcccaaagattcaacacgaccttgagtactgctttgctcatggagtagccatagtggtgtggaccttttcgagtgggtcttcctttaagtgtcacacaaagttctccttcgtccgatatgtgtggttagagggtgcacatgacactgctggttctagaaagtagttttcatattttggcaataatagtgacccattgtttcctcctatcatcatatcattcaaatttggttccgtcatttttaaagggcttggtcactcttaaatcacaggtttcttctttatctcttaccctccatccaagaccatcttccatttcatggctgaagattattgttggctatttaatcaccagacgaagaaggtcctgtaatactcaattattcatgttcacataattatgctgatagcaacttcaccatcgcctttcatgcatgacttgggtacagacaaacttcctactgctgtaaagggactctgaccctttgactccactttcatggaagagaaaaaaccatgtcgttaacaagttcttctattgtcatcaaagtgtcattttttattatagtttctcatcctgtgcacgtgacatgcccagttgctagcatcatctgcaggaaacaagaacgagtcattcaatatgtcgatgcggaagggaaatgactttcaatttgctttatttcagaaaagttgcggg

SEQ ID NO: 93885 - DNA, 761 bp, Eucalyptus grandis
  Intron number 1 from transcript Egrandis_v1_0.027650m (loc us Egrandis_v1_0.027650m.g) derived from phytozome v7.0 (c hr-ID scaffold_1; pos 23970177 to 23970937)
aggaggagaccaagaggctcgccacgattcgagaggtcagtgcacgaaaaaacgaagtctttagctttgaggggttttttcatttttctttcctggtagttttctgcagaattagctcgatcttggatttgagcttgatacttcttgaaagatgaagacttgggtttgtgtttttttaataaaaaatcgagctttttgttcgtgaattttggtttttctttgagcaaagtaaaggtcaagaattgctggattaggctgaactgagatgcagatttccacaaatctctcatttcttctttttgttttctttgtcctccctcctttttgccaggtaaatttctttaattcaacatcaatgatgctgtttttttgtttgtttgttgaaaccaaggacgcttctctctttcttcgttcttttttcaccttttggggctctgcttagtgtaatttttccccacttttgggcaatgtattttccattcttatgtggaatcaacgccaagatatacatggtttgactgatacattaaggcagttgattaaggaatggggtagtcttttgagagaccccgtgaagatcctttcacatctcttgactcgagtcaacttgtgcctctgaatctgggtttaataattatggtcctggctataaacagtaagcaaaattagagtctttcaattggagctggtacgaatctaatatccctgtcgctaaaaatcgattggcaatatgccaggaactagaggcattgtcagatcca

SEQ ID NO: 93886 - DNA, 313 bp, Eucalyptus grandis
  Intron number 1 from transcript Egrandis_v1_0.029637m (loc us Egrandis_v1_0.029637m.g) derived from phytozome v7.0 (c hr-ID scaffold_1; pos 32507011 to 32507323)
aggtctttctaattttcccccccgcttttgattttctcatttttctttggttcttgcccttttttcgtttccttagattgaggtctggttggcctttgataaggtaatctgatcgagcatgtgtttgactttagtaatccatttttctggtgatttgtttggatttctttctgggattgccttgttctaattgcataataattgttggagcatcatttagacttcagttatagccttaattgttcattatatcggattgctgcgtttgatttcctctttgactcttcttttgtgtcattcgattcatcgcaga

SEQ ID NO: 93887 - DNA, 1014 bp, Eucalyptus grandis
  Intron number 2 from transcript Egrandis_v1_0.029637m (loc us Egrandis_v1_0.029637m.g) derived from phytozome v7.0 (c hr-ID scaffold_1; pos 32507515 to 32508528)
aaggcttctggcctcggcgttaagcgaggtattgggctaaccacaaatgaacttgtttggccatgactttacttggccgtggattgtccatttccaggacgaccgatttaaaattgacaaaaagaaaagattcattgcccgttgtgacattagcatgatcaggattagagctgcttgatgtggaatattttacttgattgcatggggggtttaactgtgcataaaatttacagaatgtagcctatcataccataggcatccaaggtggaaggaaagttttgaatttggttggtgatttcaaaaatttcggatattgaggtgactattgttagtcgtaattatttcagaggctccgacagtctgtgccgaaactctccgctgttgtgaatattcaaattcatcttatggcttcagagagctaattcaaatttaactgcatattctcatctccatctttctctgcctactatttatgtcaatatgagcctcgaaaaattgtgtaatgagtacgcatatctttatatctggacaatgcaacatgtcattttgcaactcatctgcattccctctcttttactatgtaattctctgccgagtttaaacttaagtgcaatcaaaacatagcttttcatatggtctaatgagacattttgttatgctttcccaacccctcaaactccaaactcctaataatgtttcccaagaccaactctagctttcctctttacaagtatttcttggttttctgtttaagctcgatacagtgtctggggttgggggatttttccagtggtaacttaagccagtgctctagtggccatggctgaagctcatgaggcgagtgaatgctagcagttgcatgcattgtttagccacatgagaaaaaacaagtagacaataagcagccccgagcagtggcttctttttttcgttgttgggtatctgattgaaacctcttcttaatgtgtaggtcactgagagttctgccagatctcagttgcttccgaaggtggg

SEQ ID NO: 93888 - DNA, 348 bp, Eucalyptus grandis
  Intron number 1 from transcript Egrandis_v1_0.015275m (loc us Egrandis_v1_0.015275m.g) derived from phytozome v7.0 (c hr-ID scaffold_1; pos 35175741 to 35176088)
cgaattggctatcggcctcttcacgggccgcataggtaatgacatcgtctcttgttgtcaccatcggctttgagtatatacagaaaaattggttttttagcttactgctttcttctttttatcacttatcttgtaactatctagccaagttcttgttttgattgattcgattgttcctttttttgatcgaagctccctgcaacgtattaggactttatgtttttgtgtctttctatgtgagcgcctgtttaggacactagttggatgacttaggaagctatttttttttttcttaagattttgcttcttcaattatgtcttttgatattttcccaggtttggtttccg

SEQ ID NO: 93889 - DNA, 487 bp, Eucalyptus grandis
  Intron number 3 from transcript Egrandis_v1_0.025270m (loc us Egrandis_v1_0.025270m.g) derived from phytozome v7.0 (c hr-ID scaffold_10; pos 16537233 to 16537719)
ttccacgtgatggacaccgataaaatggagatctgacatttgaagagttgaaacatggcctgcacaaatatggacagcaagttgctgatcctgatgtgtagatgctgatggatgcagtaagatcacctattcaacagcttagcacattttttttttttttgacatggtttatgttttcttcttccatgtcaacgcattgtatgctgtgaagtgcatgattttgcttaaattgcaaggcatttggaagattaaggatggattacataatacggaactatgtttttcatcagttagtcaaagatttgatcatgaggttgtatcaccatttcacataattgatagaacttcttgcaaaatcaaatggatttctgataatttgatgagtcacaatttcttgtgttagcatctaaaaatagaactccatcttatatgagaataggctgatgaagatggaagtggaacgctgaactgttaggagtttgtgact

SEQ ID NO: 93890 - DNA, 920 bp, Eucalyptus grandis
  Intron number 1 from transcript Egrandis_v1_0.050979m (loc us Egrandis_v1_0.050979m.g) derived from phytozome v7.0 (c hr-ID scaffold_1; pos 35937730 to 35938649)
agtcctcttgctctctggtaacaatttggtcgttagatattcagtgacgtccttgcaaaaactaagaatatgtaatacaaaataagggcgtgaataataatcattctgaccataaattagttttttttttttctagatatgtttatgaacaaaaatctgtatttgataacaacgcaaaatttttgcccttgaaatagaattttgtttgataacaacacaaaatttcttcctcttgagggcgatagatggtggtggcggcggcaacggatcggtggctggcaattggtgagcgggggcctgcggccagtgatcagcggcgacggatggcgggtgagtggtcaactagttgaaaagacgagtgatgagaaatttttttatttttcactttgcttcaaacatatttctagactaaaaatttgttttggaaataaaaaaaaatgaaattgcatcactaaatggatatttcatttagaaacaagtttggaatagaagtgtaaaatagaaaaattatttttggaatagaaaaattatttctggaatagaaattttgatttgtcatgcactcctaaagtgtacattgttcactgcgctacaacatggacatataaaaataagaaggtgctgatattcacccttaacctaccccagtttgctttagaaaatgcttcaaatcactttctctgccatcatctcctcctcttctaaacatacatatcatcctcactcattcacacacacacacacacacacacagttgatgatagcttcctctcgcgcgccgacatagtaaaagatcttgaatcgatgcggatctatggcgatggctcggtttacctcttagtatttgacgaactggacttctcggcaatccctacaatgaacgaggactccatcttttgcaaaacacttcacatacgacg

SEQ ID NO: 93891 - DNA, 934 bp, Eucalyptus grandis
  Intron number 1 from transcript Egrandis_v1_0.039443m (loc us Egrandis_v1_0.039443m.g) derived from phytozome v7.0 (c hr-ID scaffold_1; pos 29847841 to 29848774 reverse strand)
cagttgaaaggctaggaggccaagaaagtaagtctcatttatttagcttccgttttcatgaatgagtggttttgaacttttcgtggaagatagcaactatgggtgcatcggtgcatcttcttgtgtggaacacaattcttgaaaataaaaccttataatttggaaacaccagtcctaaatgggagaaaaaagaaggtatataggaatgaggaagagcaaacggaagctaggttttccctagctgggacaaagggaaagaactccactaataagagaacatttttgcagatgtgatgacctactttgattacaaacaattctttagtttttaactgtgtgattcttcagtgtagaaacatattgaacagctagggctgtcaccctaactctagaaaggttgctacagaaaaattggaacattaatgaaggagatagttataagtcagtaacatgtgggatggaatcattctataaaatttgatggatggacaaagctaatcatgatgatgaaaaaaattcaagcccgatatttctttttcctagtagtctattttaggtatcgttttaaataaggtcaaataaacttctttaatgatcttctaagtatgtacatttccaaaaggaagaagaggaaccgaagtagtaagaaatcctttgctcgcaaattggactagatttacgtacatgaaaattgcctacagttagacttatttttccttctcgtttataagcattatttaagtgggtcaatataaagggactctcgaaaacggtcaaataaatcgtgaccaaaacaaaagaggcacacaaaccctagcaatagcaacttcatcggaaactgtctcgttgctatgtcctaggagcctgatttgtatttttctccctctctgcgctgatgggaacagaagcaactccaaaattggtgcttcagttg

SEQ ID NO: 93892 - DNA, 866 bp, Eucalyptus grandis
  Intron number 1 from transcript Egrandis_v1_0.027056m (loc us Egrandis_v1_0.024935m.g) derived from phytozome v7.0 (c hr-ID scaffold_1; pos 33801459 to 33802324)
tctctgctttgtccttccgaagccatcgatccaaggtacccgccgcggaattgtgtcgatcgtgctttgctccgcgtcgccgctttgcagggtcttgcttgtttgctcgagagatgcgtcaaaactcggtcttttaggggataagcgatgtgggtcgtggcgttcttgatattcttgcggagggccgtaataggagtgcctgctgagaatcgtgctattgtgcttgttcattgagtctcacatcccttgcaatcgaattgtgcaactgggatgatctggtatatttgtttgatgttgcataactcttttgcaatgttggcattatggaattagaatggcttttttcaactgcatatcttgcatttctatacaccggacaagctttttgaatctttttccaatataggaagagatatactttaagaatcattgttctgcccgttaatgggtcgtagatatcatggacccgatatttgtgtcttcgtcccgggacctatcctcggatgtttcaattatgtttgtagactgtagccagatgtccaggatagcattggggtgacgcttgcagatcctttgcaagacagggcttttcattccacattgggagtgcaagtggagagtgttttgtgttatctcattgcctgctacttttctatgaagttcaattaggggattttgtgtgtcaggaagtattgtaaatagcttatatcctatcaacggctttatcttggtccattaaataagtttccaactgtaaattcagttcaaatttattggagtcatactcttttttcccttcttttttttttttttcgccttgtgatgtttgtataatgactgtaacaattgtgtagtcatcagtcgtc

SEQ ID NO: 93893 - DNA, 1056 bp, Eucalyptus grandis
  Intron number 1 from transcript Egrandis_v1_0.037900m (loc us Egrandis_v1_0.037900m.g) derived from phytozome v7.0 (c hr-ID scaffold_1; pos 28310529 to 28311584)
gcttgtgggcgcacagaggaggaacagaagggtatgagaaagtttcgggcttttttggtctgtcactttgcatttgccttccaaagcaccagcttgttctccgcaaatcccgttcgcattctgcaatcatcatcatcatccgcatcatctcattatctcccccactcatattcttacgtgccacgacttactgcgcatcatattcatatcttatatagcatctaaattatgattctcctgataggacacagctatatagagataggccccagagatgactccatgaacaagaggcgtgtgatcctaacctgggattaattgcatttacatagaatgattcggtgggggacaagatctatatcaaagagggtggtatataaaagtcacctttacatgtcaatgaaaacattcaatttttatatgtaagttacacggccaggtgcacctggaaactctgttatagcataaacatactatatcccagcatcatcgcaagatccaaggacggccacaagaagcaggggccagcaaccaatgccacgagctgaaaaatttcaaacctgccaatcctcttgttggctttcaggcagaccatgagcaccagattatcttactaatgaaatgaagaaattcaatgcgaaatcaatctatgcggactatggcaacatgaattaagaacgccagccgccctacatgagtaagacataaataatttagatgggtactgggggaaaaaaattcagacataaacatgaatcattccaaagtgcggacaaaccaaaaatataaaaaagagagtaagagataagtttcaaaaccgaaacacgttcacatttcgttagtttcacacgcgaccttccccgtggcttcttatatgcaacatttaatgtcatctcgtgcgcccgccaaagtagaatgagaagagaacggaagacggtcaacgagtaactactcttctaaaaacacattaaatagtcacgaagagtctccagcatcacaccaatttgatacgggcactcagaaaattcttcttgttatataagaagcacgtcccaa

SEQ ID NO: 93894 - DNA, 870 bp, Eucalyptus grandis
  Intron number 1 from transcript Egrandis_v1_0.014308m (loc us Egrandis_v1_0.014308m.g) derived from phytozome v7.0 (c hr-ID scaffold_8; pos 70272076 to 70272945)
gggcagtggtgggtgccagggaagctttttgaaacgtaagttttttgtcctgtcatcaacattagtggtactcagatgcttatcgatgatgcaccgtgctagtgtctacagcatcaaatgttccaagttttaatgctttatacttatgggttatcttagatatttgtgcatatcaaagtttcaacattcacacatgacaattattctctattgctagtcatgtttgtaggctcttccaagcattcactcttactaagatagctctttcttttgttagggtcaaattctggccccataacatcatcttcctttgtttacttatgtctttcttcttacgtgtggagattgaggggaatgcttccaatgttcaagattagtgataatgcagcaagttttacatatgttcctgacaaatttcttatcagaaagtacatagactttgtgatcttgcccagtgtttaatctatacttcataggtttcgttaattgtcttctatctcatctgaaagttatggcagcctgcatcggattctgtgccaatgcagtttcttaattatgaacatgatttatgatatcattgtccagctaaaagcatttgttttccaaattatctcgggctattgtttgtatatatcgtccacccttggcctttgttctccactgaacgtgtaatgctactgaagacttgacagattgcaatatcttcttttccatccctgatactctcccactgtacagatgaagaataagtcttgagaaatcagctcttaagttgtgttctgttattttattttgtttcagcgtttgcttttcttctgaactttatgttcggcaggggttgttatttccaggttggaagttcattaaagc

SEQ ID NO: 93895 - DNA, 498 bp, Eucalyptus grandis
  Intron number 1 from transcript Egrandis_v1_0.033585m (loc us Egrandis_v1_0.033585m.g) derived from phytozome v7.0 (c hr-ID scaffold_8; pos 57828094 to 57828591)
agaaaatgtccactttaccattaaatgctggctccaatttgatgatgaacagttggcttcataagttcacatattgctatgaccgggaaagaagaaaaaaagaaaagatggatggcgttgatcagatctaccacaggctaaaattgttgtagattcggtatagttgactatgatcattaatgatagagcttatatactcaatcacaaaaactcattacatgcttatatagaaatattttaaacatcttgacttcaaatctagtggtagagctctttgggttagagtcacaatgcaaagaaaggctaaatccaaatcaaacttcttttttttttaaatcacaatgatatagatattacgcatcaattttaaatagacggaattctctaaaatttaacatctcaaagcattgaatgcattcattggaaggaacaaatcaaaggaaaaatgttctactgtaataagtacatccaaatttcttcaaaaacataaaaacaatc

SEQ ID NO: 93896 - DNA, 401 bp, Eucalyptus grandis
  Intron number 2 from transcript Egrandis_v1_0.011604m (loc us Egrandis_v1_0.011513m.g) derived from phytozome v7.0 (c hr-ID scaffold_10; pos 35764209 to 35764609)
acaaaaatcgacagcgtctttacctttctgaacaggcaagattcttcttcagatccaagaaatgaaagaatttatgaaagtgtcaatgtttttagcttgatttataagtagaacgaagtggttcttttactgtctcgtggcataactgcaagaaactttagtttcaagaaatttgattcgtggatttttgtactataatttagattggggccgatttccactgattcataattgtatgacttcgtccatctcttccttttacagtcacatgtgctttgttcgatagtttttctttttactatgggttgtcctttgaagtctagatagtctaatacggatgatgtatatatgcattattatgagcatagattctgatgcatcatcttattctacacagacag

SEQ ID NO: 93897 - DNA, 835 bp, Eucalyptus grandis
  Intron number 1 from transcript Egrandis_v1_0.007303m (loc us Egrandis_v1_0.007303m.g) derived from phytozome v7.0 (c hr-ID scaffold_8; pos 49923196 to 49924030 reverse strand)
cgcccggcgcgtcgatcaggcctgcgagcttttaggtgagtaggtgccctgtcggcgacggtcgagctgtcggtggccgatccgcgtcgttttgcggaacggtcgtttttcggtttgttgcttaatcggggaaagcgggagaggcgattgcgcggtgttctcgtcgcgattccgttctcgtttagcgaacggcagttaagttcttgccgtggctttcggtaatcgagcgtcgcgcggttttgaatcgtcgattccgtgcgtgattctcgctatctagatttcttgcgacccgtgcactctgcacgcggtcgtcgtgctgattcgcgattacaagagtcttccgctgactatggatttggtgaatgaattgcatgctatgtgaattccccttttagcttcatggacatagatacaaccttggctgtcaacttggtcgttggatttctgtgctttgaattatccattagtaaaacttcgtcggatgttcttctcaagagatgacaaagaagtagttaaggaagaaagcagctgcaacgtgtggcgcaataggagcttgcgagccgcatgtataacatttttttcttcttcttttttatatttttgtcatgtctcgatacttgaagttgcagtgatgaggcaactggtacagtttcacccgtgctgcgctcttgctctcgttccgagttctacttctttgttgtttgtactggcccatcaagggcgtgatgatgttctccctataagctttggcatttgactctgtgcattgtgctttctccctgtctccattattcgtgcagcgcaaaacaattgctataccaggcatctggcgaag

SEQ ID NO: 93898 - DNA, 817 bp, Eucalyptus grandis
  Intron number 1 from transcript Egrandis_v1_0.006207m (loc us Egrandis_v1_0.006207m.g) derived from phytozome v7.0 (c hr-ID scaffold_1; pos 16788383 to 16789199)
ccgagggagtggtctggtgtatattccggggaaaggtgagttttttttttttttttaaacttcccttgaggacatgcttatctggtttcgcaaattttccgtcggagcaataaaattctcagcgaccagatgattacgaaggagtcttaacgtttaaaatgactgtctagactggctttagatgcatctccccctgtgtttgaatgagttcgtggacctgtgtctcgtcccaattacgtctgatgtttccgaagaacaaatgaggtgggactgttcttcatcagatgtgagagttatttaagaaagctagcttggttattctgcatgaagtgcggctcgtctgtccaatccagatggtgattattcaacataatatcgatctaattgtgtctagtacgaccagattaatgtggcgtatggagcaaagtagcagcagatgcaattgccccatttagatgttgccgaccatttagaagctattatgctatgttttactgattaggcattttgttttagttctcattgtagcacggatgagttgcttctttatgattaggtttctccaggtgtttatttgctttgggtagccaaacatgtttctttggagtgcatggtctctaaatagaatctgctgatatggtcaatgtaaaaatagtcatgtttgtgacattgcccatcattcctttgtctagatatcatagcggtggtgaagtatcgggtactagaaatcttgtacctggcctaagtattgagctttgactacacgatgacagaagttgcaatagcggttttgacttaaatctcccttttcatacag

SEQ ID NO: 93899 - DNA, 670 bp, Eucalyptus grandis
  Intron number 1 from transcript Egrandis_v1_0.012823m (loc us Egrandis_v1_0.007060m.g) derived from phytozome v7.0 (c hr-ID scaffold_10; pos 35232904 to 35233573)
ccgcccgcccacggcgacgccgggtccctcctgtgagtcgcggagtcctccggctctcgctgtcgaactgctgtccgtcgctttctcagtccgattgaagtggcgagtgacgatttggcgttccgcgtgggggtctcgcttttcgcttatctggattgacccgggtttgcgtttcgtgatttgatctcgcaatgtgcgtgatggggctcgtgcatgttttgctcgtctgctgtgtggggggaggatatgcctttctttagggcgttggtgattggcggtgcggtgctgttgaatttggtgtgggtttttagcgattgcttgaattgatgatcgggggccaaattgattgagttcgatgaatgggagaaatttttttgtgtttgggagagaaggatgatcttagtaactaagtttctatcttaaatttgtgaactttgggggaaaatgttcctacttttccttctttggtaatttttgagcttccagttagtgtatttgagttgcatgaaattatttgagtttgatgcatgagaaatttctgtgttcggtagagaaggatgatttgaatagcttagtttctatcttaaatttttgaactttaaggagaaatgttcttactttttcttcttttggtaatttttcgagtttccagttagtgtatttgagttgc

SEQ ID NO: 93900 - DNA, 557 bp, Eucalyptus grandis
  Intron number 2 from transcript Egrandis_v1_0.007166m (loc us Egrandis_v1_0.004422m.g) derived from phytozome v7.0 (c hr-ID scaffold_10; pos 36732240 to 36732796 reverse strand )
aggaggagggaaacactgctccgcttccggaaaaggtatacttgcaaattagctttgtatgtgagattatccagggcttttgtttttagcagagttggctacccgattcttattgccatgaatgtgatacttgatgccgtgtcttctgcacacggccgacatggattgttgcgattgaacgatagaactgctaggtcgataactttttgctgtgaatacctggaaattgatggtaatatccaattggtaatgatatgactggttaataaatttcgttaagtgataggatcaactttttatctgttcaggttggtgattcaaatttgcaaatggtagaatcagctatatttttacaccatcacttcctgatagcgaaccttttctgttaatgctggaaatctaggattccctccatgtatgagtcagtagtttctttagcatcagttcttattctggggggctgttgtgcgcatgcactatctatttattctctattggaaacattcataaattctatctcaggtccaagttggtggttccccagtgtacagaataga

SEQ ID NO: 93901 - DNA, 757 bp, Eucalyptus grandis
  Intron number 1 from transcript Egrandis_v1_0.012172m (loc us Egrandis_v1_0.012172m.g) derived from phytozome v7.0 (c hr-ID scaffold_10; pos 29096087 to 29096843 reverse strand )
gcaggtcgccgagaccgacattcccatctccgtcggttcgtacctctctccctcttcctctctcccatgtctggaggcaaaattcgggcccgttgttcatctgggtcgggcgagaaatgggagttcgatggtttttagacgtaaaggaaagaacttttcgaaccgccgtggctggttggttctcttttgttgtttatctgggcggttaaggaatcgcgagagaaaatctgtcggtgagggtggccgtaggattgtttaatttgcggggcttgtgcaggaatggcgacgttaacgtagtacctttctgggatgcacgtcaacggctcaggaatttcttacagtcccattttgctttgcgttgcgttcatttcgccgaccctggttcgtgagttttccggctatgtgctttcgccctgtcgttcgggaagtctttcttccatggtctgcttcgagtggcatgccgaatcagttcaatcagttatcagtgcctatacttttgatttggattaatgtgaggtgttggtatcttctgttgtggatagactaggcaagagggtagagtaaaatacacgtgctaggtacaattttcttgtggtggtttgagctggctataaattaaatggagtctggtttgtggcgtcacgattcgaagagcgcggctttgtctttgactacttacagtctatagccgattctgtttgtcttacatttatttgttcgttcttcttttcttcttttgcagataagattttgcagg

SEQ ID NO: 93902 - DNA, 880 bp, Eucalyptus grandis
  Intron number 1 from transcript Egrandis_v1_0.041220m (loc us Egrandis_v1_0.041220m.g) derived from phytozome v7.0 (c hr-ID scaffold_8; pos 15144097 to 15144976)
aagctggcttgggggttggaactgagccaacaaaggtacggtctgaaattcgcgtaccttgataaaccggggtcaagaaaaaaaacttttgcctttattccatctatttcaagacaaaataatgagttaaataaattttcttaaacatgaataattgattgtggaaaatattttcaatatcatcaataatttatatctaaacatttttatagacgatgaaaatagtttttattcattcatctctataagagataggagcaatcatttttaagaaaataaattctaaattattcatttttcacgaaataaacaaaaccatagaaataatgatttaaccaagttactatattcatggtcaatggttcaaaaatcatttgaatgatgttcctatatgtaatttattattaagaggcttggttgtaggaaatttttctcattcctctaactatttctgattaagaaagaaaaaaaatgaagtcatttttctgaatcaaaacaaaatccattagccaatattagctaaagcattgaggtagtttgcgttttcccgtaagaattacttgccaaataaatactccatgttataataaaaaatattttttatttggactattgtcagtgtaaagaatgcattgcacgctatttactacgaattgctataaggaagatttcgttcatagaaataactcatagcaaacatttcattcaatccaatgatgaatgtataattttttttcacacttgcaaatgacctaataataatccaaaaataatatactaaaaagcatagcaattatagattaagctttgtatcagtgttatttgattatatactccataactttcttcatcttacaaatgtataatttcataggttcat

SEQ ID NO: 93903 - DNA, 957 bp, Eucalyptus grandis
  Intron number 1 from transcript Egrandis_v1_0.032966m (loc us Egrandis_v1_0.032966m.g) derived from phytozome v7.0 (c hr-ID scaffold_8; pos 25276182 to 25277138)
acattcgtgcagcaaaagtaagcaatcctatactcggtaggaaaattgatgggcaccaataagtcacaatattgtcttttcctaaatccgattgttccaatcactccttcagcagaaacaataccttttcatgagcatctagtatttgctttaggtaaatatatttaaaaggtgcatttttctttaccagatactgggattgaattaccaaatgatgtttaaagacccgtttgcaatcaacagtatctcttagcttaccattttaatagcatactaatcctaatatctagcatctctatgcttacagcttgctacgaagtttcttacggcaacgaaaaatttatattgagtagatcgaacctaatgattctctaagtgccggaagtttaaatgtatctctattactggtccagatctattgaaaaatcttgatgccatcaaactgtacttggaaaaacatgtggacaggaaataagatggacaagaaataagttaattgtcattaaattataagtggattttgccaaaagcactgtacttccgctaccccaacaaattgctttcatgaaatcagaggcattagcgaatgcattagcacgaccacagagcaacttttatgcacagttctagtttcaaaacattataagcaagaattactcaccaaacaagttgccttaacaactgtatcggcatcaaagtctgaaaacttcacaccttcgatgaccttcagcatcaaatccatgaaatcttgctctccatcgcctccggggtgggacaatctcttccttctacgctcctctagccatccctgagccaaaacatccaactcttttgcggtctcgttcatcgatcatttataaccaccaaagtccaaccagccgagacctgagatcgcatccgacaacacgacgactccaaatagatcaaagaacctcctgattgacctttggcacctct

SEQ ID NO: 93904 - DNA, 975 bp, Eucalyptus grandis
  Intron number 2 from transcript Egrandis_v1_0.010127m (loc us Egrandis_v1_0.007637m.g) derived from phytozome v7.0 (c hr-ID scaffold_8; pos 63621566 to 63622540 reverse strand)
gaaagtttttacaagattcattatccaggtatttattctgctttagctatatgtctgcagcacgtagtttatttatttatttattttcttttggtcaaatacggcatgtagtttgtgctataagtatatagtgtccaattcaacaagattaagaccattgtttcatgtaaattcttaggtctgattcaattctcagtctgctttggcttgtatcatatgctcttggttgtttcttagcttatgacaaattctactccttttagctcttctatttttctcataacctagtattttggatattatgaacccttctaccttccttgcaatcaatggttattttgtagtccggattttagttgtcgcattggtgaatcaagtccaaacttactgttgaattacatgatgtaacttcttctcattgcagaacaaaaaaggtggatgctttcacctctcgactcttagatattcattccaagatgatggaaattaataaaaaagatgtaagttcataaatttagaattttgtggaagctttaccttaagtttggttgcaatagtgtattaaaattggcttttcaagttcaggtcactttgattggctgctttccttgtctgaaagaaatatatgctgattgctgactatgattagtgtgctaaaccccataattttgctctctcaattctccacaggagatacgactgggtttgcatcgatcagattatatgcttgatgaacaaacgaagttactgcttcagatagagttgaacaccatatcatcctcattttcgggtcttggctgtcttgttagtgagctccacaggttaggttggtcatatgtaccgactcttacattccctatgatttctctaagcccatacgcacctgttcacatgcacagtcaaagatggtcacagaaaaccaaaagcttgatcttaacgtcaggtggctatgacacaggtccttgctcagccatt

SEQ ID NO: 93905 - DNA, 310 bp, Eucalyptus grandis
  Intron number 4 from transcript Egrandis_v1_0.021831m (loc us Egrandis_v1_0.019947m.g) derived from phytozome v7.0 (c hr-ID scaffold_10; pos 27548299 to 27548608)
tttcttgggaaagctcaggtgagtggattactcctctgtctgaattagctgaattgagcaattgttgtttacgcccttgtggtggtcatgaaatcggtgcttttgaaatctgttttgacctgtttcatctaatagaagttgtagcgaataatagaataccatggcctgatacattgactggattgattcttatggcaattggctgatttgaatttttttctacataatttgggaaaagttcttgaataatttagaatggtgggagaagtaatctgatgtcatcttctttgatcttctttgtttttgaagg

SEQ ID NO: 93906 - DNA, 817 bp, Eucalyptus grandis
  Intron number 2 from transcript Egrandis_v1_0.003251m (loc us Egrandis_v1_0.003251m.g) derived from phytozome v7.0 (c hr-ID scaffold_10; pos 10718328 to 10719144)
ttcaggtatgtgaattttattgtggttatacctttattttcttctctttcttcatttttcagctgagtgacatactggttgactgactgtgtttggtgttttcttgatgtaaaactaacaaaccaggcattgataccttgttgctttttggtggttgcttgttaaactattaaatgtgtagagattaagtatctatctggaagctttaatcttttgcttttggaaagtgctgagtaacttcttttccatgataaaaccaaattgaaagaaaacgcaaggcagaaggaaagcacataaaggtgttagaaggatgtctccaagtgatgctgagtgttgtaatgaattgtgcacttcagaatgtgtatcactctgcacaagtagcaaaaccaacaagtgtaatcttttgaaaggttcttgcaattattgttgtgctttttgttaaatgcaagttcattacttctggacttttaccttccacagcatactagtagcaattgcaaggcagatttccattctagttaatttggctacgaaaattttagtgtcacaccatgtttgttaaagacagaagactcaatccaactgcaagcaaaggttgactattaccaatgtaatttgccacatagcacccatatatgagaaaatccaagcttttcatattagtttgatcgcatcctagtcagtaataattgatgatcagatgctaggcttagaaaatgataagaagtgcgtactattgttattggagtttaaaaaccctcttcctttcatctttttgataggcaccaggggtttccaactttgtgagagtggcatc

SEQ ID NO: 93907 - DNA, 533 bp, Eucalyptus grandis
  Intron number 1 from transcript Egrandis_v1_0.047198m (loc us Egrandis_v1_0.047198m.g) derived from phytozome v7.0 (c hr-ID scaffold_8; pos 52535356 to 52535888 reverse strand)
caagagcagcttcactctcggtcagtgcttttcgctttttccatcttgatgtttcttccctcactttgagaatgctcatggtcaagaaatttggcacaataaagatatgcccttttactgtgttcgccctataataattttggaacgagatggattttacccttattctctgtggatctgatatgctggatttatttttagacaggaggaaagataatgcaaaaccttaacagaccattgtcatttggtagcactaagcagtatcaaagagattatatcacgtaagaaaattatctggctatgactgttttctttaggaaaaccgtttctttcacttttttataaccttaattaacgcctaaagtagaccttctcaagttaaactaggcttctcgtcatgccaaacatgggcatactatactgaagcacatcctagccaggctattggtgaaaatgtgtccctgacttcatattcgattccttctatttggatgacaggaagtgagacaaaaagaaggctatcttatcatagc

SEQ ID NO: 93908 - DNA, 873 bp, Eucalyptus grandis
  Intron number 1 from transcript Egrandis_v1_0.010283m (loc us Egrandis_v1_0.010283m.g) derived from phytozome v7.0 (c hr-ID scaffold_27; pos 371297 to 372169 reverse strand)
gttgtcaaggtactttgtctggtcttttcattagaccatccgaacaagtgttcatgtatagaatcgtggatttcaatacgggcgagcatgtttaatggatccaatcgcataaaaaaccgagagaaagaaaatgttcgaaacttttaagtcagaggcccaaattttgacttcatgaatggtacatcttttaaatgattctcgtaataatcacgtaaaatttataatctaaaaaatcataacaatctaggccgtaaaacatgatcattctttttctttaggtagcacgaattttcgttgcttgaaatttaatatgacctatgaagcccttagcaataatctgtagatattcacagtaatccttcctcatattctagacattcttctctcctaaatttagtccatacgattgttttacaaactaaagtggtcaacggcaattgagtctataaacaaagaatccatactgaaccctcaataacagtcggtcaaattagcttgtaaatcaatttcatgtaccgatgttaatacatccagcattttttctgtatttatagacagttatttttgaattattttctatgtgatgtgttattctagttggtaatggcacaattttgttggataattcttaaatcttctatactaaacaaaaattaagtgcttggttaaggttaagctcttgagataacgacccatcacttaaaaagtgtggtgaggtatcgtgatctcaagaaaagcaaattgacttgacatgtcctctcaaaattgaaagtgttgccaaatcatagaattctatttactttttcaagtttcttccaattgaaatggagtcggattgcttcttctaattggaatatattcccacagatatca

SEQ ID NO: 93909 - DNA, 462 bp, Eucalyptus grandis
  Intron number 2 from transcript Egrandis_v1_0.029584m (loc us Egrandis_v1_0.029577m.g) derived from phytozome v7.0 (c hr-ID scaffold_10; pos 31728466 to 31728927 reverse strand )
gactttctccgggtaattctaatactacgatcaagttcattttcatttctagtcttttcctatttttttttggcgagagttatagtgccatctcttcatgtgtaattggaaaatgaattaagttgtggcacagttacatttccagtaatctactcgatcacaatattcttggactcaagtaagtatatcgattttcacatgtttagtcaactatagacgatctgagatcagactctatgatgtgaatctgataaggacgcaggttgatttggttataaaaactgagtgggttaggcgaataatgtctcaaggaaggaagtttcttcttcttttgcttactttgaattgcgacaacttttcctgctgataaataagtaatgcatattctgttccaagtcttcaaggttctgcaactggttctacctgattatttaatctgactttgctttgttcagttcttgg

SEQ ID NO: 93910 - DNA, 545 bp, Eucalyptus grandis
  Intron number 3 from transcript Egrandis_v1_0.028900m (loc us Egrandis_v1_0.028900m.g) derived from phytozome v7.0 (c hr-ID scaffold_1; pos 35598438 to 35598982 reverse strand)
actgcggtatttccctgctcctattcctgatgattgttgcagcggtgtggcacaaacttgagagagagatagggagggagggagggagggaagtgattgagcttaagaccagactgtccctcctgtgagagagagtgtatatttagtatgacttgaattagcaaatgtagagttttagtataaaaatttgataatttaaaagattaatctacacgctacttgggaaaaaacgttatacatgtaccttggcagaatcatgagagaagtggttgagccttttttggcctctgctttttgatcagctgttcctgtgaaagaaagtgtgttttcagtctgatttttgaattagaaactgcagatttctaggataaagttttgcgaattttgaaaaattaaattgcatgctactaaggaagaaaaaatgatttatgtgcacctcggaagattgatgaaagaagagactgaactttttttggcctctgttcttattcagctgtttagaagtattgtactgttttccttgcagatcctaatacgcatattat

SEQ ID NO: 93911 - DNA, 568 bp, Eucalyptus grandis
  Intron number 2 from transcript Egrandis_v1_0.042388m (loc us Egrandis_v1_0.042388m.g) derived from phytozome v7.0 (c hr-ID scaffold_10; pos 24204826 to 24205393 reverse strand )
aaggacatttatttgcccagggactactacactgggtgagcaacagaagccaattacgttaatgctatcatgtagtagactttggtttcagaatcctttggaagcttctatctgatgccaattttcttcatatctccattttgagttcacaagtttcatgtttgatgctgatttaataaaacttaacgagtcttttatccatgcatctgaaaatttctgtgtcataataattcaaatcaatgttctccttggattttatttgcaaggaatttgaatacatgattcttattcacagtaaatttgtagaaatattcaagagcttgtgcatcgaaatgttttttcctagtaattgttttactcagtttgtcttctttcactgtttacattttggtaaaattatcttcgggagattgactcagcatgctaaagggttcatttttgcaaactttaatttggatcagagggcagctttctgtgttctcctttgttcaccagttgggtgttttattgaagttgttgagatatttacccagtgaaaataaagttttaaagagatcaatcaagtaat

SEQ ID NO: 93912 - DNA, 440 bp, Eucalyptus grandis
  Intron number 1 from transcript Egrandis_v1_0.042388m (loc us Egrandis_v1_0.042388m.g) derived from phytozome v7.0 (c hr-ID scaffold_10; pos 24205402 to 24205841 reverse strand )
actgcaggttttatatatatataatttgtttctgcatttccttcatcctgttttgcaaaaatcttggaccttgtggatcattatgtatgttctttattaaacttaattctttgattgccatattggaatataaagttgaacgaacatgagtcagtggctggttctttcaggcatatctagggcttcgtttgatttaattgttacatataattcttcctgtttcgcacttctttttttgttttttaaagaaaaaaatggaattgaactgaagacttcatacttgagaaaattaatatcctgagtttttttcttcttcctgtcctatgtattcatttctttgaaagcagatgctattggtttcttgtgggcatgttgcatactataacctttgactaattattgcaggccagaagatcttcgaagccaattgggcaagtttg

SEQ ID NO: 93913 - DNA, 607 bp, Eucalyptus grandis
  Intron number 1 from transcript Egrandis_v1_0.032228m (loc us Egrandis_v1_0.032228m.g) derived from phytozome v7.0 (c hr-ID scaffold_1; pos 10310926 to 10311532)
cgggtaggttaaatttcggtttttacttgctgcgtaatagtagtagtagacagggctgctgagcgaagcgtttggagggcaaaaggtttgtttttttcgtcgggccagctagctgaatcaggcagaaaaatatgtgctttgagatgggttattgaattgtagcgtgtttggagctaagtaacttatgatgggtctgtttgtgatgatgggtagatgagcttaatcacagtgacaaaagaaatgcgctttgggcgatggaccggggtggctgtgctgtgtaattcttgccgtgcagtttatagtgtatgttagctaaagaggccgcgaatagcacaacgagttgattctgatgcacttagttttagtcttggcgatgagatgtcctgccattgctgtgtagctgtaggtttgggggaggattggtattgttttcacttatgttggagtgcatgacaggcaatgctctagaaatcttcatttggttgaagcaaaagtttgtaatcgtgcgaatttgaccgcgagttggaggcctaacgagatgtctttattttttttttgcattgtttgtgcagtgaaggttgggattccggagtttttgcagggtatt

SEQ ID NO: 93914 - DNA, 794 bp, Eucalyptus grandis
  Intron number 2 from transcript Egrandis_v1_0.032228m (loc us Egrandis_v1_0.032228m.g) derived from phytozome v7.0 (c hr-ID scaffold_1; pos 10311612 to 10312405)
ttaagctcaagaagctcggcatcccttgcaaacatgtaaattgtctttcccctgggtcattgctcatttgtctttctaacaccaccctctcttttatatccaaaagtgcggacatggcacttctcaatatttgcccttcatatgaccttgagttgttttgctggtagaagatgatattctggcatgttttatgcactaatgatctggagttattgagtagatgaagtattgaataggttcatagtcttgctctaaagtcccaccatatatagttccttcatctgcaagactggaactaatttgttttgtatattttgctttgattggctactctttttgatctagggatatcgaaggaaaaaaaatttctacagtgactatgatctattgaataggctaaatatgtttgtgttattttcataatggtgaggagccaaacatctattgtatttgtgaggcatgctttgaacatatactgatagatgaaattgaacttttcaacaccattgaaaactggcacatctaaaacttatccttttacctattgtagttgatcgaaaattgtctgagctcattgtcaagtgtgcatgctgtagtaaccttattggcataaattttttttatctaagattaagaagtggaatagctgttccatccgctgaggtctgtcattgggttgatcttaaatgacattaatttgaccactttcttttcactttttttgtgaagaggtccctaagttcttgttcggttttgcagaggaagctgatattgaagtacacccacaaatacag

SEQ ID NO: 93915 - DNA, 931 bp, Eucalyptus grandis
  Intron number 2 from transcript Egrandis_v1_0.003717m (loc us Egrandis_v1_0.003717m.g) derived from phytozome v7.0 (c hr-ID scaffold_8; pos 63174431 to 63175361)
tcgattgggtgaggtcttttttgccctttctttattagttgtgacaacttcctttggtttcactaggaatatatgttgctagttcctggggcgttcatattgagtgttcctcaacagattctgcattaatggtggagaacaatggcaacaacctttgaagacttacgagatgcttgccaaatagagatttgctgtttcttttgtaaataatcaagaatcttcttgagcaatttgggtctattaggattttaataagtttccctttcttagttggacttggaaaaatgtttccttttcctagttggtagttggtatgtttttccaagttttattaggatatataaggtttcttatattgacttagagcagtactttagagtctttatatatggttttaattgtctccatcgaattgagttgatgattgtttaaatttggcaatttcgttgctttggaattgtgtgatacaattcctctcttagttgtgatgcttaggaagcttttggtgtgaagtttgaagatttattctttgttgtgggactcgtcgtcctacattcctagctgggaaataataaaccttatatatcctaataaaactagtagaacacatatccactaccaactaggaaaaggaaacattttaaaatccaaatagactccaatcacttgagaaattcctgattaatccatgaaaataaacaccaaatcctcatttggcacaccttttgcaagtgttaaatggtcattgccattgttctagacttgggtttgttctttagagttcttttatgcagttgaatttctatgtagtgcttggttatccttgtgccccggaatatgaataggagatgtttgagaatgtatcagtaaatttgatgtcatgtttttgcaaaaccaatataacatcagtaagtattggttttgcaggtta

SEQ ID NO: 93916 - DNA, 872 bp, Eucalyptus grandis
  Intron number 1 from transcript Egrandis_v1_0.040353m (loc us Egrandis_v1_0.040353m.g) derived from phytozome v7.0 (c hr-ID scaffold_8; pos 26805797 to 26806668)
atccattgtgagtattcttaatccacagcctgatgatgtttttggcaaagcaagcgctcaaatactgggataaaatctgcctctatctgtatacagttaaataaattactttttcttacattttactttccctaaaaaaatttgaaaatagaagatggtttttaatttttaagagattatgaaaatattgtatgttgctccaggtcaattaagtgtatttaaaaaggttttaggtgtttcgagtttcttaaaagtcaaatagcaacagccgcaagatttgggaaaaaaaaaagctatagtacaggtcgtacaaacaaactggctcattacatgagaaggtactgcagcttgttcagggagactgctgatttgtgaaattattttggcatgcaaggaagttgcagatatgagtgtagatgcggtgttgttagatttaattcttttgctagttcgagagatgttttggtgcagtcatgaggggataaattactggctaagcatacgtgataggagaccaaaatgtcactttagcttttgtttcttcaataatttttattgaaattcccatgaacagatatccttcaatgaatgcatgccaggatattctaagttaagattgattggctctgttgaggtagccattatgattttggattgtcacgactgtcatgaaatctagttgatatatgatattccacactttactatctttgataagtgtcatcattcgaagcaagtaagcataaaaaatgtgcattgtgcctttattgttttgtggatggggaaaatcctttagtattgttgtactgattggtgtttatatgtgcattattctagcttatagattttgctttgttttgttagaccttatc

SEQ ID NO: 93917 - DNA, 809 bp, Eucalyptus grandis
  Intron number 1 from transcript Egrandis_v1_0.031464m (loc us Egrandis_v1_0.029270m.g) derived from phytozome v7.0 (c hr-ID scaffold_8; pos 64026588 to 64027396)
acctcaactccccttctccctccgccgaaatccaggtccgtcgctcgctcgctccctccctcccttctcgtcgtcttctccgccgccgcggtcttgcttccgtcgatatcgcccctcgatccgttccgtggatgttcgagttttgagtcctaggtggtttatcggaggctgagcgcgtgcttcttttattatgtccgatcaattcctctcgtcgcgatgatgttctctgtaatgttgtccttgattgattctgtgaaagaaccgggaaatgcgtgacctttattgcatggatcgcctcgatagaaaatctggaggattggccggatgcctgtgaactttgattttgctgcgcttttttggacaagctcgtgaaggtctgatcttggctgttttgggatcgtaatcacagtccactgaggaggaggttcctttgtaataccatgagctcattcccctgatatcatttcacttgtcgaattccttatagattacttctttgatgcattttatgtcacatcttttcaacagcttggatgttttgtttttcatttttcttgcctccgtttgtatatataggtctttgtgggcactgaagtgctcttttcttttaacgcaaatagaactttgtcatgcttctgttgataattttgagatgcagctttcttctcttattttcatgaatgtactgtcaatacgtaagatgatgaattggcatagtgggttagttgatgtttttgttcattgtttgatcaatggattttgcaatgcgtgcagattttgaatattaattggtttcagagacatcctga

SEQ ID NO: 93918 - DNA, 555 bp, Eucalyptus grandis
  Intron number 2 from transcript Egrandis_v1_0.031464m (loc us Egrandis_v1_0.029270m.g) derived from phytozome v7.0 (c hr-ID scaffold_8; pos 64027408 to 64027962)
aggtatgatgatttttcttggtttttggctatctgcaacaaacattcattctgctaaaagctatttgggggtgccacaatcagtagattcattgctatgatcattttgagtagtctggcagttggggctttcttgaatcagctggtaatctgtgcttttacttatgttcgtgactgggtttgttatatatgaacatcttttgggtgcctgttatgtttttatttctgatgatactggagtcgagagtactgcaaactttacactggaacgataaattcttgactatatgtagattgattcatctgcgtgttatatctgtcttacctggtcatttggtcgatcttctctcgttgttgtcatgcctcatccattgctggccattcacatcttttgcctcttgtattcactatgtttcatggacctgtgagattgatgtcgtggtttacacaatttttttttttctgaatgaatttgaattatttattggttgactggactttctttttttggttggatgcaggtcagcttgaccttgaatataacggcagacttgca

SEQ ID NO: 93919 - DNA, 822 bp, Eucalyptus grandis
  Intron number 1 from transcript Egrandis_v1_0.008892m (loc us Egrandis_v1_0.008892m.g) derived from phytozome v7.0 (c hr-ID scaffold_8; pos 36271057 to 36271878 reverse strand)
acagggacttcctcgtccggaacaacggcgatcgggtgaggctcggttcttttcctttttgcttgcttctgctctttcggggggaaaaaggagggaaaaaagaatcgtgggtcggcgtccttgttgaagctggtcgtgttctttggggcgcgggggtcgttttgcgaggtgcccattttcgcgcgagaggttcttgttctggtggtgatgggtttgtttgaagagacgaagttagctggaggttgagaaattgttgatctgattctttttgggcggttatcttcttgtcggattgggaagatgcgggttcttgcgcctatggacttcgaattccgaagttctttctggttgttctttgccgggagttcgggattccgaagccgttggtttgggatggccaagctggcgagtttggttcaagataagcgagtttagttcaagattacttctatccatttgttttcttcagaaactggatcattggtaattgatttatgattttttgaagaaagatttatacatagagtcacgtggacgcagtatatatggattcgatttagtatgaatgcttgcgtcttcagtgtggtttagttattttggtcgacgagactacgaaattgcgattgaattaatgaggagcgcttaactgaagtgcttctctggttatttgggtgtatcatgagccatttaaggattttgtgaggtggccaattaacattagtgtgccttgcttgctgattaccgttatgaaagaactcaaattaggaatctttttgtcctgtatcaggttaaagttgatagcttgaaggggaagaagatcgg

SEQ ID NO: 93920 - DNA, 422 bp, Eucalyptus grandis
  Intron number 1 from transcript Egrandis_v1_0.028598m (loc us Egrandis_v1_0.028598m.g) derived from phytozome v7.0 (c hr-ID scaffold_10; pos 13209080 to 13209501 reverse strand )
ccttcagcagagctttagcatcgatttgcgcacctgttacccataaatagaaagatcaagaaaccagcttcagaactcagaaaccctttactccaacaacagtttccagaactatgtctaaaggcttcactaaaacatacaaccaaggaaaaatctcttctttcatcaaacattgaaaagcaacagagatacagctactgatttatacaaggagcagcagacaagcaagaccctccatttatttgagactacaagatgtgttttcgtctctatttcctcttcaatttcatatcttacgcaaaacaacgcaaaaatcacaactttgattcgacgatttcgcttcaccaattaatcgatgcaccacagagaatcgttaccattgagcagtttcctcactccttcaccaacacccactggatccg

SEQ ID NO: 93921 - DNA, 763 bp, Eucalyptus grandis
  Intron number 1 from transcript Egrandis_v1_0.052672m (loc us Egrandis_v1_0.052672m.g) derived from phytozome v7.0 (c hr-ID scaffold_8; pos 59507029 to 59507791 reverse strand)
gacaggttttgagtcattttcttgtgtttgttcttggtcattttcttgtgcttgttcttctttccttctttttggctcttctgtttctagtggctgtgagttgggtttagctttaagtgatgtttacggtggttttacagttgctcagggatcattgttttcaatggaggagggcttgagtgctctgtcgtggggtagccattagaattatggattgtcatggtcatccattatcagttctgtcttgtgggaataacataatttaggaaactttgcttggacaatccgggaatgtgcggctgcctattcgctctgtagcagttgataagtaagactagagtggcattcttttcatattcgatactgataatgaatactgggcagttgtctggtttcgctctctcatgtgaaccatctcaatgaggaggatcgcaggagagagccggtttctctttggagtagcatatctcctcttctctatgacccgtgtaatcggcaatcttttttattgagataccttctctgcgaaggtattgtattttacactgttaaggatttcactgattctagggaataaataagtgaagcattgattaattgggatatggaattagtgatatcgctggttctttttggcctttatccgaccttttttctcctcaaccctaggattcttagtcacagtttcttcttgtttcatttttctttgtttgatttcctttctccagacattcgatcgccttcctattcaggactggctgaa

SEQ ID NO: 93922 - DNA, 337 bp, Eucalyptus grandis
  Intron number 3 from transcript Egrandis_v1_0.054287m (loc us Egrandis_v1_0.054287m.g) derived from phytozome v7.0 (c hr-ID scaffold_10; pos 8409667 to 8410003)
cagaagggaaggccagtccaggaaaggtcgccaaggtatatatctacattttgtttatatttatgccctgattagtgtcagtcagtcttcttgtttgaatatacttttttttccactttgattctttgtggtactgacaagataacataatttttttgtttgtgggtgctgttcttggtgtttccattaatcttctgttccagtctatctgggtgagtgccatcaatttttttctttttaatttctcttggttaacagttgcatttaatgattctgataagctaattatttctgtcgatttttcactatactttttcttttccttacttagggggtt

SEQ ID NO: 93923 - DNA, 268 bp, Eucalyptus grandis
  Intron number 3 from transcript Egrandis_v1_0.031465m (loc us Egrandis_v1_0.031498m.g) derived from phytozome v7.0 (c hr-ID scaffold_1; pos 15198873 to 15199140 reverse strand)
gccattcctggtaatataagcagtttattcttcaggttgtctgcaagaaagatttttaaaaaaaaattttgaaattttttttttagttctaatactttttaaagagttgttgtaccaattcatcagatagaaattaatcagactatgatagtaaatcaaaacatgttccctgtggttttctagtagaaagggttaactggtctgcgatatctctgctcgaccgatgcgtgtagggttccaatcattgagtttaaaaggaacggaccga

SEQ ID NO: 93924 - DNA, 577 bp, Eucalyptus grandis
  Intron number 1 from transcript Egrandis_v1_0.031465m (loc us Egrandis_v1_0.031498m.g) derived from phytozome v7.0 (c hr-ID scaffold_1; pos 15199386 to 15199962 reverse strand)
tcctgaaattagcagttacttgcatcccagaggaggtacggctcgaatctgaggcaaccttttttttttttttttttaattcatctttctcttccttttgacgggtgcgaaattttgtccccagcatggaatgcataccatgtgggcgaaacaataaatcggtcatgccacatctattgcatctccagatgtttctttgataattgagcagctagggtttgtagccttgccctattttgtgcagtttatattctatgatagggaaataattccaaaattatcttaaaactcaggttgtgtcgaaatttcccaacataaatttcctgaaaaaaaaaaagtccaacatgtttttttccaccttttttaactttttattttaaatttgttgggaaatttccctttttccacataagatagtccagtcgagacttgatatgaatgaactatcttcagagaaatggctatagatatggaagacactgtccaaatcggcttcgattcaaatatcattccctagctcaaatcagtccatctcccatattctaaaaatttggaataattatctgcaggtccattg

SEQ ID NO: 93925 - DNA, 671 bp, Eucalyptus grandis
  Intron number 1 from transcript Egrandis_v1_0.024649m (loc us Egrandis_v1_0.024649m.g) derived from phytozome v7.0 (c hr-ID scaffold_1; pos 28008836 to 28009506)
caggtagatttatcaaaaatcattccatcagttttcagatcatcaagtgttgttttaagtaagatgtgcacacgaatgaaatttatgatcttatgaatcttcttctcaaaatcaactgaaggttttccagctcctcttgcttgaaggaaataatcaaaacaagaacctggaaaccttgaaatatgctctttctacttgccaagctgtagaatttcccttctatctgtaaatggagaaattactatcctcgctactgagatcaatagtcttctctaattttaaggttcaagggagaaaagtgctaatttctaatcttcaaatgcaacctgaattatcttcaagcgcttcttcaggttttaggattaatgcaaaatctctagaataatttcttttttccctccttaaaagtagggagaagaagtacgatttctattttgaattcaagattataggctcgcagttttattatagccaaaagaaggcaaaagtatctgcagatctcctttctctctattctcgtgattaatacgacagccatggcaaagagaagctctacaaacagagggatggagttataaataagttttcttactcctagtcatgcatgcatgttttagcagcttacagtttagatttctttttttcctcttcaaatttgcagggttatcaag

SEQ ID NO: 93926 - DNA, 884 bp, Eucalyptus grandis
  Intron number 2 from transcript Egrandis_v1_0.015120m (loc us Egrandis_v1_0.008066m.g) derived from phytozome v7.0 (c hr-ID scaffold_8; pos 72586463 to 72587346 reverse strand)
agaatacgaattattgagcagcaatccttcaagtaatgatctacaactgcatgttggcacttatggttgagattgaagccccagttcttgatgactcgattcttagcaagtgatcctaaaacgttaaaagttgctaatagccccttttttttttttttttatcttcttcactttagtgattagattttacctaccataaaattaataaaactgcttgtatagaaatgtgtatatatataatatatcttaccatataattcatatgaagtgggaatgtatatgtcatcaacaaagcaacccgataaagatatatatatttccctagtgttaatgatgctcaaatcaaaatggggcctccacttaacccatgcaagtgtcactgaacttgacttctatagttgggtcactcatcaatacataaataggaaagaatcttagtgtcccttccttttgtgttgtgctgctcgaaaactaggccgggcctcttttttgtctaggtgcacatgttttcttttttcactatttttcataattattaataaatttcttgcttgaactttcagagattgattgacaaaactaatttactaagtgacgtgacaagatgcaagtgactttacacgatcaattcatattcatcaagatgcaagtgacttacacgatcaattcatattcatcaatcaattaaaatccgtcacgtcatgtaactacaccgatcttaatcttagtgtacctggcattattctatgtgtttttccgacggaaaagtctttcatgcaaagagagaaaaggccaaaatgacccgtttaaccatttgtctcgtctgtgtttgtgattcctatgaaacagtgcacttggtggaatctgccaaacaatccgaccct

SEQ ID NO: 93927 - DNA, 904 bp, Eucalyptus grandis
  Intron number 2 from transcript Egrandis_v1_0.015963m (loc us Egrandis_v1_0.015963m.g) derived from phytozome v7.0 (c hr-ID scaffold_8; pos 7464763 to 7465666 reverse strand)
gcttaggtgctcgaatcccgcccgccgcgaaatcagtgagaagcctgctcctgaaatgctctttacccgattcttgtgcatattcattggccaggaagtgctatgtctagtttgattggctgcatcgaacgttttcttgatattcgtttgtctgtttgctgagtagaatgagaattgtgcaattggggcgcgtttatttcttgggaaatcaacgatttgggaaatgcttaccttgaaatgatcgatagaaaaattagtcgatgggaaagcaatagaaagggattgcacaattaagatgcctcaagacagattacacgtggttttccaatcacaagaaatgcaaaagcatttgacaatacaaagattttatatggaccatatgatatgactggagcatgccattaagaaaggtcctttggatttaagaaactgtcgttgagagtaaggtcgaggtttaacaaaagtgaagaaagcttgggacaaactatgaaattggagaagggagcaacaacaaagtgacgttcttttggatgtaatggttttcggaagaagtcatatatttttgtgccaaaataatccatttttctaccaagacacctaccgttcctaaagaaaaaactgaaccggcaaaatctttagatagatggtagcttagggcaagctgataataatcttcctcaggtaattgaaattgcatcctggtctagtgcatgcattgacccgcttaaggttcatcacttgcattagcacatttttatatagccactcatactgtgtctcgaagaattggcatggcaattttcttgatttttggcttggtatacttgaaagagtgcttgaattcgtgatctttctcttcatgcttgcactaatctagttctcaatgtgacaggagagccgtggc

SEQ ID NO: 93928 - DNA, 950 bp, Eucalyptus grandis
  Intron number 2 from transcript Egrandis_v1_0.016658m (loc us Egrandis_v1_0.016658m.g) derived from phytozome v7.0 (c hr-ID scaffold_8; pos 59802747 to 59803696)
attacagcatagatattgcggaaatcaaggctgaggtaaatggccttttcttgttcttctctctgggctaaattatgctatctctgatgaatatcaattgtgtgttgatcctgtcgtaccgtctctaacactattatcgggctgattgtgtcttgacttatgccattggtgtcataatcttattcacggtacaagatgactccattatttgcaagaagtaaagtgaaaatttcaaaattatatgtgttgagacctcattctgtgtcatggttattcagaatttagataatgcttatgtttgttgttagctgtcttagagcaattgtctgtacttctcttttaatttaggaagctatccaagattttgcttcctcgttttaatcagtggaggttacaggtttgattgccctctggaatatagggcatcccgggcttttaggaggaagacaggttttgcataaacacatacaatctgctaacatgctcacctaaaagaataattttgagctttggctcaatgaattaggataacatccgtcaactaaaagaaattccagtagagcagctcacaaaaattggttcacttttctaagattgtgtaagaatagaatgatggagcctgttggatccatttcttggtgataaggttggtcctcctttcaaaatgtgagacatgtggcttcaggaaacttgttagcgtttgatcaattgaagaaaacgattaacaacataacttaattgtaataggccgtagccatgttctcttgtttgttaaccatgtacatggttgtttttttgtgaaagccatggcatattggttggattcaatcatctatatcagtttgtctaaataagagttactctaattattgcaccctattttgccttgcatgttccctagagtcggaaattttattatgttatttttctgctgcttctaggttaagaag

SEQ ID NO: 93929 - DNA, 995 bp, Eucalyptus grandis
  Intron number 1 from transcript Egrandis_v1_0.012664m (loc us Egrandis_v1_0.012664m.g) derived from phytozome v7.0 (c hr-ID scaffold_1; pos 29320801 to 29321795)
tctcgcgctgcgcgtcgatctccttcttggattaggtaatgatcgctcttcttccttcgtctatgttcttgctgtttcttgatcgcctttttgttcccttaatctgggcattcgattgtttcttggatcatggagctccggatcggttctgatgggcttgtcgtggttttggctcatcgcgcgtacccttttcgtcctcaatgctgtttgttcggaatcttagcttatctccggttttggtctccccgcgattgaacatgaaaaaaagctgtgaatttcgatcttttggtgtttgattccactgatttcttgtcggggaagtcgtcgatttgtactatgatttctgggcatggcttttcttgcgcaaagttttgtttttgccccctcttgcccgaagtaaacaagaatgcacatgctgaatttggattttcccttttatcccgtctcatcagattaacttccaccttgatttcgatggtcgagattggaagttccatctgttgactgccgtgcaactttttaccttttttcgggagccgtttcgtgttatgattaacgcaatcgaacttaacgagacagtgttctgggtttctagccaaagtcaacaagctgaactggcttcgcttgttggcagtatgagttgtcactcagaagcgcatcgatattttgaatgaagttgttttacataagcttacccagctctgattgtatatgtgcttgtgttggaacttttggggtgtttaagttttctgttgttctggtgtttatgtacttgtatttctcgaaaagaagtttcattatggtgtgaaagaaaacaagacaaggaattttcatcaattctatcacattgcagtccatcctttttataggcacttcagatacaggcgaatagaagcttgtcattccgtttcttttcatgtcgaaattctttcatgtttctcattggtcatatcagtctttgtgattgttatggttaacttttgtgatttcaggag

SEQ ID NO: 93930 - DNA, 338 bp, Eucalyptus grandis
  Intron number 2 from transcript Egrandis_v1_0.012664m (loc us Egrandis_v1_0.012664m.g) derived from phytozome v7.0 (c hr-ID scaffold_1; pos 29321995 to 29322332)
catcttccccagcatctcctataccggttcgtatttattgtcatttatatcttttgcgacttattgaattggttgatttggtactctcgtgctttgtttttatttttgttattcttgtcatctttatggacgtgcccctctcttctcaagcaatttcccatatagtggagtggggcaatggtaaaatcatttatactcttgttaaaataaattactttgaggtctagttttcctgtggttgtaatacgcctacgttaaaatggctgcttataaacttcttttcctctgaattttcttgtgcaggtcgatagcttgggatcattctcagaggagataca

SEQ ID NO: 93931 - DNA, 801 bp, Eucalyptus grandis
  Intron number 1 from transcript Egrandis_v1_0.015940m (loc us Egrandis_v1_0.015940m.g) derived from phytozome v7.0 (c hr-ID scaffold_1; pos 23484971 to 23485771 reverse strand)
agctaagcagggctctgctcttgtgctgccttcgggtgggttgcccttttggttttttccgtgatttatttgggctttgattgcctcttgtttcttcaccccgcgttggaacccgccctgactgtttggaaccagaccggactgaaccagaaccggcggttcccatggaggccggtctgacttccaattctaatttagtggaattgatgagtactgatccagttcctatgcctactctatactcacttttagatttttgccctgcttcttgcagggtgtgggagtcgaaatccactcctgaaacttactcgtccccatcccatccacccggacttaattggcataaaaagtgggggtcagaactccaaagtgtcccgctttttggaagtaatcacaacatgtttaatttacttggttcagcttgtcttaagttgtctgataccatcatttctgttgtcctacaataattatctccatctgtatattttgtcatatgttcttcgtactttcaccgttgagaaagaaaagaaaaaacttgagctcgtggtgcgaagaatagctccgtacctggtactctggacacgagacccttgaaatggtattgaaattctctgaccgaaagatcccaattgttctgtgatcggtttctcttacgcttcttaactctggcatttttcctatctgaaagcaaagagcatccacaggtctaatattccgatttcgtgcctgtactgttaaattgcattctcacgggatttgatttcagggagtttcaccaaattgttggcggttttatttgtt

SEQ ID NO: 93932 - DNA, 695 bp, Eucalyptus grandis
  Intron number 1 from transcript Egrandis_v1_0.004061m (loc us Egrandis_v1_0.004061m.g) derived from phytozome v7.0 (c hr-ID scaffold_1; pos 35067077 to 35067771 reverse strand)
tttgcaggcttttgcattcacagatcctcttggtacttattattcgatgatccatcttgaactgtttttcgcattgtgtggttatcttgctttagcatcgattggcgttatttctccgtctggttgcaaaggtatgagctaagaggcgtcaaatttttgtttcgttaatcttacaagaagaacagaccagtaacgtttgcgccctgagggacgcagacttttgaaggcaaggtgcatattttaaagtcacgggtcttttctggatgtgccctttgatcagcatgaattttgggttatctttccctatttttcggtggactttatagttgcattttgagactgttcaagtccactgcaaaatgatcatatggccctcattgaatcgaatcaaattatgggttggatctttctgccttgatagcaatccccaccttctgtcatacgacctaagcttcccaagtagttgctgttcagcaaattatgagcctctgatgctattcaagactgaagatgactgggtttcttgtgttcggagatatgagtgatgataattacagattgtccgattgcttgcctaatagtctcggttatttctttgacttcagtatgttttcaactctctgcatggaatttcagttaattttgtctttgggttgctttttccttctctgttgtctatgcagctacgacgcttc

SEQ ID NO: 93933 - DNA, 539 bp, Eucalyptus grandis
  Intron number 1 from transcript Egrandis_v1_0.025434m (loc us Egrandis_v1_0.025434m.g) derived from phytozome v7.0 (c hr-ID scaffold_8; pos 70923252 to 70923790 reverse strand)
tcgcggtgtcggcgcaggccgaggagactctcaaagtgagtgcatttctcccgggcgttcttcttgagagagttttttttttgttttttcctgtttgcgtggaaagtttgagtttttgagttggagtgcctttggtttttcctgtgactggtgagtggaattgtgatgttctggaatctgaaggaccaatgtggcgggtttgagcttcagtggttcttttaatctttaaatttgagtgcttttgaaactgctatttgtattttgatatgctgctgggaagaaaatgtggagtttggtgtgattagtttggtttgtcatagcttcggcgaggccttcgaagattatgattggtttccttttccaattgaatttcttgtcgtttctttcttgggattctgctttagctgttttagatttatacagtcgatattgtcggtgttaccttccttggttgcgtaccttttttttttcttttttcttttttctcttctacattgtgaggattgtggtttgtgtaggaaattgtgttggacgcgata

SEQ ID NO: 93934 - DNA, 631 bp, Eucalyptus grandis
  Intron number 2 from transcript Egrandis_v1_0.002225m (loc us Egrandis_v1_0.001705m.g) derived from phytozome v7.0 (c hr-ID scaffold_10; pos 6636760 to 6637390)
agacccctccggcaaagtctcagcctgataagcctgtgagtgcattccttgttatctgtttgctgttgatcagtaactggtgtgtctctccttggtgttttgatttgtgtacttaaattagcagttgaatattgggggaagaaagaaaaggaaaagggcagatcgaatgagttggtgtttttctttggatgcgtatgtatcctcgaattgcagaggtcataagcattcaatggtgtcagacaggatggttagtttaattttaactctgagaggaaaaataccaagctttcttctctaatgttcaattccctatcgtggaaaggcagcctgatcagataattaagcatagccgtcttttttcttttccccaggtttctcattatgccattctttttgtctcttctttgggttgtttgagggattactgcaaaacaatctgaattttggttgaaaaatacttctcaatgatcaggttgtttcttcgacaaaatgaattctcatgaggaaaacaaggaagcatgcattgattgagtgaaaatcctaaagcaggaacttagttggcaattgatatatttacttgcttattaaaaattcaggtgcatccggttcaggagaattcagctaggaggaa

SEQ ID NO: 93935 - DNA, 863 bp, Eucalyptus grandis
  Intron number 1 from transcript Egrandis_v1_0.007083m (loc us Egrandis_v1_0.007083m.g) derived from phytozome v7.0 (c hr-ID scaffold_10; pos 6671093 to 6671955 reverse strand)
tgtcccccgctgagctggccaagatccagcaacaggttcggcgtcccttcctcctcctcctcctcctcctcgtcatctccatctccgaaagccttctcttttgagccgcggatgccgttttccggtgttcgattccacggcgaattgcctgaattgtccattttgtttgaggattatcggattgggagctcccgatcgcgctaatggctacctagattacgcctctgccgaaggaagctcatcgcgattaaaaatcaaatacaagttttttatattactgctgcttcgatatcagcttttgggagagaaaaggaattgcctcggggttgagaatcagaatttagcttttctgcgacttctcctaaagataggaataaattatagttttgattttgctcaattgtttctccgattttggaaaataaaggtttgtgacaaagcttatcgattagacataagatgctgctgctgcgcggtaaatgtaaagtggctcgatttctgcattttatgtcttcagggtggggggattttattattatttctatccggtgaataagcatttgcagcatatcctaagggtggaatagtgaagttggtctgctttattccctctttattgaagaaagttttcacagtaatccatatctcgggacttgttttaagatattatgatgcaatagcattgattatccattcggatagtaaaatgatcccgttgcatttgacgccactgtaaagatgcccattcttttggactctttgactggtcccacttccatggcccgtgttgaatctcttcgtttccagttccaactgattggtgtttccgaattcttcatgatgtgatgcattgttcactgcag

SEQ ID NO: 93936 - DNA, 900 bp, Eucalyptus grandis
  Intron number 1 from transcript Egrandis_v1_0.034949m (loc us Egrandis_v1_0.034949m.g) derived from phytozome v7.0 (c hr-ID scaffold_8; pos 54117823 to 54118722)
cgccttctacaacgtctgctgagattccttctcaggtcctctctctctctctctctctctctctctctctctctttcggtgggcgttgtgagttcttgctttttgtgtacgtgagtctcgctgtttgtgggttcgctggtgagatcgagtttcgtgcttgagatgggtcggattctgcaggcgtcggaagagatgggtcgtcggcgtttaggcgtttggtttccgttttccggttgttgctctggttttagctggttccgtgcaatctgagctctttgagctcgagaggtcgtgccccctcctccgtcttccgcttccggtgctcacgccccccgcgagaattttgcttgagctgtggtttgagatcttggttaggctcgagtgagagaaatatggagagctatcgaaaaagaaggaaagaaaatatagaaaccccgatgcgggatgacacgagtgcgattaaatttgagtcgaacgcgacttagtgcattgcgacgtgttttctggaattcgagctactttagtttggaactgatgattgacgcggcgacggtgacaggatatgacttgcggcccattcggaggctttgagaagtttgcggattgtgggaagattagcaggaactatgattattttagaaattatacaaccgcctccaaaagatgagagctttacctcgtgcattgtcaactttgacaagctggagtgatgctgcaagaatcattcttattaaataattgtagcacagtggcccacgactctttgcatatttagctaattcaggctaccaagtttaatgacctatagagatttccatttgtgagtcaggcttccaaacattttccatctccagctgtcattgcttttgctgatatgctgtttggtatttcttgaagatc

SEQ ID NO: 93937 - DNA, 792 bp, Eucalyptus grandis
  Intron number 1 from transcript Egrandis_v1_0.010662m (loc us Egrandis_v1_0.010662m.g) derived from phytozome v7.0 (c hr-ID scaffold_8; pos 36253375 to 36254166 reverse strand)
acagggacttcctcatccggaacaacggcgatcaggtaaactcgactctctctactttagctttttgtaaggaaaaaagattgtgggttgaagttcttgtggtcttcgcgtgagttgtttgactaactacacagttcgcgcagacgattcttgttctgataatcggttcttaaatttcaaattatggggatggctgaaaataatattgatctgattcttcgttggtggtcctcttgttggattggaagatgtggttcttgctccttttgtgttttaaattccgatgttccttcggttgttctttgctgggagtttgtgatcacgaagccatcggtttgtgatggctaagctggcgaatttagttctcgataagctaatttgttctgatctttgattatcatctttgagtatcgtccatttgtttcattcataaactggatgattggtaaatgatgtgttactactactccaagaaacaaatatacttaagagtcatgcggacactgtgtaaggatacgaccctgttatactgcaacgccctttagtttaaatgctcacaccttaatgttgtttacttgttttggttgatgagactgctgattcgcgagaaaattaatgagagtgcttctccggttgtcaatggggtgtaccttgagaattcttaggattttgcgtgggggtcaattttatttggcctgccttgcttgctgattactgtatgaaagaactcaaattagtaactcttggtctaaatcaggttaaagtcgatagcttgaagggcaagaagattgg

SEQ ID NO: 93938 - DNA, 855 bp, Eucalyptus grandis
  Intron number 1 from transcript Egrandis_v1_0.017705m (loc us Egrandis_v1_0.017705m.g) derived from phytozome v7.0 (c hr-ID scaffold_1; pos 37434185 to 37435039)
ccttcgctacctcgctccacaagccttcgaagcaggtaaagctctccaaagttcggtaattcccgtttcgcgagttcgaatttgcgagaaaaacggagttgatttgagctgatggtcttggtggcgggcggttattgttgttgaatccgcgattcttgtagctgcggatgagctatgatgagcttagtacttgtagactggctgaagatcggaccttgtttgttcagtcagctgttatatatcttgaacggcactggcacgggttgagagttacggagtgttacttccattatctgcgggtactggattagatgggtttttgctgtttggtgggtggtaggaagaactgatgatgataagtcgagctcgggtcgagagttatgtggtattagactggatagctgtggaacttgcatgagcttcggtggagaattggatggctttgtactgtttaattggttttaggaagaattgataatgataaccaatggaaatatggaaagttatcagctcaatgttctgtttgatatcgtcggaatcgactattttcctgtctttagtttaattgaagatggcctgatgtgaagcattattgtcctgttgtactacttttttttttcgccatttccatcattgaaccaaaaaaaggattaacttcatattaggctcaagctactatatggctgatttttcataaccctgaaggtagtttactataacttcaaattttggggttttagagttttctagcctttatgagaaaaactggaaaaacaagagtagctgtagagtgtatttgttgtttcataattggacctcattagtggttcttgttttgtagaggtggagattttc

SEQ ID NO: 93939 - DNA, 736 bp, Eucalyptus grandis
  Intron number 5 from transcript Egrandis_v1_0.028750m (loc us Egrandis_v1_0.026575m.g) derived from phytozome v7.0 (c hr-ID scaffold_1; pos 38527122 to 38527857 reverse strand)
cttcaaggagcccctcttctgatattggcaaataagcaggtaaatttttgtgctattgaatctccctcttctgagcttgctgaagctatatgaccattttcttcctcaaatttgttttcatatcacgtgacatagaagacaattagtatgggtgctgtttttcttgagattttgatttcataagacacgaccctgtcacaggttcttttatggtaaacttttggttgaaaattatatcatcatccgtcacttttgaggttgtctctgtttccatctccttagttatagatttgtgcattcatcaacatgcttatgctgctttgcttagtgtggttccttgttttttttcttgtgacgactgtattcatttcactgagtgaggttgaatacaaggaacttcttgcatgatagcattttgtttagtaccaaaatctccataatatccaagtggtcaagatttttctttaatgcttttgtctacttcttttttcggaactggtggcatcttcttattagagcatctaaaagtcttttcacatgtttaaatttcctacattgagctggtctcttattttttatcaataacaaacctaaggtatgctctttacgatctttttgttacctcgggagtctgtgattttcgttattttcatctccattttctttggtccatgagggaaggcaattgtatgaagtttaacttgatagcaggatcttgctgaagctgtatcagctg

SEQ ID NO: 93940 - DNA, 534 bp, Eucalyptus grandis
  Intron number 1 from transcript Egrandis_v1_0.028750m (loc us Egrandis_v1_0.026575m.g) derived from phytozome v7.0 (c hr-ID scaffold_1; pos 38528790 to 38529323 reverse strand)
cgaggaatccaatcgactcttcggctcaaatccgtgtgagaatcctctttcccttcacgtcttgcagctgatttttcgtaactttctagactcggtgtccggttgcctttgatttctcgtttcttccgatcattacggcggaggattccccggtctgtctggagacgagatctcgtgactacgggttctagtttttctgatcccgcaagccgcgcaaattcacgtcggttcgaaatctccgtgtcgaattgctctcgtgatctaaatccgtttctcgattggattgattatcgcgctgtccgaggcaccaaatctgcatttcttccttccggcgcacagcgcgaatccttttctcatgtggaattgcgcctgtgttgatttcgtcgaacggagagagagagaggttggtgatttgtgttgagatggttcgccaaaggcttgccctctgctcgatctcctcgtcctccttcttattctgattttacctggtaatgcactgacgggtcttgttttgatgtccagggtcaggagatt

SEQ ID NO: 93941 - DNA, 1029 bp, Eucalyptus grandis
  Intron number 2 from transcript Egrandis_v1_0.008109m (loc us Egrandis_v1_0.005573m.g) derived from phytozome v7.0 (c hr-ID scaffold_10; pos 36654181 to 36655209 reverse strand )
cagctcgtgactccctggactgtgtctgtggctaggtatcgcagaagtttacatttcttttcttgccctgatgtgtgtgcgcgtgtgtttgtcatgtgattggtgcttcatgtaaaaagaaaattcttcttttattgaagccttattcaaatgttatctttcgatttctcttcaatttgcgtggtctggtggaatgatgggagactttaagcgtgttctgtcatttttctagttatcctgtttctggataaggcgttcagtgctgttttgtccccttatgactttaggctcccaggcttgagctccatgtttcttcctctaaaatgattcatgtatggatcacactgccatgtatcatataaaacttctttttcattggctgttctctaatgggttgattatgttctgctttcatttgcccaaagcaggtagattagtaactacgcttatacattggctcttaccatatgataaactcaatgcctctagtaaacatatttttttcttctgacatggtatattagttcttataagttataaatgtctgatttccacaccacaaatttaatgcgtggattgtcttgtattggtttctttttataatgccatttgagtatgtacaatggtctgagaagtcggttgattagtgactccatggcttcaacattccaagctggtcaatttttgtgaagaaaatattcttacgatattacaaaatcatactgggataactgatggtaaaattggttagggttgttgagaggtctaaaattctttattgctttatactgtctgagattttattcatttattctttccttcttaattacagtaatccttccaagtcacttttctgtagtttgctttgctggtcttttgattataaccatagttccttactgaagttgcatggtcatttgtgattcattgctcgatattcttttttttcctcggctttatcctgatatactttttccccatcttttggtttcagtggatatagtttattgcgagatccacaccataata

SEQ ID NO: 93942 - DNA, 808 bp, Eucalyptus grandis
  Intron number 3 from transcript Egrandis_v1_0.006627m (loc us Egrandis_v1_0.006632m.g) derived from phytozome v7.0 (c hr-ID scaffold_8; pos 58216398 to 58217205)
ggttccgcacgttgcgaggtaaagcgcgtcggtgtggtcgcgtggcgaatcttgtttctgtacggacgattatgtgggtcggtcgaaaatagtggagggagcgtggcgtggagtgcgagctcttttttgtgttcgaagttgccagcttttgtttgattgctcgtgtccgtgtatttaagcgggaaccggaagagagcttttttccgtgatttttaagaggaacggaagtatccatgtttaggatttggtgtgcttgtgtaagatatcattggaaatttcactggtggagagcctttttttcttaattggggtcgctgctttgtttgactgacttctttttggagctatgaggttttgccatacggaataaagaatttcgtaaagctgtgatttgattataaggagttgcattttggtttagtatgtcaagttgatgagagatggtgtcaagttagtgtggtgagatggagcaatttcagaatgcgatgttcgagtttgagcagctacagtggttgtgatggtcagtatcagggactagtattgcaaggattatagaccttaggagcatgaaaaggccgtagttgatatatccgatcggttcttgtgttttattcatgttgttggaatttagacttgcatgatcaagctcttgtgatcccattttcagttttctcactgtcacaagcctgagtgctacttaaatgattattctggagagatggtgtgaattacctcgaaatttcctactgcttggcatgcgtattttcctaagcttttttctatatgcgcagatttggaagttgacacc

SEQ ID NO: 93943 - DNA, 740 bp, Eucalyptus grandis
  Intron number 4 from transcript Egrandis_v1_0.016179m (loc us Egrandis_v1_0.016179m.g) derived from phytozome v7.0 (c hr-ID scaffold_8; pos 5990400 to 5991139)
gttcctgaccagtatgttttcttctcctactttcttttgggcgttttgatgcatttccaagttgcatatcttctaaaatgtcttcatttaaattttagtcgtacttttctgtttgagtggtttcctcctttgtactagttccttcgtattaaattgttctaacttctccatatactcttggtatcactggccaaaaaaccctgatatttgttggaatttttgtccttgtccctgtcctcgtcctgattttcagtcttgctgatttaatttaagtgaaaaaggtaactctagaaggacttcttgatttggtgctatgatcacttggcacgtatatgatgtgaaagcacctgttaaagaacttctagaacagttgcattagcataattctagtttgttggcccagggcaagaatttgccccgacatttatggaccatagtttcttgtggagtcattaggctcactgtttgggtgctatctgcaagttcaatccggtaaatgtaggacttatccaccgtgctcaagcccaccctgatatcagatgagaatggagttcatacatggtgtactcagtttccttagaagaagttttgtcttgctataaatataccctataatgtcaatgattttgcttatggtgttgtttctggatgccaaatttagtccagtaattttaacgcgtggtaagtcgagtttatgtaatctcttttgtaatatttacaggccacattacagtgtcaac

SEQ ID NO: 93944 - DNA, 492 bp, Eucalyptus grandis
  Intron number 1 from transcript Egrandis_v1_0.038646m (loc us Egrandis_v1_0.038646m.g) derived from phytozome v7.0 (c hr-ID scaffold_8; pos 21860017 to 21860508 reverse strand)
gccagatcgcagcattggacttggaggagcgtaacaaaaaagaggaaacccacttcgaatttcataacagcagctgtggttgtgtccttagcttttcttgtggtctttagtgtgtcgctggtgattattaggacgagacggtctgctgcctgctcatgcggcagacgaccatttgatgcattttgaataacgagtgctgaagaaagcgacaaagaacttctctgagaaaattggggaaggcgggtttagttctgtttaccagggagtactgccagactcaaatcctatagcagtgaaaaaacttttgaaccaaaaccgtagtaacaaacagttccttgcggaagttagaactgtcggaacaaaaagcactgcaatgtggttcggctgcacggcttttctgtggtagagtcaaaaaggttcctagtacatgagtaccttgcaaatggttcgctcgcagctcatttgtttcagaaaggttccaacaccctcgat

SEQ ID NO: 93945 - DNA, 732 bp, Eucalyptus grandis
  Intron number 2 from transcript Egrandis_v1_0.029539m (loc us Egrandis_v1_0.029544m.g) derived from phytozome v7.0 (c hr-ID scaffold_8; pos 8785366 to 8786097 reverse strand)
acgcccaagaggagtgagtgcttcttgtacctcttctttcttttcttttcgcggatgattctcgtgatattcacgaatttctttgcttcggggttttccttgcgatatctttcaatgttcttcatgtttggaagtttacttcatagtttgtagcgagagccagatgagtttacttcagggttactagccagagcctgatgaccatatccttgttacgtatctggatggagacagagagagagaaattaactatttccattcataggacttgtgttaccaatgcattagaacgggaatctgttgcgctgcagtccaatgggttaattcaacatattttgttttcatttggtatttgttataggctgttcacaaacttatcttgcatcctttgtcctcagtgttctcttgcatccttattggggcttatttttgtttcatggaaacttcattgcttagcccttgacgaccctagatacaaactttcttccaccttggaagtattaggaattagcagaaagatctgtgtataatattaaaagtcccgtggaattttcacacctgatcgttttcagtctggtgtactgactcaatagaattctcatgaagaaataattcaaagagggagcacgttgtctgtttactgttatcattcatgcccctaataccagcatatgtgcttagttcggctcttgctctaactcggatgcttgaatttggtgcagaaaccctagc

SEQ ID NO: 93946 - DNA, 566 bp, Eucalyptus grandis
  Intron number 2 from transcript Egrandis_v1_0.042240m (loc us Egrandis_v1_0.042240m.g) derived from phytozome v7.0 (c hr-ID scaffold_10; pos 5770643 to 5771208)
tttagggtaagcgcatgcatgaactaattgaattttgatcttcttaattcatgagcagtcttggactttcgtaagagctattagcggtggaaaacattattttcacaagtatgcattacttaatcgattgaaaagttctatatattcaacataaataaaatcaaaagtgatgcccgtgtttagggtaatatgtagaatgtatgcatgcactcgtcatctctttttttagtcaatgcagttgaatcgatgagtcatattttcttcttccttaaataaagaaaccattattttgaccagtaggttatacgcatgaattttattagatttatttttagtcaaatttgcaagtgagtcatgttcatatttataacccacctattagaggctcgattggacgaaattaagattagcatcgataaattatcaattattattcatttaccttagtttgccattgccatgtactagtgtataagaaaacattaattttctcatttcctcattttctctccaagtgcaactaatttgcttttacattttcccccttgaaatgctgtagttgaggc

SEQ ID NO: 93947 - DNA, 1002 bp, Eucalyptus grandis
  Intron number 1 from transcript Egrandis_v1_0.019745m (loc us Egrandis_v1_0.019745m.g) derived from phytozome v7.0 (c hr-ID scaffold_10; pos 24309803 to 24310804 reverse strand )
gtgagttccgctccaccggcatccgcatcatcgaagtatgcatacctctctctcttttatgtgataggagctcattcggatgcacacccgatcgttaacaaaggctatgttttcctctatttatatttgagtgttgtgttttgtgttgcgaacatcatcacttgcaatttatttacaattcatcaatcagaacattagttggaggaacagggacaaagcgaaattggctaataaggtaatgtttggtaatacttttaggaacaactaattttattcttttgttcccggacaaaaaaagaacataaatccatttagtaatttttttatttccaaaaacaaaaatccaattttcttattcccaaaaataggtttataataaaattaagaagaagaaaaaagtaatttcttatttccaagaacaaatttttttcttttttctctttttttttttccttattatctccttctctctttttcttccattggccattgctagccactaccgttgccgacggttgccgatgaatggctaggcgaggtctggtgagctagcacgagcctcgccaggccaaggcgaggtctagcgagctcattggaggctcacccagccatcacaagcctcaacctcatagatctgggcaaggttgagtctcatcaatggcctagtgaggcttgtctagccaccggtgaggtcgaggcttgcagtggccatgcaagctcacggacctcgctcagctggtcgctggccacggcaatggtgggcgaccaaccacaaaaaaggaagaagaagaagagaaaaggaaaaaaaaagaaaagaattctaccaaatttttatctaaggaatagaaattttggacaattatcaagggccttcaaaaaattataaattattcccgggaacaaaataaaaaaaatcatttttgaccaaaaattattcttgggaacaaaatggttaccaaacacgccctaaaatgattgtggcaatgaaatagggagagctag

SEQ ID NO: 93948 - DNA, 450 bp, Eucalyptus grandis
  Intron number 1 from transcript Egrandis_v1_0.016237m (loc us Egrandis_v1_0.016243m.g) derived from phytozome v7.0 (c hr-ID scaffold_10; pos 1534937 to 1535386 reverse strand)
gggtcgggttctccttcttcaaagcttcgttctttgatgattttcgggcgttagatggttctgttcttgaatttgataggtgtgttagtgatatggcagatcaaaagtcttttgcatgtctttggttgtgttgctatcggcagtggcataaaaaaggagagatgttggggaaaatgagttttgatcagcaaagaaaaggaggggattgcatgcagtgtgctctggattttgacgtggacataagattttcatagagtgggcagagtttttgtttctgtgtcctgggacttatagttattattatgggttatgttggttcttctacttagttgactctgatttagatgtctgtttcaatgagttctttcatgtgtcagacatgaaatgccattgtgtcaatcctcgaccgcttcatggtatctatatgtaactttcatctgatctgagcag

SEQ ID NO: 93949 - DNA, 888 bp, Eucalyptus grandis
  Intron number 3 from transcript Egrandis_v1_0.044978m (loc us Egrandis_v1_0.044978m.g) derived from phytozome v7.0 (c hr-ID scaffold_1; pos 11502795 to 11503682)
ccaaagtggaacagcttacttgcttcccagaggtttgtttctttgtccctttcttgcattgtatattcttttctttctttagtttccttgtcttaggaagctgattgtaacgagtgatgacgatagtcgagattggcactgcactgatgccatacaacttgaaatccctcttggcttcaagtggtttttctgggatcttcacagcttttgctaacagtatcatgctacatctattcctaacaatggtggcatagatcagataccttaaccacttcagacagctcaagactttccagcttatgacagaaaaaatcaatttctagttgttaatgcttatcaaggattatcaagagttcctctaccaagagcatattttcaagattctgtcgtaaatgtgagtgccatttgtccttaggtggcatagagcacctgatgccccaaacttatcttctctcccttttgagatccattcatccttacaaacttgttgaaccattgaaacatagcgcatctcttttcttcttctatgcaaatactccttgtcttactaaaagtcaaagtgagtgcacttcaatcttgattctctagagaaatcagatgcggatttgcactgtgcttgctggcaccccttactaaggagaattacttccttactaaattcaagatcacaatattcaattagtacatttcaagtagtcatggtgcctctctttgtgaacggttactgttgtttaagacctttgaccaaggatttccctctttaacattcacatatgataatttcatctcgtctctgcaaccaggcgcacaccaaacagaataatcttcttttggcaaaatgatttagattttaacttgggaatgttacactactctattaacagctgg

SEQ ID NO: 93950 - DNA, 654 bp, Eucalyptus grandis
  Intron number 1 from transcript Egrandis_v1_0.007868m (loc us Egrandis_v1_0.006907m.g) derived from phytozome v7.0 (c hr-ID scaffold_10; pos 681840 to 682493 reverse strand)
ccatcgctcgcttccaggttttgccttcggacattgttcgtctttcgtttccgacgttcctttttgttttttcgttgttttttggttgtctgcgagctgtgggcgtcggtaaaggcaaaacccatgtttcttgatcctctttttggtgtcattaagagtagagatcagtgtcaatagtcggttgtttttttttatcagagtagataggaatgaagagtaccggtttattgcggttgaacttttgccttgatgcaaatgaatgagtctgcctgtagctggtggggatgagttttgttccacggacaaagctattgcttcgtaattcgttctttaacattggttcttcgtggtaagctaatgcactttattcatcaagatttgatttttcttttgtttaagctgggtttggattggaaaattggttccgggaatggcttctacataaacaatgacttggttctaacttctgttacttcagattaaaaggcttacacttataattctttttgatactctacttaataattgctatgtcttgataatggagtgacttgttctgtgatcttgtcaagtcgagaatttcttgatgactctgcttcacttttccttttgatggcagaggctcttgggtaaaaaggttatatttatcacagg

SEQ ID NO: 93951 - DNA, 827 bp, Eucalyptus grandis
  Intron number 1 from transcript Egrandis_v1_0.005872m (loc us Egrandis_v1_0.005872m.g) derived from phytozome v7.0 (c hr-ID scaffold_1; pos 13427206 to 13428032)
gcgggtagcttgtctgggtgggatttgaaggataagtaagtactaagtagtgattcatgtgacacagctttgtttttttcttttttatatgctgaatctcttcttctttttccatgaaagttaattatatttggaaattgatgtatctagtacctttccggattttgtcagagatgaagcagatcttatcaatagaattgtgcgggagatctctatgcaactggaccgaaaaccattacacgttgccaagcatccggttggaatacatcgacaagtggtaaagctggaatctatgttaaatcttgagtctcatgatgatgttgtcatgataggattatggggacaaggaggcataggaaaaacaacattagccaaagccctttataatgatatattcagaggatttgatgcttcatgttttttggcaaacgttcgtgaaacttcaaaagattccaaagatttagttcatttgcaggaaaaattgttgtctgagatattagtgggaaaagaattaacaatgtttagtgttgatggaggtattaatttgatgcaacatagactttgccgcaaaagagtcctccttgttctcgacgatgtcaatgacgtaaaacaattaaatgctttagctggagggcgtgaatggtttggtaaaggaagcagaatcatcattactacaagagataaccatctattaactgtccatgggatagatgaagatcatatctatgaagttaaaattctagatgatttggaagctcttgaacttttcgataaacatgcttttcttggaagtaaggaaatagtgataagcagggatcttgtggata

SEQ ID NO: 93952 - DNA, 578 bp, Eucalyptus grandis
  Intron number 1 from transcript Egrandis_v1_0.000498m (loc us Egrandis_v1_0.000498m.g) derived from phytozome v7.0 (c hr-ID scaffold_8; pos 32457739 to 32458316)
atactctagacatactgaggagcgacgaggtaaaagttattacaagtagaagatatggtcaatccaacaaaatctctagttgtgttccttaaattgagaatgtcaattgatggcctgctttgttttctaacttatagggaaataaaaagcaactctatatatatataaaaaaaaaaaaaaagtacatgttttcatgccttactcctgtgaaacgagaagaaagtgcacgctccagttggttagttggaattcttcatttcttgtttcagtgagaatgaaaatggattttttgcttccttgaaaaggtgtttagtctttgaaaagagagagaaatcaacaccaaatatacattatgaacatgcttggtttgtcttattttcaagttgagaagaagaacactaattatcttgttattacacgcctttgatttaattagtttggggtcaaagaagaactacaaatattgttgactactttgcattagttttttgcttcctgtgttgcatactcatctttgttccctgctgctatggtaggaaaaaggagctgtacgtgctctcagtttgggtattattcat

SEQ ID NO: 93953 - DNA, 914 bp, Eucalyptus grandis
  Intron number 1 from transcript Egrandis_v1_0.017147m (loc us Egrandis_v1_0.017147m.g) derived from phytozome v7.0 (c hr-ID scaffold_10; pos 37242311 to 37243224 reverse strand )
gggtcttttcttggtgcggtttcgacttgatcataagcttaaatacatgtagtcttctgtctattgatgttgcaatacctgctctttttcctgcataatctctctcaaactaaaggacttattttactagtgggacagtaaaatacccgatcataggtcctccgcttgtagtcaccaccccatcgccggtggggtggtggcaatggccatagcgacccttgcccagatctgggagagggtcactgccttctctctgttctggcaagtgccggcaaccttgctggccatcacggccaccccaccaatgatggagcggtggccacaggtggaaggtttgcttttctgttcctttaaatttcatcttttaaaatttttaatctaattttattaaaatgtaggttaatatagttagtgattaaagaaatagaagaaatctttttcttttctttttgtattgcgtcttaaataaaagaaagggttagtcactttttcaactttgaccgatagatatcaaaagggtagcactccgtattttgggcgaaataaaagatatgtcgatcgagcgtaaacgtaacaaatacaaagaaggggcattgttcgcctagtagcgccaccgaaaacaccacttcccaaccgacttgcacgtgttaaacatgcagttggcatttatcgctcaaggttagcgttatgaaaaccttatattcgcgatgagctggacgagaagaaactctcatgttcggttctgagcatattttatttcataacaattaagggcaatataatccttacgtaagggccattccataaatctttactgaatgtgacattggatcggttcctttatttagagcttccatttgatttctcaaattttttgctcatgtgaatggggttgtatgtgcagttggtgaacc

SEQ ID NO: 93954 - DNA, 670 bp, Eucalyptus grandis
  Intron number 1 from transcript Egrandis_v1_0.011495m (loc us Egrandis_v1_0.011495m.g) derived from phytozome v7.0 (c hr-ID scaffold_8; pos 12369058 to 12369727 reverse strand)
tcgccggcaattacttcaccggcaagatactggaggtctgctcacagatggagaagattaacaggggaaaaggaaaatgaaaagagaatattttttggacgaaaatatcctgattagctcgccggaatatgcatcagttcaccggccagggagtcaggtcctcttttgagactaaatgactatttcggatacttatttgaaacaaacttcacttcagattttttttagaaaatgaagctatttcgagtccttatttgagattatttttgtttgataaatacaataattacctggagagcactcattaacaatggatcttttatcctttcattcgtattgtctgacgctaattgcacatgaattgatttcgatataacatcacccttcgaagaactagcatgcgccgtattatttttattattttgttgttgctatgatcattagtacaattgctactatctaataaactaactgaaaattgaagtcaaacaagaaacaagcagaatttccgaactccccaccaattaattcccctcacgcacgacactccagctcaaaaacctcagaactccactctctctcctctgctctgctctgtctctccccaacatgccggctctctctgctccgccaagctgatcgccgccttcctcctcgtctccgccgtccc

SEQ ID NO: 93955 - DNA, 1016 bp, Eucalyptus grandis
  Intron number 3 from transcript Egrandis_v1_0.022470m (loc us Egrandis_v1_0.022470m.g) derived from phytozome v7.0 (c hr-ID scaffold_8; pos 10907117 to 10908132)
gaaaggtaatgaccatgatgcttttggcggattccaacacttgggagccactgcaaaacaccaactttaaagaattgggtcttcccaccaggattggctcgtgaagttgtagtatatgctacttctgcaaaatgtcctttcatactttttgctaatttgcgttatattgcctgtttaccttccgtttcttccaggcaaattgacttcctcatgttctataaaaccttcaccttccataggtccatccaagcatttagtgaatccatgttttacagcttgttctccttcgacaaaaggtcctttcagatttagacacagctttctgtacaatagcttgttccctttccataaagccactccctttccatgctttagatgtcctgctgttaatcctatttgcaaatggctcatgcctttgttctacacattcaaaaaaattagtaacctttattattttgccaccttccaaacatcacatggtttttctaaaaaatgtcagcctgcctgataggcattaaggatatataggatcacaataattacgcatgggaaataatcctctgcattcaatgttcattggattcgtgtgtgcatatgttaccattgtgtataagcagagatgttggatatttgttcctttatgctaacagaaccagtccttggtgccagtgagttttggtttgactaggttgtctatatgacaagccatttagtaatgtgacttcactcctattagcctttggggtgcaataaatcttctcagctttagcaacaagctaatagttttccatcagttttcctctcttaattgattcaatccgtggataacagcccttgcgaagagataaaatgcagtaacgttttatacatacttttcttaggggcatcctttcgttctgctttatctggttttcaacatgattctattacaaccagacactcgatacttcaaagaatttaaaaccttcccctcctttccaggtgcttgtagtccaagagaagggtggaaagcgtgt

SEQ ID NO: 93956 - DNA, 647 bp, Eucalyptus grandis
  Intron number 1 from transcript Egrandis_v1_0.020971m (loc us Egrandis_v1_0.016906m.g) derived from phytozome v7.0 (c hr-ID scaffold_10; pos 22852040 to 22852686 reverse strand )
caagctctccacatcgccctcgacaccgacccccggtgacgaccctttgcttctctgcgcttgcgggttctcgcgtcggagctttttcatttcgatgtcgagttttgagtcgtgggttcttgttttttccaatcagttcggtcgtcctgtgatggagttgggtttcttgcatagtctaagcgagacgagggaaagaagtgagggggaaaaagagagagaaaggtgatcgtttgcgcatgtcttaatggtcttctggtccatgcatgatgatgatgctgctcggtcaaatgatgggctttgttcttgtttctttccccactgtaatatggatcgcaatgggtcatcggtcagctccagaaagtgagatttatgctaaatcatgatctcttagtaccgtaggcagcatcaggatttagacatttggttaaatatgatttcgtggggtgcagtcaaattttggatagggaaatagtctatgaatgatgtctcttgttgttgatttatgtctatgacactagtgctttagatgtgatcggtctggataaagtcaagctaactgctgcttcactgatattcaagtgtccttaaagtcaagttcaatgtgtttgatagcgaaactcatcatttgcatttcctcttcagttctt

SEQ ID NO: 93957 - DNA, 507 bp, Eucalyptus grandis
  Intron number 1 from transcript Egrandis_v1_0.040821m (loc us Egrandis_v1_0.040821m.g) derived from phytozome v7.0 (c hr-ID scaffold_34; pos 332615 to 333121)
aatatactccaccctgccgtgtatttacctgttaggtgagacactatttactttgttttttaaagatacaaagagatgcatcgtcactcattgtactgagttgaattttgttatcattttgatgtggatcaatttgcgtttattgcttatgtgtaagacttcattgcacgcatgaaaatataatatgacagacatgaaggtaaagcacatagtgtcaaaatttctctgcactaccacagattcatttctgtcatatctatgttatattttcatacctaaatgaagtcttgtacatgaaaaagaatgtcagctgcataatataaatgtatactgtcaatttgaccattaaaaaaaagttcaagaaatgctagacataaagaaaaaattactggacatgataagacaaaaaaaaatggctcgcagagtagtaattctcgttgaatgcatcgttctcttccgtgtctcaaaccaggtccatttccagccgtgtgatcgggaggaggtggg

SEQ ID NO: 93958 - DNA, 856 bp, Eucalyptus grandis
  Intron number 1 from transcript Egrandis_v1_0.015001m (loc us Egrandis_v1_0.015001m.g) derived from phytozome v7.0 (c hr-ID scaffold_1; pos 13523343 to 13524198 reverse strand)
cgttccaagcccaccaaacgatcaaggccattgaggtacgctttactgttgaagctaagcttcttggaatcgcttcttcagagccacgaggcttggttttacgaagcaaaagttgatctttttgccggacccagattttgttttcaaataacgttgttgggtcggcattggtttgtggtggggatgttcttttctcatgtgggtggccgatagtgctgtcgtattgcgtttctttgctttgctgctatctggctaatctttcggtgatagagtaaactgatgttttaagtggttgtttagtgctgctgttcgaatggctaaatagttgtttgattgtttttttttttttttttgtggttattctgggtgcatttcgtatggcctaggacactgccttcattggtcttttggcaaattcaagttttaagctttgagcccttgggatttctctagaagattgtacaataggccgcagttaatgacaaagcctgtggattactcgtgctgttcttctgttttgtgggactgatcagggagtcatgttactcacttgactggtcgttatgttttcaaaacttggctgaaaagaatcttgtgttggaatgtgatcagccgtgcgggttggttcgtgttgggtataagagcgtgataatggaatacatgtggttgttcatacagactattgaagtggaagtcctctgcttagagtttggtccaaaactccctgacatggcttattcttacccaagaactgtgctatcattattggattgattactttttgcttctggtcacgtgagtttttcttcttcttttttcccaacaggttcttgcattagcttgacagtcttctgcc

SEQ ID NO: 93959 - DNA, 918 bp, Eucalyptus grandis
  Intron number 1 from transcript Egrandis_v1_0.012697m (loc us Egrandis_v1_0.012697m.g) derived from phytozome v7.0 (c hr-ID scaffold_8; pos 5582708 to 5583625)
cgattcccattcgccaccacccattcgttcccgaggtaacgcgctgagaaattcgacccaaaggttccatctttttcgcctgtagtgctgctgtgatccatcgtttcgtgccggttcgtggcgcgttctgtttgccatcgaggttgggggtcgaaagtgggtgttgggtcttcgccaatttcgtttcttgtgaattgtaggactagttggtgtcgagggatgaaggaattgaatgcttggctccagagttcgagctcaaagtgttggagcatttgatcttttagacgtgtcgcggttggtcgtgttgtctttatgcaggctcgagttcggggcgtaactcgggctaatgtctgtagactcgatgtttcataatagagctgagtcggttcaagctcgaggttggtggatcgtgccttgcggcgaatattgggccttggcattttacagcgggtcgagttcgagtgttaaactgtgttggtcaggacttgatttgattgcattgctgtaaagtactgcacttacggcttattgacctctggctgttaaatcgaatgatgacttgtcagatcctagaggaggacaaaaaccaagtcgggaactaagcgaaaaatgtattgcatcacactgagaggttaggaatagaattcggctcgaaatctttttaagttgctgaggcatagagacaaatgatgaaaaaacaagagatgctttgtccattcataaatccatgatggtagcccaggtcagctgtgaaaaatgagagtggggtctcagttcttggaaggagcccgatttatttgtagcttgagatcttcattttgaaatgccaaatgcctaaatttgtcttcttttcccccttttattaacctcttgggcaacacaggtttcaaaagcagtggattcattgtactccgaatt

SEQ ID NO: 93960 - DNA, 785 bp, Eucalyptus grandis
  Intron number 2 from transcript Egrandis_v1_0.038017m (loc us Egrandis_v1_0.038017m.g) derived from phytozome v7.0 (c hr-ID scaffold_8; pos 47891792 to 47892576)
ttaagctcaagaaactctgcatcccttgcaaatatgtaaactgtctttgcctagatcattgcttattcatctttctaacactgttgtttctcttgtatatgcaaaagtgtggacatggctactcaattttcgcccttcatatgactttgaggcattttcctggtagaggatgatcttctggcatgttttatgcatttatgatctggaaacaactcattatatatgtgaagtattgactaggttcatagtcttgctctagagtctccccatatatagttttttcatctggaagactagaactaatttgtttgtagattttacttcgatggcaagtcttttttatctagggatacccaaggaaaaaaaaaaaaaaactttctacaatgactatggtctatcgaataggctaaatatgtttgtgttatttgcataatggtggggagccaaatatctattgtatttgtgaggcatgctttgaacatatactaatagatgaaattgaatttttcaacaccatccaaaattagtgcatctaaaactagtcttcttaccttcgacgttgattggaaattgtttgagctcattgtcaagtgtgcatgcagttgtaactttattggaaacttttttattaagattaataaggagaatagttgccctatccactaagttctatcattcagttgatctcaaatgacattagttgtaccacttataaggacattccactttctttgtgaaactcctaagttcttgtttggttttccagaggaagctgatatcgaagt

SEQ ID NO: 93961 - DNA, 1014 bp, Eucalyptus grandis
  Intron number 1 from transcript Egrandis_v1_0.048701m (loc us Egrandis_v1_0.048701m.g) derived from phytozome v7.0 (c hr-ID scaffold_8; pos 3531229 to 3532242 reverse strand)
tgctttccatatcgcagcgaagcagggccatttgggtattcctttgtttgatcccatcttttactgttcttgcaattgaatgatccatgtcatagtttctcacggggatgtgtctaaagctcaagaatgaaactaaaaacatgacgcaacaggaagttttgctctgtaatccatctcatctttaacctagaggatacacagtgacagggctggaggaaaccctgatcataattccttcctatcagcaaactcacactttattcgcaaatttatggagcaccccactaggaccgagtaattctgtggttgcccgagtgacagtttgccggttggtttctgcagttccttgtcaagcatgtagctttttcctggtttcaccaatagaaatctgcctcaatccttctcatgtacggttatttgaactgtaaatagtctggagcattaactgtcagagttcaattttcaactgtttctggtctatcttgtcctctaactgctgcttcattcaaagtcgagtgtgcctggatgtatcctcacttactcccttcccatctttaaatgagagcgagcttggttggccctcttgtatctgccagtaagtaattatcacatgatccttattactcgtatcctgttctgaagaaatgattgaaaaattcccttctctgtccacgtagtcatctttatatcatttagttgattcgacatttgagttctctttactactgggttgcgaaattcgttacttcctttgaggagagtcatgccaatgtgcaagtgctgagcagtcatctggtcaacatttctatcatttcatcatcgtttgagttatttaatgacgaatcctcttgtaactatctttttctagctgtattttgctacatgcctgaccatatgtgtctcacttaattggatcttaccattggattcgatttgttctagactataaccttcctgaccaaaagaaaatttcttgcagaggtgttgaaggaactactgcgtgtatttcccaac

SEQ ID NO: 93962 - DNA, 669 bp, Eucalyptus grandis
  Intron number 1 from transcript Egrandis_v1_0.008000m (loc us Egrandis_v1_0.006805m.g) derived from phytozome v7.0 (c hr-ID scaffold_10; pos 17588119 to 17588787 reverse strand )
tgaaggaccccggaactgctggcgttctcaaagtacccccgtttctccgttcgtgtaatcttgtcggttatctttttgtccctcgtgcgctgcttcatttgatgaatcgatccacctctgaggcccaggtgtgactatgtttgaagtggtggcgcaatctagtgtgatggtgttctgtttttccgtttgaattcggaaacttcgaatgtggcgagggtattaatgtggaatgaagttctgtaaaccattgtgatcggcgtttagttcagctcaccggtacattttttcgatgtggttcggcttgtgagatcatgtgactcgtgtatagggcagcgtgggtaaatgggctctcgaattaagttagttgcgatggtatgcttcaaaattggttggaaatgtagtcatcctttaatataacattgcttgataatgaaatacagagttcgagccttcaagaaagtggcttttcaggttggttattggagaagcagttgaaaggattaccatcattgtcaatacttctgttttctatggtctcttccttggtttaggcataaaagttacggcctttgtaaactctacttatcattcatattttgctccttctttaatagtaaaattttactttatgcaggcttgggacagatttattttcactcctaatcatcc

SEQ ID NO: 93963 - DNA, 769 bp, Eucalyptus grandis
  Intron number 3 from transcript Egrandis_v1_0.024133m (loc us Egrandis_v1_0.024133m.g) derived from phytozome v7.0 (c hr-ID scaffold_8; pos 54999758 to 55000526 reverse strand)
cactggctcgaagtgccggtaagcaactgtttactttggcgcgccaaggaaagatgcacatgactgccaaatgggcatcttgctttcaattactgtcgttgagcagactatgatgtttcggcttcgctagatatgcggtgtgtagaacttttgaatggtgctaaaatgtccagaaacaaaagcaggaattttttgtgtttgttatggctgtagcattttccttctcctcttacattgaggggaaagatctcttcagcaagtgatctcatctgttaggaaatgagagattgtgtatatggtataaacctttcctcgtaaatattgtgcatcactttatgtgagaacttgctttttgaagattgtatttgtgtcagtctcaaatttcgtcaatctcgaagttgatatttacagcttgattgttcgtctggcctcttatttagctacatactgctgaaaagaagaatgataaatgaaaattttaaatttgcatactatatgtaatgccctgcctttgaatatgagatacttggttttgatttgtggaatcgcaccatgcagatgaacagatacgggctgatcataatgggattctctactaatttgcctgttgatttctgttctgttaagggtagaggtctcattccggcttgtcagttaggaatatcactcttatcattatccaatgcattgaatcatgtcgcagagactccagagattggttggagtttactccatggtaaaataatgatagaaattttgcaggctgagc

SEQ ID NO: 93964 - DNA, 390 bp, Eucalyptus grandis
  Intron number 1 from transcript Egrandis_v1_0.022111m (loc us Egrandis_v1_0.018197m.g) derived from phytozome v7.0 (c hr-ID scaffold_1282; pos 3405 to 3794)
ctggcacaggtaattgtcgccggcgtgctctgttttacctgttttgattcaatcgttcgttgctctgtatacataacggggtgcatatgccgtcgcgataaattagggtttgctctagttattttacccttcggcatcaggaaaatgtaacgtgctcatggctatatccttaaagatagaggatttaccattttaatgtggcggacagtatgtttttacacaatttctggggttgtcgaaaagtggttttgccatcttcttcagttgtcatgatatagacggcatgacatgtatcttttctttctagtgtcgagcaagcgatagcaggctgagcgtagtccgttcctttatgcaggtaaaacgacttttgtgaagagccttcttactggg

SEQ ID NO: 93965 - DNA, 853 bp, Eucalyptus grandis
  Intron number 1 from transcript Egrandis_v1_0.015747m (loc us Egrandis_v1_0.015747m.g) derived from phytozome v7.0 (c hr-ID scaffold_8; pos 14563717 to 14564569)
gagccatcacctccatcgtcgtccggagtccggtgattaaccctcagcttttctccattatggataaacccctcatgcatacgtacatacatacactgttctatacactaatactcatgtcatgtgaattatcctcttttggagtttagaaaaacattttaaggacacattctcagtgcgatacaacggatacaaccgattacggtgcatgatttatatgaataatcatgatttttagtgagatcgagtgcgagtttacgcatacttttgatatgggcatgattgatcttatagaatgagtctagatgatatctagcaaattagagcccatcagagtgaaaaatatgattccatcgattgccctctagcttgtttcttataggctacgtttggtactgaaaataagataggttagaataggataagattggaaaagaagtcctccctgaatttctcatcccatcatttgttcaaggaaatataccacacataagggtgtttgccgcaatccctgtggttgtagtcgcaaccacaagcgctcgcaagtgcgagagagagatctttccaggctcagatatgagttttacacttgctgtgaggagtgcgatttaatctggttcagggaatgagtttgatagataatgtcggaaagctttcgagcgaaaaatccggggttggaacttgaaattggcattggatttgctttataagaacagaggttaatatacttatggtgcatatgtagatcaaatcattatgtatgaagggatttctcgtggttttccttcttctctgtttaacgtttttgggcgattcgtgtgcgactttgtaggtcaattttgtgacaagggag

SEQ ID NO: 93966 - DNA, 946 bp, Eucalyptus grandis
  Intron number 2 from transcript Egrandis_v1_0.014024m (loc us Egrandis_v1_0.014024m.g) derived from phytozome v7.0 (c hr-ID scaffold_10; pos 35449835 to 35450780)
ctttgttggaggcatttcctgggagactaccgaaggtatgtcaagcgtttcgtcactgaatttctcatggattaatttgaacgtggagtgtatacttggaagttctcttgtcgattagaataaattggggattaaactgtctaatgctaagtgttgcgaacccggctagtgcataagtatcgtaattcacattactcgctggccatcaatacgtattaagaagtttgaattcttctgtctcaggggaatgcctagaagtcccttgaagtggataataggaagtacccaaatcatctatggtcctcactgtagatttcaatttgtgcttacgcactgtcctatccagagtagcgaatcttgatgatttttcttggctgctctcagagatcctcgtttccctacgcatctcaccaacttctcaacacttagttttgacaattggcacaacccctgtccgtgtattctcgtcctatgattgaattcaactagttattgcttgaatttactgtcatttttccatttgattgtgatgctaaagagatcttctactcatctatttggatagtttcctgtcttctgttctcactgaatgcattcttctggtttcactgaatgcattcttctggcttccgcaacggcaccactcctcaaacatggcatgcacacgtcagtaataacttataattgcaagtgttagtagttgtgcacctaaacatgttttaggattgaaacgagggttttaggtgcatgaggagtggatgcagcgtagaacaggatatttaatcatgaaaaacataaacttgcttctagtattgccaatttgtaatgttgaccatgccatctgttcgaatatagataagtaccgatacactgttcaaccttgcagcattttgtgtattttttgttttttgttttccagacagattcactagttattttagcaagt

SEQ ID NO: 93967 - DNA, 1010 bp, Eucalyptus grandis
  Intron number 4 from transcript Egrandis_v1_0.014791m (loc us Egrandis_v1_0.014532m.g) derived from phytozome v7.0 (c hr-ID scaffold_1; pos 40184646 to 40185655)
aagcaggcaagtaagattttgattatccctccctttctgtacccccactgcttctctctctccgaacttactttgtagtctaattatgtggttgttgcggtgaaacctgttcttgtgatgtcaatacatatcttttgctgttttttcattcagaatgctgaattggagttctaaatgaatagtattatggcaagaaccaacagtataatgagtaggaagcaagtgactttatttgcatcgtgattggttgctcagctgcaagaaaggggtcatattggtggatggaatgtagccatgggagtgtcaactttagggattctacttttccaaataataaatttatgctgtagatggagcgattttcgaactgtatttttggatctgcaaggaaagaagcgaatgtagtctttctctactcattttcaggcaaatgctgttcttaccactgaacttttgtgagactatgtagcttaggaatcttaagaattttataatcattctgtccttcttttagctcattggagctttctaaaaaaggagccagcatctgccacctctttatattgtattgatgtcaccaatttgtctgtcccaacttatgtccattcctgcacctgagggcataaacctttgtaatcttagaagaattttctttttctgttggagtttcattacctacctccttgtcagtatagcatgctctctcccttaatttttctttttgggggggaaagttgtatgcagcagctctgaccaatcttctaggccagcatttgggtctgttattgttcatttggcttcatccagcatcatttgttggttggggtagcaatttttcatattcagtcaaatgtgagaccatcaatgaccattgatcatttttttcagtttggattagtatgcatgccgcaaaatttcacatcctgtcattatttgtgtttgtggtctaacacttaattgtattgatgttatcagatctgttctcatatctcatcaatctccaacattta

SEQ ID NO: 93968 - DNA, 635 bp, Eucalyptus grandis
  Intron number 2 from transcript Egrandis_v1_0.005112m (loc us Egrandis_v1_0.005112m.g) derived from phytozome v7.0 (c hr-ID scaffold_1; pos 25844532 to 25845166 reverse strand)
tcctgaggaccttggggattcctgcactttctgaggtacgcatgccccaccccctcccccccttctccacagacacaaagccgcaggagcaaagggcactagcatatatgctcaacacacggccaaatatgtcaatttcgacatacctatatttacaatatctcgttatatactgacaaaatgacctggtaaacccataatgaaaaaatcttgtatgagtttcttgcattgagatagtgaaatgaaaacccattgagtaatagaaggcgtggtttgtgatatgaaatgccatttggatagtgaaaagaaaataattaaactgcaagtttttttatgaattttgtgcatttgaatgtttttgcggctgtgttgactatgacactaaaatgcatgtcattcacttaatggaaggctcaaaattagggtgcacttataggcttgtagcatgctgttggatttacattgaagtttgaaagataaattcgagactactttacctgtactaagtattttattaactgtcaagtatagaagcatttattgacaaacatataattccagcaatcagttgttgacaaagctcttctccttattgataatttcttggcagcttgtaacttgtgaagcgatatatt

SEQ ID NO: 93969 - DNA, 729 bp, Eucalyptus grandis
  Intron number 4 from transcript Egrandis_v1_0.031544m (loc us Egrandis_v1_0.031544m.g) derived from phytozome v7.0 (c hr-ID scaffold_8; pos 13474547 to 13475275)
cggtaaaaattccccgcaactgcattttggacaggcacaagcatcgtgctctctctttatgaattgaatgaatgaaattgccaattgttttcggcatttgtattgctcctctgtgaatgggaagagaagagaattgtttctgtcttttgcaagctcttgtggcattgagtagtgtttagtggcaaaattttcctcatgcataattgctgcattcttgcaggcaacgtgattgcatcagattaggagatatgcaaatgttgtgatcacagtctactgtcccgcggtgttatacttggatatgtcatcttagcattcctaaaaatgaactaatttgtattatggagctctctttgaatttagatgtcactttgcttgaaaaaagtgtctttcagactagtgaagaaatagtgatgcatgcctttttttttttctttttttaccctgcagaccttgagggaagcctcctgaattaaattgatgagatgcctggtttagcttattcatgctatcatgtaacaagctttatctttccttgtccttggtaattgaattcgatcttgctcatattctttttagtagccgattcttattagtttaatgaccgtgtctcgacttgcttctcattttgacattttcttttgattctgtgaataaaaaaatcgatttttctcatgcttgtaatcttgtttgttaggactggttgctggagtttttacagtgacacgctgt

SEQ ID NO: 93970 - DNA, 528 bp, Eucalyptus grandis
  Intron number 2 from transcript Egrandis_v1_0.023833m (loc us Egrandis_v1_0.023833m.g) derived from phytozome v7.0 (c hr-ID scaffold_8; pos 54937933 to 54938460 reverse strand)
aactcaagtttatctgtgagtacattggcgctgcgagttcggttcgtttcaatttggagtttgattgaattttctttgctttgcttctcttttattatgcaatgactgaaggtgagaattatccttttgctcgatgataatttgcttgagaattcgtggatcgatattataaataaggcatgactttcagtagcatgtgtgaaatagcaaccagtcgaactgttttcatattcttttctcttttgcatagtttctatcctcacaccacaaattcttaaaatgccctgtgagagtgattacgtttctggatttaatgtaggtgaatggttagtgtaataaaataactgagaatgattagtttaggaaaaatgtaaaatgagattttgttattgcattatattttttagatgcgtttcgtcaaatcctgttctgctgatgggcccccttcttgttaagtcttttaatccgaagcctcttctctgtgtttatgcagttgagttgaggaaacaaagctcctgctcgattcaa

SEQ ID NO: 93971 - DNA, 976 bp, Eucalyptus grandis
  Intron number 1 from transcript Egrandis_v1_0.045665m (loc us Egrandis_v1_0.045665m.g) derived from phytozome v7.0 (c hr-ID scaffold_10; pos 38183889 to 38184864)
aactcctcgctcttcttgatgtatgctgcctcgatttaccacttcatgcatacaatgatttactgagccgtgaagctttgcttgcattgggatttcttatttgtgtttcattgggataaatatgaatgcttgaggatggttgatgtttgtttggtggatgattgattttctgtctttgggcttatcatcaatttgctctcatcatgcatctttgttgttttagttggtctatatatgctaggcatctagttcatatggaacaggagagtgagttcatataatggctttccaactcctttctaaactatagaactttggtttcagcatactacattaagcaagttaaacggatttcatttaagcgttgctccttgtacttggtgttccttgctgtctacttctccatctgctggtattcttgtgctaccatgagcttcaaagtcaaatctctagttttatctttcccgccccactttgtttgacctcttaaaggacatacatcaccaattattgaagcatctgaaaggggtgttctctttctacatttccagaaacatttctgtactctttaatgttgcttatttagatgtagaaactgacttttgctttcatctacacatcccccctacacagaatgctgaggatgtcttggtgaatgtggagcaagaaccatcggacttcctccgggatgcccttcttcctgtcatgaagggtctcatagctgaagctctgttcaaacattgtaatgaggatgttagagttacagtggcatcttgcctcagtgagattctgaggatagcatcaccggttcaaccatataatgacgatcaaatgaaggtatataaaacaaaactctggagattttctaatatgatgaactcactcctccctagataaaattttgttctttcacagtttattgagtatccattcatgggcaggaaatttttcaactgatcgcggaggctctttcaaa

SEQ ID NO: 93972 - DNA, 797 bp, Eucalyptus grandis
  Intron number 3 from transcript Egrandis_v1_0.003771m (loc us Egrandis_v1_0.003245m.g) derived from phytozome v7.0 (c hr-ID scaffold_1; pos 16264093 to 16264889 reverse strand)
agcaacaaggaggtgtttcttcgggagctcattaggtatcttttgggtttcgacctattcatcttgcggatgctggcgctcatgagtttctttgttttcccgttgactacataaactctgtcttctcatggtggtctaagcacaatttcgaactaagaccgtgatttgaaaacgatatgataaatgatactagtgtgggcctgtggcattgagctacactttctgtggcttagggttctatttatgactataaaaaaaaaagagttctggaatttaaaacttaatgccttacaaaaggccttgaatgtttattagcccaaattcagtcaatattcggaattactagcacccatattccaggaccatacaatcctgttacatgaaatgctttgatgtggtcgacacctttattttatctgaacggatgttgaagataaggaaatggtgtctttcacattgaagggcgacttactttctctttgcctaccaatattgactttgaggtccgatataattggattctcctttatatatggatcaatggagatacaggtacacaaattagctgcagagttaagagttctgcaccatttaatagactagcgcaactgaaattgtcattctactttatgagtgctgtcattttgtggaggtttaagtcagtttattatcgtaattatctttttgaattctaattgctgtctaggcatcctaagaaggaaagtaatcaatttcttcctaatttatcgagttgtcattgtcctcatttgatggtgctcatgtatgtgttcccagca

SEQ ID NO: 93973 - DNA, 711 bp, Eucalyptus grandis
  Intron number 1 from transcript Egrandis_v1_0.017853m (loc us Egrandis_v1_0.017853m.g) derived from phytozome v7.0 (c hr-ID scaffold_8; pos 25914113 to 25914823 reverse strand)
gcggaagcgattgttttttccggcaaggtgcggttcttctttctcgtttgtttttgtttgttttttcctctctgttcgctgctgctgctgctgctgctgctgcttcttcttcttctttactgtagagaagtatgtctcttctggttcaatgagcaaatgggtcttccttctgtggttcttctttgaagtttcgtcacgcttgcgattttcaggacaatgggcttgttccttccgaagaattagcgcatttgagcaggaaaaaaaggactccttttgatgtttttgtttgtatgatttcttttttacttttaggggagggggttgctgaagcagcaacgagggttcgattgggatgactgctcgaataattagcttcgcatgtgcggacattgtgacttttgaactgagtattcgattggacttgcgagtgtttggggttctttcttgctcttcaatatgaaatgcagggtgtgctccttttccccttgtggttattatcttcttcattggtctcttcagtgttgggctcatatggtattgctttctttttgggtaaaccaagcttgaagcagatttacaaccatatttgtgacgttcagcgtcctctttctttttaatttttcattttcgggtcattgacatgaatttactcttcctttctccatgtgaatggcaggatacatttatcgtaaagccccacaagaaatcttc

SEQ ID NO: 93974 - DNA, 521 bp, Eucalyptus grandis
  Intron number 1 from transcript Egrandis_v1_0.030621m (loc us Egrandis_v1_0.030621m.g) derived from phytozome v7.0 (c hr-ID scaffold_8; pos 42329453 to 42329973 reverse strand)
caccccgtgggcaggtaaacattatagtttaaattaaaataatacatagatattcgatcttgatttttctaaatttaggagggatactaaatcacgtcctcctccacatgcgacgaccaagattaatccacaagagtggtaggcagggttcacaagtttactccgagcatatatataacgtccaactgcaccattacaacgaaatggtttatgatagaggaaattcaaaactcaactagaatttgcatttcgataaaacttatctccgacaagggggttttcgcaagttggtctggaagataatcacgcgttttttaaaaagcgattgttgagagccgaatcaatttttttttgcttaagttttaaaacatgatattcaccctataaaattcgtgcaaaggaaacttagttctggcgaagaaaatagtgattattctacagtatttgttcaactatgtatctgcctacgagcacttcgtcatgcagccgaaacctggcggtcggaacttggtcaaaacctt

SEQ ID NO: 93975 - DNA, 664 bp, Eucalyptus grandis
  Intron number 1 from transcript Egrandis_v1_0.018252m (loc us Egrandis_v1_0.018252m.g) derived from phytozome v7.0 (c hr-ID scaffold_8; pos 19295242 to 19295905 reverse strand)
aagtcaacgtcaacgaatctaaggtttgctcctcctcttcaattcttctttttttttttttgttaatctttttcttctttgggccctcgattggtcaattcggtggtactcttgtgttcttcattctatctgatgaatttcttcctctctcagcaacggaagtcgagcttttcactttctcctcgcgcctgttctgctaatttcatcaattagatgttaatttttgtagtaactgttgtgggtgtttccgaaatttgagttcttggtgtggattcaagctgtgcgcgtctgtttttttcttccgttttctttccttttttgggtgtgggcaatttcagggttagaattcgattttgattggagggtaagtgacgagatgttgtgtttgtgcctggcctcttcttccttgtcctttctgtacttctctccttttcacattcccccactccccactttcagctctgtcttctatttcagcagggtttatgcagccgacaaatggcgattaactgcgtaacatctctgttgtctgtgcttggtgtcatgtgattgaaatatgcagaaaatttgtagactttagaggtcaatttacatgaatctgaattgccatctctcctgaaaatccgcagagcgtcgtccccctcaacacttacgtcctgatctc

SEQ ID NO: 93976 - DNA, 596 bp, Eucalyptus grandis
  Intron number 2 from transcript Egrandis_v1_0.017363m (loc us Egrandis_v1_0.017393m.g) derived from phytozome v7.0 (c hr-ID scaffold_1; pos 23334453 to 23335048)
gaagaggttctttttcaccaatagctactctaacgtggttttttcttgttctagctaatttgggtggtctctttgctgtcttcatttttctcttgcggtgggggtttgatttcggagagagctcacatttggatgtttgtttagtttcgtctgagtctagtctctcgtgtgctgtatgtcacgtattgagcgaacaatctgaagtccatttctacattttcagaaaaacaaccttttctttgtaattactatgatgcaattggagcttctctacagaaagaatctattcagctagtgctttggatgcggatattgaattagcccttcttgctatattttctgctactccgtttgcctccttcatctattgctaaatcagaactgttttgtcaaacacccacatcttcttttttattagtttctcttttatggagtttggcaagaaatgattaccataggctcatgattgcttgcttttggctagtttgacttgatgtttattgttctaaggtaaaacccattgtttagtaatcaattctccttttcttttcctttttgcagtgaagacggaaaactgagctgtggatactccagtt

SEQ ID NO: 93977 - DNA, 728 bp, Eucalyptus grandis
  Intron number 2 from transcript Egrandis_v1_0.033126m (loc us Egrandis_v1_0.033126m.g) derived from phytozome v7.0 (c hr-ID scaffold_560; pos 4017 to 4744 reverse strand)
ggtgctgtccaaggtctccttttgtttagatttgtgggctttttttcttttcttttcttttctttttttagggttattggattgatatcagggtttttcttggatctcctgcctgaccctttgatttgtggatggctgacgtctgatggaagaacgggttctcgccgtttcgattgtcctttctcttgttgtcctgtaattctgttggttgtctgtggtagtttattcttgctggaaatttcttctcttttgtctgcttgacgctttattttcatggatttgtgatcagctgtgaaagatagattggcataaggatggaacatctttcaccttttggaatatcggttttgtagataacaaacttgtcttttgatgtagagaaaatgaaccatcacttttagaagacttactgatttctccatcatgctttttgaagaatacttacattttctctttggatgttggagagtttgttcgagtcattgtccgtatgcttacctgcaactatcaggcattgaaattgggcacatattatgctcagatttatttgactttttatttgtttgtgttttctggagaatcagattttatactctaagattaatttttggaactctacctgaactagttaacaaaactgttttctttttatttctgtgttgacgccgtctgatcattgtctcaatttcacagatcctgctagtgcagctgcttctcaggcaagcaag

SEQ ID NO: 93978 - DNA, 643 bp, Eucalyptus grandis
  Intron number 1 from transcript Egrandis_v1_0.045320m (loc us Egrandis_v1_0.045320m.g) derived from phytozome v7.0 (c hr-ID scaffold_1; pos 4164133 to 4164775)
gaacacaaggtaatttatcgtccttttcctctctggaatagcattgtctttggctttactctgtcagagttcttttgggccaaatgtcaaccattcttttatatagtatggaacttttgaatgctcccttctattcaaaatcacattctatcaccttgtacttttacattgctggatgatactttttaggttagtggattataggatttgtttccactcatggaacatagttttctctgtctgctcctgtgaaggaattgtaaggttcatatactcccacaggcaataatcttggagtttttttagtaattgctccttttttcaatccatataacatctctcagttgtttaaatttgttttgttatagatggaaatgagagcaatatccttgttttgtttatttcttgctgaatacatgaactcttccaaatactttgattattcaacaaatggaatatcggtgttcactgttttgcctggatttcttgctttctatctgtttgcgattgttttggaatatcatatgtgtcagaggaaaactgagcattctacagcttcaattccacatgcaggactaaattgattttctcttcctgattttccctttgtggaaggagttcatttttgtgtatatccttgcag

SEQ ID NO: 93979 - DNA, 1007 bp, Eucalyptus grandis
  Intron number 3 from transcript Egrandis_v1_0.026927m (loc us Egrandis_v1_0.026927m.g) derived from phytozome v7.0 (c hr-ID scaffold_8; pos 40046844 to 40047850 reverse strand)
ataccattaaggtgagagctggctacttttctcttttgcatgcagccatcgccagatccttttcaatcctaagaaggggttttggcttgcttcctgtgatttgtatatcagcactgccagcacaatcaatgactgttttcttattggagataaaaaaagatagtagaagaaagttaggatgctggttcgagtttgttttgtagttgccatttgtcctgtatacttgaggtttgaatgtaaatatgtgtagtgctccttccatcttctagaattgtttgttagctcgacaggagaagttgcggatgaggtttagtcccaaatgtttgttgctggatttgcagctattgtgacttttattctggcatgtttgtaccgaaaatcctataaagatagcagtatagtctccacaaagaacatgaaataatttataccagacctactatcaggtttgcagggggcttctagttgtggtccatatacaggtgtataggacactgcatgatctcaattttagttccatgagcttttgaaatttgaactagcagctataaattggtgcttctgtcggtgtcgatcaggtgatgatctaggagaagacaaatcatccactgcccgttaatatctacacatattgcttctcctattaattgtaaagctgcttgtatttggtcattgagtgttctctttaggcaaaagaaaattaagtttgctacggttaatttgatccttgcatttccaggctgagaatctctataggctgaatgtgcatagcagtctttatgggatttacatcagcacatgaactttgtactgctactgcatatgactaaactaattattttacttgttttgttctatatgcattggtacactggagtgtttcttgattttggaaacttcaatactgcagagattttggtcctgcaaatttatgagtgatgacggaacttatatgcgttgacttttttgtaggaacttgagagaaagaggaaggagagggcacaact

SEQ ID NO: 93980 - DNA, 614 bp, Eucalyptus grandis
  Intron number 4 from transcript Egrandis_v1_0.023075m (loc us Egrandis_v1_0.016620m.g) derived from phytozome v7.0 (c hr-ID scaffold_8; pos 63376620 to 63377233 reverse strand)
caatttcagtatgccatcttatcgacatttactgtgaaactggtgtatatgtctggtcatcttgttgaaatgcctgagttttaggtaaggatgggtatattggtctctgagtcaagcacacacaagaagttattaggagtttccaagtttacgattttaattgttgaaatgccatgattgtggagaacgaataatcaaatgtttactatttgaaacatttgatctatgattaaagatgtggggttctctcctcctatagaaattgtgagttggacgttagagaggagtgagtattaaaatcacagatatatcaacaggattttcatgaatgctaattttcatttcacatgtttcttttcacattgcttagaaattcaaatcatacatacaaagatttcgcattcttgtggaacagaaatgagcggaatatgttagtgatatagcatattggacatgttcagttctttggcttctttttgttttggtgaggattatcatgccgtactggtcagtaaataaaaccaagaccatattagaccactaagattgatatttggcatttcagtggtaatgctgagtttcttaccgtgtatgtcatgtcaattgtagttaaa

SEQ ID NO: 93981 - DNA, 586 bp, Eucalyptus grandis
  Intron number 3 from transcript Egrandis_v1_0.038452m (loc us Egrandis_v1_0.038452m.g) derived from phytozome v7.0 (c hr-ID scaffold_8; pos 64951401 to 64951986)
gtggacattcatttgcgctttgagaaggctggcgagtaattaaattctggatgctcttttgactcttacctttctttccatgcttcacttcaattttgtatatgcaagtagttcagatgcaacgagtagttttcacgcaatcagtgcataactgctttttaatagatgcatgattgctagttgctcagagattcaatacatgctaatgcatggcttcacaatcacactcgtaaaggctgatgacaattttagttctgactaaatgtcaaaaaacaagagactaccgttgaaaatttggtggatagtatatagtgaaccttcaaatcaagtttggataacaatggtttaagtttaagttcggatgataaacgtattaattattaagtttgatgcaagatgctagtaaagtatgccagctaagaacatcagtgcaaaaaataaactcgacggttaatgtatgtcttttggcttttcttttttggtactaaattcgtggtttcaagtgcaacatctctgctatacgcaaaatagaaaagaataaagaacttgatacaactgaatgtttttatgcaacaggcctattttg

SEQ ID NO: 93982 - DNA, 788 bp, Eucalyptus grandis
  Intron number 1 from transcript Egrandis_v1_0.023584m (loc us Egrandis_v1_0.023584m.g) derived from phytozome v7.0 (c hr-ID scaffold_10; pos 30312799 to 30313586 reverse strand )
gtgatcagccacaaccctgataacgacacctccaggtatttccttgttggttgcaattagctttgcccgctgtcggtctgctcattttgatgttgtggtgtgcatatttgtctgagtttacttgctgggttctggccattttggtggatttcgagtttcagccatgatttcggggttttcggcttggtttgcccttgcttagttcttcactgtctgctctggtgcagcgtgtcgtggtgccgtctatggtgtttatcacagaggtccgacagccccatatgggatagggattagatttccgaattgcttaatttgttgtagtagttatctaaaggggctcttgatatcaggtcgcttgaatgctttgatatgactttcttgatgcctatctgatgctgtttctatcttgtatttgtgactgaaacttctgttcttcatcatatctgctggttggtccggttatgcagctattgtggctcattttgtttacacgtctttcacgacccacaattatgtgaagataagttaattgatctgacaatgaagaactcgacataaacaatggaatcacagcctgggcagctgcaggaggtgtccaccctcctgtgtcctcccccattttaactaacgaaactacaatgttcttgctggttcatgttttgttatactgcaacatatccactagttcgccaaactgagtttgctacaattttgagctgtgtgaaagtgaactgatgtcttatgttacttcagaatcaagcttccatccgggtcgaagaaaattgtgc

SEQ ID NO: 93983 - DNA, 827 bp, Eucalyptus grandis
  Intron number 2 from transcript Egrandis_v1_0.045646m (loc us Egrandis_v1_0.045646m.g) derived from phytozome v7.0 (c hr-ID scaffold_10; pos 12242504 to 12243330)
acctttggaaacattgctaggtttatcaaccataggtatttgtttgttttgagaagtagcattcttatgtttatttggtttttgatctcttagattgttattgcatctgcctttaagatggaaattcctcaatattggatggtttaatttgtaaacgtagctcctggcagaaagttcactttttaagcataagtcctttggtctaaagctttgagaatccaactttcagctgggcattgcaagcttatctcctaaaacagcataaaaattcaagacacctggaaaggatttcccctattcattcatcgtagaactcatgtattaaacctggtgaaactgagttatttgctttgtcatggtactgctattgtttcctgagtgactatagaaagcagaccttgactctgcttggctttttctgatttctcatgttctccccttcttcaagcttgcgagaaaaggcatcaatgcctacttaatggaaggctaattgaactgaacgatgtcacataattcgacctaattggggaatcatattccgtggggggctcttccatttttttttgctaagatagaggtcttgatcctgctttccttctgatggaattcaacattgactctggctagtgagtatctgttattggattcacttttctctgaccctacatattgtgtttaagaaaagacagaggatgaattactcaaagttcatttaaggttggggatactcatagtcgtatcactgtatattgtaaactttcaatccctacggctaccttatcacaatgtgtaaagcataccagcatagtgtaatcgaggttccagta

SEQ ID NO: 93984 - DNA, 476 bp, Eucalyptus grandis
  Intron number 2 from transcript Egrandis_v1_0.027709m (loc us Egrandis_v1_0.027467m.g) derived from phytozome v7.0 (c hr-ID scaffold_10; pos 38004617 to 38005092)
gaaggacaccagtgagactgaggcaagtcctcgaggtatgacccttctccataacatgtcctcctttcttatcaccccagctccagtgcatggaagttgattgcctgatattaattttgagggcagacctagaatcttgtttttttcgatacgtaagctgttaaaacattagaattatcttctgtaaagagactaggatcttaacgtactggatagatggtcctatctgaagttgctatcgaaagaaacctacagtccctgaagcgagtttacattgaggttcctagcatcagctgcatcatatctctaaaaagagagccttatattgtgatcgccctttgagcttgtttaattgaactttgattgagttgagttgtgtttttatttgtttctaagacagggttgtaggaactttttgctcttatcgtgatgaaagatccctaaatagatgcacttgcatatctaatttttaggtg

SEQ ID NO: 93985 - DNA, 443 bp, Eucalyptus grandis
  Intron number 2 from transcript Egrandis_v1_0.048414m (loc us Egrandis_v1_0.048414m.g) derived from phytozome v7.0 (c hr-ID scaffold_10; pos 2194858 to 2195300)
ccagacattctccgataattgtctttggaggatcataagggggaagtaagcgaatatgttttcacttatcagcaatatgactactgcttagcattgaaattaaagaaaaagcccactgcgcacattgacgatatcaattccaatgtacgattcccattaattatagtagaatgtaaataaacacacatagtctgctgaaagtccttgttcttgaacatatcatggatagaacttttcctaaagagcgctagtcataatgacaacgacaatccatatcaagtttgatagtttgccctgaatggcattgaagaaagtgcctaccattaggtttacaaggaatagatcaacaccatacattctacacattacttacaagtaggtctttcaatcttcatatgtttgattttcagtgctagctgcatggtttcgattaaagtaccctc

SEQ ID NO: 93986 - DNA, 755 bp, Eucalyptus grandis
  Intron number 1 from transcript Egrandis_v1_0.034258m (loc us Egrandis_v1_0.034258m.g) derived from phytozome v7.0 (c hr-ID scaffold_8; pos 64254630 to 64255384)
ctccgacagcttcgacccaggtgatgatggcttttcaattcactgtccctgacaagaaagtattctttttaccttcaaaaagggcgtcttttgttttgcttcaaaaatggttgctttgggctcataagctcgtagcagtacggtgtctttagtcgttgatggtgatgatctagagctcgcatctggtttcgtttcttgtcgatgatgcttttcatgtggtcgctgaagagcgaaatgctgtgacagagaagggacgtgtagaaacagctcggcgttttggaagtgtctcgttgcgccattccatcgaacagcttctgtgcaattaagactggagacgtagaaaatggtgttgtgactcagctgagtgattcagcgttgcaaatgacacttattttgatccgttcgcgggattagttgcaatacccacttgtgccttttctctgtttggctaatgatattttttgctcatcccaaaaagcctgcaaagccattttgttcaagctaagcttcattcactcttgctttatcctgttgttggtgaatttgactggcatccacctcccctttctgcaaggagcttctttctcatgatatgtcgacgtgtgctaaagtgaaccacatttttgtcttgaagggattgtgcatggttttctgcctgaggatggaatgttgcttagctggttacattcttatttagttgcgaaacttgagggaggtcttctgctaattttttgtttgataattttctataggag

SEQ ID NO: 93987 - DNA, 988 bp, Eucalyptus grandis
  Intron number 1 from transcript Egrandis_v1_0.029599m (loc us Egrandis_v1_0.029599m.g) derived from phytozome v7.0 (c hr-ID scaffold_8; pos 8361025 to 8362012)
ggcaaaaccgattcgaggtcgagagtcgagtaaaggtacggccttgcccgattccgcactcccccgatctcgcgtcgcgcttcgatggtttcttcatttcgggcggctcgggagtgagctttttagggtttaaggcttgcggtggtggtcggaaatttagcgatttttcgatcttgctgagtgctttcgattcgatattggtggctgttttcatggggatttacttggttggagtgttgcttgatgttgtagcatttgagttggggttcttttgcattgctgagctaaggttcattggtttgctcttgcgtttgcggttctctgtcgcttgagatgtttcctcggagcagttttgggttctgttgttgttcctcaatcttgtcgtctttgtctcttagctgttgcgtgtcgtggagagggagagatgctggaaaatgggttccctccgatgttgctgtggcggtctggtttatgtatggaaattttaattaatcgatttgctaaagaagtgaagcttggtttttggatgttttccagtcgatagtggagctcatgttttcctcacgagatttgagctgagatgctcaagcatgcgaactttgtgctttatctggtgctagatatggtttggaacctgctactgtctgcatttttttttttttttgggtacattcctaagaaatgatttaacctaccaaggtcttgtgctattcattcgcgtgcattcatgattaatctttctcttatatttggcaatatagattttagtaaatggcataggggctgtgctatctgatccgtatcagagagcagattaaaaaagtataggcccgatatagggagtaggcaggtgtgacggtcggtaattctgtggaagctagcagctttgcagcgagtttcaaagtgaatgtttatggttgagttgttcttctaagttcttttgcctgcggtcttgtggcatacttacactcgacactttcgtgcacag

SEQ ID NO: 93988 - DNA, 890 bp, Eucalyptus grandis
  Intron number 2 from transcript Egrandis_v1_0.016829m (loc us Egrandis_v1_0.016829m.g) derived from phytozome v7.0 (c hr-ID scaffold_8; pos 46272153 to 46273042 reverse strand)
attgggttgcaagctgttccttccaagtatctcaagtacacagccaatgcatttaatacagcaagtgtcccacccccagcaatctttccactttgtgtaaacaaaaacaagttatccattcttttccttgagtcaagtcaatctgctgccaatttgtctattttatgcaaaccatggcatgctccgtcgaattaggatcaattaggacagaaataaagtattgggtcgaactcttcaagtgtcaaggtaaaagatgaatagtcatcgactctcggaatcggtagaatgagactattttgggacatactatggaatcatctaagatttgaccttttcgaacattgtataggctcgggaaacaaagagatagcaacaagaagaaggaaaatgattatgattgaatagaggaactctagaacatttggagatctcacatggtcgatgagtttgggtggatattaaagataattaggatgttatagataatttgggattgctcttaattggatgattctgttgattttatatatttctcaagattgtgcatatatcctgattaatatattatcttagaaatttatctaataaaaccgatagatatagacttatgtattctcgttcaatatatagaaatatacacaaattccaaaatcctgtctttgtagcataatttgaatagatttcagaaattcacagttgctttgaaaaagcggtatgaattagcctcttgttttttgtcatatgatttaaatgactcagcatggacattacatcctccctatgtttcggtcaaggcgtcacaggcacttatggttaacctagggattgagttgcttgttttgtttgtgccttgttgaagttgtgcagctatatacctcttatcaactagg

SEQ ID NO: 93989 - DNA, 932 bp, Eucalyptus grandis
  Intron number 1 from transcript Egrandis_v1_0.006019m (loc us Egrandis_v1_0.006019m.g) derived from phytozome v7.0 (c hr-ID scaffold_10; pos 11187203 to 11188134)
ggtgaggagaagaccctgcagcgctcgcgcagctggtaaagtcgctctcttgatcgctcagtttccgagcttttcgttgcttgtgtgaatgcagtggtggtgtgctcggttcggctggcttaagccttttctcgcctttcgattttcgagagtggtcggtggaattccgtggcgtagtagagcctggatttctaggtgttcgctcggtcgtgttcttgatctcgtcgcgctgagttgagtgagagcagctcgttgccctgcggaaagtagatgtggaaagtagctgttgaggtcttattttttattgatttttttttttttggctccttttgcgtgtgctttttgattgccgtgaaagttcgaggggagattcttgacgttgggatttttttttccgatttcgtgtcgcggcttcgttcctgctgttaacgcgaatttcgtgaaagagaggggaagagaacttgggctgcttgaggttcttttttttcgtttgaaatctgtttgttgttctatgattattggtttgacttttttgccgcttgtgtttctgaaagtgagctttttttttcttttttttttttgcatgatctgtttgtaatttttggtgaagggaggaattttattttagccctttttgagtgtttcggtgagtgttcttctgttgatcttcttgggcttttgatctctgaattctcaagttgatatttgtcagctgagttagttccttctttatccttgttgcttcacatgcagtgcactttaaggtcccttggctattcattcctttctatagaacttggagatttctgaatttttttttcttttttttcttttttttgtggttatcgttgattcttttgcttaatatggtatctcgcttcattaagtttttagtatactcatcgttcaacgttgcagaattgagggacttg

SEQ ID NO: 93990 - DNA, 709 bp, Eucalyptus grandis
  Intron number 1 from transcript Egrandis_v1_0.024966m (loc us Egrandis_v1_0.024966m.g) derived from phytozome v7.0 (c hr-ID scaffold_10; pos 2792284 to 2792992 reverse strand)
cacgaagcaagcaagctctccgcgaagatcccttcgtattctctctctctctctctctctacatgtcaagttttgatctttttctctgaatccgattggcctcgatttccgctgccttggaaagttccgtcaagatgatagattttttttggaaatttagcgaatttcgtgcccaattgcttcggtgtttaggggaatctatgtgcgattgggtggatagggctctcgtgtgtactgcggaattcttgccattttttttttcttggtcatcaaaacatgacctggggtttgcgtaaaagtgttagtcttgatgctttcttttgttgggttgggttcctgatgatggcggcgtcgtcgtcgtcgtcattcttgtcggtgttacgatcgcatgcgttaggcgagctcgtaggcctggacggaagagatttgtgtgtaaggtggtgatgggaagttgatagtgcgatgtgagagtttattagccgtgttattattggatacgcattgcccatgctaattgagtttattgctgcccgactagtttgttaaattgtcctttgtttttccattagggaagagagcagaagttttattggtgttctgttcgattggttgtactaattttgagaagttatctacttccacagcttgttgttaccaaattggttgaagcttcttgtgggttgctggacctgcagattttggttaataa

SEQ ID NO: 93991 - DNA, 548 bp, Eucalyptus grandis
  Intron number 2 from transcript Egrandis_v1_0.033371m (loc us Egrandis_v1_0.033371m.g) derived from phytozome v7.0 (c hr-ID scaffold_8; pos 55786412 to 55786959)
ggaaaccagtccgcttcacagaaaattaaaggaaggtaccattaccaatgaccattctctctgtattttgtgcattgcagatatgatctcttgtacatatgttccttttgacaacctgctgaacaatgtctacataggtcctaactttcttcatacttcatagttgcttaattgggactgaaagctttgtttgatccttgacgggccttttgctatatattaataattgcctaatggtggaattctttagaggaaaggtgcctatggtccagtggtctaacccttgctacacttccagttacatttggtgttgaggttccatattcaaagggaattgggatttggtatcatttatgcaaattaatgatgttcaattgtaaccttatattgattgttctgtcccagtggacaaatgaacatctgctcatgtttaaaagtgaagaaaacatgtttgtgaagttcaagtcatcatttgccagaccatttctgtgttcagcattcatgtttgttcagtgacgtttttctttgcttgatttgtaggggttgtc

SEQ ID NO: 93992 - DNA, 621 bp, Eucalyptus grandis
  Intron number 4 from transcript Egrandis_v1_0.023520m (loc us Egrandis_v1_0.023520m.g) derived from phytozome v7.0 (c hr-ID scaffold_10; pos 1878672 to 1879292)
cactttgtgagtttgatggccctcttccattttcgatggtgtgaactatgatgtcggatgatcatcttgttttatagattttttttgtgataattcttgatttttatgtgtatgcatttgaacatcattttctcttggatttgctgcagtaaaattttgtgtatggatttgacttgtgggaattgggccgttatttttgcaatttttcaagcaagtcgcaataaattcgaaaaaaagaagtggcattgcctgcatagatacccattacttgacagcatttatacaatttgacttgcttgccttgtgaaatgaagggccactaatgtatgagaatcctccaacttctttgccaaattcatgtaattttttcactgcgaatgttaatagctagaaagcggcaacttataattaatgcctagacatcccttcatatgtgcacttcttttctgagaaacatacattgcaacgggaatggctacacattgatgtaatgcttatttttccaatggcaaagtctttttatcaaattgttttggtatccttgctcatcgcctttagtttgcttctggcgcaaattgattgccatatgtacctgaccaaattcatttttttgattcagca

SEQ ID NO: 93993 - DNA, 855 bp, Eucalyptus grandis
  Intron number 1 from transcript Egrandis_v1_0.008501m (loc us Egrandis_v1_0.008501m.g) derived from phytozome v7.0 (c hr-ID scaffold_10; pos 8012032 to 8012886 reverse strand)
aggaccatcgttgaagttgttcaggtttgcgcgcgctcgcattctgttggtgattgtgattctggtcttgcagaattttgagggatttgttggtgtttggatgataggttgtgcttgtgattgcttgttgtaagtttgagcattgttgattggtcatgtgttatgaagatgggttggatatagctacgtttatacagtggtgaattcagaaacttacggttgggtggcgaggtaaaagaatttagtaaattttcttggttggggacataacgttttgcatgaaattttgttgattatagtgcatgtcgcagaaagttgtactaaggatggagtcgccaggagggtggcaggctcggttaacccccctcagtctgtttttggttataggactggcaattttgctttgtgttgaatcagtcattttttggtctaattgtgttaggtgtcttagatgagtcagagcgttctagttattggcttctgcctgctgatggctttgagacatgaaggaaaaattgtcggcatgttaattcttgaggctggctgctagttctttctttgtgcttttgtcatttggggcagtaatataggcagtttcgcctgctgtttgcaagtgctaagaaggtttctttggcctttgaaagtccacatttacaacgatacttctatgtttgctcgataaattttgccgagttgatcaaatggtttcattggatgggtttggttacttctcacgggataattgggctgattctgtgtactctgttcttcactgattttggccagtctcgctcctttttgaaaaatttgatccccgctgtcatctaattttctgattcacttttttggttgcag

SEQ ID NO: 93994 - DNA, 669 bp, Eucalyptus grandis
  Intron number 1 from transcript Egrandis_v1_0.016688m (loc us Egrandis_v1_0.016688m.g) derived from phytozome v7.0 (c hr-ID scaffold_8; pos 10897853 to 10898521)
catttggtttttctctctcgagttttcattatttaatccatcgtctgtgacgacggcaaagcctacccaattgcccacttcctgtgtttctttatttgtttgatccgtggacattcgcaatttagttggtctttgtgtttggttgtttctttctatttttttcttaagaaagcttttatttttcttcgtggctgccgcggtctttatgctcttgagctttgcgtatccaatggttgagtgactggtgaggttcttggctgttcctggacaaatatgtagtgagaaaaattacgggaatattcaagagcatcatcacccaagagagtgtttgcgaggggagttgacttagtaaagagagactattgaagtcttcctcctcctttgctttaatagttttgttctgggttattttctatttgggtttattactttacttttgagctagaccagttgtttccgatagaaatcagtggttgaacggtcgcttcatttgtccaggtttagctcgtaggctgccctttcccatcagatcctggttgctctttcccaggatctttcccatcagatcatggctgccctttcccatcagtgcatcatcagctttgaggcaaggcgtgactgaacataacgatagtgggatccaacagatccaacagattcaacttctca

SEQ ID NO: 93995 - DNA, 622 bp, Eucalyptus grandis
  Intron number 2 from transcript Egrandis_v1_0.052932m (loc us Egrandis_v1_0.052932m.g) derived from phytozome v7.0 (c hr-ID scaffold_10; pos 16584645 to 16585266)
ttgcggtggtgcattgcgtactgtttaccgtcataagctgtcatgtaaaacctacgctgactatttaggaaaactttctaggtgttctaagtaaaactttgttagtttgacggccagagaattaaatgacaaattttcaagattctttactctaaatcattatcactcttattcacactgcagtggtgcagattatgctattcacatgagttcatatgatgcataagtcagaatataaggaattcaaaggtctaagaaatctcttcatgtaattctttcttccgttttttctgtgttcatctggtcacttctgttctaatggatctctgcctttcattgcaacaattatgtttcatgaatctctgcatgcgatctttctccaagacgcaattgcaatgactagacagaataaactagtgtatgccttatggacgacaacttgccagacaaaccagtctctcattttgtttttaccatacttcacactcataaataagacaagtacaatgattttatcttatgtctctttacaaatctgattaaaaactttgtgatttgatgcgactaagagttgctctctcttggttgcattttgcaggcaggtaagggtcggacaggttta

SEQ ID NO: 93996 - DNA, 589 bp, Eucalyptus grandis
  Intron number 1 from transcript Egrandis_v1_0.054131m (loc us Egrandis_v1_0.054131m.g) derived from phytozome v7.0 (c hr-ID scaffold_10; pos 1988131 to 1988719)
gaagagcctcgaggctcaggagcacctggccgaaggtaatatcttctttgttttcttcttcccataataatttagtgtccttccgagaaatatttctgaggaaagagaaagcaagtcgtttttttttgtgtacttctttttggaattcagatggcctaagggtcttgatttagttaagggccaaaaaggttttgaatctcctttacatacagtgataacgtatactgggaatgttgcaaacatgaaataaattagtaaaaatgaaccataaacttacctcggtatataataaaatttacgagaatatgattgtaacatgaacgacccttttgttattgcagatttaatctttgaggatgaaacttgaaagtgatgttcggccggtcttataatagatatatagaagtttttttgccctaaaatgttctacgtcattgataatttcatcatataatgaactgtgcattatatcgtaagaaatactactatggcattgcaatcaagaaatctcaagcgattgggaatgtagtaatccgattgtcttcgacatacagggaggagcaaaggagggcagacgaggaaggagcag

SEQ ID NO: 93997 - DNA, 969 bp, Eucalyptus grandis
  Intron number 1 from transcript Egrandis_v1_0.011324m (loc us Egrandis_v1_0.011324m.g) derived from phytozome v7.0 (c hr-ID scaffold_8; pos 69378848 to 69379816 reverse strand)
tcatcaagccacacgtcataaaaaatattgtcgtaaggcctaatttcattaataatttcactaaatatctactttgcttagttcttacttacaacggctttcattctgcctgagcttttatatatgcatgggctatgtctacacccatagattttctactctatgtgaagggatggaagaggctactagctctagttagtagtccttttaagcatgttaacataaggatttcatactcgctacaaaatatttaatttgagtcatttaattacctatttaaattagcaaaaaaggactcttattaatcagtatgcggttggcctccaagaatttcaacggcaaaatggatcgtctaaaatgcattcatgatagaaaacatgatgatcacatccatgaaaccctaatattctcaagatgtatcccaggaatttatcacatggatgaaagagatctccccttgttaattttttttttactattcccatgtcaagagtttgcattgaagtttccacaagattcgaagtgatcccatatacagttttgctcagaaaaatataatattttgtgtacacacacactgatttaaatctccaaagaaccttcgagtccaagtttgaccatctcgatgaggagacaccgccatacatgtctattgcgacatcttgatcaaatgcaactacatatagatgcgaccgaggattcgtcattctaagcacactatcatctgatttaaatgtccaatatcatgcgaaatgtaaacctatatttcagttaacaccaattgtgtcttgtcgtatcattcggtataaactgatttttatgtgatattgctacgttacaggcttaatatcatgtggcacttttatctttcttgtattttttaaggacatccttctgaaatataaaatcaatccgttctttgtattttgtgtaggaaatattttctgctgggtcagacacatcctcgac

SEQ ID NO: 93998 - DNA, 772 bp, Eucalyptus grandis
  Intron number 3 from transcript Egrandis_v1_0.021369m (loc us Egrandis_v1_0.015373m.g) derived from phytozome v7.0 (c hr-ID scaffold_10; pos 6658311 to 6659082 reverse strand)
aagcacgagtatcatctccagtgcattctcgagtggtaatctatagtgctctcagcctcaacagaataagctttgctgctgacggaatagaccccattgtaatgctagaccaatgcagtatcagcaaagatatttgtcacatttcatctgcatagtctctggcgcattctccgattctctggatgtcatataaaatacttatactctgctgataagagcacctgcattatgtagcgtccacattatccgtgtttcttttttgaactttcatgcattgcttatatcaagcaaaatgttatatggaatgattactctcatatgcttgatagaccagacaaataagaggaatgctagaatagcatttattcacgtgttaacaggccgtgcacagccatacacaagttctgcactgctatggctggagtaactgctggagttcttgacctgatgtctgcaatgttgttttttaaggcattatcggcccgcatcctgaatgattatatttcagtttccccagagtccttaaagttttattttcttggtgtggttcatatcgtttgactattcatatacgttgatagtagagctccatttcttcaagtattattttatccgggtgcatctgaaacctgactaaatttccaagggaaaagaccactctttggcatataaaatgcaacaaatggtgtcaaactcttaggatattgatattctgatggcttcttgtttttcctcattcgcctctaggtgtcagaggagttcacagtgtccc

SEQ ID NO: 93999 - DNA, 925 bp, Eucalyptus grandis
  Intron number 2 from transcript Egrandis_v1_0.014371m (loc us Egrandis_v1_0.014371m.g) derived from phytozome v7.0 (c hr-ID scaffold_10; pos 161657 to 162581 reverse strand)
accaagagggacttcaaggtcacaaggagtggttggtaagtgtcactgttaacatttaatttatttatatatatgcttgagaaatggatacagttcttttttcttgcgaaatcttaacctttctaggtaatataagttaatttagagcatctgggaatcaatggaacgcctcaaaacttcattatttcctactctcgctggaggtaaatcagctttgctgactgccgagtgattaaagataaaggggcaggccaaaaggatgcccacctccacaatccataaaaaaagggcaataaaaagggaaaaaataatgtataagtccattttcaattgaagtaatatatctggaatgcatggttctgaaccctttgaccaactgtagggtactgtctgtcaaaatcatattacgcattctcacagctagtgaagagcaatgcacttatttgtggtgataccaagtgcacgtattacagaacacaatagtactttccatttgatagtcggtgagatgacacactggtcagtggagatggtgtcctggaaaacttttatgagtaatgagttttgatttccttgcttggccgaattggacctccttggtgattggacaaagatctcttctaggagtcctagtacttggaagtttgctagtcaattttgtaaatattaaatagcacgctagaaaatgtttctattgaaaaggcagaagtctgtctgtattgctcaagtgccaaacactgcacgagtgtcttggaaccgatttctctacctcccttcatttccaaaagaattctgctttcaaataattagacgatgaagttaattcgtctagtgttaatttaaatgagacaatgaagttaatttatctgctggtgaattacaaactgtaggcggaaatcaactacttgggtcagctgtatcatcc

SEQ ID NO: 94000 - DNA, 538 bp, Eucalyptus grandis
  Intron number 1 from transcript Egrandis_v1_0.014371m (loc us Egrandis_v1_0.014371m.g) derived from phytozome v7.0 (c hr-ID scaffold_10; pos 162846 to 163383 reverse strand)
ttctcagatcatagctgagagtcctctccacaaaggtatgcatccctatttgaggcttccgatgcatgatttcagctgagtttatatcaagaacaggtgttgttttggcctttgaagaataaatttttgcaattcttgataggacatgatttttttttttagctccttcctttaacttcccttgtgttgtcgatacattgtatttgatactgatttggagggtgatgaagtagaacttagaagggtaaaatctaaaaacagtatcctttgatagttgaagttagaggtttattgctacaaatggcaagcgaaattcatagcacatggttggttggcagttactgacatctctcagatttcttgaatattcacgtcctttttctggtatgggctctttttgttgcttaagttttagtgtagctggagttccaaaggaagatgcatggtgcccacttgcgtggtaaaacggtgcattgttctgtttgatcgattaagtcaaaatctacatgtgcaggggtgaatttttttaatcgtggag

SEQ ID NO: 94001 - DNA, 683 bp, Eucalyptus grandis
  Intron number 1 from transcript Egrandis_v1_0.016224m (loc us Egrandis_v1_0.016271m.g) derived from phytozome v7.0 (c hr-ID scaffold_8; pos 34629962 to 34630644 reverse strand)
ggggcagtgcaatttggggattgcttacttgcaaggttagggtttagtaatttggtagttgcgctgaccaattattgtctctttgagctcaagaagataaaggggatagacttttattagtgtttgatcttggtgattgtttctttggttttttttggttaagattgcatctggggacttgtgatgtgatgagattagaagtaacttttgcttcccgaccatttagcaaggcattattcctcaggaatgatggtaaacgtctaactagaagggcttggtgtaatttgattttcctggttttataaaattgagatcatacttgctgtgaatagaggtctgaaggattgcgaatggcacatcgactaatcgggttgctgctgagagtgattttccccatttccttgaaggagatggtttttaatgtatactgagctaagtgacggctcaagtgcatggtatggcaaatgggttgttgctttaatgctcagtgtgtttgtgaactctattatgtttcgaaattcccttctttctggggatcactctgctcgtgatctgcttttgttcttttatcgctttaaatcatggcttcctcttgcggttcagttgccaaagcttgttatccatcttcttatgattactctgatgcttgcagttgaacctgcaaaacctcaggaagctatcaa

SEQ ID NO: 94002 - DNA, 993 bp, Eucalyptus grandis
  Intron number 4 from transcript Egrandis_v1_0.010915m (loc us Egrandis_v1_0.007921m.g) derived from phytozome v7.0 (c hr-ID scaffold_1; pos 13818294 to 13819286 reverse strand)
aggtatgtgatcatgccagtgtcggttgtggttttaagtgtttgtgagcttttctgattgttcattgggtatcaattagcacattttactggtgttgttgatgaaaaaaaattcaactctttgaagaagcagttaaatacgatacatgtatgaggtcgtttacacaagatggttggaggaaccttgcatctgttattgttatttttcttctattattgctgtaataaccggttagttaggactttctctggccaaatctagctggttatgctgaaagttgtaggaacttggtcagatcccaatttctgttaatatcatctgtttgagttatgtttctgcttccttatggatttcggattcttgacctgtttggtagcctgtctttaaatgataacatcttacgccatgcccatcaatctgtttgaattcacgtgtgtgcttcactagctaagagtgacagatttgtattctgtatgtactgcagtccttatcttcgaatgtgtgaactgtacctaggacggttaatatcttatgagcatcttccatggattggtgactggcaggctaatagattaataaaaacatataaaaatatgcaaatagtctcagcattgtctgtgattttaagcctcagtttaaatgaagctcagtttaatgaagctttgatcaagttgctggagccatttcgttgattgttgttctttattgatttattctttgcctacgtgacgttgattacttaatctgttagataaattaatagaaagaatgtaattaaattcctatcaggtgcataccatatgaagtccctccttgatactacatttcgtcgagctgccattgaagaatattcctgttgaattgttttcataccacaatattaggagcttcttgcaattctctctatatttgcatttcatcagttgaattattgaccacatgataaattattatgaaactcgtgcagaacgattgggaagttgtaaaacgagg

SEQ ID NO: 94003 - DNA, 817 bp, Eucalyptus grandis
  Intron number 3 from transcript Egrandis_v1_0.026333m (loc us Egrandis_v1_0.026333m.g) derived from phytozome v7.0 (c hr-ID scaffold_10; pos 10048796 to 10049612)
ccgagagaggtatcatctgctactaccatcgtgattttatctccaccttttttttaccgacgaatgaaacaattagatgaaagcgaccaaacagatcagaaacagagagacagagagacagacagagaccacggcattatctgcctctctttttcatacggtctgtttttcgagatggtttagtccaagtcctcgtcaacttgtgggcagctacaccagttgttacatgaatttccagcctcacctttgttatccctaaaaccggaactttgctcacttgtctcttttgatgtttcttgcgttatgccattgcatcaaagctgtttctctcgtacagcttcatcagaaggcttccaaagggcctctgattggctctgaaaaatgtggtctttttggaatcctagtgaaacttcaaccagacctgaccttgggggggcttctgagttttgttcggttctcttgctcggtttgtccgtctccgatggttcttttatacccacttgtttagattcttcattgcacacagtgtccaacattccttttgcgagtccatctcagcttttgtacgttctctctctctctctcgtgctttccttttctcttgtcatgccctttttggtctcgggctctcaagtactgatcagacaaattagacgctagtttgagcccaccacaggttcaatctcatcattgctctctccctccttgtcaagacactttcagacagctctcctcagtgtgttgttgtggaattgagtgtttttggcgtgatgaattggcagcttactggagagacggtgggggaagtgaagccagt

SEQ ID NO: 94004 - DNA, 987 bp, Eucalyptus grandis
  Intron number 2 from transcript Egrandis_v1_0.013931m (loc us Egrandis_v1_0.007243m.g) derived from phytozome v7.0 (c hr-ID scaffold_10; pos 31716511 to 31717497 reverse strand )
gacagatcctgtaagtgctttaataaaatgtcatgaaaatggatttcgaaaattataatttgtccatttggattcttaaaatttgttttcctagtatgtcggttaattggttgattctgttaatagatggatgagcaaacttctcttttattgataggtccacatgtcttctatttacaagttcaccttcttaaacatattctttagcaaatgaataggtaagatcactttctaagaaaaagaatcaaggttcatgaaatggtgaatagaaggattgagtatgagggaattatcatccaatctggttgaaaaacaggtctgctgactatattttgatcgacataaatctgctggtccatgattagattgaaatgaatgagtaggaacttcagatataccttgttattatggagcatattttaatacagagttgcacaccatctatcaatatatgtaatcttactatatattctttcataatccaattatgggtacgatgcatatttgaccttccttgatgccaattttgaagagcgaatgcattacaaaaccgattttggtccatcgaagatcccaaatagatcattgggttttgatttttctcatggtcttgacctgagttcaattgcaggctcccagttagtaaacaatatacttatgggtcaattgccacgcagccatgtgttcttatgttatttatgcaatgtgtttggctaaaagctgattatgtttgtttccttaggtggcctggaaattgtgtaaacctcagcttcttggagttgaatgcaatagaattgattgctttttaccctttccttatatcaaactttctcatcactgtaataaaagtttctgtatttcaaatgtctgttctcagtagaacattagcattcatgctcactatgagtttccacttttattttcctgagaattgtttaactttcccaaacaggaataccgtgaacgagtctattctggcctggctaa

SEQ ID NO: 94005 - DNA, 473 bp, Eucalyptus grandis
  Intron number 2 from transcript Egrandis_v1_0.037727m (loc us Egrandis_v1_0.037727m.g) derived from phytozome v7.0 (c hr-ID scaffold_8; pos 8003243 to 8003715)
tgatctcgttcttcctacccttaagaactctctcagtaaatacatcaattcgccttctctcctccattttttatacgatgacaatatagttttgatcactaagaatttttaagaccgtataagaatttcgttatgggaaaacatatatgataaacattaacctagttcctttgctagattgactattttcagtttgttatagactaagtatggcaaaatagagatatgttgcatgcatttggatattggagatcggagatagctttcaacttttattatgctaagaagtttgtcaattttttttttttttgtcattaccttgcatattatagaacagaaaccacataacatgttccatcttgctgcttactctattcccttttttattcatggcttttgatttaaaataaataaataaataggaaattggcatttggtgtgtatggatttaaacagtcgggtagggttagagt

SEQ ID NO: 94006 - DNA, 744 bp, Eucalyptus grandis
  Intron number 1 from transcript Egrandis_v1_0.003967m (loc us Egrandis_v1_0.003967m.g) derived from phytozome v7.0 (c hr-ID scaffold_10; pos 1850325 to 1851068)
gcgttcaggtaatgatacttcgttgaactgctgctgatgttgagaacatggttttgattttcccttttgatggattaacctttctttctgtcgggggtcccggaaagttaatgctttgcgttgcttttggggaatgggatcgtgatgaggttgaaaagagctgcctgtttcggtgtctttagtaagttcgggtaaatgattgattgcgatttgcaaagagttggacccatctgtttttctaagtgctttgttgtatgaggcccataaagggcaaagtttcaagatatggaacgcttcgcagaagtgcatgagtgaatatccaatctagctaacttctactgttcagtttttcattttgtgtctagtgagaataggaagactctgcccctcctgagtcttctgcttttatatctaggctcttccattgatgaatccgatggcatttggttttccttttccatgaggaggcttttataaatgatgattgtgcaatctagtttatcgccacactcacaaaaatctattcaaaaccgatacttgtgttgatgtagattttccttttcttgccttgacatagctggttgggggtaaagaagtaggtaagtgggaaacctgcttatggtgtttttgataagtgtatatactttcttacagtctatgtgttgagtaaggtgattgtaatttcactcacactttacaaattttttatcaatgtcattaggtcttgggaacattcattgcaga

SEQ ID NO: 94007 - DNA, 695 bp, Eucalyptus grandis
  Intron number 3 from transcript Egrandis_v1_0.017979m (loc us Egrandis_v1_0.017979m.g) derived from phytozome v7.0 (c hr-ID scaffold_1; pos 39264585 to 39265279)
agaacggaactggtcaggcaagtaattatcaaccatcttgttacaaactctttttcaaattgtccaatttgcccatgcgtattgcaacatgagatccttaagacatctcaaaagcgtcttgactattccttcttttatcaatgctttggacaaagcttgatgtttctacaaaaatatatggatttttatggtctcaaggcataactattactgaagtagttgtgcttaggttagaattatgaccctacaagcacatgatcaactgcaaataaaacttgtcttaattgaaatattaagttgtaaggtatagttacctagctaggtatctggccttgattcatcccatgatatgtatgcacgatctatgtatcaattactaaaggcatttaccaaattataggatgatatggatgacaatgttgattggcctctattattgatatcctcaaagcaagttcaaatcactatgatttgtttttttcaagttagaagattggaaaatcatctaatgagaaagatataactaaatcttacttttgtctttgttatttggtggtactaggtggcgttttcttttggttttttggctattttcaacactgctactttaataactagatgacaaaattgacaagtgaaccttttctattacttgaacaggaagaaggttgggttgtttgtcgggtgttcaagaa

SEQ ID NO: 94008 - DNA, 588 bp, Eucalyptus grandis
  Intron number 2 from transcript Egrandis_v1_0.019887m (loc us Egrandis_v1_0.019887m.g) derived from phytozome v7.0 (c hr-ID scaffold_10; pos 37402296 to 37402883 reverse strand )
cattagtgagtataaatctaaatttccttattgagacaaaggaatgagaaaatataagcgcggagctagacatatctcaagaaaaccgtattgcttactggatccacaagtatcattaaacagctacaatgattaaatatttttgattgaactatatgatattgctagtcttacatttagggtttaaaataggacagactctcattggaatttatggatcatacaagaacggaataagtgcatttgtttcctagaaaaacagtaagtcaagttcagattagaggaactggtgaaaatggtcactaaatacttggatttttttatttatataaatgactaatgtattatgggaattcacaagtacatatagttctgaaggtaatcttcctctgtcaattgcccggactcgatccaaatgtcgagtgcatggaattacgtatcttgagctaagcttgacataaccagaaataaaaccaggatcggtgcttgggccgaacataaaatgtcgagttcaagactttgactcagttacatctatataagccggaaatttcaagttctaacaactgaaccggcgtttgaacaggc

SEQ ID NO: 94009 - DNA, 649 bp, Eucalyptus grandis
  Intron number 2 from transcript Egrandis_v1_0.018067m (loc us Egrandis_v1_0.018067m.g) derived from phytozome v7.0 (c hr-ID scaffold_8; pos 6195230 to 6195878)
accgtatcgacactcgcgtccccattgaagtcactgtatggatcccttatcaaactttcacctcgcttgagactttctctgagccatacgatgcatcgtcatgttgttacaagtttgttgaattttgttaaatgacacttaagttcagctgatagcagagttcaagatgcggcacggtgttgttcaagggttgtggaatttagtagtttagtggcttgagttttcgttttgtgggaatcttttacaagttaagggtcaacaagcatggaaattattcgaaatcttcctttgagatgaaagtgctccggggttcatcctgaatttatatacgggaatcacatataaagttgttcctggactttatacggagacatttgattcttgacatattgtgaaatatgacaagtacttggaatacttcttttatttgctctcttctgtgagagattcaagaaatctacctccgttaactcaattccttgtgggttttttgtcgcattgagatgcatgataattgagggatctagacacaaaaagctaatgacaaaaataattttctggatcttaacatgtaagatcttgatgttgttgttctgtcatgtgaatatgcacagatcggagagctaaagaagctcgttgaagagggtaa

SEQ ID NO: 94010 - DNA, 778 bp, Eucalyptus grandis
  Intron number 1 from transcript Egrandis_v1_0.004621m (loc us Egrandis_v1_0.004621m.g) derived from phytozome v7.0 (c hr-ID scaffold_8; pos 56665391 to 56666168)
gttattcctccaaagaggtcattcttctcgttccctgaaaaagcaaaaagaaagaatagagtttttctttcatgaagaatactccggttggaaaaaaaaaaaaaattcaggctactccttggtataattaattcgaatatagttcctagatttttttttttttgaatgaatgaatgagtagctaatacaatttttgaaattccatcggtgaaatggattgatagaaatgacacgctttttttttttttcaattgctttcgattatgtgagttgataaaaaacattttaatatgaatttgaaagggatatgtttgtttagaatttgagaatgggatatcactcgaattagctaaatgtaaaaatgcatagggaagaaaggtagaaatactaagaggatggttaaatgtcgtgacgtttgccattatatatcagctaattagctagataaatttccagtttaatttattcgcaaattttaaagtaatggaattgttataaggcgtgaaaattgaaggcttgtgattaggaaaatatagagggaagcgaaaataattgagttaaatgaagagatatgcggagtttaatttttaccattctatcgaattgtttttttttttggtaaagaaccattctatcgaattgtttgtttgcatcttttcctatgtttgatcttggactatttattataaccaattgaaacttaaaacaaaatgtgaagctaaggaaatgctttcatgatgatgatttggttactgtctttctaaatgcagaatttggc

SEQ ID NO: 94011 - DNA, 746 bp, Eucalyptus grandis
  Intron number 1 from transcript Egrandis_v1_0.021336m (loc us Egrandis_v1_0.021336m.g) derived from phytozome v7.0 (c hr-ID scaffold_8; pos 36965898 to 36966643)
ccgggaactccgccggcaccgtgaccgcttactacgtacgtatctctatcgttttgcatcgtatcatgcaaactttatgcagggaacgaagtccatgtacgtacgagcccgttttggctgaaaaaacgataagttcttttcttgcgatttcggtttgtgattgttttagattaccttgttctagactgctcctctcaaaccagcgtatgatgatcacccccgacttctttttctcctttgcttgcgtatctttatgagtggacgaaacagttttcttgacttcgtgttattggcgttttgacatcattatggtcggctcacatgagaagtctttagaaggcaaaaagcagctggtgatagagaaagcttggggaacatcatcgagtagaattaccactcgcattagaaagtggaaccaatttgaaacgtacagctctggcgttttggtgatgaaaattttatcagatgaaatacatcggaccatgtctatcaaatgaataccgtgtctccatttattacagtgaaaaaaacaaaggaaaatctcttaaacattcctaaacaattccttttttcagtccatgcaattcaatgaggaggtgaaatatattttaaagcgaatcatctcttactgcgacttgtcgatagcttccggctcttcttgctctccgaccatggtgtgcgaattgacacgggctaactccgatcgctgtgacttttgcagttgtcttcgcaagggccaactcacg

SEQ ID NO: 94012 - DNA, 859 bp, Eucalyptus grandis
  Intron number 1 from transcript Egrandis_v1_0.006963m (loc us Egrandis_v1_0.006963m.g) derived from phytozome v7.0 (c hr-ID scaffold_8; pos 8082567 to 8083425 reverse strand)
tacgccaacaaggtcgggccgtttcacaatcccaggtaaacaaaagaacccgatctcggggctcgctcctaccccccgaatctccggtcggttctgtgtggctcggtcgagacgtgtgtgttgaagcggcgtttgtttggatctgggcggggtgttttctcgatttgggtttttgggttcgggccggagttggatccgggtgagtgggtttggctcggagtggggtacggtgacggaattgagagcgtcggtgcgtgcctggagtggtaagattttggaaattcggtgggctttctgatgatttaggaaaatggtaatgtagatgctgttttagtttggaagtttgaattttggtttcctttagaggttttgcgcagttcgattgcaattgatacttcttcgtgtcgtagtagcagcggtggtcggcagcattactgcagttaccggctctttttgatgtagtggcggtgtcttgtttgcatcgttagatcagtgaaatatttctggaatgtttaagttaaagttgctttcagttgtttatccgattttagagctggatctagtagcatgggtatgttttttcaagccatcactgacattaagtaacagctagatcagctacgagaatcttgttaattctcgttctttgttgtgcatcgagtttttgttgagattcaaattacctttcttcgggtcagtgaatttccacatccagctctatacacatttcttatttctagttcttgtttgaaggcagtgtaattgagtttgaagaattttcttcatgtcatatgagctaatgccagttgatccttttcgtgcagtgaaacttaccgctatttcgatcttccattctgca

SEQ ID NO: 94013 - DNA, 656 bp, Eucalyptus grandis
  Intron number 1 from transcript Egrandis_v1_0.003163m (loc us Egrandis_v1_0.003163m.g) derived from phytozome v7.0 (c hr-ID scaffold_8; pos 423432 to 424087)
caacaacgtcccccacctcggcaacatcatcggatgtacgcctcctgttcctctcgatttctttccgttgccggacggtttgttcgcgatttctttttctcctgcgcatttgatcgagcagcttcagcgcgttcttctggtttttttattccccttagttagagcaatcgcgtttggctcgatagtggcgattgacctccgtattctgcattctttccgcgcgcgctcttcccttgctcgatattattggccgagttcctgcggtgagtcgatcgatcggcgtgcggaagaaacgcgctcgaatggaatattgggaaagtagcggaaaagagtcgtgcgcgtgcgcttgttttgttcttgcgagctgtgatttgtatcttgtttcttttggtcgatgtgtttctttctcctccctctctagagcatttgtaagctcttttgtaagtcgaacaattggcatgcggaagaaacgtactcgaaatgaaatgtgaatgaaatgttgggaaagtattgaaaaagagtagtgcacatgcggttgttttgtcattacgagctgtaatctgtatcctgtttcttctggttgatttgtcgtttttcccccctcctctggagcatttgattgatctactttgtcgggacaggtgtgttgagtgcgg

SEQ ID NO: 94014 - DNA, 811 bp, Eucalyptus grandis
  Intron number 1 from transcript Egrandis_v1_0.029355m (loc us Egrandis_v1_0.027068m.g) derived from phytozome v7.0 (c hr-ID scaffold_1; pos 39437394 to 39438204 reverse strand)
ggtacgtattcctctctctctctctctctctctaaagatcttcacttgtgtggaccttgtttagctgaacgatcggatgcactgaaatgacgcgttcaatgctctcatagaagcgtagttgatgcacatggccgcgaagaattcaagatgcttcgtttgatttctctttatctttttacccattattatgggcttggtatgagattgtgcggactgttgggtgttgaaaataatgaggtttcgcgacgccttttggaatagtatatctgattactgagtaaacgcggctggctagttgggtttgcattgacatatccaggcgcgatttcgtaacttgtccgggtattctgagggtaacagagattctagagattctggaataggagaggaaagatgaaaattgcactaaccaacctgttttgttcttcttgattatcgttggtttgctggaacttccttgagctgaatactgcattcgacggcattagtagaaatgattaaagttatgaattcgtctttgaacttaagcattcgtaaaggaaaataatgtccatctgtttgggaagtagttttctatgttgtattctcattgggttattttttttttttttttgagaacttctgtttctacttaggtgtcagtctatagtaagtcctaggctcctatttaatttaagagctatgttatgctgtagaaacatgattttgtagcatttgcagtcactagcttatactaatgtttctgttccgattgcggcgttctaacttatggcgtttgaatgttaggggcttataagtacgtgtcggagct

SEQ ID NO: 94015 - DNA, 864 bp, Eucalyptus grandis
  Intron number 1 from transcript Egrandis_v1_0.023069m (loc us Egrandis_v1_0.023055m.g) derived from phytozome v7.0 (c hr-ID scaffold_10; pos 20864542 to 20865405)
tgtactctccgctcgcgcctcttctcttcccacaggttggtctgctcgcgtctgacacttcttccttcgccatctccacttcatcttgttagctttacaggattagcaccgttgcgcagagccccagagaatcatctttccgtgagttgcccacttctctcatgatgacactgattactgggtcgtgtcgaaatgtggatgggttcgcgttggaacgttgttgtttattcgtttcttccatagttgaattgggtctttttctttcttaaagatcgtctctttatttttgtttttctgcaatgtatattgttcgcgtagattgaactcggtggtacaattgtgttgtcgtagcttagtcatggaagctgttatcgcccacctaaaacgggaataaaggagaaaaaaagaaaagggaagaaatgccattcgattcctgggctttaagtgtgagcggaaggtgaattggataaatccctcgggccccttgtctttcacaatgtgctttatccaaaatggagttgatagttagtagagaagtaattacttcatctagctagaattaagttgataaaaggaaaaaaaaaaatggaaggggaatgtaaaactgtcgattttaattatgagggaatgcttatgttggggaaaaaatctttgaaaggagaggaatgtgaagagattaaggttacgttgaatggaaatggagagagagagagagagggagagagagagtcacttttttctacctcttagatgaaggggaatggacactatgcttcctacagtgtagaaatgattataccgtttgattttgtgcttttgattgttacagatttgcataaattgacaggtggctgcagaaattct

SEQ ID NO: 94016 - DNA, 700 bp, Eucalyptus grandis
  Intron number 1 from transcript Egrandis_v1_0.016343m (loc us Egrandis_v1_0.016343m.g) derived from phytozome v7.0 (c hr-ID scaffold_8; pos 48938540 to 48939239 reverse strand)
ctaacaactcattgcttcaggtacgtctctcattttcccacggtgtgcacataaaatctcggattaatctgcatctaaagattgtttcggtgatgatgtaccgcaatataatctcttcattctatatcaaactagggttttttgttttttaatcaagatttgaaattctatatacaaaaacgccattttattctaccctttgaggccaagtaactattgattcaagaattcaaatgatcgccctaattcgtagacacatttttaatcaccaagatttctctcgaagaagaatgtacacaaaaggggtatactaaagtgcaacttatcattcaagaattcgaatgatcaccctaatttgcaaatacactttttaattaacaagatttctcacaaataagaatgtacacaaaaggggtatattaaagtgctagatctcgcaagatcgcaatatgggacaaactcattcccgtgacactctaatttggattaatatagtaaatatgtggaatgcataagattggtcattctatatgaagtttccacttttcaatcgtcaatatatcattgtacgagaatggaagatataggtaacaaatgagatttatctctttgcacatgaaaaaactaaagatgcaaactttctatctctatcttgagttaatgctttctccttttctttttgtagagaaaggtgatatcg

SEQ ID NO: 94017 - DNA, 450 bp, Eucalyptus grandis
  Intron number 1 from transcript Egrandis_v1_0.046091m (loc us Egrandis_v1_0.046091m.g) derived from phytozome v7.0 (c hr-ID scaffold_8; pos 10048854 to 10049303 reverse strand)
cttcttctggttaattataattactcctgatgctcctctcgcgtgtagtgatcttccttctataatgaattgaaatcgacggtgatttgtcctcctatgtttttgcataaaaatggtaatatgcatgtcttctagtgactctatacaggagtttgcatgaccatgatctcttgcatattgcaattgaagaacgatttaaccctaaaatctccttttgcatctttcactacttaccaacaaaattcttgtctaaacccttttttaaacatctaaagaaaaagggttaacaaggaaagttgatactaaagcaccaacgatgatttgtgtttgaacttgtcaattcattttgcagcataaattttgatactacttgttcgattttgacttttgaataatgtgtgcgttttttgtgtaggatcggggttcgcgtcgaagaagagctacggatct

SEQ ID NO: 94018 - DNA, 921 bp, Eucalyptus grandis
  Intron number 2 from transcript Egrandis_v1_0.047023m (loc us Egrandis_v1_0.047023m.g) derived from phytozome v7.0 (c hr-ID scaffold_8; pos 44276411 to 44277331 reverse strand)
tgcagagtggagaggaggtggcaataaagctggtaaatttctggagctctgtggtttagatgatgggaatttgttgcctgatgcggttcatgaatatgatttttgttggttaatggtgcttggctataagaacttgcattgtggcattgatagcatgaatgtcatttttttttttaaattttgttagtatgatatatattttatctttcttggggagatggatgtttgattatatatgttatgctttgtgaggaaatcaataccttttgtcagtaatttggtgtgggttctatatgttaatccgttttctgatttttcccctcttgcttggttgttcgttattagtagaggctgtagcaaattaagcccgcaacttacctttattaagctctgtttttgaatatgtacaatttgcttttctctaatcatgttaaaattgggtcttaaaaaagtttcagattaaactgttcaattccacccaaacatcacacttattactgatgatgaacccttcttcatttctcagtgcactgatggttattgcagtgataggtgtccttcatcttgagcatcttccagtgtcactatagaaaatgttgtctcatacattctgttgttttgagtagatagcttctgagaaaactatcagtccaactgaagctgctttctcgagcatggtgattagttattggtatagattgatgagtatgaattcacttagctgatttctaaaatgaaccagattttatttccatcatatatttcctcatatttgatgttccctctctctctttgcatctcttcttgttgttattgtgtgagaattgtagacttatgtaaggaattaatttgttgtatgtaatgttgcatggaacctggtattcaggaatctgtgaagactaagcatcctcagcttcacta

SEQ ID NO: 94019 - DNA, 753 bp, Eucalyptus grandis
  Intron number 1 from transcript Egrandis_v1_0.033100m (loc us Egrandis_v1_0.033071m.g) derived from phytozome v7.0 (c hr-ID scaffold_10; pos 9765908 to 9766660)
tttgcgggtgtagcatcatcaagattcacatatagttttgcatcttcctcttggggtaagattcctaaagattatacttgaattcatgataaaatcgtgggcaagtgcaaaagaaagctccgtaggaagtgtgagaatcttgatgatgctgcatcggcaataaaacgactcttgcaaagtacagcacgaaacactcgctgtctcacgcctccccatttcccactttaggccttaacgaggagatactaacagttccctttttgcatcagtaccatatatatattaaaatacccagaaaaatatcagggtatgatctatttgcattccgctaatttttttctactgtttggtctctacttggaggaagaaaccctaaagattctataggctgttttatagagcaacttggggctattctccgacatttgcaagatttatttttgatcttctgaggaaagaagagccttcagtgggaaaatggtaacttcttcagcagttttctttaacttttttcattattgttgtccttgttagttcttgaaagtgtccctgactagtagtttcttgaaatgaatgcagaaagcacagtctttctgccactaaagaaagaatatgcattgtgatgtgtgtagaattgtgattcaggcgatttatccagattaatatagaaaatgcattactttcgagagtttttcttctatcatatattgattttggtctttgttacagatcactgatttctaggcgatacca

SEQ ID NO: 94020 - DNA, 946 bp, Eucalyptus grandis
  Intron number 1 from transcript Egrandis_v1_0.022448m (loc us Egrandis_v1_0.022448m.g) derived from phytozome v7.0 (c hr-ID scaffold_10; pos 811722 to 812667)
tcttgcactcgcagagtcgaagccacggtctggaggtgcgcattttctttatcactctctgttttacgagcttggtttgcgacttattctttgcgggcattaagagtggttcttgccacatccattcatgtgatctggtcgacgctcttgctagcctgtgttggcagaaagaaactgaagtagacatgctcttgctttttcggttactacccatgattgtatagagaagcttccgcatgttgacgtgcatcgctgatgattttctccagcaggagttgttgttattttagagtatcatgtagtttccaactgctgcacattcgcttatccgacaaaagaaacaaactgttgcgtatttcttcattttctctcgttttccatggagacggtctcgcgattgttcactctaagtccagcttgatttgaaatattttcagtggatttgtgatgatctgttttctcgatttatttagattagattttgtaataccgctagtaattgatggttaaatgatttgattgcacgaattgcacgaggtaaagggttcaattgaaaagaaaaatgcaagttaaaaaggcagggtttctgggctcgatatcagagttagccccgctggacaccaccgatgtcatatgtctccagaaccaaaaggaagttacgggatttatgatgcggtaactatgattatgcctcgccacatcagcacaagaggcaccgagtaacgatcattgaaatattaaatgctggaagaattcagtacagatgatttgcatagttgtatctgcatttcgatgaatctcgtactttgaagagtcattgagttggatggaaactatgaatttctttaaccaaacagcagcctaattcactccttgttatagtgaaattatggattaaaaccatcttgtttgtacagttcattctctgcatagaccaagtcccagc

SEQ ID NO: 94021 - DNA, 926 bp, Eucalyptus grandis
  Intron number 1 from transcript Egrandis_v1_0.050202m (loc us Egrandis_v1_0.050202m.g) derived from phytozome v7.0 (c hr-ID scaffold_267; pos 11276 to 12201 reverse strand)
ccggtcgccgaacgttggactccggccaccgaacgtttgtcgttgccgcaaacgaatttttatttcagaaatagaaattttaaattgttatcaaacatgtttttttactcagaaactcgtccatggaatagaaattgatttcttttctaaaaattttctcatgcgtgcccttaatgtgcatcaacaccaaagttgaggggagtaaaatgaaattcccatatgtttatcattgttcccatatgacgtcaaacttgttagacttatgcagttgcattgtcacatgtttcaataaaacatacgtatttaggcttgatccagatgttaaagccccacaagttttgacttcttcaaatactaggagttcaccaaaaatgacatgaaaaatatattgaaacactagattgatacgtcaaagtccataagcaagttggcaatctctctagttcgtggtagttatgaaacaagctatcggttaccgtccacaaagacagatccgaagcttcacttcatgaaaacatgccatctgtcgaaacaagaacatcagatttgacctttttgttttccttttgccggtggaagattgagctgaggaggtgagctaacagacaaccaatgaagagacgttctgtgtttctttcctaaccgtaccgaaaggccagtcaccaacttatcatcacagccctagattttatatgaccatctcttgttatataaactcccatatccttcctccatttactcggacataatcagcaatccattcctctccgctcattgattttgagcccttgagcctatcacagcacaatatcctgactccatataccaatatggcttctttctttaagagcttggttctcttcattaccctaattttctcaaccatcaacatgagtttcggagctcgtcatttgttgcaaacaact

SEQ ID NO: 94022 - DNA, 865 bp, Eucalyptus grandis
  Intron number 2 from transcript Egrandis_v1_0.013332m (loc us Egrandis_v1_0.013332m.g) derived from phytozome v7.0 (c hr-ID scaffold_10; pos 11744323 to 11745187 reverse strand )
ttgctgtcaaacagttaagcagaagaggactgcaggtaggggtggtccttttcgaagcggagatatcattcgttcggtagttaatgatatcatgcaacatcttgtagcatcgagtttgcaaaagtaaaattctttcagaaatgtcagattggcattgtctttgcttgaagttgttcctgcgtaatttgaagaatttgcctgagggaacataatatgtctaaactaggagttacttaaaagcctacgtcatatataaagcgtcggagtttcttttttgttggtcttttttgaattttttcgagtatcatatcatggtattatttgattcctctgtatttttaggcttaaaatttctgtccaatgtccttcaagactgaactagttgacagtttctgacagttgcacagacagaataatttcttctatagatgctaaagttggatgaattaaatttgctactctgtctaaaccagttgggcgagtagttaccataatatagatgaccttttgtcctaaaaatttcacaatcataaagttagcagaagcgataaaaaaagaactacttaaatgttgggacatttgcctttctcaataaatgtggttgagggtagttattctcaacttaggctttctcttaagtttcacctgtacgcaacatggaaatcttccctatagttaattttaggactgtctgattactgaaagattgagtaatgcgttgggatatgtcaaacagattatcttagaaaagttgtgccttattcaaaataggaagtcgtctgacaaattcttaagatacagtctcttgctcatctcggaaatttcatttattcccatttcacttctgcttgcagggtcataaaga

SEQ ID NO: 94023 - DNA, 875 bp, Eucalyptus grandis
  Intron number 1 from transcript Egrandis_v1_0.013332m (loc us Egrandis_v1_0.013332m.g) derived from phytozome v7.0 (c hr-ID scaffold_10; pos 11745543 to 11746417 reverse strand )
gaggaaagggaaaaacaaaaagagcaagaacagaggtgactagttatattgagtttctttctatcctgtgaaggtagatggtttttgctttttggttttggtccgaagtctgtatatggctgaactttatctttggcttggtgtctcgactgtataatgagagacctatgatgattcattgctgggtttcttctggagttgtccaggatgaaccgattgtttcgaggttagggtcatcccattaattcggctatcagttgaaaatatttgtttcatatttccgggagtatgttgtgcttagatgaataagaattcggtttcgcgaaattcagatgctgtgaagctgaattttcaccatatgggtgcagcgtcctaagtataatttagtatcatcgtgaagatgttcgctcttattttaaagtttgtgctgtccctatgtgcctcataaggttttgaatatctgcggttgttatcattgttttccctctcaagttgggctcgttttagcatgggttgccgaaagagatcatggccatgatctatggtattcttagttgacttacttgttattggaatatggttcttatcctcttttgtttatcttggatgaatgttccgtttctcatatctgtttaaacctgcgccttcatttgtttgaaaagagaaaaaggaaaactttgtcaatgcaaaattatggcttgatgtttgatgccattccagatggactatggcaatactggggtacatattctgttaatttctagtatttgaaaaatgacatgttaaatgtggaagtttaattacccattactcgcttgaaggtttaatacttctgataagaatgatctaaatgcagggcacggacagtggagact

SEQ ID NO: 94024 - DNA, 1008 bp, Eucalyptus grandis
  Intron number 1 from transcript Egrandis_v1_0.034359m (loc us Egrandis_v1_0.034359m.g) derived from phytozome v7.0 (c hr-ID scaffold_8; pos 34410977 to 34411984)
cgtgcgtgctctttcttcaatccgaggtcgctatggcttagcttcgaagttctttcgcttctgctttggagtaaagtagggcttttgggtctccctaagtcttctcttctctctcctttctctctcgtctaagcaattgagtgttgacgtaagagtcttcgaggcgcggcccagcccattatcaaataatgggtctgtagaatacataaaacattttgaggttaataccttaaaaaatcacaaactggtatatttatgataaatttatcccaaattatttttttgaccgccaaaaaccccaaattagtatacttttgacaaatttaccccaaactgatacacttgtgacaaatttaccctctattaatttttattaaattttaattaaattaaatgacacatgacagtttattacactccgtttgtcacagtttataatttttgtgatttttttgtggtattaattcaatttagcggaaggtataattatcaccaatttaccagttttgagttttttgtaatcaaataaattagtttggggtaaatttgtcataattgtataagtttatgattttttataatcagtcgaggtaaatttgttacgaatataccaatttttaattttttatggtaaaaaaataatttaaaataaatttggagattttcagaatattaacctaactttttggagtcccgctaaagcacgcacttcttcccccacctaaagaaagaggagtccttactctggcattcgcggcctcccctttgccaacactaatgaacatataaatgcatcttttttccaaccaaaatccaaacgcgagatccgttcaaccgcgacgagcaaacctctcctcgccatcccaattcacagatcaacccacacattgtggaaagcaacaactgtcacgttctccccccagaaaaccaaccctataagagaccggcctccccctcccaatcttcccctcaggctgcattccaagcgtgattcggcgatcaatctcg

SEQ ID NO: 94025 - DNA, 881 bp, Eucalyptus grandis
  Intron number 1 from transcript Egrandis_v1_0.037329m (loc us Egrandis_v1_0.037329m.g) derived from phytozome v7.0 (c hr-ID scaffold_1; pos 13806736 to 13807616)
aaggaaagccatagccatgttcgttcttttcttttcttgccagctctttctctcttttcttttcttctgttgcagataatttgagtgaagtgtaagactttatatagagaagaactcctcttcgtttcctccgataattagaataaaatgctttgatatgctttataatgtccatttatatgctttgtcgattctcgatgtctatttctaagacgctttcttcgatccgtttctccctgttgttaatgtttatctgtattcatgaaaacagtgcattctactggacaccttgtgagtaaattcttttccctatttttgtaccagaagtcctaaatcttgtatatgtaatgcagccaaatcctaaacctttcgattaatttgatttattcgttcttttcaaaaagtggaaatcaagtcctttcaataatcgtatgacgtccatcattatttgccgctcgtgtttacaatgatcttcgttgatctcaatattcaattcagatttatcagatcttgtgccattttcatttgtctctgacgatacttgttctttgttgggctttatttttatgttcttttcaacttcgctaaggttctcatttctgtctgccttaaactatgatcttaccagagctctacttgaaggtatatgatctttgttaatttaatcatgatgaacacgttgggtttttcaaaatcaatgacatgagatgtattgtgtcatacctattattcgaccgacaaactctttctgggtaccctttacgagaggttagagtggattttgaaatcaagttacaaaactttgatctcaattaacttttgactattcgcaatcgatgagttcgaccagagtcaaggcgtttattcaacaaagtgcaaac

SEQ ID NO: 94026 - DNA, 415 bp, Eucalyptus grandis
  Intron number 2 from transcript Egrandis_v1_0.050649m (loc us Egrandis_v1_0.050649m.g) derived from phytozome v7.0 (c hr-ID scaffold_8; pos 43691718 to 43692132)
tgaaaccctggccagagttgctggcaggctatgtccgtgttgtttcctagttcttatgatgccgtattgaatggatcttcaattttggttcctgaggtggctaggctttgttaaaagcatcaggaggagttgctgaattctctgtatggcggatgattgctaattgctatgaatgtgtgtgtgtgttttttttttttcctgtgggtacttctgtctgtgctaatcttatgcaaatgaatatttttgaagcttacggcagttgtaagcttttttccctcggtggttttctgtgatgatggcaaaatgctcgacaattttccctgtttggtttttgtttggaagattttcttgactgtccacgctgctttgtttgaaaatggctacagcgaagaggaagcagataagaagatctact

SEQ ID NO: 94027 - DNA, 876 bp, Eucalyptus grandis
  Intron number 3 from transcript Egrandis_v1_0.021290m (loc us Egrandis_v1_0.021290m.g) derived from phytozome v7.0 (c hr-ID scaffold_1; pos 16327736 to 16328611)
ggaacattggccaggtatggcaattgccctctgttggtatctatatttctttatataccatcctactctccaaaagaaatgtaatttcatccagagactttggaatttgacgctgtgaatttgccaagtccatgctcatcggtgggcttaaaagttaatttgaattgatgcagttaagtccatgcttatcatttgcatcatgttgactttagtgacttttgatgtttgattaccattttatctatatttcttgtcaaaagttaaaatgtgcttattatgtgtctattttagatttcaccccccattccctacgtttatagctaccgctacatgaaactttctgttgcaatttggtctaaataattgtgttattaagagcaattaaaggatgcgtaactttctgcttacaaagggtctgattatccttgctggtttttctttagcctctaagtgcagctgcagaacataaacctattgcctagccaataataattatgataataataataaacctaccctacattgttctggactgggattttatgaatgaatttattactaattagaatctatgatgcaagaggaggcatggtctccctagtactgattgtatctctgtttcttttttatcccttttttggcttttattggctctttcctctgtgttcatgtcaaactattccgttgcctactgcgattaattctggattaaccacatgaaatctgagaatattagaattaatgtctggcaaaatgtgaaagttcatatgattctagtcagtttactcttgtatattgggctttccacaactctgtaaactcaaacattatgtatgaacagataaaaattggtgatctggggttggcagctgttgt

SEQ ID NO: 94028 - DNA, 1023 bp, Eucalyptus grandis
  Intron number 3 from transcript Egrandis_v1_0.011096m (loc us Egrandis_v1_0.011096m.g) derived from phytozome v7.0 (c hr-ID scaffold_1; pos 18195773 to 18196795 reverse strand)
caattaagattcagaaatcgttccgaggatatcaggtagatcttctatgtcgtgcgggatttgtttttattttgctttgattctgtcaaagtcctatctgctctgcaactgctgcgcttctgatttggcaagccatataaacaagaaacctttttagtgggttgctttgaatagaaggatgcttcttttccatttgttctatttttaaggaacttaatatagttgttgctgacttacgtggaaatttttccaagttcataaaaggaaaattgtttctcgctgtgaaactcttttgaaatgcctgctgtgtagctgtacattcaattaatagcaatgcctagcatcagctgatcacaaacaatcagctagccagttgcctcgtggctcagatgttttttctattttaactctgcaaaagtcatacttgatagaaccattcattcgcatcactattttggtgctctctaagaagagtgtggacaaatgtttgctaagtgtaggtttctatgcaagcgaaacattttcggatcctatgtggtagcatctccatgtggaaataactctgaacactgccacatgcgacaaacactactttggtcattttatcttgagtatggcacattccttgccaaatgaagttggcatggttctgtagggaaattaaatactaaattattttctaaagctctaagacgtgtttcaaatgaagtacagtagctggatcatcagatatcagttcattaattctaagagaatggaattctgactatgatatccccggagcatctgatgaagtcaaagactaaaaggattaacttggttcagacaccagatactgaagttcttgatatgaaaatacagcacccaatgaaactatttgataaagttgttaagatgagtgccatcatgaattttcttatgaatagagatgtcaagtgaacctctgattctggctttggaatgagtcttttctttaagtgtgtcgttgacattgtcaatatctatttcaaggcaagaagggca

SEQ ID NO: 94029 - DNA, 696 bp, Eucalyptus grandis
  Intron number 1 from transcript Egrandis_v1_0.011096m (loc us Egrandis_v1_0.011096m.g) derived from phytozome v7.0 (c hr-ID scaffold_1; pos 18197267 to 18197962 reverse strand)
ctttctcctcccgcactggtccgcttcattcccaggtagttcccctctctctctctctctctctctctacgtgagatctgctctttttgccctcgccttcgtcggtggttgtccacctcattgtctcttctcctcctcctcctcctcctccttctgcttcgtaaactgtcgtagctcgttccgtggcgttaccttttcgcctccttgttctgcttcctactgttcgacccatttttcgcttttcccggaagctgcgagctttgccgtgtcggtgcagtcccatcgctacaaatctgcgtaattcgatgagggcaatccgagctcagttttttccagctgtccagcgattggtcttcggtcgctctaccgaattggagtgtgcttagacagtgtttttttttggtgggtgcaattcgcccataggatccgttgtttctcattccggtttttcttgctctgcgtgccttcgtgaaattcgaaggacttcggggatggtaatctgggttgggatcttcgtatctcctatttatcgtgtcactcgagagtgaaaaatcgactctttgtggcaatttccagatttagatttctgggcagggactaatttgcttggttgactttggtaataatgctggttaagtagagggggcaagggggggttttgaattgctttctcaattgggttctgattatcagcag

SEQ ID NO: 94030 - DNA, 1044 bp, Eucalyptus grandis
  Intron number 1 from transcript Egrandis_v1_0.021313m (loc us Egrandis_v1_0.021313m.g) derived from phytozome v7.0 (c hr-ID scaffold_8; pos 1373873 to 1374916)
ctgggttctgttcggtcgaggcgtttgaagtgcgggtggggaaaaaaatcgatcctttctgcttggtttggaaagtcattgaagggttgtggtatgttttggatagttaacaggagatagtgaagtaattgatcatcacttggcgtgtgatgagcgtatccaaatcattggatcctgggtttttgacccgaagctgagtttgcgcggtctctatcgaaacaaatgtcgagtgttcgcatgtaactgccttcattgaaccaagcatcattttgaggtcgtctttcacagggaattgatttgcctttctgtttctggctgattctttagctattctttgagaaatctagactttttgttttccgctcattatgtggacgtccgtcctcaattcacaaagcaaaagcagtttataagtcagttcatcactttctgggatatcaggtggggattcctgtttgaaattttttgggcttggccaagttctgaacttgaccaagtggcgaatgaaataggagttcgtgtcggttagcctgtgaccatagcgcttgcaggatcatcagccgtcttctagaattcacaacggcagaatgttctgcaaatgaactggtttgattctcactgtcatcgtttttagccttgaaatatttaatatgggcgtagacaaaagacagcaacagcaattcactttgtagcttttaagaagcttcataggcatagatgacgttttgtccagaggcttaagctgtcacaaatgagttcacaaatccccaaatgtttaagctgtgggaaattagtccacgttgttgttgagtataatatgtctttgcaagtatcatttagtcctctgctaatttatataagttttgaatggttgatgccaaaagaagctgacatgcatacaaaatgaacgtggtctttgggctactgattagttttaaacccttcatgtccagttaaacgtgtcataaaacatctatcattgaggcacaacatttcccgacaattgcagagtgctgtctctggtctgaacagagggctcgctgc

SEQ ID NO: 94031 - DNA, 916 bp, Eucalyptus grandis
  Intron number 1 from transcript Egrandis_v1_0.022930m (loc us Egrandis_v1_0.022930m.g) derived from phytozome v7.0 (c hr-ID scaffold_8; pos 62339686 to 62340601 reverse strand)
tcgagctccagcgaggtggcaaagccccctgccaagtaagttgttttaagttcttcctttttgcttgattagcaactccaatttcaaagttttttccgcttatgatggtggatcctaaggcaaaagataatttttaagctgaatttgtgcgagctttctggggagagagaagagaggtcgtgttcgtttgtaagccccatcattgcatgaagatctggttttgcagcagagagagagagagagagagagagagggtttcctcttgttcttgcataattagaaggagttggtgatgaccatgacctgcaatctggtacgggtttcttgaatcatgagacaacatcgaacctattaacctaattcatattcctcatcaggacaaaaattaaggaaacgggtctcggctgcaaggaaaaaattctctcttcttccccctccttttcttggttgaatttgaatgattattccacatccacatccgttgattatctccatgaaagaagttgattttcgcaagcatatttccttttttttttttgttgcctttttgcaaatcggcatcaattccaagcctcacagaaagcagtcctgatagaattgacgtctgtggctttggctgattgtcggggagacacgggaaaagtacaaaacatttggaatctttgctttttctacttcttttcccctcctaaaccaccaaataataatccaacaaataggccgaaagtaaaaaaggaacacctccatcgaatttacccgatgcccattatcgacacatccatgatgttccgctcaagtttgggattttatccgaatatagaggtgaaaaaatatttatattttgcaaaccatgtgacgtgggcgctttgacttttccacagggcgcaagtggtgggttggccacccgtgcgatcgt

SEQ ID NO: 94032 - DNA, 732 bp, Eucalyptus grandis
  Intron number 2 from transcript Egrandis_v1_0.048221m (loc us Egrandis_v1_0.048221m.g) derived from phytozome v7.0 (c hr-ID scaffold_8; pos 38264491 to 38265222)
tgacggcccttggcatttataggaaatatcaagaggtacgttatacaagaagctaggccatgaagcaacggaatcctgtttcagtttaggattagcttatatagacttcacgaatgtcttcaatgttggttgaagatttctgcagctgatcgaccaccaaagcctaaggacataaattcggttctacgtgcgttcatgctaaactacatagcgacagatatctagttcatcgtcacatgaaaactttctacattttcttagttaataaacagactattttgacaaggcagtgcttgcatgcatcgaattagctttcatgcatattttaacaatatgtgaatggtgttcagactctatgctgaagagcatatcatgattactgttccttgtatgtagagtggttttgcagctgcaaaggtttatttcatgttgaaagaagatgcttgatcgatagtcctgaccgagaacttcgaccataaagagacctctttctcagggaaaaggcaacatgccggagatcgacctccttgtggtaatgctcatagccacagtcaaaacatgatggatcggacgaggggatgtccactctcacctcgaatctggctttcaaggcattcgtgatctttgatactatgtcctatggcgttttgctgctcggttgccaccgtgtatttccagtacgggacttctggtggaggcttctatgagcgagcctggtttatataggccgcc

SEQ ID NO: 94033 - DNA, 971 bp, Eucalyptus grandis
  Intron number 4 from transcript Egrandis_v1_0.026378m (loc us Egrandis_v1_0.026378m.g) derived from phytozome v7.0 (c hr-ID scaffold_10; pos 28395243 to 28396213)
cagctgcttttaaggtaattttgtctgtatactatatcttgagataccgctcgttattcaccattaagttaccttgtgtaagtaatcaattttccccagtaagaagtggttttcttctggggaagtaaaaaggaaggtgaagaacagatgggctttgtttttgcaattctgtcttcatcatatcttaaaagttagttatgcccaattaatacatgacctggatttttaccttgaagtttgagctgaaaggctgttggcgtgaagctcttaatttagatttatctatagataatgaaatagcaagcatcagctataattgcggtggtactgttttctggatgcatcattgattatgtccatttgatccataagattgttggttatatgcacgagaaactgcagttactaatgcatgccaccaggatacattgaaaattcaaattcatgaacttgaaaggatgaatattgaggagaagtacatgcttgaggatatgtgccattaatattgctcaatttagataatcttccatttgtgcagtgggtaattcagtaattgggaaaagtgggagatgaagggggtggtagctttctttaggaaattcacggaccaagaagatcgatcaaattctggaactttcgcttttgttaatttatatttgcaattcacgctttacacacgcagagggtttctacctgcaagtacactttggagagagagaaagggaaagaggggggactcaggccagcttcgttggactgtcaattcccttttagttcattaccataatgctagataatcattcataattggattgtttgggcaattatgcctttctatgaggttactttgtcaatcatgtaatgatgcttggtaggaactgtgttgaagtccgcttttccctattctagattgccctgccataagttgcagctagaaatgtcatataaggttttggttgtgccatttcaga

SEQ ID NO: 94034 - DNA, 871 bp, Eucalyptus grandis
  Intron number 2 from transcript Egrandis_v1_0.027175m (loc us Egrandis_v1_0.026872m.g) derived from phytozome v7.0 (c hr-ID scaffold_10; pos 3293762 to 3294632 reverse strand)
ggagggaaggagccggtctcggtgcttctgagcaggtaagacttgatcttattgattccccaccttttgttagtgacgtgcttttgcggagttctgaggtggagttgaaattataggttgtttgtgggttttctgggattggagaaattagattggatatccgcccgttggtgaagcagtttggcgttgattgtagcttctgggtcgaaagttccagtggttaccttcattgctgcatgcgaggactatctgcagctaagaggaattaggcagtgtgtgattggataggaagttctggagttaagagtgaagcaattgaggttttattcattgggatttttttgtttgtgtcgagtttttcttcctctgctgcggtgggcctctccttgcagcagccatgtagtgggaatatggtcttcagttgtttggtcattttttttcttggtttcatgggaagccctggtgcatgagactgccagtgatgctgggtaatttcaaggagcagatttgaaatggttaaaagggacgaccttcgtgccttttacagttccatgggtattccttgaaaaataaaagccgatcatcatgaaacttgcctatcttttttgcttgtagtgtcaatggctgtgagggactcaacatgctattacctcgcagatggtgtagttatggttttttgatacattacaagtataagaagaaagtaaagcttttgagtggaactcattgcctgctaatagaaacttgaatgagaattagaacagattactgtgaaatagctgcattagtttgcttttgtctttgtgatcatttttatgtggattttccttcttaagcaggcatccgtgggaagggaatccaactcattggc

SEQ ID NO: 94035 - DNA, 984 bp, Eucalyptus grandis
  Intron number 1 from transcript Egrandis_v1_0.008776m (loc us Egrandis_v1_0.008776m.g) derived from phytozome v7.0 (c hr-ID scaffold_10; pos 3254871 to 3255854)
gttcgagctcgctcgctgagtccgcgcgggaaccggtgagtccgctcacttgtcgcctcccccagttcttcatttcctcttttctttcgtgggaaccgtactatgaagttgtttttgacatggtacatggtcttagtatctctatggcccaccgtttgattgataacgtggctaatcaagcatttttccgatttgagttgtcatgaaagtcaggaaaagataaacaaatttgggttcccatgtggtgtcgtgtcattagctcgatggaagaaaatagtttctgcacatcatcatgccagtggagagaaaaactcaagagatgtttgctatctgttttgtgatggatctgatgaatttggaaccgcacaagccattgaaaaaatctttctttgagctttatgtggagattgtgcccaaattctcccgattatttaagttctgttcaccgagaatttttcgagttgtgcgtgtcgggctcggcaaagcccctgctctgttcttgcttgggacattgtttggccaacgcagagagtcatgtctatggtcatctttggccaaaaatgatagggagttatacgagacattaaaacgatgacaactgcccttgtttgtcctcgtaaatcagcaattgcggcttccacggtccgtgagctgatggggatatcgacacgagattctacctaccgtgggtggtttttctcgttgtctggaagaatattctagcaaaagcaaatagtatagcagtttgagtgtgcactgaccatctaagcttgtactgcacccatttcggcgctgaacctaattttggagatgaaattctggacttgatagaaaaacttagcgttccctaaccgaccagtgatggcatgattgattgtcatccgttagcttcttgatgttaagtcttgttgaactgttcttctcatccatccattcattatttgtgcagataaattgtcctctcctcatctcacaatccaagag

SEQ ID NO: 94036 - DNA, 415 bp, Eucalyptus grandis
  Intron number 3 from transcript Egrandis_v1_0.053173m (loc us Egrandis_v1_0.053173m.g) derived from phytozome v7.0 (c hr-ID scaffold_1; pos 4785447 to 4785861 reverse strand)
agatcgctcgtagggtctggcgggactacgctaaagtaaagttctgctctccttttctctcctatgaaagctcctgattcgggacatctctaattacgtgccatatggccgattcattcgtgaattctgtaacagtttttgaattttatgcaatatgatgcatgtggggcagatcatcctactaagtagtctgatggttttgattaatcatgttaaacttatcacttcgaacgcttcattcttgtctgtggatgtgtttcttgacttttgagttgacaaatagtcggatgcgtggttcttaacgttcagttgactggttttatttactgcattaagttttcaatagattaccctgaaattgaacctttagtttactttgagatcatgtttgaccttgttggattgaggtgaggga

SEQ ID NO: 94037 - DNA, 835 bp, Eucalyptus grandis
  Intron number 1 from transcript Egrandis_v1_0.031814m (loc us Egrandis_v1_0.031762m.g) derived from phytozome v7.0 (c hr-ID scaffold_10; pos 17096488 to 17097322)
gttgatcaatttggttattcgcgagaaagcatcaggttcttcatctgatttgcagattgggtagtgcatcttagattatatttcttttcctcgtttgtttctctagtgaaaattgaaaatgttgtctacatgggttttgttttttcaatgaaacggcatttgaagtttgatcttgctggattaagcaatctcacacccaattacaatggctgatctgcacaaaaaatataagcctttcaatatgccactgtccaagatgtagctgggttaatgatcttgccagattaagcaatctcacacccaatgacaatggctgctaatctgcacaaaaaaatataagcctttcaatatgccactgtccaagatgtagttgggttaatctaaagactgccttccgaaatgccactgtccaagatgtagaggtggttaatcaaagactactgaaacaggttccaagttctgcacatttctactttctattgagcaattagactgttaaatcaaaacgctaatatcagtctttccaatttcaatttttctttcttttctttcagacaagcatattataattaataactcatgtttgttggttgtaaatctgccatctttcatatactcagcattggactgtatcctatgaacttcatctctctgcccaactgattatgcagtctaagtttcatggatcaacttagtcctctcggcggttgcttaatcttctgttttttcctctttctctatccctgtcccataggtacattatttcatttcgcactgaaattgggcataaagatctgatgtgtttatattggcaggaaaagaacaagcaaacagg

SEQ ID NO: 94038 - DNA, 577 bp, Eucalyptus grandis
  Intron number 1 from transcript Egrandis_v1_0.012641m (loc us Egrandis_v1_0.012641m.g) derived from phytozome v7.0 (c hr-ID scaffold_10; pos 11968543 to 11969119 reverse strand )
tgctcgtccggcacgggtgagaggtgggttcgtcttcttcttttcttcacctctctcctgcgccgctcttcgatgcgcttctccgcttgatggggaaagcttgctgattggttgggcgggtggggcgtgcggtttcgtttgatctgtgctgcgggtgctcggcgtttggggagaattgcgtcggcgttggttttacgtgcgaaagcagccgtatttttttttttttttttttttatttgagttggtgttctatgtggtggggggagttctcgtgtgaagcgttttgacgactgggtcgctagaggagtgaaaaaagggttttcttatttctttttgtttccgtttcgattgtctcttagcgaccttaatgctgtttttgcggactgatccgagtggaactttctgatggggtgttctcttcttggaactgggattggattgacaaatatagtgaaaaaggttttcttttttctcttgtttctgtttcgattgtctcttagcgatgttaatgttgttttgcggactgattgagtggaactttctgatgagggtgttctcttcttgaagctaggatcgg

SEQ ID NO: 94039 - DNA, 978 bp, Eucalyptus grandis
  Intron number 1 from transcript Egrandis_v1_0.011232m (loc us Egrandis_v1_0.011232m.g) derived from phytozome v7.0 (c hr-ID scaffold_8; pos 483516 to 484493 reverse strand)
gtgggggccttttggagggcaaaggcaagttttggtcttcttcttcttcttctaatagatatccatgtatccatatatatatatataaatattatatacaatagatagatgtgtgtgtattgccttcgcaactctctatctcacagtgtcagatggaaagcgaagaaagaaactttaaatgattataatataatactctcggaatagagtacaaaagttagatatcatgatatcttaggaatgtcagaccaggtagtagcccatgtagccctgtgttttgacaaatagatgaacggggggaaagatagagagagaaggggggctttttgaatcaagattttgcagggggcctaaaagggtgttttctttttagcttctttttaatggtggtgatggattaatgatggaaaaagtttcttcgtgagccgtgatgggttgttgagtcgttgctgctgcttcttctgctgccattgttacatctattgtacactgaagcaattcatggccgtgacagctactaagctgtaccacatgccttttttctcttgggcttcgaatcaaatcacgcaagacaacccccctcctcctcctcctcctccctcttctaactgggagttattatttcagcttttggaagtcgtcgttgctctcattaagtttggttcgtctcttgttatctgagccccaccagtaatctgaatactaatttaatggtttattctttttccattttttcattttctagtgttgaaactttcattttccccccctctcccgggtctatttgctttctccgttgcgttttcctttagtcctttggtattctgcatattctgctgaacacttgatgggtagttactaacttaactgcttccttattaattataagggtaagtcctgttcttttttatattgctaattctttatcaatattggaatgaaggtggaggtcgatattggagctttgctgcttgaaga

SEQ ID NO: 94040 - DNA, 927 bp, Eucalyptus grandis
  Intron number 2 from transcript Egrandis_v1_0.018189m (loc us Egrandis_v1_0.018189m.g) derived from phytozome v7.0 (c hr-ID scaffold_1; pos 7562002 to 7562928)
ttgcaagcaactttggccgaaacacacgcgtaagaaagttgccatcaacatttcttttaacttctcatttcgaatgatttcatgcctagtcattcatgatcggatcattctagagaacctcctgatcgtttctatatcttcagctggtactgccctcaattagtaggcactgtacacaatatttttccttccatataagacccttaatgcgcatttgaaatacttgcagtcatccctccgaacttttctatgtttcagttattgatctctctctctctctctctctctgtggcatgacattggtaatctttatccaaaaatgtaattgtgttttggtgacttgaacaagagctgcatatgactacggaggactggccactagatgggccattattttattttagtgagacttgttctgaggctaagaataattggaatatgataatgcatcttcttttgagagcatcgttctacaaataggaaaataaaagaaaatctcccgccaagattcaattgcatcatcaaactacaactataatcttacgtactcttccctttcttgttgagtcaatgacaagatcatcaaatactggcttcgaatctaatcacaaaatacttttgacttttcaaaggatggaaagcatccaaaccaaaatgaatttggtctgaacatttatctagtggcctgaaaattattttcaaccatcgtgtgtaatcaaaccattcaatttggaaaccttaatgttggaggacaatttgatcaaaatattggacagataattgtgatattgaagaggtcagtggaatcataactggttcattggtttttggttattatttttcgtacttctgattttagatttttgccagtagtcgatgaatactgactcttcatgtgtgacgtgaagcttgttaggaaaagccatc

SEQ ID NO: 94041 - DNA, 1012 bp, Eucalyptus grandis
  Intron number 1 from transcript Egrandis_v1_0.050267m (loc us Egrandis_v1_0.050267m.g) derived from phytozome v7.0 (c hr-ID scaffold_27; pos 270386 to 271397 reverse strand)
tattgtttacaaagggttgttgctagatagtaggggtgtcgggaaccgaaccgaaaactgaaccgaaccgaatcgaaaaatttgattttttcggttcggttcagttttcattaaaaaccaatattttttaattggttcggtttttatcggttaaccgaaccaaactgaactataaaccgataaaaattcattttttttctctcccgattcccgtctcctctggctcaatttcgcgcgcctccctccatggtggtccagctcgagagcccccagccccagcagcagcagcagtagccgcagtagcggcagcacgagcgggatagtgatggttcgccgacctgagcgtcgacgtggagggcaggagaggagttgggtaggaggcatcagcgctggaggtcgaagaagaagcaggcaaagatggatgcagagatggaggcgaattgcaagagagcattttgaaaaaaagagagtgggtctgtatccgcagcagacagaggagagagaaaggaggaagacgaagttgctgatgtgtgccctcggcctcatctcccgcaacctccccctgccccccgacttgctgaacgccgtctcctccatttgcaactacgcggcggcgggcggtgatggggacgggggtggggacgaggaggacggcacgggcggtagatttgaggagattctggtggcggtcgagaagggtccgatgagggtttttttttttctctcgatcgttgatctttctgggggtttttgatgatgcgagcgtccaggaagacgacgcagagaaggaaagaagaaataaaagaaatgcaaaaaactaaaaaccaaaaaccgaaaaatcaaaccgaaccgaactgaaatttcggttcggttcgtatttggttcagaaattttttctaacagttcagttcggttcggtttttcaaaaaaaccgaaccgaactgaaccgttgacacccctactaaatagtatggcagttgccattacaaagtccaagctcgtggaccctagc

SEQ ID NO: 94042 - DNA, 417 bp, Eucalyptus grandis
  Intron number 1 from transcript Egrandis_v1_0.021134m (loc us Egrandis_v1_0.021134m.g) derived from phytozome v7.0 (c hr-ID scaffold_10; pos 10399944 to 10400360 reverse strand )
gattcttcaggtgtgcaacatcaggtgaggatggaagaagcgttttcttatgcacccttttgatgatgatgatggcgattgtgttgttctttagcgttttcttatgcactgttttgatgatgatgatgggggtgttgctgttctttctctttcttccgaggagagcaagcactttgctgttcatttcgagaactagccgcgagattttcccctcagagcccgatttgggtttcagatagaaacttcacttcactgaaatgaatttggatgagtcgactgattcaacaagcttcgcccatttgctcaaaattcaaacttttctttcccttaatctgcctggtgttcgaactattctattgacaggagacatgagacaattcagtggtgcttaaaaaccgtgcttttcttgagcaggaa

SEQ ID NO: 94043 - DNA, 697 bp, Eucalyptus grandis
  Intron number 2 from transcript Egrandis_v1_0.054052m (loc us Egrandis_v1_0.054052m.g) derived from phytozome v7.0 (c hr-ID scaffold_1; pos 16459820 to 16460516)
gacgccattttactaaagtggagaagcttcaggaggtaatttatttccatgtgttttttcctgctggtgttagcactatattgctgatagcctagagttgaagctgtattgttaattggattgtatcttaaacatttttttttcaagggagaagtctgcaagcgataacttcttttgagagaaaccatgacctttctactgtcaattatggcagaaaaatgtaagggagctctgtgctttgattggatagggaggtgaaagaaaatgggagagaaacttgaaacagagaataaattttcttctctttctcttcccagaaaaatttcaaattcctctgaactttccagttaaactttcattcccccagtttcttgctttttccaaacaaaaacaataatttttttttttaaatgtgggacctgaggtcatataaaagctagcagactgaacctgttgctatttatggtttatccttttgccttgagcacattctgttggaggtgattgtagagcttgcatgacatcttatttttcttttctttcacattctgtgtccatgaaataatagatggatgtaaattatttagtgcacactgtccatagatgaatggttgtctgcaaattcagttttctaaccaaatctcatgggctttgttctgtagattgtggataggctccattggtacgtgcaaaaggg

SEQ ID NO: 94044 - DNA, 806 bp, Eucalyptus grandis
  Intron number 1 from transcript Egrandis_v1_0.050593m (loc us Egrandis_v1_0.050593m.g) derived from phytozome v7.0 (c hr-ID scaffold_10; pos 34183204 to 34184009 reverse strand )
ttttattagatagagtacttgaaggtaaaatagaggtgaagttgtcgaaacagaagcaagttctttccctctgcaaagttggcaacattcagagaatacttggcttgatagcaaaactgaattaggttggaaggagtgttaacaataacaaccaacttgctggcttcttgaagagtttaatctctccccatgaggaaggattttgtggagttggtctttcggctttaatcttctttaaatttggcctttcacttacatggctatgtggtctctcctgtccgagtatttagttatgcaactgatatcaaaggggtcgtttgcttttagtttttcagcgagcagacacaatcgagaagctagcaagcatttttggaataaacagtttgtatgcaagcaattctggcacatataggctttgcaggagagaagttacttgaaagagaaatagagatgaaagtggctttgagtgtccgctacgcagtggagtgtgtaattggagtactgtgtgcacagatgcttcatgtttctttataaaaaaatttcagcttatggtttcattgcacaccttcatttcaagtagaacatgccccctgacaaatggaaattcccatggcaccacaatcatatagtttggttgacaccacattaccacatttgagctgtggaggatgtaagatcttctgtgtgttgaggttggtactcgttacaactactaggctcaaaggttgtccatagcgaaaatgcatccttgcattatcatccctttttcagggaaccatttcatctagtttctggcttgtgttaac

SEQ ID NO: 94045 - DNA, 368 bp, Eucalyptus grandis
  Intron number 1 from transcript Egrandis_v1_0.000627m (loc us Egrandis_v1_0.000627m.g) derived from phytozome v7.0 (c hr-ID scaffold_8; pos 55390628 to 55390995)
cccaacaggtgacttattttagcattccatctcatgtgtcttggatcattaaaactcgttgcatttcatatggtttcttttctggatttgtgttagccttgttgaaatcgaattctgtgttattgaagttataatgcaaaaatcaaaattttcccattttattccaagcaacattttttccagttcacttcatttaagtaccaacgctaattcatctacaatggaataaatccttgaagtaacacatttcgaattcgatttgatcttctcagaattagtttaatgtttacacaattttctcactcattgtcttttgtctccatctaactctaggcgagaaggtgagttcataagaaaagttacccaga

SEQ ID NO: 94046 - DNA, 659 bp, Eucalyptus grandis
  Intron number 1 from transcript Egrandis_v1_0.015678m (loc us Egrandis_v1_0.015678m.g) derived from phytozome v7.0 (c hr-ID scaffold_1; pos 19018952 to 19019610)
ccacggccctctctaccgcgtcaccactctggccggtcagtattgcgacgcttcctctcgaactgcggtcctcgagctgaattgaatatgcgttgtttctcttttcttttcttttcttttcttttctttttcgttttgtgttactttcaaatgatgatcgtggtttatgtcgggttattggtatttttctacggaaaggggtttctctgtgggaccaaaattaaaaaaaaaaaggggtattgggcatggctggagtgggaaatatgttgaagaaaacaagggaattttctgctaggattagaaaaggccttgttctcatcgtgtcaacatgttctctatactaacatgctcattgtcgactagtactttgtgggttgatctactctatggctgatgcatgaatgtacgtctggtgaatatgataaaatgcttgaaagtttggtttctttacatttcacatgtctgtcatccctcctagattaatccaatgtagacgatttttggcttatacaccaggtgttacagtcctgtgatgcctatgtttgagtttagccatgggaaaattgaggaactatcgtatcgcattatgtccataatccctttggtgcatgcctgtttgtctatgcgagaaaggttatattttgcttcggttgttgcag

SEQ ID NO: 94047 - DNA, 575 bp, Eucalyptus grandis
  Intron number 3 from transcript Egrandis_v1_0.051205m (loc us Egrandis_v1_0.051205m.g) derived from phytozome v7.0 (c hr-ID scaffold_1; pos 38629477 to 38630051 reverse strand)
tggccagccatttacaggttcgctttctggatattcctcaagcatatatagtacatcagcaatcatttcatcaattcaagtaatttgattcacgtcgtttcacctttccttggactaaatcggtgcattcacaagagttaactacttgtagacagttgtaaagcgcaaacgtattaatgataattaaacgcatggaggagtgtccatacatagaaaagaagtatattttgtgagtattagagtgagtttcgtcgagtaccccatatttagcaaagttgattgattttattaatcctcctacgcaaaacatgattgttttcatacaacaacaaaatgatatgaactatttttcgatggtgaatattgattcactaacatacttcacattgttattctagtcttgacattataaaaagatttgaatgctttttgtatctaagccagaagtcccaagttctttgccccaaaaatctgaccacttcagtgtactggaaatttggaatttgtttttccacttacatattgtggtcgaattcgcagaagtatcgacttttcctcaggaaggttgctgataa

SEQ ID NO: 94048 - DNA, 641 bp, Eucalyptus grandis
  Intron number 2 from transcript Egrandis_v1_0.028067m (loc us Egrandis_v1_0.028024m.g) derived from phytozome v7.0 (c hr-ID scaffold_8; pos 47542663 to 47543303)
gagcggcgccaccttcgctaccggttctcccctcggtaagcgtctcgaattcgaacgagtgtcgtgtcgggtcatatttaatgtcgacggaccggctcgtgctgttacctgaattgggtgaaaggatttcacggctgaaaatgatgaattttgatgttgaatcggtagcccagttgagtgaagaagagtggtttcttcatacgagcatccatgaagtacttgaattggattgaagttttggggtccgaccgagctgacccgttaatccaaatgggtttaatttcgcttcgtgaaaatccattagcctgacggacagtaattgttgaggaccacagagtccttggctttgtagctgttcaatgtttgcagtattgagtatagtttcttcattggtgctagtgaactttataatgtgtggactagcgacatgatggcgaccaatgtctgagtgcatgcccttctatatttgcatgctgggaattctcccagtctgctgaaattagaaacgctttttgtgtcatgacattgatggctagtcactaaacagcatgctgattcttcttctccatcttttttttgtctttttctcttggtcaaatgcagcagtaaaaagattttcctctattagaaaatctgcaaga

SEQ ID NO: 94049 - DNA, 1016 bp, Eucalyptus grandis
  Intron number 1 from transcript Egrandis_v1_0.010709m (loc us Egrandis_v1_0.010709m.g) derived from phytozome v7.0 (c hr-ID scaffold_1; pos 13773082 to 13774097)
cgattgacggtcagtgtaaattcctatttgggttcgcttcgaaggctttgggttccatccttcgattttggatcgtgtgtcgttaggaaccatgtaggcttgtgtacgctttgttgtcattcgtgatgtactcgggatggatttatcaaggaaagatgtgagacttgggatgtttaattcgctcgtgcaaacgttctaattctagggttgcgggtactttattgctgttagagcttgattgaggttgataaaatgcctgtggacagatttggagtaagaaagaaggatagtgaatatgtcgtgatagttcttgaattgaagtgcgcaattgagaagtagcttctttttaagcgagctgagtggatgcatatactcttcccttcctgggtctgctcaatttacgctgtctaggtttgagttaccatgttaaaggaaggtatttttgtttgagtgggttttagccactttgttcgagccatacagttgtgagagtccaattagatcatataggagaatgaggttatacttagttttgacaagttcatagctagtaaaccatgtctctgcacccgttgaatgcagatcttggaattagacataggatgtatatttgtctgcatctggtgcttttaggagtattcatggtggatcttctgctgggaaaaaatcgtgttcagcatcttcagaatggtatttgtctttggttcagactgatgttatgggttgggaagcaggatttacactgccagttcttatcccaatggctgtcccactagatggtgacaaatgatctcttctaatcaatttttttcatcatgaaaagtgaaatcagagtacaatctgttcaaaatgatgtgaatataatatatcttgcatcatagtttctgaaacttggtcacttttgcctttctagtcagtattatcatcatgaccagtatatatatttagcttacccaaatttgcactattattaaccattgggcaatgcattatttttcaggaggaatacgataccc

SEQ ID NO: 94050 - DNA, 690 bp, Eucalyptus grandis
  Intron number 1 from transcript Egrandis_v1_0.004875m (loc us Egrandis_v1_0.004332m.g) derived from phytozome v7.0 (c hr-ID scaffold_10; pos 37050219 to 37050908 reverse strand )
ccaatccgtccggtcctcctcctcctcctcttcaggtaactccttatcgatttcgtctccgtctggtttgccggatcgaatgctgtggctggaatcgaagggaagtggagagggaagtccggaattgaatttgtcggcgtagatggatgagggcgattgcgatgacctcgggtctttggatctcgatagatccggctctagtttgtgactggggcggctgtttttttgacgatgcttatggttttaaagttatgggagctacctttagtgattaaggacgtttgtatatgtatgtattgtgttgtatggaatgggatatcgcgatgaccaagggtgtctctagtggttttgattctcccaaggaaaagggaaaattaagagtggggttattgaagaattgagttcatttcaagacgcatttggtggcatgacgattttgttttcttctttccttgatgaatacttgatttttcgaattcaagttgggagcattcctcaaagtgctagtgtaatggtgaagaagaaaatattcaattgttgtttttatctgggaaagcgatagcatttgcagcttgtggttttggaagagctctctttagttggaggatcacgtgcaattgtgtggacttagattattcatgcctttcactttgcttttggctttgcaacttgattaggactttggttact

SEQ ID NO: 94051 - DNA, 837 bp, Eucalyptus grandis
  Intron number 1 from transcript Egrandis_v1_0.010879m (loc us Egrandis_v1_0.010559m.g) derived from phytozome v7.0 (c hr-ID scaffold_8; pos 66755094 to 66755930 reverse strand)
aagaggttggcactctttctacgagctgaattaaggcccaaacgagtgattattagtggtcaagcttaatgcttttgtgataggaggattaggggagcaatttatgttgtgtgcatgagctactagatcacggcaaatttcatctgcgctggttggtaatataaagattagattgtgactggtgtaggcttagggctttcgtgttcattaccctaggctgtgactggtgtagatgtctctgaagtgggagaatgtcacagaacgggcatttcctttgtgatattctatcagatgcagattgagagataaagagcgaggcctcaagatctgataagtggcatttctttttacaccagggaaggtcaagttactcgatgattgttgtttttgtttagatggagggaagagagtgctgttcatctacgcaagactagatttgaagttccggttatccatttcagtttgtgatatcaaatgagactgaatattctggcataggttatgtactttttgttgcttcggttattaaatgactgaattgtttctgaagttgtatcaaaaccacagacaagtaacaggcgtcgtgacgcagtgttactaatgaaaattaaaaagaaccacagtatggtgtcattgttgcctcggtcaccatctatgaaccttttcctggattaagcttgagttacggtgatatggagggaggcttatactaggaaaacttcattagcctagaatactgccatttcttgaatgagttctctttcctctcttcactgatgaatggcttcaatgaagtttgcagacgttggttgcctggaagtctaggttacgcagttg

SEQ ID NO: 94052 - DNA, 614 bp, Eucalyptus grandis
  Intron number 1 from transcript Egrandis_v1_0.026794m (loc us Egrandis_v1_0.026794m.g) derived from phytozome v7.0 (c hr-ID scaffold_10; pos 27742792 to 27743405)
tggctcgtctctcagaattcgtggggcgtcctgaagtaaggcgtcttgccatctcgtccttcgcccgttccccttttttcgtcgtctcttcgattgcttctcgtctcggtagaatcgaattgtcgctcttctcggtgaatccgtagaagtagttttctcgatgattgagcaaagcaaagtgatcggtgcaaatgattcatcgttcttgcaggtgtaactccataaagttcagctgtccaatttgaaatttctagtctttatctcctgttagagatgggtgtctgtccctaccgtgtgaatttgatgacaagttctgtttttttttaattaatggggagggggatttcggatttcaaaggcataatggagagcaggaatgggtaactttctatagaagctagcgcgaggtgcaagaaaatatcggattggccgagttcgattcattgtgatattgcaaatggttgaatcatgattcctctgttgattgattaacatactgggcagtggttaattttgcttttgattgtctgttttttgtcgctgttaacggaagtcaaatttgctgttttgattgtgcagcaccatctctggcgatttgggaggagcaccgttcg

SEQ ID NO: 94053 - DNA, 731 bp, Eucalyptus grandis
  Intron number 1 from transcript Egrandis_v1_0.031651m (loc us Egrandis_v1_0.031651m.g) derived from phytozome v7.0 (c hr-ID scaffold_8; pos 41917398 to 41918128)
tcaaaaccctagcctctattgtcgcaaggtaaagagaagaagaactagtcgatgctctctttcttttcttttaatttctggtcatagttcaagctgaatgtgtttgtttatttgtttcttgttgctgatttggatgcatttgaagtttcaatgagtagtctcagttggacattgatgcttcggtggttaggaccggaagaaatgtgattgtagttgaggttaagttaaaaatgaaaaaaaaaatctgagaagcttgccttcactactcgagcaaccttttttaatattccgcttgccaagttgtgagaatctgaagtaaaattacgggcgtatgtaaccagaataatgatattcagtctttatgtttgattgctgatctcaagtgtccatgtacctggtaatgttggacttagaaagatgtggtctagtttgcctcttgttttacagacgtatcttttgtttttcattccttgcaaaccgtgtcttgcaataatctgaactaaattcattcaactctgctatgctcattgactcgcctctctctctctctctcgcaatagtacttaccactcttttctgtcgatattcaatcgtgccctgttggcttgagagatccagatgagttttctcaaatgttggtcgttgcattttttatgattgctttgtggttgttctgagcacaggatgctgcttgaagcaatgcctcctacatatttgacagatttgaaaca

SEQ ID NO: 94054 - DNA, 738 bp, Eucalyptus grandis
  Intron number 1 from transcript Egrandis_v1_0.017487m (loc us Egrandis_v1_0.017487m.g) derived from phytozome v7.0 (c hr-ID scaffold_8; pos 47534506 to 47535243)
ggttccagggcacgccctactcgcaccgcctgaaggtaatttgaatcgaaatcggaatctgtcttctctctctctcttgatttccccccggaagggttttggattttgtcggtgaaaggaagggccttttgtgcgtgaaatttgcggtcttgaggcaggctttggggagtttgaaaggattttgatggcttgtgaattgagttgcagaaatttaggtgtacatagcatcaacaaacaacgctgtttggtttgaataatttaagattttgtagcttcgatctctctcttgctctatggagaagtcatgagtttcactctgttgccattgcatcttgacaagttggtagagctttatgcaacagattgttcaagctataccagtaagactagtttttttgtcttgcaaaaaggtctaaacgaattttgcacattgggcacagatgatgaatttgtgttcttcaccctaaaaatcacgcaacatgggtattaattgaattgcgaattgctcgagtttcgaaaattatacggttgtcctgttttgatcagtttctgaggatgtatatcacttctcttgattgcatgcttgttttgcctcgttgggaggtggaaattggaaggctgctctttgatttctttgtgttcctttaaagatcattgtaatttttctcttaaaaggctgttggggatgatcaaagtttctctctcgaaatttcctatgtgcacaggttatccagggcg

SEQ ID NO: 94055 - DNA, 932 bp, Eucalyptus grandis
  Intron number 4 from transcript Egrandis_v1_0.053774m (loc us Egrandis_v1_0.053774m.g) derived from phytozome v7.0 (c hr-ID scaffold_8; pos 70554301 to 70555232 reverse strand)
aattgccctttcgctttcagaagaagatcagaaaggtaaaaatttcattggtgcatcaccaaactgtaagcatttacgatgaacatttgattgaatgattacacagggattcttatctcatcaataatgcggtgaatgtgcgatgcctctgaaattaatctgtcaagagtgaatgacttagaagtaaaagtactgcagcatacgcaaaagaatgtattcaagccttgttcttactctctatttcaattcttcttaccctcttttatatagaatagatcgcctgtaggctatttagtgttgctgaagttggagttgcgaattattgaatctgttcacctttttgtaccataaccacttcatgcttttcttttctactaccaatatacttcattatatgttcaaaagttacatatgtaaattctacatatataagtggttccccataatttctctggtggttccccataatttgtctgttatgggcatccatccttcagttatgcagatttccaaaatgcctggctcatgggaagaaggtttgaaatggtcatcagctctttttaaaggcaaagcctctggttgtatattgcataagctagcttgcaatgtctttcactatcatacattgagagctagaaatcttagaatccataaatcacgtagctattcagtctttgagattgctcatgctgccaaatattcatgtgagatttagattgtccaaggaaagtaaatttgctgtttgttttagtggtcacaactctctttgttcttgggggatttcttgctagtcgtttttggtgagggcttgtatgcaggattaatcccccctttctagcgtgtttgtgcaacaatatttctcacttgtcaataaaaaagtttacataaatgattgagtgatttcatgattcgtctgttgaatctttccctag

SEQ ID NO: 94056 - DNA, 440 bp, Eucalyptus grandis
  Intron number 1 from transcript Egrandis_v1_0.017873m (loc us Egrandis_v1_0.017873m.g) derived from phytozome v7.0 (c hr-ID scaffold_8; pos 40040400 to 40040839 reverse strand)
tgggtttgcatctacatcaagaaagggatttacaggtactcttttaccgatttttttttccctctctagtttttttcacatcgaaattggaatattcaaggggcttgtcaatgttcaagcagtactgaataattttatatcttaattaagcatgcgttgaaaattggagaaacaatagtctctgtgtgctatcatggacatgacttttcttttaaccatatctgtcgtatttaatacacattaattttctcgtatgttaatcaaactttgagagtttatctttgataaaaatttgtcacatctaatgtatgtgtattcatcataatgaaaagaaaaatggaaactttacagaggtctgtcaaacttgtgcatgggttgagtagagtggctactgtggaaatgcagggagaaggtgagaataccgaaggacaaaccgtaca

SEQ ID NO: 94057 - DNA, 801 bp, Eucalyptus grandis
  Intron number 2 from transcript Egrandis_v1_0.014718m (loc us Egrandis_v1_0.014718m.g) derived from phytozome v7.0 (c hr-ID scaffold_8; pos 30933313 to 30934113 reverse strand)
atctcgctcgtgctcttgctcatccttcttgccatgtaaatgccctctctgttcagcatttttttctcacgttttagtcttgccacgatttgatcaagacagaactccatttgattccatctggtaccaaccactcgattaaatggattaggcaagtctagcttcaagctgtattctgatctaataaactaaagtcgagtaaatccatcgtaaagtgtactcagacaagcaaattatagccaggactcgattcatctgatgttatgtgcgtattctcttgaagagtggccagtggttgcatccttgcggcaaatcagaggtcccaccacagaatgaggaggctgaaagaaaccgttctcaaagcgggcgaagatgctcgccgaacaattcgaaaaatcattgcgacaatgacagaaatggaatacatattgcttccctatgaacccgtcgtgtctttccggttgaatttgaccactcatcaactcggaaaggagtcgagggtcatccaacgctttgtccaaacgaacggccattcaatcaatctggcaattcaaacttcgtaagcgtctgtcatctctcctctaccatatgctactcatctcaagtccaacgtcttctaacagagtaacagaatcatatttagtggagtcggtataggttattcgaaaatgagaaccgctaaaatatttataggggacgttaatgtggaaagaatgaactttcatatgcctgcttcgcaattttttgattgaatgccatctgtttttatttcaatgtgcttataggtacattgcacacatc

SEQ ID NO: 94058 - DNA, 677 bp, Eucalyptus grandis
  Intron number 1 from transcript Egrandis_v1_0.050299m (loc us Egrandis_v1_0.050299m.g) derived from phytozome v7.0 (c hr-ID scaffold_8; pos 21029280 to 21029956 reverse strand)
cccggggaagctaagccaggtagggcccctgcgattgagttctcgttccttccttcttcttctttttttttgcctcctcctgcttgattttaaaagagcaaagcaagctcgatttctttagtcctcactcgcgtcggatctaaatgagtcggtttttcttaagtttgaacactgctcgctgatttctcttgagtttaagtgtgagctcgatctccgagtaggtccatattcgctctccaactcgctgcccactacgtctttgaagaaatgcctgaccagattcgaatttgttctgtccaatgcaagacatgggatggaaaattttagtttgagaagtgaggaaaatttattttgggatttgcttttctagaatcccttttgaaagaaaaaaagtcagattgttcattataaataatattccaacaggcggtgttttgcgattgactcatttatattagcactaggagcatgggagtgttgctagttttcttttctgtttcttttattaatggaaaagtcaagtcaagaagcacctatataagatggttcagtgcaccttatgcaaaatgctgctttttgttaaattagttgttggagaccgtgcttatcgactcggagcatcataaatgatcttggttttcgtttctatttctttattagtacaaagtgatatccac

SEQ ID NO: 94059 - DNA, 1032 bp, Eucalyptus grandis
  Intron number 1 from transcript Egrandis_v1_0.018354m (loc us Egrandis_v1_0.018354m.g) derived from phytozome v7.0 (c hr-ID scaffold_10; pos 19787689 to 19788720)
tccggcaactttcgcgccgccgcctctgattacaggtctcgcgcgctccctctctttcccccttttcgccgcgggtcggttcatttccggcttggtgttttggggtcgtagatgttctgtggaaatgttggctgctctgcgtgtggatgatcgaagtgggttctttacttgttgaattgctgttgagctagtgaatcggaatgcggcgccaagaaattggcgttttcaggggatttgtgctgctttggagatgggtttgcatttctttatggtcgcagtctgcaaaaaaattcattttctctttaacctaaccgttgtcaatctgggatagatagttttaggagttccacgttatgcatttctcatgtatgtgagtttcctttttgaaaggtgtgagactaaacggagatacttcacccaaaagaaaaacctctaagatgcttcctcaaaggtgaatacggatttttttttttttttttggtaagggcatgcgagggagggcaaacgactagtctgccagcactactcagacattgcaagttacgaaatttgtggagcctatgtataaacgcaatgctaacttagtttggaatttttgcatggaaattacaggctggagggctgtaccttctctggttaatgtcagtttgaatcaattcttttcttggtacaatcagtatcttgtttgaatgcagctttgcagttataaactggaggtaaatgactggtgttcatccaaggaatagatgcttgacagtgtagggttcccaatattgattctggaagaagagaggattgtttgactgcttgaaatgttgcaaaatgagctaattgataactctactgtgactaaaagttttccctccgttttcttggtactgttttcacaaaatgagctaattggtagttttactgtgaattagttttgcctttgtttttgttccattcagcaacagagaatatgaaaatcttcgaatctggaaggctaactagcttggatttgtgctaacagttcagacaaggaagaacccg

SEQ ID NO: 94060 - DNA, 934 bp, Eucalyptus grandis
  Intron number 1 from transcript Egrandis_v1_0.027112m (loc us Egrandis_v1_0.024844m.g) derived from phytozome v7.0 (c hr-ID scaffold_1; pos 30239513 to 30240446)
cgccgccgtcgtctacgttctccgatcacttcccggtaagcgctcctctgggtctctctggctcgcgtcgccatcgattgggtcgcgttgcgccctcgccccgaccgacctaggaccccgaatctgctcgggaggatgctaacgcccgcgtctttcgccgattcgtgtcttgggcgacgcgggctgcgtcgtgttgcgtcggtctcgtgacggatttccgacggttgggtcggttggagggattggtgtcggggttttccgtggctcgaatgagggaactttagcaatgatagtctctctctctctctctctctctctaacgccgtgctccttcagactcgtgatgctttaccttcgctcgcccgcgcaattccagtgcgcgtatgcaatttttttgtttttgatttttgtcgatcccttgctttttcgtggttgatgattcaattcttagcggcatctgttttgtaaattgacaatcgctgattttcttgatcgacattagactttttgaggttatggtgaaagagagaatcggaaacttatggagctgctttgtgggtccttaattcgtgtcgttgttaatctgtcatggataagcatactcatgaagccgaattagggcaagcagttttgatctttatgcgaggtcctggtttcgagcagcttcccagtgttagggcgattatcttagttcgattaagtctcgagaaattgttgttctttataaattaaaattaaatttgtggattggattgtcacagtgaattcattcctgtgacgaattttgagtatgcaatttcttccgctctttacttttgaaatttgtaggtctctcctattatacattggaaatgtatggcgtttttgtaataatagttgaaaacatgtcatgcttgcaggtccaattacctgcaaaattcaatttttagagtca

SEQ ID NO: 94061 - DNA, 674 bp, Eucalyptus grandis
  Intron number 2 from transcript Egrandis_v1_0.027112m (loc us Egrandis_v1_0.024844m.g) derived from phytozome v7.0 (c hr-ID scaffold_1; pos 30240720 to 30241393)
aagctcttgaaagagttcgtgctgtgctaggtgagtaaatatatttatgtgtaacttatgcctccttataagccaattacatggatggatgcttattccttttctcttagttgaagacttctttactgaccaaaaaggtcttttgcttattcctagagaaaagtcctgatttgatgtgtcaagtgctcttagagctctcaactagtcattgggtttcatgtatctgagtaatccttggtaggctatgtacttgggtcagcttctacagtagtgctactttgattactttgtttgcaaagcaggtttgttggtattttaggggatgcccacccctctttatttgctgaagcttatttcgtgttaatatggttgggactgggagcagttttacatttataaaaagtatcacttggttgtcgtttcatgcacagtggtcttcatatgctaaataatttctttttctcctcttctcccttcatgagattcacattattaaaatctctttttgaatgttaattttgtgcgtttgagtagttttagcatattgttaatggtctatgagttgctgaatcttttcttggatgtacttgtatgagttttgtgctattgtgccaatgggagatttagcttctaattatggccttgtctcctttcagataaaatcaagccctctg

SEQ ID NO: 94062 - DNA, 461 bp, Eucalyptus grandis
  Intron number 3 from transcript Egrandis_v1_0.015325m (loc us Egrandis_v1_0.015223m.g) derived from phytozome v7.0 (c hr-ID scaffold_8; pos 21346599 to 21347059 reverse strand)
gtctgacttatcagttgaggtctctctctctctctctctctctctctctctaagcccccggggatacgcgcggattcataagtgcatgtgttgatttgttgtatgttaggcgcactgtgttttttttttttttttttggtaagaagtaagtaaagcgcactgtgtttgtataacgcagaaactgaaaattctatacaaataagcaaatctaacgtagactgattctgcaccatgtgctatgacaatactcgcaagtgaagtgaatgacttcatgagtattacatataaggcaaggaaagatcgatatgtttaattattacaaaaactctagctttggttaaattaccagaaaatttctcaaatcaaactcttctattttaactaattatcaactttagtacgtctaacaatttaccggtataacagaagtggcgctattctgaaattgctcgtcactacat

SEQ ID NO: 94063 - DNA, 491 bp, Eucalyptus grandis
  Intron number 1 from transcript Egrandis_v1_0.023094m (loc us Egrandis_v1_0.023094m.g) derived from phytozome v7.0 (c hr-ID scaffold_8; pos 35333890 to 35334380 reverse strand)
cgacataccgaggtacgtggtgctggcttggctcttctggtgggatgtgtattaggattatagaatgcaatctgataagcacttactttgcttttagtctttaggtaggatgcgagaacttttttgttttgcacaagaacacaatggagattcgtgcttgtcgtataacccaagttgaagttaatcacatgctttggatatattctggattatcttggtcacatgcttttgatatatacgggagatatggttcttttaagtagattataaatggatggactgctttaagtaatctttggttgtgggacgatattcggagatagcctaggaaggtcaacttgtgatcggttcaagcgattgacatgtgtagtcctttgcatagaatcttgtatatgttagtttatttggacatgttcttgacgaattcttaattgatgattggaaacattttctcagattgaacgcaactgattttctggagagattaagag

SEQ ID NO: 94064 - DNA, 840 bp, Eucalyptus grandis
  Intron number 1 from transcript Egrandis_v1_0.020155m (loc us Egrandis_v1_0.020155m.g) derived from phytozome v7.0 (c hr-ID scaffold_10; pos 37381197 to 37382036 reverse strand )
aattttaggtaatccctgattttcaagcatgaggaataattatatatactttgtgcctcgtgaattaatttagaatttaggaatgcaaaatcttatgttcaggtaactagcttgttgtctagatgaaattcttattcggtaggtcccaagtaattcgcgttagaatttgcttctcgatagatttaacgatttatgtctaattaagttcttagatttttttttttataacaccgcataccagatttagaaagaagtgggacttaacttaaaagattcaaaggaggtctagatgtcctttccgtcggtgagatgaggcagtgtgtgtatagtgcactctcgaattatgtacgatcacttcattcttaaataaattaatatataacaatagtatacatgtggccgaaagtgtagatacatggatcttcaaatcgatggggggagatagctaccaccacaattcaaaccaaaaagaaaaagcacattttttggccaataacaaaaaaattatctgttaaatccactccatgtatgaagttcataaattatatcaatttggttgttttcctgatatgtgattcacataatttattggattattaacttttcatcgctaactcaattaggtgaccattgattgtttcttagtgcaaggttactttcattaactagtgaaaaggaaaaaaagaaagacacttttgtatatatataattgaaaggttgatttaatttgtatcagaaaagaaagagttaataacaacctctctctctctctctctctctctctctctctctctgtgcgcggcagtaaaaccatacattcattcacggaaaagctgtcgg

SEQ ID NO: 94065 - DNA, 962 bp, Eucalyptus grandis
  Intron number 2 from transcript Egrandis_v1_0.006625m (loc us Egrandis_v1_0.006625m.g) derived from phytozome v7.0 (c hr-ID scaffold_10; pos 22839384 to 22840345 reverse strand )
agccaggtcctttttgagccacttttttgtgtaattagtttgctattgtcattgaattattggttgctctctcgtcttgcactgtgtttagatggatgaattaatgcaacggaagggaagtaaagacagagattatgaataggataaacaatggaaatagtaaaataaatattacttttttgggccatagaccttgacccatgggcaaaactgggaggagatagaagtaaattcatgaatcgctgtgcccttcttttcattgatgtctgtcttgttcatttgatgagatgcatatgaagaactcccagttttctttcttgccgaacgaagcagacgaattgttaccttgagcaatttcaccagatattacgaacttggcgggtatattatgaggacttaatattttccttggtaattgtcatggataatcggttttgcatcatagatcagcaaaactgtggattactttatttgatataaacgcttttgaagagcaaagaagtgtattcagtttatatgggatggtctggccaacttccataaactggcatagttgagcgatgctctccattgatatataagtaatgatggttcatcaagaagctcagctggactcatgttagttcagttgtatcgtgcttatcacaaaccatgggtttctttttgttaggctagtactggttttagatattacttatccaaaaaagactgttactaatcctaggctttatttcttcttatagaacatagtatgtgtgcaaacgcccagtagtgtccatatctggacctgctttgatgtttagactattctaaatgacactgttactttcacccggctttgtttccttctttagaacatctcatgtatgtctgcagatttcgtgtagtgtccaccactagagctacgtacttttctaatggtaacttcactttctctgactcgataatgcaggaacatcagc

SEQ ID NO: 94066 - DNA, 884 bp, Eucalyptus grandis
  Intron number 2 from transcript Egrandis_v1_0.030245m (loc us Egrandis_v1_0.030245m.g) derived from phytozome v7.0 (c hr-ID scaffold_1; pos 36140649 to 36141532 reverse strand)
ccagccggccaccttcagtattgccgcgaccactggtactgtttcggccggtcaccttgtggattgttcgatatgggttttattaagttggttttggtaattaattttgatgacatgcactgtttgattccgctcctatgttcagtattccatatgcttgtaccaggtttttatttaagcggctacattgtgatgattgatgtctaatggtgtgggctcttggattttattagttatctaatagctctcttgaagtcatgttgagcatggtttggaggtatagaaattgtgggatctagatagcagatgattcttttgtcaggcatgtctgtttactggaactcagctggttgaaatctgaatgtcctgtgcgctgtttttgctggtgatcatggttgtctccttgatttgctacatctgctttggaattcgtttgtaaagggtggcttttgttatcgatacggaatactgaagcttaggagcatattattctgattaacaaggtttcatccaaagagactgagaactcattttactttagttgtttcaccatagtcaaagaaagcacttcaaacaacaactaagaactcaaaattctattgtgctacatctctgtttggaaaaatatctcaatgaaagagggcattctcgcttctgcttggcttgcattgattaagctgctcatttggaaaaatctggtcaatatccttttttcctgtggttagatcatccaagtagaagtatgggatgaaagtatatggaatggtgattgctttaacatgcttgggccctcttcttcttcccttaaaattgacatatgaactacctcctgatttttctttcatgtagacgaagcaatcagcggagggaaattggtgattgat

SEQ ID NO: 94067 - DNA, 690 bp, Eucalyptus grandis
  Intron number 2 from transcript Egrandis_v1_0.018052m (loc us Egrandis_v1_0.018052m.g) derived from phytozome v7.0 (c hr-ID scaffold_8; pos 6167452 to 6168141)
atcgcatcgacactcgcgtccccatcgaagtcactgtatggatcccacatcaaacctttacctctctcgggactttctccgagtgatcagttgctaaattagaatggtgttgatgatgcatcatcatcaagatatcgttaaatgtgacttgagttcagatgatagcagagttcaagatgtggcacggtgttgttcaagggattgcggaatttagtagtttatatggcttgagtttttgttttatgggtcaacaagcatgaaaattattcgaaatccagggttcaccctgatttatatctgagaatcacatttgaagttgttcctggactttctgcgcagacatttggttcttgacttgtcattgtgaaatatgacaagtacttggaatacttctttaatttgccttcttctgtgatagattagagagatccatttccgttaacgataccttgccattttcttgttgcattgagatgcataaagattgactattttttgctaggagctacctaatcaaattgtaatgtttgagaagtcagggaacacaaactattcaggcatcaggacacaagaaaaactaatgatgttcaataacttctggatcttaacacgtaagattttgacgattgttgttttgtcatgtgaatatgcacaggttggagagctaaagaagctcgttgaagagggtaa

SEQ ID NO: 94068 - DNA, 1028 bp, Eucalyptus grandis
  Intron number 2 from transcript Egrandis_v1_0.005632m (loc us Egrandis_v1_0.005632m.g) derived from phytozome v7.0 (c hr-ID scaffold_8; pos 30051723 to 30052750)
tggccgtcatcaggtaatctttggttcttcatcggttcttgtttgctgagttctgttttttggggttgttttttctaaatgcgggaattgaagttggaaaagaatagatcaaatttcgcgggtagcaattttcttagaccagcaaatatggagcttctgatatatttcaataagctggtgtgacatgagactttttatagtaaggttgcaagtgatggaagcaacaataggaatgtaaaaaatttgtgatgccagaagaattgtgctcttataccaattgatgcaggatatcctagctttgctaccctttgggtgcattacataatttcctagaagtaaaagaagcaaggatcatactagacaggagacagattgaaaagacattagatgggtagaaaaatccatcggttgccgtattctttttaattactatttgtaaagacacctagtatccattgatagcatggtcaatttgttggtgataatccttattgagaattctaatgtgtcaagaagtggggaaaaagatatttacatatcaagaatgacacatgattatccttggtcaagtcaatcaatgtatttgaatgagaaaaaatgtaatgttctgcaaattcactttctcttctgcctgtttttgaccttatgatgaaaaggtggtagggctgaaacttgctgctgtgaaaccatttgcagtcttgactatttagagcatgctctttagagatcatcttcttttgacctactggttaggagcttgaatgcatgccatcttcttttgaccgactagttaggagcttgaatgcataccttttttaaaaactgaatttatgcactagctgtttaccttttcaaacagactatttctgctgacaactttgcacgtaaacctttagagatctctatagctgaaaaatgctcacatgatggataattgacttgtcacacgcctttagctatgaatttgtgcactgatgttgacattttctctaggatccaaagttccaacctgaattgtcaagcacata

SEQ ID NO: 94069 - DNA, 654 bp, Eucalyptus grandis
  Intron number 3 from transcript Egrandis_v1_0.033610m (loc us Egrandis_v1_0.033607m.g) derived from phytozome v7.0 (c hr-ID scaffold_10; pos 7205912 to 7206565 reverse strand)
cagttttaaacttccaaggttaccattttcatcctacgtttaatttcttaggatggaatatcagcgttaatttgatgattagatattgacatgcgggtgacaaactttgcctgattgctttgtttatacatgtgatcagagttttcactgaaacagacacttttttgtcaaggggatactttggtaggtttaatccgtagtctcatggctcaaggcttgccaatttgctttttacgctaaaagatcaatctaggaccagtagacagtcactttctgcattgttgataggttattggcctatcggttgaatgtttgaatctagatggtattgttctccttacaactcatggaaaaattgattctcatgcttagtggaagaatcgagcttcttgatttggtttttgtagcttatttgattttaccttaacgagctctctaggtatcatcactgtatagtcgttgcatgattcaatgaaataaggtagagcaattatatttcaatcatgttaaaatcacgctcacccaacagcatgtcatgctttaggtaaccgagtttgtttagcagcagttttgctcgtacggttgtaatcatcgacctaaatggatctctttctttcagtttcagggcgactgaagatatacatctaggcctgc

SEQ ID NO: 94070 - DNA, 889 bp, Eucalyptus grandis
  Intron number 1 from transcript Egrandis_v1_0.002339m (loc us Egrandis_v1_0.002339m.g) derived from phytozome v7.0 (c hr-ID scaffold_8; pos 58412952 to 58413840)
gtggtgttagtggtggtagggaggtgactcacctaaagttgtgtgatctcaagcgatgtactatgtcgcttgacttcaggtagcagggcgcgcggccctagcaaaggattctcggcggccagatttggccatcgatggctgagctttgctagttgagtttcgtcagttgactagtaagtctaaggaagaagacaatgaatagtatttttttttaagggcaaaagagaaaaacatgattattaatgaagacaatattggaaaaaaaaagtcattaatccctcacaataacatttcgaaaatactgaaagtccaaaacaaggactttcaaccttccaaatattaacatttggccaatgagatctcaaaaaactaaatcaagcgtcttataattttcctaaggagttttggaagctcaaaactcattggaaaagttgaaccaaatgggcaatctaccttttatcactcaaataatatgccttatgttccctatttataataacggattgtgagcatgatttgccgatgtttgcaattccctttttacaattcagtaaacgaacgaggagcttctcattcgatacggcctttgacgttgcactacaaggcgagccgaacgacagaaggtcgaaattacagggtttgatttgactctcgatttgagatttcttcaataatcgaacgagtaagggattggattgcataaatagagaaaaaaggggagtcctaccactaaatagtgaaagtgcaagtactgattagaaaaatcgttccgttcacgaacgtcggacacatcaaatatcgacggggggcagtttcgtaaataccgcgatcttcctctcctctcctctcctcttctcgcgcagagggcgacgcctgctctccgagaaaa

SEQ ID NO: 94071 - DNA, 456 bp, Eucalyptus grandis
  Intron number 3 from transcript Egrandis_v1_0.029675m (loc us Egrandis_v1_0.029675m.g) derived from phytozome v7.0 (c hr-ID scaffold_8; pos 52881541 to 52881996)
atttcccagtgattttgtctataaagttgttggtacctctctatctcaatgccaaaatagcatcttcctttcctgaaccaggtccttaagtcctttcatattggtgaaaacgcaatagttgtgtggatcttgtattcttttcctttatatatgccatctcagtgattcttatcctctttacaataattttgtgcttcaaacatactgttaataaatttcaatctatctccccatgttattgttctacatgcttccggtttgtcatctttgttttctttcatgacagttcaatattttactcctcagtgtcacattattaagctctgctgcctgtctaaatcaaagtgtcactactccttgtaaacttgttaaaccatattgatccctgagactggatgctattgtgtgtttttctttcaagtcacggacactgaggaaacgcacattggacagcac

SEQ ID NO: 94072 - DNA, 849 bp, Eucalyptus grandis
  Intron number 4 from transcript Egrandis_v1_0.029675m (loc us Egrandis_v1_0.029675m.g) derived from phytozome v7.0 (c hr-ID scaffold_8; pos 52882068 to 52882916)
gggagtttccagaaggtcgtttccttgctctatagtgcatctgcatgaacaatttgattactaagttataagttatctcactgatacttggttttagactgatcttgttttggtacttcaatctcactggagttctaggtttttataccttttttattttggccaaattatgtattaaccctactgagtttgcacaactctaggttgggaagtggtttgggacagtagattatgcttcaaaggggttttaggaacaaggccctgttcttagagaggttggagaggtaatctttttatgcattaggactagtctctttcaaattgatctttaaccgtttgactgctgaagtccatgtctagtaaccattagagctcgttcagcattccttgataaaacgtttgtatgttcctgctggctctaagtggggaagatagtttagttacttaaaaaactaaaatgagagaagaagaagaagaagaaactcggcaggtaaacacataaatttttagctgaaatttttttagctgaaacctttttcatatagctagaagtttttctgcaatgcttaaaaatatacagatgcaatatcattattccccctgttgcgtcaaactatttctttttggattggctgtgtcgacatttaaactgcagggaggggggaagacggaaatttgaagtgataaatgccatggcattttagcctagtggttttaacctttgtcgagagcaagtgcgaaatgattagtgacaactttctttttactttgcttttttcgcatgattgttggtcatacacaatttatttttccttattgagcagtgtgacagtggtcacagcttatctc

SEQ ID NO: 94073 - DNA, 588 bp, Eucalyptus grandis
  Intron number 3 from transcript Egrandis_v1_0.010725m (loc us Egrandis_v1_0.010725m.g) derived from phytozome v7.0 (c hr-ID scaffold_10; pos 3616167 to 3616754 reverse strand)
acggcccttttcatattgccaacaacttgtctcttgtgtggaatgattatgggttgggaccaggtgagtaagtgacaattttgtactgatcatagcattattaatcatgatttaatactccaaagaacgttgcgtcattctttggatttttctctttgctctattattattattattattattattattattattattattattttgaattatgcaacgtaagcgttgtcctcctactcttttctgttgtgtttttccttgacattgtcgcatatgatgttggcctagttcgtttgttttagcattctttttcgaaaaacagttgccaacttcttctgttgctttcgccttcaatagctttgctatcaagcaagaaacggaattgcgatcatggtcgataaaattaattatcgaatgaataagcaatacgtatcttattaaattaaaaaggaaattcagacaacgaaaaaacatatgttattgatgaataaactatctctagtttgaagtatgttacatttcacgcttttgttaatgtttttttcctccacaggcatcgaatctcatcttcgttgatcagcctactgg

SEQ ID NO: 94074 - DNA, 644 bp, Eucalyptus grandis
  Intron number 5 from transcript Egrandis_v1_0.010641m (loc us Egrandis_v1_0.010641m.g) derived from phytozome v7.0 (c hr-ID scaffold_1; pos 28061400 to 28062043)
aaagtagacaggttatgctgtatacattatctcatctcctaaaatctgtgtacattcaaaatctcacgataatcacaaaaagagaaagaatcaaaatatgtttattatcatcttttgtctccaaagtaataagtcacaaactccgcaaggacaacccctatacgagttaaaatagcccctccctcttctctgtcatatgttaaggacaaaggtttaggctagttgcgggctatgtctttagaacttgagcagatgctctcttttccttttccttttccttgccaattggcgacagcaactaccaatttgattttgcaaagttctctgttgaaccttcttttcaaattttctctgagttttcacctccgcattactgtaattgggtttacaagatgatcaacataggctaaatgttgaaagaatattcctagaaagcaatgcagcttcttccaaagtctttgtagaggcttgattgagggttggttagcaagtttatggtgaattcctcagatgtcattgcattcatcgattaaagagcattacgtggtaaaacttcaccattttaaccaaatctgatttaacttttcttctatccttttctgagtgctaaaaggggattcttgtgattcagctggcatattctc

SEQ ID NO: 94075 - DNA, 934 bp, Eucalyptus grandis
  Intron number 1 from transcript Egrandis_v1_0.006358m (loc us Egrandis_v1_0.003806m.g) derived from phytozome v7.0 (c hr-ID scaffold_10; pos 3794495 to 3795428 reverse strand)
gaaggacagacgtgcagattaagaagcaatacaaggttatcttttaaatgtagttgatccgttcatcctctcgtttgaacttttcggctagagtgtggagctctagtctttacattctgttgattagtgtcggctcatgcttgctgaaatttgaaattcaaacataaatttacatgggggagtttctatgcttcttgttcttacaggcgcttttcaggagttgtattagtggtagagaaaatcaactcagttgattgaaaaataaaaagattttaacataatactccatagacggaatattacaagcaagatttcaaggtcactgactgaaagaaggattttgggcatgataatatccatcactatagaaaacttttgaaatgataccgacatgatgatctagtaaggggtaatttacaaggcttttgaggccactgacaaggaattgaatattgagaagattttcctaatgtcacaattgatgatgctaggctagtttcagtgtccttttcctccttattctctctggaaagtcgttggcttttgtcactttccatttaattctggccataaagcttatcaaaatctttgaaattcacaaacttactcaactttttcactttcaattgtggcatacagcttatccaaataattgaaattgacaaacttactcaacattttcacttttgtaggatctagctgaaatctgtcgaaagttccaaatgctcaccgttagatggtcagataattgaacttctttctacacatgtaaagcctactctttgtattacgggtctaaaagatccaatatactggatcatgacacagatgttttttgttctttatacatgaagactttattgtacaaatgctcaacctcttgcttgcttatgttgtaggagttgggagatttgggccttgtcgctaaagcaag

SEQ ID NO: 94076 - DNA, 622 bp, Eucalyptus grandis
  Intron number 2 from transcript Egrandis_v1_0.022954m (loc us Egrandis_v1_0.017548m.g) derived from phytozome v7.0 (c hr-ID scaffold_8; pos 27003862 to 27004483)
gtaattgctttttcaggtctgtgttccttgttagaaaaagatcaccgtattgttcatgattttgttgaatgtttccagggtttgatttgttttgttagataacagtattcctctctgttttggaagatttatggtacgctcattgcattaccactctgtcgtcaggacacaacacacagtgcattttatggtacactggttctggaacactatcatcgacgtactagaaattcctcagctgaaaaaattattgcaattcgtatactgtatcattctgcttgagacactgtatctaaaaatatatattgaagaagagctctatttgtcagggaatgtagctcttttaacttagtctcgaggatattagattgactcttccgttatccaactaagtaactttgtaaatttctatcactattgtattgctattgtacaacgcctagagaaactaaccatgtgcctcattcctgttttcattccacatatttgaattatccatcctccaggtaatcttacagccttgtgtggagcttttgtttatagaaacacctttgctatggttggaattttcatagttgtccactcttgttaatcagggcccttgcagatcagttggaaggca

SEQ ID NO: 94077 - DNA, 573 bp, Eucalyptus grandis
  Intron number 4 from transcript Egrandis_v1_0.008624m (loc us Egrandis_v1_0.008624m.g) derived from phytozome v7.0 (c hr-ID scaffold_10; pos 30684643 to 30685215)
acacaggtatattcttagctttttgcagacaacaggtttgttgtatcttggtttgtctcagacggaaactgaccattatcaaataattatatttgaataaacatcattgaggtacatatacaggaactcatttttcccaatgaacaggcaaatgttacaagaacaaatcacattatgtggaccatgggtgatgattttgtgtaccagtacgctgagtcttggttcaagcagatggacaaattcattcattatgttaacaaggtaaaactgcctgctttactatttgcttttatgattgtgaaatgcgagtgtttatgcatcaaaacacttgaagtttggcaaagctcatttccagtcacagataatctggagacttccaccagtatctttttctctgagatgtaacataaaaggatctacaattagtctgaaataacacttagtttaaaatgacactttctaagcttactctggagagtagagatatgtttttgcccctctcttctcctttttttttccaatgcacttgccataattttcttttcctgttcctgatatttcttctctctcagg

SEQ ID NO: 94078 - DNA, 250 bp, Eucalyptus grandis
  Intron number 2 from transcript Egrandis_v1_0.033907m (loc us Egrandis_v1_0.033907m.g) derived from phytozome v7.0 (c hr-ID scaffold_1; pos 38407679 to 38407928)
gcagaaagccgtagaagcagcagccgacatatacggtcagcaaaacttttcttttttatcttctgaatcgtgttgctggacttaagttcaaagggtttcttccttttgatttccaagattttccttaagtcgacagaaggatctcgttctcttttccggtatattcgatcgtatcctccgattaacgtgcatttaataaatgaacaaacaagcaggggtggattcgatagcggcggataccaaggagcag

SEQ ID NO: 94079 - DNA, 993 bp, Eucalyptus grandis
  Intron number 2 from transcript Egrandis_v1_0.013935m (loc us Egrandis_v1_0.013935m.g) derived from phytozome v7.0 (c hr-ID scaffold_10; pos 10735103 to 10736095)
tttagcttcctcagctgcaggcttggcctgtttaggtaacagatctttttctcagttacctttaatttaacttgtaggttgaagcgtttaatctacccatactgtggatagctggatgatgcctatttcaagtactttgtcaatttgctgcttttttcccccttcttccaattaactcagaacatgaataatacagtaggtcaatctttgtcatccatgggatactccaactggtcaaattttgtgatgtactaaaaagtggtctgtagcaggacgttacgcttcagttgaatttttaacccttcaccggcccaaacaatttgtatcgacctctcctgcagagttggagtttcaaagagcaagaatatggatagaacactgtctaacaaaagacgaggcaacatggctattatctgacagactagaatgaaaagcacaaatcttgttctaacaaataccatatgtagatgcttattcgtgcactgctgcatgtttgcgttgggcatatatacatatgctcagttaatttatagcattaaaattaggtataagtttctcaaatgtccatacaaaagacaatcatgtaggttaagaagcatgcgggcagataacagaactaaagaaaagacagagtaattgtaatatttagagatcgtcaggtgcataaaactagggaaaggaaaagaacaagatattttgatgggtttatattttacatcgaggatgtacaagaatgcccatgatacagatcaaaactagaaaggatctctagaagtatcattgctatttagacttatatctagttgatgtatactggacttttttattcccacatgctgaatctatggttcctacttaatttattttattggcgacattgtttcctcgccttgagattatgttatgacatcttttgttttattaggaaaataatggacagttctaaaatttgtgatttcatctctttttgcagtgtttgctcttggaaagtta

SEQ ID NO: 94080 - DNA, 651 bp, Eucalyptus grandis
  Intron number 1 from transcript Egrandis_v1_0.049152m (loc us Egrandis_v1_0.049152m.g) derived from phytozome v7.0 (c hr-ID scaffold_1; pos 32346869 to 32347519)
gatacttgggtaatctaaaaatgcctcttcggagtatagtttcttgatggtaccaaccatgctttctcatcatgtgcacaaacgttgctacatgttttcgaatgtttttggtgattgtctctctactcttgcctgaaagaggactgttgtagcaaatgtcaaaatccctactgcctaacagcagcttgcgggtcgggcttttctactttgtttcaatgaatttgggagaaaaatattttgaactgtcattatataggccatgagattgtaaaatctccttcaggatttttgcgatgatagatgtcccgatccatctaaaccattctcagtggaagtatctacatcgagttgataagcttactgcattcattctccacgaaataatgttctaatttacgcgagtttcagcaaaggatgtgccgatttagtattctctgttttttcggctcaaaatccttcattgatgggctatgacactcgctagagaaacttcattccagtacttgctttttggtgcatcgtggcacgaaaattcttacttggttaattctatattcaccttcttggtgcatcgaggcatgaatatactgtgttgattcgttctatatccccatcttataatacagggatttgttcaacctttttggctgc

SEQ ID NO: 94081 - DNA, 433 bp, Eucalyptus grandis
  Intron number 1 from transcript Egrandis_v1_0.023227m (loc us Egrandis_v1_0.023227m.g) derived from phytozome v7.0 (c hr-ID scaffold_1; pos 3304509 to 3304941 reverse strand)
gctaccggcatcggagctgggcttcgaacttacaggtaacagccgggttacttcggagattggtgcttgttccgaaagactccatctttacccttttactcgcgcaccatctccacctgtttgttttattgctcttgaaccgtatgcaatgctgagagtttgccttattatcttctgagttcttcgtcgaagcttttcacctgtatatgtctagtgtgcttgaataaatgctggccagaggaaaaaaaaaccgttcctttttgagaaaaccagatggttgctctcaccatgctcgtgggttgggacaaattttagtgttttatcagtaaaattcaaatttttgtaaagagttgggacatatatggggtcaaccttaatgggctctttttaattcgcagttttaatctcggttctccttgccggaaatctacag

SEQ ID NO: 94082 - DNA, 770 bp, Eucalyptus grandis
  Intron number 1 from transcript Egrandis_v1_0.015971m (loc us Egrandis_v1_0.015971m.g) derived from phytozome v7.0 (c hr-ID scaffold_1; pos 5299788 to 5300557)
gtacgtgtgcgatcatctgttccggcacttccaaggtccgtttcttgatgatgaactttccccgaggttgaaccctttgattgatcggaatgttgttgatgaattgaggatttttatgtggtgggttttctcatttgttggaagtttcttgtcgaagttgtgcagagatttctgggtttgctgaaatttttattgggttctgatcgtttggcttatagaggttggcacacatagccattttcgttcttgccgactaacataccctttgtgaagtactgcatgcagattttattaatttacttattttagttttggctcataattatgttcaatttgtaatgaatcttggattagcagactcatttcgagtaggatgtagctgggtccaatttggtaagagaatttgagtgagaactaagagaatttgagtgagaactttgctcaacttctgcttttgaactttcagaagcttatatcaggcacagttaaatgcatccggatctgaatcatctctcctgtgcgagtgcgcatgttcttcatcttattaaacttagctatgcctgtaggatgggcctagttgaaactgggattgagagaaagaccagtggatgtcatggttaatggggaggcatccatagctttttttgctgtatcttgtcttttcccttgttttgtgtaattgtgctatttaaggaggggccttcttatcttggcgctcttaggctttgtgttgatgcagcattatcagctgaagcggagggagttgtgac

SEQ ID NO: 94083 - DNA, 791 bp, Eucalyptus grandis; identical to SEQ ID NO: 93679
  Intron number 1 from transcript Egrandis_v1_0.014444m (loc us Egrandis_v1_0.014444m.g) derived from phytozome v7.0 (c hr-ID scaffold_1; pos 20540688 to 20541478)

SEQ ID NO: 94084 - DNA, 729 bp, Eucalyptus grandis
  Intron number 2 from transcript Egrandis_v1_0.009519m (loc us Egrandis_v1_0.009519m.g) derived from phytozome v7.0 (c hr-ID scaffold_8; pos 73425949 to 73426677 reverse strand)
gctgaaatctgctcttcttttccggtttgttcctgttttgtctccttgtaattttttatgtcatctgtctttcagttttattacaatctttgtagtgttcggtgataacttatgataatttgtttgcgcgtttaatacctttcgaaacttaagaacttgtttgaaaagtcaaaaagttatgcaagagttaaagattgtttatctgagcatcttgatttagctcctgtaaaaggaatctgttttgggtctaaagtatactcctgcagtcataacgtctcacatgaatttataaacaaacagaagggagacaggaagtaatcctggtgtaattccaaactgcgaagctattttcttagctgaaatgtttggcaaatttgaaccttaaggagatttctttttacttctctttcatgagaagctagcagaactgacccaaaaagactaacaagaacactttcgagaaaggaaagtggtgcttgtaaatccttttgtcaaaacttaagttgccgttctgttttccaacagaatttaaataagttataaagaagttagaaacaaagtcctccgaagtactaaaaatgcttcatattcctcgatttaggttttacttatgctattttcagggtctatttcgaaaagaagttgatgcttttcctaaatatttaatgatcttaactttttgaacttttgacagacgaccggttccctttatttttgggctgcccatct

SEQ ID NO: 94085 - DNA, 920 bp, Eucalyptus grandis
  Intron number 1 from transcript Egrandis_v1_0.011505m (loc us Egrandis_v1_0.011505m.g) derived from phytozome v7.0 (c hr-ID scaffold_8; pos 3896941 to 3897860 reverse strand)
ttcttgtcaacacgttctacgagcttgaggctgaggtgagaggtttttgttggttactggtgactagttgtagatgataacacgtataattatctaacgaaatggggccctttgtcctattttttgtggactttgtggaagtaatttgtacttttttagcctgttgaaatgctgtgttaaatttgggtaaaccagaagattcttttctaatccatcataaatcaagtcaatttcaaccattaatatgctggatgtctcatcatccaacagtgactttgatcatgtaaaataagatggagtaaatccatacaaaaaaactgcacggaaaaatgcttcttgaatacttcactctgctcattgacaaaaaaaaaaaaagaatacttcactctgcttacatggtaagcgaaaagagagaagtctacttgaaagtgctgacctacaaagctgattgctctgtttgttgagctagtattttccaccaggcgaactgtgcgggctccatatattcaaatcattaaatattgtttgacttcatgcgagactctattctagggctctattatgctgtcctaggacttatgggcgcctcctgaagttaacacgtgcttcatttacatcgacccaattatgtgcatccaagaatttttcctagcattactcatctcgataaatgaccaaaattccgaagttagctgcacgtcctttctcaaggtgttcgacttagagccgtactcagcgcaccccacgaagtcaaaagaaccagtaaatatcgtatatagtgaacaacagcatgtgtggaaaagacgtaagcaggcgctgtttcggagaaaaaattagggaaaagaaaaatttatgtggatgttcaaatacgacttgacttcatacatttatccaatgtatattcgcaggtggtggatacg

SEQ ID NO: 94086 - DNA, 853 bp, Eucalyptus grandis
  Intron number 3 from transcript Egrandis_v1_0.024472m (loc us Egrandis_v1_0.024472m.g) derived from phytozome v7.0 (c hr-ID scaffold_1; pos 9064973 to 9065825)
cagggccattcgctcgaggtatgttgagttctccgttttgttattgatgctgcaacatgaaagcaagttctttgaaaattttagtcaagtttcgattagattacacctgtcatggaggtggtcgactgtgaggtacagtttgtaaagtggacaggttctgatcatggtcacaccggtcttgttgagcagatggttttgatgcgcaatgcccggttgtggtctttgccatcaaaattttcacatttgtaacttctaatgaggcgtcagaaacagcaattcggatatttatcgttggggatgtacatgattttctgggccgtcaaatggtgattacccataaatatagtgctgtaatcttgtggaacatcataacatggaagaaccattgaaaaagcatcaatcttttagtgtgttctagtctcacaggtagatattttatgataaaaaaagttttgattttggttgaaaaatgaagctgttttcttcctttccatttgtctactacgagtttgcctatactgaaatcaagaccttgcaggataaagtatgctggctcatctgattatgatatgataatggcgtgaagcattggatcccgtcgaaaagaactccaaaatgcaagaggctgcaatcttgtgtcttgattggactagtatcaggttgggggaccacctgagaagatccattaagtcaacctcggtcacgcatgtcctatcttgaggtttgaagcaccgttcattttttattttttttcctattgatgtctagagatttggcatgcttggatctatttgtcaatatgctaaattcatttgcagacgcctttcaagtgttctgtagaggattgctctgc

SEQ ID NO: 94087 - DNA, 932 bp, Eucalyptus grandis
  Intron number 1 from transcript Egrandis_v1_0.000790m (loc us Egrandis_v1_0.000689m.g) derived from phytozome v7.0 (c hr-ID scaffold_10; pos 30339067 to 30339998 reverse strand )
cggccgactccgtccagctcagcccctcgtcccaggtaacccgctcggctcgccggcctcctggtcggaggatgccatcggcgatttcttctcttctctctctgctcatttttgatacgtgatcgtggcgatgttggggttactactagtctttcgtcccgcgatctccccggtctttgcttttcctggtctgcgcttaggtttgtctggggactgcgtgctaactggtcgagtccaaagatttcgaaatccgttcgctgggttttgctccgtctgtgtagtaatggtaatgcatgcatcgtttgaggggatggttatgaatctatggatcgatgacctgaacagtgtcagtatcgatcgtccggaggtccaatttcgcggcaaagttgggttttttttgtgtgtgggatcgcatgcgccccaagaacttttgaggatgacaatccgtttttatatttaagatacaggcggggaggtacgtgccgcccaaatcacttctccagttggcaaggagataaaggaaactttgtttcatagaaaatgactgatttgtaaaataattttttttaaaaatgattgtctatatcgcttgcaaaaagatgaataaatgaataacatcgtacacaaaaatatataagcatgaattgttattgataatgaaaacattttttattgactaattatttcaagcgatgcaatttattattcttaggaaaatattttccgaaccattcattttccgcgaaacgaattaagtcttaagtaaatcttctctgattttttttgaatggcaggctccttctaggagttgcacacctttgaaggttttttttttttttggttcacttcaaatttatgcatgagtttgctagggaacttaatgtgtttcattgcattaacataagcagaagaggatcggaaaacttgctgac

SEQ ID NO: 94088 - DNA, 637 bp, Eucalyptus grandis
  Intron number 1 from transcript Egrandis_v1_0.000365m (loc us Egrandis_v1_0.000365m.g) derived from phytozome v7.0 (c hr-ID scaffold_8; pos 59027786 to 59028422)
aaaattcgtccttctggactgaaaataacgtgcaggttcgttaacaattggtcttcttccttatttggccataaagtactctatgacgattcaacattcacagcaagtcttctttgagtttaaggatatgtagtcactaattagttaatctagatgtaaaattttctatcagagtctgtctatttatggtttcattcgaagtcattcaatacattttgcccgtaagaaccgacagcaagtttatgcggcatcacagcatgccacaggacaaatagataaatcgtcatttagcagcgccatgtcaactttctccatggagggagcccaattcagattatttcgaaacatagtgacattattcaaaaatttgggagcaaaacaacttatagaaattggcctaaaatgttgaataactatctttgcaactaacccaattgtttcctattacaaacaaattttacacttgaactcaattcattttttttttttgggtcattgagctgtaggatagatttagctagtctgcaccactcttagatattattaaataatttagctcatcatcaagagagcactgctgagtatatggagtgtggatccaggttttgataaggattcgaccattgagtaacttgga

SEQ ID NO: 94089 - DNA, 1000 bp, Eucalyptus grandis
  Intron number 2 from transcript Egrandis_v1_0.017360m (loc us Egrandis_v1_0.007057m.g) derived from phytozome v7.0 (c hr-ID scaffold_8; pos 40077414 to 40078413)
cacttctggcattattcatcacgtcagacttgaaggtaactggaaattggtgaaacgcgacataaggtttttgatttccattacataacttaaaactctttcctgacacatgggaaaacatgatctggattgtcggtgttttttccctttggtgttatgtattccttaaatgagagcgatgaattccttcatttactgtaattggctccactctacttttgaacttacccttgcaactggaactaagatagcattttctgaaagaggtctagggaccatcttttttaatcgaattcaacggattctgcaggtagatgctttaaggtgaatgagaagcttcagttgatagacgctatcttatctgtaattgcttagcgtcacatgctgcctattatcgtcaattttttcctgttcttttttcatgcaagctgctttcatgttatcaagatggtgatcatgcattttgtatgataatgcttgagtaataagaatttcacaatgaagaccagcctaaattacacaacaattatgtttggattaaatatggcaattgatttattcactatgagaagaaagctgataaagagtacttcttcagcaaaatgattctctacaagaagaaagctcgtaagcgatctttagtactctgccttctgtgttcactgcaattgttagtttgaagaatctgaagacactaatacatttatagttctatcgcattgaaaagagattgatctcttcaccctccatcaaacattaggttttgaccaaataaacaaattttctttaggctgtcctgcaatttaaaatgtaaaagaattttatgtggcatgtgccggtttttattttatccttttatctcgggtgctgacaccagtctatccattttatgataccgacagtttgcttgataaaaatttaagttacttattccctgctctactgaaatttattttccttcacaggtcttaaatctgctacgacttattattttaagtgt

SEQ ID NO: 94090 - DNA, 755 bp, Eucalyptus grandis
  Intron number 2 from transcript Egrandis_v1_0.012876m (loc us Egrandis_v1_0.006784m.g) derived from phytozome v7.0 (c hr-ID scaffold_10; pos 22971867 to 22972621 reverse strand )
attctggaacaattcaggtttgctcttgttctttggcaaccttgtctactatttctttagctacccgtgcattgagtttgtttcctatagggatggaattggggcaggtataatccggtacttattcctttacagtctttagttggggatatatgtctattagagagagtagcatcacttgttgcgggtatcaggtgggaagctgacaacttaaataatgtgggtttgggatcttatttccaaatgcaacaggttaggagggtttatgaaatgacgaaaagctagcgggatggattttagttgaggaatgtttagccgttcattctggaagctcgtgatcatcctcattaagaacttttatgccttaattgaattgatcatgctaaatcctttgtatgtagttatagtttactttgacccagaaagtcaaaccatctgaagtgttagaagatgcatgatgcaatctttgttttcattttcttgacttgttacactgaactttctacgtacaatagatggctagctgcacttgcttccatctgctggctagagataaatggaactatagaggtgcactgaaattttatgttgcacttatctgggatgaaatgaactgctgtgtagtttagatcaccctttaataatttaacattctcttatgctatatgtctttctttcttttctttttctactgaaacttataagatcaatcttcttttctttgcatggtttgcaatcacttgtctcatacttag

SEQ ID NO: 94091 - DNA, 643 bp, Eucalyptus grandis
  Intron number 1 from transcript Egrandis_v1_0.024451m (loc us Egrandis_v1_0.024451m.g) derived from phytozome v7.0 (c hr-ID scaffold_10; pos 3312148 to 3312790 reverse strand)
gtccgcggcaaggacggcagcgctttcgcccggtaatgtcgtcccggttgctttatatatattttttctttctgaatgcgttttccttcgccgaagaatcgatgtctagaactagaagttgttcgtggagcgaaggccgtgcgccgtgctgtgtcggtcatagtttttaggttcgaagtgcgtgtttttctacctcgctgctccggttttcttttccgcttagctcgttccttgatcggcgatttggtctagctcccgtggttactgtatgtgccgagccagacgcaatgtgcgcgcatctgccggttttgattttgcttttgcagtacacaatgtcatttacctgttcgtgttttggtatcggtcgattttttgttagttttctgcgggaaatagtttgtcgacgcctacgagttatatacgggatgtaagcatgttttgctagttccgattcacgtttggattctgctgttgcttttccgtcgaagattttgctcggtttgttggatttctatttcgcacggttagttgtgaaaggagtcgtacggtgctctgcaattattttccaaaatctggtgttatatctggaagctgtggctaatctggatgtgaaactggatttgcagtgaagagtgcaacaagg

SEQ ID NO: 94092 - DNA, 935 bp, Eucalyptus grandis
  Intron number 4 from transcript Egrandis_v1_0.044745m (loc us Egrandis_v1_0.044745m.g) derived from phytozome v7.0 (c hr-ID scaffold_1; pos 14653944 to 14654878)
gggctcggcggctgcatcactcaggtaaataataagtcatttgatttcattcattttgacctaacaagcttttctcactttttttctcctagaaatgccttaataattttgaagattataataattttgagtggccgaatttaacttgggctttatccgtcgttaaaagactacttgtttgcgcgagtgatgtcgagatgtcaaggtaaatgcacggcaatatcttgaaaacgtttcgattgaattcatgatgcatgcatgcctcgtccgtggaatcgaacacgacataattttgtaaaggcaattatacctttttatgggcttgatgcgttgtttctatgactttagggaaaaagggggcatttgatattgaattgaagaagaaaatatggcactttgtctccccgaaaggcatgtagacagaaaatgcatctttcaaaagctctaaattttaacgtgccaccgatcccgaaatcaaggaaaggtgaaaggaaattttctgtaaaacctgatacaatcgcagttttgcgcagcgatttttcactacgcttaaaatttctttttaagaaaacccccatttcatagtatgatttaaaagattggtttacgaatgggtgcatttggacttctcccgaggctttcgatctcaattcaaccttccaactaattgacctgcttgaggaaaataagctatggaaaaggttgacctgcctacatcaagttgagaggatgtcgttgaccttcggcctccgttgacttaaagcaggtgcgggtgggtcccggtacaggaattattattattattattattattattattattattttaacgaatgaattataattatcattatttaagctttgatttatcagtcttttgattttcgcctgcttcttttacaaaggccaagttcaaggcaagagcaacaataata

SEQ ID NO: 94093 - DNA, 967 bp, Eucalyptus grandis
  Intron number 1 from transcript Egrandis_v1_0.016940m (loc us Egrandis_v1_0.016940m.g) derived from phytozome v7.0 (c hr-ID scaffold_8; pos 47516175 to 47517141)
cgtccgttaaggctggtgagtgtgtcgtttccatgttggtttgctggttctgcgtttgcttagcgacggtttcgttcggtagcctgtgacgcatttcgtcgagcacgtggtggtttagctttggctggatctgtgctcccttgttggggtgtggcgagaagtttgtacggaatcgggaatcgggaatcgggttcgactaacgagtaattagaaatggtcgagaaacatagaaaagtacgtcccttttttcctattttgactcaaaaggagaatctttggtgtagattcgggttgctttagggatgccatctgggaaaagcaagctaccagggttctttgggctttaaaggtctaagaatatgatccttaaaggcgaggctaagattgtttgttgggttgggttttttgaagggtttaagagaaaaagaatcgtgtcgtgaaaattcatttgaattttgggttttcaattgtttgtttgtttaattcgtttgaatagggaaatactgaaaagccaaaggtacaagtaccaccgaagatcatgggcataacttgtcttatctggtcgtgtatgttgaaacttctctataaacaagaggttccctttgtacccaatcacctaaattgctttacctggctgaaattactattggactgacctggattgcatgaaagcaattcccaaagctagtgagtcatatccaggactaccttgagcagagatgtggattggttgcttggtggagtaacgtatagtattcattgtgtcgaccaactttattggcatatgccttttatatacaattttcaggtattcaggttttttggattttgcctccttagttatgtcaatggttaagttttataggggacaaagcgagttgccaacattttcttaaggctataccaatgttggtctttgacaaattgtttgttttgcttgatgcaggaaagtggcaaagaaacaaat

SEQ ID NO: 94094 - DNA, 794 bp, Eucalyptus grandis
  Intron number 3 from transcript Egrandis_v1_0.043735m (loc us Egrandis_v1_0.043735m.g) derived from phytozome v7.0 (c hr-ID scaffold_463; pos 13942 to 14735)
cacaaattgttggagccatcattcgagccgtcagtgtatgtcacaccaacttatttcaatttttctcttgtattccacacgaaagcaatctagactgagttcataaatggagcaattacactaatttgggcctctttcctatctccatatcaaggacacattaggacataaagacctatggagtagtacttcattggcatgagcttaacgttaaattcacgtattaaaattaaggattgctttgaaatcaccatgtttcatctacgagcacatgttggtgaaaccctttttttagtccagagcttaacattcatttttttccaattaaatcaatgctcacttggggagcccgttggatagggaattaaaaaaacaaatttgactttatcacttcgctacttgaaaaaaaaaagaaaaaaaaaattctttcattagctttacaaaatgtaaaccctaataatagtaataaccaagaggaaatttagatgccgcaaaaaaaaaaaaaaaaaaaaaaaaaaaaaaaaattgacataactaaaatagtcactaatacacattgacccgcggtcatggtgactattagagaagtatgatgatgtccatgatgcatgaagcagaccccagaagtgattcatgtatacttgcaaaatcatccttatgatttgtctcgagattgctttttttcttttctcatttctcactattatcaagtatccttttttttttccttttttatttgaatcatcttgatcatgacagactctgatagaagaaggggctgtaaatctggtggt

SEQ ID NO: 94095 - DNA, 765 bp, Eucalyptus grandis
  Intron number 2 from transcript Egrandis_v1_0.048707m (loc us Egrandis_v1_0.048707m.g) derived from phytozome v7.0 (c hr-ID scaffold_8; pos 32598919 to 32599683)
tcgcgctctcagccgtcattcccaaccttaaaaaggtacaagccgaaaaagtctggaaattattaggattgcaggattgatcgatggttctgacaaagtatgagattaggacagattagtgtagtcgttagcaccggacgagggggatgcaacgcatcgatgggttaaagagtttccacttgctgagaattcaagattcatgctctcttgaaatatggggttctgtaaaattggcgtctctccaacatttatgttatgtacatcaaggacttttttagtataacagttttttaatagctgtgaaaataatagtttattttgagttacaaattttttagagaacaagtcctacaataaattataattatttattatttaattttttgtaatatagaatagattgttattctaatggtagattaaagacttttacgcaatacgtttaattcatataccacaatcacatggctaatttattttgttttgagattacaacttaaaatctatgcttatcgcgtgacgcaaaacctggtgagatgagtgaagatctatgattgcaaacttggtgtaatgtaaagaaaagaataatgaagtcccataatcgttggtaagggaaaatctacgtgctctgataactagcttaaactagacgcacgcaactgataaatcctatttatttcttcatcaccgatttaggggaaccatttcagaacattttcacatcgttataactgttctaacattgatgttaaacgtgtatttcag

SEQ ID NO: 94096 - DNA, 880 bp, Eucalyptus grandis
  Intron number 1 from transcript Egrandis_v1_0.024013m (loc us Egrandis_v1_0.024013m.g) derived from phytozome v7.0 (c hr-ID scaffold_10; pos 35310381 to 35311260)
ccgccgcgccgccttgatcaaggccctcaccaccggtccgtccgcctctcttgttttccttcttttctgtcgtttctgtgggtaattcgtacgctgaattctgcgttgaacgcttcatgctgtacgcggcttgtgcatgaaactctgaccagcggagaagggccgccttttcgattccgacgattcttttcttccgttgttgttgtcggctgtccgcttgtgcagttcaggcattgctcctctgcgactgttgatgtcgtatggcgttctctgcggggaatttgtagccgtgaatgacgttttcgtgtgtgtgatgttggggggttggagggtgtttgtttatttgtttgttttttctccatgttctgtcttgtatacatggtcggttactggactgcaagttattttgattttgcaaattcttcgcgaatagattgatgggtagtattgcgagcgttggcaggttttgaattttcggtttatatttcgggtgtggaggaggagatgaattgactctatgtgaggtcgacatggttatttagaaggagggaggcagagagagagagagatgtcgatcagcggcaatgtgatctttgtcctggtttttgcaaaggtggaagtgtcgtgttcgttgggtagataattatccagttggggagtaggcaggaatgttaattttggagttttgagtccttggtaattttatgtgagcaagctggaaggagcatgtagccgtgctttctcctgcaaagatatcttgagaatcaagtgcttttgttagtttctcatggatagtttttgctggactggtattgtaaaaatattcgtgactgttctcttctgctttctccctaaaagggtgcttgctctactgttgcag

SEQ ID NO: 94097 - DNA, 737 bp, Eucalyptus grandis
  Intron number 2 from transcript Egrandis_v1_0.025671m (loc us Egrandis_v1_0.025671m.g) derived from phytozome v7.0 (c hr-ID scaffold_10; pos 2802793 to 2803529 reverse strand)
gcagaaaggtaagtcagtgcggtgtgttgctgggtttgttcgattttttccccttcggcattccttctgaaccaaataggaaagcatgtagtgtcggttcaacttaggtttacatgatcaaagatttcaagaattggcttcttttctatttggaaaagattgcatgttatattaccccatcgacaagtaatttggggtcgagagtgacataaagaggatgcaatttccacatgctgattgtttcattacttctggttgcacgtcatctcatttttcggtgcaatactggtgtaacttttttgagtttggtctctgtagacttccatacggatgttcttttctcgctgtattggaccctctattctgaggtttgcctcacttggctaggttagtttttgtttgttctgtcagacacgttattagcaaaaagctattaaattatggagaacgtggcatgccgtccagtaaatagaggtgctcttatgtggccggactcctgtctgatcgagcaagtttatctttaggatttagtcgatgcttcttgttctgtttagtcctccttctcacatattcattattcaaaagctttggcctataactagatagcatcaaagaactcaactgttgaagcaatgctgttgctaagaggattttctttgggttggattaagttaagctgcctttaacaacaccaccttttattttactaatttgaacaggaaaggatctgcactggt

SEQ ID NO: 94098 - DNA, 720 bp, Eucalyptus grandis
  Intron number 1 from transcript Egrandis_v1_0.014709m (loc us Egrandis_v1_0.011776m.g) derived from phytozome v7.0 (c hr-ID scaffold_10; pos 22917867 to 22918586)
cccaagggctgtaggttagaatatctttgaaaatcttgatttcgaccgaagatctatataactaaataaacaatgcatctcacttgtttctttctctttgctactaaatgggagtgcttttgactatttttaatgagagaggggttttagataaggtgatcccctattcctataaattattgttatgtgttccgaaattttgtcccgcttattataaaaggtgaaacattttttttttaaggaggaactatttaaaaagtttaatgtgtatcaaaataggtgaagagtatttactaatttctcatctgatgcatacgaatgattaattgtaattttacaaggtggatcacacaattgtgaggagcatcaagaattgtctctaaagataaagcgatttgctcaaatcatagaataaattataaagagtaatgttagaaatattaaaggccggttgataaaaatggaataaggatagtatcatagtagaggagaggcagggacacgctgcatttccagcaacgtgtctacacaggatctgagggaatatctgatacttcatattcctacagtccacatcggcagccatccacaaggcggacacgtggccatgtccaagcggagcaaataactacataaacgcccgacggttttcagccactagtccaagcgctcttgcaatccaaagccccccctcttttctcctccctctctctctctctc

SEQ ID NO: 94099 - DNA, 546 bp, Eucalyptus grandis
  Intron number 2 from transcript Egrandis_v1_0.027595m (loc us Egrandis_v1_0.026355m.g) derived from phytozome v7.0 (c hr-ID scaffold_1; pos 34246277 to 34246822)
tatcatcttcatttccaacgacaagaagcaggcatgtacttctttttcgttgaaactttcctgccattttgcttctctatttctttccatattccttgggtggttcttcgcgattttagcccttctgtttctgtccatacaaaataattataggtctagtagagactttgaaggaagagaacaatggtgacgcactaaaaatactatcctgagcaattcaaatgccctgcgttcacttttattcctgagatggaatatgggctatccttctcacaagctgatgagagctaactgtatgctgggcttgttcttataaaagatactagacttcgaaactgaattccttgctaacataaaaattgcaaagtttgaatagcgtgatctccgtattggcttgataccatagagttttttctcttctttgaagtcaatcttaaatgaaattgggatctttaaaatctttgtatggtgatgcctggggcatgttattgttgcttcctgatttctgcagattgcactgtggcatcagaaggccagcaaattcac

SEQ ID NO: 94100 - DNA, 785 bp, Eucalyptus grandis
  Intron number 1 from transcript Egrandis_v1_0.023231m (loc us Egrandis_v1_0.023231m.g) derived from phytozome v7.0 (c hr-ID scaffold_1; pos 36939040 to 36939824 reverse strand)
ggaccttcctcgtaaatcgcaatccttgcttcttcttctccttcttcttgatcatctattgttttcatgatggaaagccttttcccattaagagatatgcctgcagagacagaaaaacaaagcattgtgactttcttttaattaacctcggaactatcgctctcgatccagctattttttcgtgcggatgtagtaggcatttctaaaggcatttgctatttgccccttttgactttagtgaaacaatggtctcagatgcttctcatttgagatttcttgcatttctccaaatcataaaatgggtacttcttcgaaacacaatctcttattaagttccacaagtatgggagaacatagtacgacagataatagatgatgggcttcactttttctgcccttgtctgaaaagaaaagaaccaacgagaatttggagaatctcatgaggaagttgtacctgttagaccctaatttatttatggttttcttctaaatatgtttaacgcgatgagcttcaacttttttgcagcaagcgtatattttagaatgtatcagttggagaaatcattccataattcatgatttattttcccaagcagtgttcatatgcatccacaatatgtatacacagtctataatttcatgaacaattttgaacccatgcttgtgtgttagtactgtttaaaaaacaattacaattcctctaaagaaagattacagctctttgatctactctctactctattatgtaacaaaattcttttggatccagaatttgcgggagatct

SEQ ID NO: 94101 - DNA, 604 bp, Eucalyptus grandis
  Intron number 4 from transcript Egrandis_v1_0.049994m (loc us Egrandis_v1_0.049994m.g) derived from phytozome v7.0 (c hr-ID scaffold_1; pos 13518745 to 13519348 reverse strand)
tatagcagtcttgaacagtttgaggtttggtcatttcctcttctaataaatttgcctttttcccccaaatgaatgtaacagtagctgctgtctgtccattcattagatttatcggccaaagggtagcatccactgttttatggcactgcaatattgtaatagcatctgtttggaatgtaagaatagactcgctgtaattttgtttctggtttcagacagaaatttgttatcgattatcaatagacagtctaacatctcatgcagtgcaaagatataccacgataaacaggggcatatcctcccataaacttgaaagaaaatagctccctttgatttttctctgtagttttggttaagatgggtccatcatcattaccaaagaaaatcggctattgtacatgatgctagcgtcatagatcttcttttccatgctttacattaagacctttttatcatcccaacaacgcatacaagttactgtcaaatcgaggacaaaacagcagttgaatgcaattgagctgtaagagaagatgcactgtcatgcaaaagtctggacatcatctgactgatttgtttcttctcgccttgctatgtcccgtgcagc

SEQ ID NO: 94102 - DNA, 797 bp, Eucalyptus grandis
  Intron number 2 from transcript Egrandis_v1_0.030639m (loc us Egrandis_v1_0.030639m.g) derived from phytozome v7.0 (c hr-ID scaffold_10; pos 27754588 to 27755384)
ccgctcccgtcgcggccccgtcgtccgagccaaaggtgcgaatgtcgtcgtcctcttcgtttgctgtttttttaatatttgtttggcgctgttcggcgtgccgtcctcttcatgccggtggcgtcggtgcttttttctttttgcgcaatcggattagttatctgcagaagacgagctctgcagtttcactgtttatctctggttagagtaactgaattcataacattggccttatggctcgaggatttgaagttttttctttgttttcccttggttgatgtataggctgattggatttttttagtcccgtttagctgtaaaattcgatctttattgcgctgatgtgttagctgggggctgtgagatgtttgctcattgtcgattttgtatgtgttccggttgcggcttcgaaagtgtgaaatttggtcggaattgggaaatgagttagtaatgcaatttctatttaggagtttcttacattgtttttaattctcttgtttgggaaaaggagaagagattcacaggggtgagagagagagaggggaagagatctaatcccgatcgaaaaaagccacctttttctcataagttcaatgagtacttgctgtgactaattgattctcattctctcgtagtaactccaaactaatgcacatgtctcggcttcaatagtcaaaaatcaaaatttgctgcttttctccattctagtttgtcgcttcttgcgcttatttatttgcatgtgatggaactttaatggtttgtttccagtggagccgtcagagaaatctgttgagata

SEQ ID NO: 94103 - DNA, 491 bp, Eucalyptus grandis
  Intron number 1 from transcript Egrandis_v1_0.017847m (loc us Egrandis_v1_0.017847m.g) derived from phytozome v7.0 (c hr-ID scaffold_1; pos 16362796 to 16363286)
agtcgtcggataggcttctgcgaattcgccacacggtatcggagctcataaatgcctttaacctttttttttcttttttttttctttcggttgattagatgttcttggttatgtctctctagaattacggatactagtgatgtgttgtgaattgtgaagctactgttagactttgggatttcaaaacttgcatcaagtttgggttttttcagtgaactgtcgttgaatcggcgtttgggggatggtggtgtatccgaaatgcttcagttaattatgcatttagagcatgctttcaatctggttcatagtcaagctgcattttttctttttcctgaagatgtctggctgtaagagatggcggattctcgaattttaagataatctcagaatgaattgcggcatccatcaatcggtgattttgtggatagttgatttgattgtgcgattctttttatgaccaactgcgagtagcatttgaatgcagtgcgcgc

SEQ ID NO: 94104 - DNA, 819 bp, Eucalyptus grandis
  Intron number 1 from transcript Egrandis_v1_0.008768m (loc us Egrandis_v1_0.008768m.g) derived from phytozome v7.0 (c hr-ID scaffold_10; pos 7397561 to 7398379)
aaggccctcgtctccgagttcgccgtcttcgacaggtttcgctctctctctctctttccgacgtcagatgataatgcagtcccgcagataatccgttcgtttcaacgtgaaaacgatatttttctccatttcctcgtcaagattgaaaatattatttagaattcgaagaaattcgaatatattacatctctctctctatattcgactgacaagtctgaagttggttcaaccaaatcaagtgcgatttgtcgtcacacatctcgagacaagacagggggggcattcttctattgttggcgcgagcgttcccacctaggaaaaaatcttagctcgattcacatgcgcccctgcaaaaagcgggcctcacgtggagccatctcatgaagtcgtccttttttcttaaatttgttttagtaattgttttttaagattaaaatggtatttatatctcgaagaaaacttaaagtgggagaggagagagagagagagagagagagagagaggatcttcttggtttgatgcgggatcatagcgtagaaagttgcagttactatataagatttagagctgtagaatgagatggcactagtaacgtccgacgagaattcaagtcacatagcaaaaatcttcgtacgtttgattgatgctagacattgacagagaaaaggaagtgcttttaattgcgactgtcagatccgtgaggaagtgttttttgctcgaatttaactgttaattcaaaaagagtaaaaacattttccgaatcatttatatttcaacattttcacagtctgatttgattaattaaacacatgctactag

SEQ ID NO: 94105 - DNA, 944 bp, Eucalyptus grandis
  Intron number 2 from transcript Egrandis_v1_0.055280m (loc us Egrandis_v1_0.055280m.g) derived from phytozome v7.0 (c hr-ID scaffold_1; pos 30610324 to 30611267)
ggacaaaaagcagttaaaaatagcgctttcccaaggtatgatttccggtccaattcatttgctttctttcattatgtaaagatgttaaaagttacatttctacattaacatttatacacagatcttcatgaacactcgtatctccaacttcattcttgaaaaagaaagaaacaacttctttaccttcagatcatagtccatcgttcctttagtacttagtttctgcgaagtacagttaaatttcaaaaagtgataatggtttggcaagttagtaatctttaataagtctgcaaattccgtgcctcttggtgaaaaatcatctttgaaatctagttgtctactgcatcttttcagcaattcatgatcacaattttgcattcaagtacgtttattttctgccttgctagagtaggggaagcaagttagattatatcttaaggtacttcttgtttacatggtttctacgttctcacgttctttgtaaaagctgtaatctgaataattagtgcttctttggatcaatacttgattgccattttgaagccgtttaggagtatttgaattgattattcctatcatgacgggatatgacctaccttttaccgtgatcaaaaccattgccttatgattggaagtaaccataaactacgtgagagggaatttaaggattgatcatcgaacagcgatataggagagggcatgagcctttttgctggtattcttttgtattgactcgttcattggctttaaatctaaaaaaactgtgtgagaactaaggtgcatggctagatacatcagcacaagacagcctaaaactatatcacttgttgggaaatgattagactgagattttacaataaacactatgattcgtcatgaacccgcaataatctctttgaattcttcaacaattgcagaagttactacaggtgcactagccaagg

SEQ ID NO: 94106 - DNA, 831 bp, Eucalyptus grandis
  Intron number 1 from transcript Egrandis_v1_0.025362m (loc us Egrandis_v1_0.025362m.g) derived from phytozome v7.0 (c hr-ID scaffold_1; pos 27644177 to 27645007 reverse strand)
atttgttgggtatgtttcctatctttttcaccttccctctttcttgattaagagtctcttcaattgaaaatcatcaaagtagtaaatccgttgccaattgaaacttcagttgggacgagttagtttttttggtggggatgaaagcaccttgccgccattaggctcgtggatggtttgtctttggtaatcaaagaatgtccaaagaaaaaatgggagaaactgttcgttcaaacctaagcaagatcgatggatgacatgaggtgtgcctatagtactgatccaagtaataacttcatgattgaatggcgactgaattgtttgttttttcttttgggcttttgcctctcatttgtgaccttgtttagctgccaaaaagtgtagaaactcctgatagcttgggtgaactggtttcaattctagagtgcggcaacttctgactgtctgggtggaactggtttgaattctggagtatagtaattatgttggatctggaatcttaacatttgatggtgtggttagaatttgtacactacgggaggttcatagctatcttcctcggagtaaatttcctgttcactgttcaggattatgcattagatcaataatgttcctgtagatggttgtagccttagtgtgagaatttgttccttccttgtcagatcctttgcagactgctttcatgtatgattgcaactttgcatgagaactgtgataagcctgggtagtttcgtaacatcagaaaactgtgtgatttctgcttccgtggcttttgcaccaatgccttcctttatgctaagttcagttctgtaggttgcacttgtgtgtatcctg

SEQ ID NO: 94107 - DNA, 849 bp, Eucalyptus grandis
  Intron number 2 from transcript Egrandis_v1_0.005781m (loc us Egrandis_v1_0.005781m.g) derived from phytozome v7.0 (c hr-ID scaffold_8; pos 59215610 to 59216458 reverse strand)
aagctgaggatcttttaagaaatttgggcattcctgttagttgagctctgtcgctctctctctctctctctctctctcttcatgtcaagttcttgtctttatcaagtatcaatttcacttctttatccttcaccaaaaaaaaaaaaaaaaaaaaaattcacttctttatctacttgaagttaatgccggaacatgtgacacgacccatttggaccatatgcctatgtctctctcgttggctcgtggtctcagattttatgtttgacatgagtccacttcctatgtttctagcataatgtaaggtcctgcataagcgatacaggggtgtttaaaaaaatggagagtggtttcaattctaagagcaagcaatcatctgacacaaaagcctatcagcctctcatgcagaatccaaatatgaaaattgttacaccttttgcaccatggtgttttatttttaacatgtccagtgaatatttcatattggtgtttgaatttccattgtttgacattgggtaaatgtgctatattcacgacaaatgtgcagagttgtgtatcttgacatgttatgctcgtgacatggaaacaattgccaaccctggctaaagtggatttcctcattatgacatctgagatgttgttttcctgccacttattgcaattgtgttctaatttgatttctggctttctatatatatcaaacaatgtggtgtgaattgtgatctgcctcacatggatctgtttctgtgggcttgatttattgcaaaggatgttccataggcctgtggcctgggggatagttattgctgaggcttatgctacaaattcttgtaatgtgcagagtccttttgc

SEQ ID NO: 94108 - DNA, 380 bp, Eucalyptus grandis
  Intron number 4 from transcript Egrandis_v1_0.020236m (loc us Egrandis_v1_0.020236m.g) derived from phytozome v7.0 (c hr-ID scaffold_1826; pos 2243 to 2622 reverse strand)
ttcatcttcggagcactctcacttctagtatgtccgacacaacatcttcattagagtctctatgttcttgcttggctactcaataggggaacctgaaatagttgtgggatagttgaattcagctaattcgaagacacaagttcttgccattattcaggaatgctgctttatttgattatttagaagcatgttcacaaaggaataaaaaaaaaaaaaaaaaaaactgagcaaaatggcatttgcagcgtaagccacttcagaaatacgtaaattcaggcaacgcagttaataacgagttgcttagaactttttataatgcccgcctctgacacggatattgtcgaattggactctgagatgttacaagttggtgttaggta

SEQ ID NO: 94109 - DNA, 496 bp, Eucalyptus grandis
  Intron number 1 from transcript Egrandis_v1_0.038079m (loc us Egrandis_v1_0.038079m.g) derived from phytozome v7.0 (c hr-ID scaffold_8; pos 24142490 to 24142985 reverse strand)
aagcgtccggcaagagttgccccggtggagccacggtacatacaaatacatctaatgtctaatttcattataatcacacaataataatgacacgagtctctcctagtagatgtcggatctccatcatgctcatgtggctagagtattttgtgcaagtaactatacttttctaacacagtccaacttgcacaagaacactaatagaaacaaaaacggacacatccgtaatcttcaataagatttaatattttatgaacttcttgaccaatcctcgagtgcaagataaatagaaaaattatttagcctaactatcacgattagggtttttcttgcttgtcaatcaacacgtgccctctttagtgacacttaagttttgacttatagttacttataagacaaatgttagttttatttattactaattttttgttgttgggtacatgcatccgaatgctccatagacaattgtcttcagcgactcaaggaatattgcgat

SEQ ID NO: 94110 - DNA, 607 bp, Eucalyptus grandis
  Intron number 3 from transcript Egrandis_v1_0.014621m (loc us Egrandis_v1_0.014621m.g) derived from phytozome v7.0 (c hr-ID scaffold_1; pos 34138833 to 34139439 reverse strand)
atagcccttttactgtgcgaagtggtgaacgtgaggtgatttattgactattgtttatttgaaatactaacttgaaattggaatgtttttgaaatgcaactgattgatcatgctagtttttttatttttacttttggggtctaagattgatcatgctagttcaatgccttagaaataggttctctgctactatcagagagaaatctctctgtgaaataatgaatgtatccttcatggctaacctttccgtataacacaagagtaagattgagcagaactagtgtaccgaatctcaaccattagaatatattacataagaattttcagcattagaatcacatgcatattattgccaccgtaaagcaagaagttgcaggatattctttgataatcaaataatcgtgaatgttctcgctattctattgtgatgtcctatatatccccttttactggaaagggaaaagaagtatgacatagccagctagccttgttaatgttccatgattttgctcttgtggattcatagttggctcggcagatgctagaaagctgcacttatgaatttgcattgtggttgtattccaggtcaagtgccatagtctcgtat

SEQ ID NO: 94111 - DNA, 631 bp, Eucalyptus grandis
  Intron number 1 from transcript Egrandis_v1_0.031523m (loc us Egrandis_v1_0.031523m.g) derived from phytozome v7.0 (c hr-ID scaffold_1; pos 34276304 to 34276934)
ggccaaacttcccactttctgcccctccagttctcgtaatcccaatatttccccacctcctcttcaatgtattgtcaattctgtccttcgctatccaatccaaagctgaaagcttttgaattgccgatcatggctaccatatgaagtacgatggatggaccgccggaatatgctgacagatgaaactgaaatatcaaattgattagcggctagtgattaaacctaaaccggttgttaacgcacatgtgggtcatccaaaaagtttgtcttaaccttcaatattcattttttccatgagtacaagaatatccttattccagcttcaatacatgcaaccacgaagtgaaaaaagttactgactactgctatggtcaagtgaaaagagaagttcaccttcaatgtcaaaggcttaggtgagaaccgaaaagggaagaaggtggactcaataggaaaaactcatgctagaagggggtgggagagagattaacacaaagtactgggccaaccagtcaattgtcaacgcaaaaattattggaagggaaagagagaggaaggtccaattggaatgagcaacgcggtggctttgtatatataaggcctcaagctccttcctttctctcccacaaacggc

SEQ ID NO: 94112 - DNA, 732 bp, Eucalyptus grandis
  Intron number 1 from transcript Egrandis_v1_0.028058m (loc us Egrandis_v1_0.028058m.g) derived from phytozome v7.0 (c hr-ID scaffold_8; pos 66905548 to 66906279 reverse strand)
gccatcgctcagtccatcaagttcttcacctcctggtactccttcctttcgtttctccccgttgtttgggctcccgcgtgttcgtgagcttcccgatcttcaccgtcgatgtccacgtgtgcatcggtgaaggcgaatgtgcctgtatggtttcgtcgtgccttgtcatgatggcttttcttttgactcctttttgagcgatgatcaaatcaaacgtccggattcgattcgattctgtaaagtaaaacttagcttgcgcaaacgatggcaagtcgatctgtgatgaacgccgttttggcgtaatcctctggcttccaaaattgaacctaatgcttattgtttcgccgaagctagagaacgcaccaagaaactgaatctgagctgattgatctagctcgttgaccttaggtcacgtttgtttaaggcaaccttcgtgtgtcgcaggctatagatattcacctgaatcgatgcatctgtcgtttaaagttgatctcttcccaatccaatgcttatatgcggttcgctactctaaaaattgcctcgaattttgtggtttaagatcatggatgtcgtaatgaattcactttgactagatggcggtaaagtggaatttagagggtctatttgtttcccctttccatatgtataattctcttttgtaatttggtttacgtggttatatgtcctgagagtcttaagcttttcttagatttgcaggtataaggaaaggag

SEQ ID NO: 94113 - DNA, 736 bp, Eucalyptus grandis
  Intron number 1 from transcript Egrandis_v1_0.015953m (loc us Egrandis_v1_0.015953m.g) derived from phytozome v7.0 (c hr-ID scaffold_1; pos 23508213 to 23508948 reverse strand)
agctaagcagagctctcctcttatactgccttcaggtcgattgcccttctagttttcccattttttcatgaattctttggacttaattgctcttgatcttcactgcgcactgtaatcaacccctagaatggactcgcaatttgtggtttttgaaagagaagagaagtgtatacatctttgatggaatttttcggttgtgttgcttggttgtagctagatacgagagtcatgtggcctgtaaaaatcgtgagaattgtctgtacagaagcttcttttcgtaggcagaccgtctctacttttgtccgcgacttgtttggcatacaaagtcgggctgaaacttcaaagtttcatgatttttgaagaaatcacagcatgttcagcagttcttttttcttggtacagctcgtcttatggttctcatgcaattatgagctctatgagtgtgtactttttatatgttcttcgtatttgcactgctgagagaaaagagaaaaaagcagtttccttaataatttggacatgtgagcttcgaaatggcattgaatttctctgaccaaaatatcccaattgttctgggatcagtttttcttacccttaactcctgcaattttttcatctgaaagaaaagaacattgacagctctaatgctctgattccatgcctgttttgttggattgcattctaataagagttaatttcagggattttcaccaaattgttggtggttttatttgtt

SEQ ID NO: 94114 - DNA, 854 bp, Eucalyptus grandis
  Intron number 3 from transcript Egrandis_v1_0.018817m (loc us Egrandis_v1_0.018817m.g) derived from phytozome v7.0 (c hr-ID scaffold_8; pos 45470866 to 45471719 reverse strand)
gtgctctcgttgtcaacattggagatctcctccaggcatgctctcaattccgctcctaaattaacataacgagtttcttctgggattcgccttctgttgttttaggacagaaattagaaaaaaacacagagacacagatgaaagaggttcgattattttgcttatcctatgaagtatcgactctctccaagagccttcgtatcgtgtcggacacttccacatgtgtccgacactctcagacacttttcgacactcggtcaacatgtgtcggaaaatcaaatacatgattaactttcccgacagtcttcgacactcgagttgaaaattccaacacacgagtttccgacatgtgattatgatatcatggttaattttaaaaattttcaataaataagatatcaaaatgtatatatgtgaaaatataaaacacaataataaaaataataaatgagaaagaagaaaaacagagtgtgaattgcttgttttttctccaagttttatgagttattggaatagagttgaatttgtcaaattgaaacaataaatgatattaataaattatggattaatatttttagtgtaaatttattattatactttttaattatttatttatttttgaatttaaatcaaattaatttgattttaaaaatgataatttattatgtatatatgaaaaatataacgtgtcataacgtgtcagaattccctgtttttttagaaatgacgtgttagcatgtcgtgtcgtgtcgtgtcgtgttacatgttagttttggtgctacttagtgcttatccgtgtcatgttttgtttcctggcagcttatctcaaacgacattttcgaaagcgtcgagca

SEQ ID NO: 94115 - DNA, 525 bp, Eucalyptus grandis
  Intron number 2 from transcript Egrandis_v1_0.013820m (loc us Egrandis_v1_0.013820m.g) derived from phytozome v7.0 (c hr-ID scaffold_10; pos 17778327 to 17778851 reverse strand )
gcatctgcatcaggcatacctcgatattcttacaagtatgcaaactgactatcctcaatagctctaatgtccttaaaattccccttcaactacatattcattgaaatttgaaatttgattcccggatattttcacttcaattcaagcttttttgaagtttattaattatatggcgaaaatatatagatggtttctgttgtgtcaaatggaagatcaatgtcccataagttaatgctctcttttcttattgtacgcatgtatggctacatatttagtctttctcaatgaatgatattgttgcttcatagcaactcctgatttgggaaacaggggagcatgtctcttccatgctacatttcaagccatgggcaatagttcaaatgattgcagggtgatcagatcttttccacacgtatcatgttcccaaaaactcttgtaaaaatttagtattttcgttagtaaagttgtgtgagcctttgcacatatgcagggacatacaaaaagctacacaaaacttcactactc

SEQ ID NO: 94116 - DNA, 1049 bp, Eucalyptus grandis
  Intron number 1 from transcript Egrandis_v1_0.016862m (loc us Egrandis_v1_0.016862m.g) derived from phytozome v7.0 (c hr-ID scaffold_10; pos 36645735 to 36646783 reverse strand )
ctgcgcgtccgatcgccgcggggagaggaagaaaggtacgcacgtcctggccagatgtatggtgcggctcgcgttcgtccggttcgacggtggacgtcgcgccttccgtgcgtgattcgtcggcatcgaaatgttgagatgccgcagatgcaaaaatttgttcttttcaaactagcgctgaaaaagatgtgatttttacctaccggagtagtgcatggatgcgaattgattggtggtgattcgtgctgttgctttggcttttgtgtggctatggtaaacaatggtgatgagattaaagatcacattttgacgcatcacgaccacaaaaatgagaaggaaaagaggaaaacgcttgatgttgcagaggaaatatcgtgttccctatcttcggaccgatgcgatggctttgtcattgccacctatcgtttgcgttatggcgtactagttctgtgttttcgattacgcgaaagagctttttccagtttgttttcttgcaccgacagctctgcttttccggcccttttgttctttcttgtttgtgatgttgtttacgtctgtaataatccttttctagtgttttcatggatgtaaaggaatcgtgcccctttttacattagattttatgacgacagctcgatctcattctgagtcaggcagcaatttagattgctgaatcagtggcctgggggggaagtcaatcgtagatattccaatttgacggcgtttttgtcaagcaagaatgttgtttacagacaagaatgttgtttacacaccgcgtttgtatttgcagtaacagctgcaaaccatttcctgtctttttaccatcaattaagcgttctttgagatgccatccacgttgaatctgcgaggctaattattggtaacttggtattgctacatgctatgacctgcttgattgcgaatgaaattgctctttggtcaaaagttttttgaatgggggcactaggtgaagtattgtgcgacatctgacccatgttggatttggttttctaggtgtcccttggacagaggaggaacaccgacttttt

SEQ ID NO: 94117 - DNA, 948 bp, Eucalyptus grandis
  Intron number 1 from transcript Egrandis_v1_0.039778m (loc us Egrandis_v1_0.039778m.g) derived from phytozome v7.0 (c hr-ID scaffold_1; pos 36776368 to 36777315)
gatatagtaaaaatctctcaacactcttgcatacttcatttttatatgcttttttctttttatttttttcttctcatttataattattttctttttttttaatttctttttccccttccatcgttctcaaacaaaattttattaaatagtgtttatatttttatatctatatattgaatttatatcacaagatagaattaaatttgaataagattaaactaaaaaaacataaacgttgttactttttgttattttgaatttcttatatagaattcaaatattatttatattgaaatataattttagttttattaatttaagaagtttgttattcaagaaaaataatttcatactatggatataagataccctattaacttttattttacctttaacctggaataattttatccctatatcccttttatatccaattttatcttgtcttaagtaagcattagatgtaagatataataaattttatcttaccctgaattttatcttgattaccaaacatagccatatggtattttaatcttatacgatataccataaagggtattcttttcaatgataccttatacgatataccatatagggtattttaatacactgatagtgttaaaaataccatatacgacatatcctatagggtatttgaattctaccagtttatttttatcaatgatagttagaatacccaatatggtaacttttttttttttaattttattatcaatgatagtccaccaaataagtgatcccaataccgaccaaaaaaaaaactcatcccaacattttaggcaagaccgatcttctttgtctctctctaatttcaattctcgttcgctgtctcgccatttggcaagatcatccctcgctttccttctcctctcattcatccagaaaattctcaaccatcgctctctaacgaccagagtggcaaca

SEQ ID NO: 94118 - DNA, 809 bp, Eucalyptus grandis
  Intron number 1 from transcript Egrandis_v1_0.039337m (loc us Egrandis_v1_0.039337m.g) derived from phytozome v7.0 (c hr-ID scaffold_1; pos 36165010 to 36165818 reverse strand)
gcgaggctcgagccaacaaggctctagcgaggtcaccagctcccgattggccggtcgctggccatcaccaaggccggggaccaactagaggaagaagaagaagaagaaaatgacaagaagaaaagaaaaggaaaggaaaggaaacaaaaattgctttgattcttgagttgttcttgagaacaaaaaaacaactttctttaactgttctaggggaacaaacatatacaaatgttctttttctattccagggaacataaaaacaaaaaagcaattaaacataagtgttaccaagcacacccctagttacagtaacaaaccactctaacttggaaacctcttcaaattgggaaatcttcttgcattataaaagtttcgttttttaactcaaaactccaagacatattctctacataaacaacccaggatttgatgcggttgattatgacgatagtctggcctttcccttaagaagaaagaaatctgctctctacgtacaagttgtaatgaacattaaggacaatcctatctacccaaaaactagcgcctaattaaaaggctctatcacaccatatatggcatgtaatccaagcatatggcagttcttatatcatttgcctaatttaaaaataaaattcatttttgtcggtttaggcaaagtgaagaatctctcatgaattactgctaacgccccacctccctataaatgctattgcacgcattgtgcttcagagcacaaggaaaaaaaagtgtgttcagcagaccaattatccaaaggcaagaagagaggctaggcttgctttcataacaaa

SEQ ID NO: 94119 - DNA, 868 bp, Eucalyptus grandis
  Intron number 1 from transcript Egrandis_v1_0.005073m (loc us Egrandis_v1_0.005073m.g) derived from phytozome v7.0 (c hr-ID scaffold_10; pos 3134618 to 3135485)
ttcaaaccgcacgaataaccattttaatattgaaagttaaacaatcaaaacatcttattagtccaagcagttattctcctccgatgtagatcagattactataatcctctgaaaattttgggacctcaatatactgtgacaccttttcatctggtgtaatgcgccagtttctgacatcaacacagacccaacagattcgaagagaacaaaagaaaaattgtcctcacccctctatatatttgagcactggcctttgtatcagatacatctattgtgagattttgctcatgactgcagaatctggtttgtttttgcttgatgaatttttacggttccaaaaataaaaagtctagacgaggtcttgcttgagtataataataactgcatataacaaataattgacgcccacaataaaccttgttattgagatgctctactttgcatttgtcttatccggtggaggaacatgacttcctctactcccctgtacaaacattctcctatgcattcaagctaattgaataacttctcataagactataagcagaactagagagagagagagagagagagagagagagagagttcaatccattcattttgcagttcttcaaaatctcttgaaatttctccaattccatcttagcatctctgtctctcatggccaaacaagcattcagtccatttctacttgtccttctcatgatatcaatttcaatccaccactcagctcagctcgaatacactcaatcacaagctctcttcagagtccagaagctcttccactacccaccagctctgagcagcttctacaaaaccacagacttgtgcaacattgacccaaccccatccttcacgttagtctgct

SEQ ID NO: 94120 - DNA, 767 bp, Eucalyptus grandis
  Intron number 1 from transcript Egrandis_v1_0.005937m (loc us Egrandis_v1_0.005937m.g) derived from phytozome v7.0 (c hr-ID scaffold_10; pos 1321465 to 1322231)
tcggtaaagcactaccctatctctctctctctctctctctctgttgaaaccctctgtttaaccaagcctgaacttttcttcaagtaacctcgttgtcttattgttcttcttcttcttcctttttcttttttggcttttctggtattgtttctcgatgaaagtggctagatgccatacatgcatatctagattagagaggtgagaatcctctgctttttttattggtccaatgtgcgcctgataccgagctagtgcgatccatttgtctaaaaaccgtgagataaagcgggggccttttgttttagcaaagtatgcttctcctttatcagaacaaaagatagcatttgcttttccagcgggctggcttttctctcttggattctttctggtctctttcttttttgtaatctgggtgactttctgggcatgcatattttaaatctttagcatctcttgggaatgatttgccgtaaagatttctcgggtctgctttcccaatgtcaaaaagtcagataaagaatgacctccttaagggattcaaaatgggactgtgggtgcatcttatttgcttcttggttttggtgacgctcgaaagtccagagacaacgtgatgtggaattgtgagaaattatctcaaaatatatgacgccttgaattacagcggtctggagttgatttctggaagtcactgatgaggcattttcttaatgctgtttcattttgttttttcagctgagcaagaaaggagcgcttgagttcaattcgaa

SEQ ID NO: 94121 - DNA, 840 bp, Eucalyptus grandis
  Intron number 1 from transcript Egrandis_v1_0.023451m (loc us Egrandis_v1_0.023451m.g) derived from phytozome v7.0 (c hr-ID scaffold_8; pos 31428138 to 31428977)
gcggtgttctcgtgcttgattcgatctctcgccaggtgattacaattcaccctcctcctcctcctcctcttcttcttcttcttcctcctctgcttcttcccagttcgatgcccgtttcctgtccgtctgtgcatccgtgtatgttcgttatgtgatgcgatgcgatgcgacgtttcctcatctggcaatgaagctgatgtggggtccgattcgccgcattgtgctctgcagtttctgggttctccttgtttgtcgaaattacggtcgacaagtcgtcgtgcatcctttagtttctgcttcgttctttttctttcttcgtgtttttttttttttttttgggcattgctctctctctcttcgggctcttcgtgtagcgaggcccgatgggatcttcctttgcgggcaaacccagatccaatttgcaattcttgctgctggttctgcttgtcgtgtggctgcgtgctaagaaactccgtgcccgctgaatccctgtttcgtttccgttgctgcccattagcctgcggcctcggatgattgccgggctcgcgtcaagtttctttttttatttgagcggtgccatcgatgcgtattagcttcggatgtgggtagccagattgagccctgcagagattgaattcacttgatcctttaccctttatttaatggggaagcagctacacgtggttttgattgatgcatattaatctgacgctctcttgttccatgagccgttgcttttcttcactaccttcttttcccactcggtagacaaactctcactttctctgctcttcattactcttagattgcgctagcagggtcgaggcctgtcagatcggg

SEQ ID NO: 94122 - DNA, 258 bp, Eucalyptus grandis
  Intron number 3 from transcript Egrandis_v1_0.023451m (loc us Egrandis_v1_0.023451m.g) derived from phytozome v7.0 (c hr-ID scaffold_8; pos 31429241 to 31429498)
gtggctcaggtctgtatttggatttgattacaatacttataccatacttattgccttgaggatttagataaacataaactgattcttcactgcaccaatttaatgttgctgaagccatgatgagcatagtgaaggctcgagtattgctttttctgtctgtctacagtacttcttctcgatatgttttatactgtcattgataaattggtatttcttgcaacaggcatatttggaggtaacaaaattgcagttagcaag

SEQ ID NO: 94123 - DNA, 732 bp, Eucalyptus grandis
  Intron number 2 from transcript Egrandis_v1_0.014309m (loc us Egrandis_v1_0.014309m.g) derived from phytozome v7.0 (c hr-ID scaffold_10; pos 16495613 to 16496344)
cccttcttggcaataggtaactctctctctctctctctctctctctctctctccatgtaccaacgttcttccatctttttctttttggcttcatcataaatcaaaggattcaacctccacctttagcagttcagttcggaggtcattactgactttcttttttccttttgcgaaaaatcatatgtgtgacatttacagtctaagatatcctcgctcatcgcccattctttttttttctccctcaaaaatggagctgatgagcagtttactgcaacttgtggagatggatgtgatagtctgatcctctcagtaactctcagctacccaagacaagaatggcgatctccgcgaactctcatggaaagatcagctttttgatttctcggtttcagaaagtttgctaaatttgttttaccaacgaacaaatttgtttgtgtaccaaaaaagtacagaaaaacagttttgtattgtgcctgaatgttctgatgacagagaccctgattttcagtctggtgcctaaatttgcgttaccaagaaagggaaagagttttgctctttcataagcattcttaaactaaagttgagatgaagaaaaagagcaaaaatccttcaaatgattagtttcagcacctaccaatattatcgtgtttttttttttttgcttattaatgtcctttctgcggctatttctccttaggtggtcggccatagcaactcatttaccgaagcgaa

SEQ ID NO: 94124 - DNA, 1014 bp, Eucalyptus grandis
  Intron number 1 from transcript Egrandis_v1_0.026965m (loc us Egrandis_v1_0.025843m.g) derived from phytozome v7.0 (c hr-ID scaffold_10; pos 7000977 to 7001990)
tagacttcggaattgtcggatccttcgtcctccaggtagttctgggttgctctctttcttccccctcttccggtcatcattcaatcatcttttttctttcttctttttgggcatcgttttaaaccgatttcgcagttagtttgtagttgcttgcgttgagcgaaacgtgggtttgcgtcacttctctttgcttgaccacagtgttcatgttttgtccgcgtaagctgagaggagggtaagaaacataatcatcagtacgagtaaagatgagatttttatttttattttttatatggaggggtgggggggctggagttgaattcgggagctcgagagtgcgcgagtgaggaactgagcgagaagatgattcgatcattgctgtgaactgaattagcgaggcaaaggaggaagaaaaaaagggtgcgtttgacatttttggttattgcagtaggcggttttgtaagctcgctagcttgtacagtgatcggtccttgggttgaagagaccttgctttgatttttaatggggattcaaacaaaggggttgcaaagtaacggccaagagacccattcggttgggggttgggggggggggggggtgaatttgggagtttgagagtgcacaagtgaggaactaagcgaaaggatcatttgatcattgctgtgaactgaatcaatgagacaaaggaggaaggaaaaaagggggtgtttgaaattttcggttattgcagtaagcggttttgtaagctcgctgccttgttcaatgataatgataggtcattgggttgaagaaagagacacattgctttgaatttttaatggggatccaagagacccatttgcaattgcaaccctcaccaccatcactgaccgggcaaagctcgtggtatgacctcactctcgaggaagttgtgacccaactgggggggacttggggaagaaacctctaggtaaagtgaaccttgatgagcttcttaaaattgtatggaccactgaagagagtcagtgtgcaggg

SEQ ID NO: 94125 - DNA, 355 bp, Eucalyptus grandis
  Intron number 1 from transcript Egrandis_v1_0.045556m (loc us Egrandis_v1_0.045556m.g) derived from phytozome v7.0 (c hr-ID scaffold_8; pos 46914919 to 46915273 reverse strand)
gacgttattactggtatatcacgcgaatcctcagcttccaagtaaactacggatttgatttcatttttggtagataataatctgcgatttgtcaccgcggcaaatacacatgggaaaagaaaacgatgacttcagcgaaaatgcattttatatgtgccatttagtatttatgctgttgttgcagcgagctaccagtacttatccaaaaaaaatagacagaaaaatctttctacgcaccatataatatatttcttatatgtatatgtatatatgtgtttttcattacaagagaatttttttttttttcattttttgggtaggtactggggactttttgacttgctccccccacaaa

SEQ ID NO: 94126 - DNA, 723 bp, Eucalyptus grandis
  Intron number 1 from transcript Egrandis_v1_0.000003m (loc us Egrandis_v1_0.000003m.g) derived from phytozome v7.0 (c hr-ID scaffold_8; pos 58853455 to 58854177 reverse strand)
ttcgaagctcacgtaagattctctccccgcttcgttctaatacttcgcctgtcctcccttcctcccctgcgggtttagtgacgattgacgagctctggatcgcggcaccgtgctcgatcaagtctttgtttgacttgatcacttgagtttccgaagccattctcgagtgtaaggtttctgaatgtggcggccgcggagtgatcgttgctgagctcgtgtgttcggctgcattttgaggttttttatttttatttttattttttggtactgtttattaatggaaaaaatgatctctggcgagattggaagcgtgatctggttgcgggaactgatgagcttgttaaaagctagagactggggaaatttagtggcttgttttaagagacggccggtgatggatgtgaaatgtagcattgttcttgtccacgactgagcttggagtttgtctctctctgttataatgttaattcaaattttgtaagattatagctgttgtcttgcctcagttttaagaacgcacatacttgtcttccccaagcaggattgtatatcttgtctattgctaaacaatttcttttctccccgtttcaagtctcccactttttgcagtgtagtctcctgtgttattaagcgggtatggaattgtagcaccgtctatgggtgtcataatggaaatatgttgttacaggttttacatttgcttcgaagatatctgggggaata

SEQ ID NO: 94127 - DNA, 643 bp, Eucalyptus grandis
  Intron number 1 from transcript Egrandis_v1_0.023310m (loc us Egrandis_v1_0.023310m.g) derived from phytozome v7.0 (c hr-ID scaffold_10; pos 21244043 to 21244685)
aggtttgataatttttttacctgttgttgctatgcttgatatggattgcgattgattcacttgaattgttagttagcatgtgtcatatagctgaaatgctggaaattattatctttgaattgatgccatgttcttatcatgcatgtggatatcttgaagaaaccttgaactaaaccgactaattcatttgagagcttacaactatgaatgtacctccggtggatatctttgcaatttatcctcattaacattgtcctataatagctgatagcaagaacttgcctttctatggttgttgatatgattcatccagttctatgtgcacgtccaaacgaggtcaacatttgattctcattatttatatgttcttgtcatgtggtcaaccgggttgaccatctatgtgaaaccactaaatcaattgaggaatatgaagatgggaggtatgacatagataataagacactagggagtagcctttgttattttacattttgtttcaaccaatagcaactagaaaacacaatgtttgcttcacactctcaatgctatattttgattcttaattcatcctcatgtttttttaactaattcactggttatgtcattactccataggatacaattttttgcaagtctattctga

SEQ ID NO: 94128 - DNA, 804 bp, Eucalyptus grandis
  Intron number 2 from transcript Egrandis_v1_0.003647m (loc us Egrandis_v1_0.003647m.g) derived from phytozome v7.0 (c hr-ID scaffold_10; pos 9138471 to 9139274)
gactccacaatcttacgtcttttgcaggtatatgatgctttagattccccatcttcataccataacttcctttccttgtgttatggccatactctgccttttatgtctgtttatcgtttgtcagtcatataagctggatttcacatgacaggtttatattaaaataaataaaaaattcaagcatttgctagggaaaactaaaagggaaaagatagcctcaagcagatgcctgttgctactcattgagggaggttgattttatgagatgatttatatcttgcatatgagtatatcactaattgcctgaaaagttgatatttcatgaaactttcttttcttggagatgacaaggcttctactcgaaaggaattttgaaaccttataagttgctgtttctagtttcagtaaggaactacaaccttagaatacacgctctactaaatatttttccttctttaaaaagggacaaataatatgccgagttaactctttctagagttttggttttgaggctactaattctagtgctttgcatgcgcttctaagtcagttactggtagtcagtggaatcgtttggtggttgtgaagtgaagatgatttatgagttcaacatatatggattatgaataactatttgtattagcaatcttacaatacaatgtttgatttggtattgtctatcttcctttgatatttgttcttactccatcacctttgggcagcataccattgcacgatggtgttaagtgttcactcgagcaaggtattttcacattgttttgatgctttctcatattatagggg

SEQ ID NO: 94129 - DNA, 625 bp, Eucalyptus grandis
  Intron number 2 from transcript Egrandis_v1_0.009834m (loc us Egrandis_v1_0.009834m.g) derived from phytozome v7.0 (c hr-ID scaffold_10; pos 21349565 to 21350189)
cttgctttggtttgtcatctctatacatcttatgtagcttttcttgtcatgtgtctcttttagtgacaggctggcatctttaattgtaaagaaatgaatgtatgttggtgtgatttggtttttcagtttagattcttcatttaggttcttcatcgcttgcttgcattgaaatttatatctatatgcattaggatcctgattaatggatctctaggttcgagaaatcgcataccaagttcacgctacattattgaagcttattctttttgtgctttcagtttgaatgtacagttggaattatctttttcaaggatcagttaccttttattttttcccccgtggattgtaatgttgatagtggtgtctctagcttatagtgaggatttgtttatcataaagagattcattgttcccgaccctactttaacttcatactatttctcttcatattgagaaacaaatattacggtttgattttcccacattgctacttgtctgaatgttgttcttatccgctggagaaattggttagatctgcttattactttttggcattctgaatttataacttactgtttcattttgtgtagatccgggtctcagctgtcctaaccaacggaccgta

SEQ ID NO: 94130 - DNA, 764 bp, Eucalyptus grandis
  Intron number 1 from transcript Egrandis_v1_0.003980m (loc us Egrandis_v1_0.003944m.g) derived from phytozome v7.0 (c hr-ID scaffold_1; pos 34637789 to 34638552)
gatcacagatatcccaggtccttttacctcaggtatttctgtttgagggcttcaagaaactgcaatacttttttatttataagctggaatccaagtgatcaatttcttaaattctttggaaatatttaagcaataacttatgatagtgttggagcttatttgaaggacaaatatgctctctgcagtattgcttactttttaaattgataaaagctcgtgggtgtgggtatcctggtaagatattatcttgagctagccttgtggatcatgtaattttctccattcatttgcggtgtagccatgtaagttcggtgttggcgacaatgagttgtcttgccagtttttcttttcaaataataatactgttgtttttgaaagttgatttggggccgttgatactggcatttaaggatggttttacaagttatctgaatgacatcaactcgaaaaacttgttataattttttagcattcgatacggtaaaatatctcttttctgggcatgagtatggctagaaagagtttctgatttgctatctaatgtaaatcaaaatgaaatcctactcaatcaaaattgtgtgtcaaagccatgctgggaactattagctgacattttcatgattcaatgtgatcaaagtgtttaagatattgtaaaatcacagttcttgttcgaccatactctgctggtttatatgttggttccactttatccttttgtagctagactgacgtcctgccctttttccttaagctaaactgtgcag

SEQ ID NO: 94131 - DNA, 672 bp, Eucalyptus grandis
  Intron number 2 from transcript Egrandis_v1_0.039476m (loc us Egrandis_v1_0.039476m.g) derived from phytozome v7.0 (c hr-ID scaffold_10; pos 14222208 to 14222879 reverse strand )
ctttcaaaattatcaaggctcaggggaagcatcaggtatggctgtgagatatgtcatggcacttactatttgttagatctgcctctgagattatttcgaagagccttaacccctaaaatacataattttaatcatgactatgggtttatggtaccagtcattgttcgactgtactatcgttgcatcattgtatccagtacaaggtcttcgatcttctctcctaatgatgaaactgctacctggattgtgcacgctcacgtcactgaagtaatagaggactggaatttctaattgggtctatgattttttcttctatgtggttacttttgtaatgacgttgcattcagtgaatttatgtatagtatcttctctcggtcatttgaagggagtccggagtacatggtaatagaattggtttgttaaagtgcatatacagtaagtctcacagaccagcacgtgaatcctcatgtgctagtgatctcttaagcctctaatccctacacgccttgatttgcagcgtgaaacgtttcatttgaattttatatactggctccattctgacacttgatttgtttctttttatatttgattcttgcttcatttccactgttattttccaagagaaagtagacattctttgttgagattgggttttgtttcaggaagtaatag

SEQ ID NO: 94132 - DNA, 593 bp, Eucalyptus grandis
  Intron number 2 from transcript Egrandis_v1_0.024311m (loc us Egrandis_v1_0.024311m.g) derived from phytozome v7.0 (c hr-ID scaffold_8; pos 1944004 to 1944596 reverse strand)
aggtatgtgcacaacaatccgatgccaatgtacactaatcactgtttcatgttcttcgcacgtgattttcatttttctcgaatgtaagtaagaacttgtacgatgttcatgcagcacaagttcgaaattttcccagtccatgggaaggtcggcgtccttcgtttctgttgccaaagcatgaatttcgaaaaccacatttttttcatgcgccgtctcttttcgcatgttttttttttgtttgtgtgtgtcgaattgattgtccgtttctggtgtccggcttgtgttttgatacgtcttcttttcatgggcaattttgcttatgtttttatgacgtcccgagaggtttatctacacatagaacataagctcgatcgagttccagaaatagttggtcagggtcatgaagaagagaaaggaaaggtcaaacctagcgaatagattagtgattacattccttaattagctgtattagcagccgttaatcggcaagactcgcacgtgcaacgttagacgacaatggctttttgctaaaaataatttagtcatttgactattcatcctgttttgttgatgcgagaagattgaagccgcag

SEQ ID NO: 94133 - DNA, 869 bp, Eucalyptus grandis
  Intron number 2 from transcript Egrandis_v1_0.037817m (loc us Egrandis_v1_0.037817m.g) derived from phytozome v7.0 (c hr-ID scaffold_8; pos 65082712 to 65083580 reverse strand)
cctccaccgaagagaaggtctctccctctccctctctcacttttgtgcttaaaagtgtagcaaaccattgtccctttgttatcttgaccatgcgttgttcattagtttgcattttgagtgttcaagcgaaatcatgacaggctgtgaagcctgaccataggggcgaaaactattgtctcaactcgttatctattttgcatttacgagcaagcaatggtcgagattataacgggtattcccattgttattgtgagaagtttgtgtttccacccactcgccggatagctaaaatttgtaacaaccttacatgttaacccttcatcaaaatttagggaaatttactaaaagaaagtcttaacgtattataattatgtcaattcagtcctaaatctcgccgaacaaaatgaaaaaacaaaaaagggaaaaaaagagagagataaaaataaaaagtaacaataacaaattcataaaaaaattataaaaattgtcaacgtcattgccgtggtgccacataagatggttgatgtctattttaacgatttttggtcaaaattgactaaatgaattgaattggcaaattatccatatggtttataactaaaatgaccaaataaaaggtttaggattcaattaacacaattatatagattttagaattttttttgataattttctctcaaaatttaggtaattaatgcatttaagaagacatgcaaaaagaaaaaaaggaaatcagttcgtaggaaatttatgtgacggcaagtaaaaatgaaaaagctctaggagattacaatttctctcatttgacactataatctaaggaaatttgtgtgaatcaccaatttgcgcagatacacacagcaaagttg

SEQ ID NO: 94134 - DNA, 685 bp, Eucalyptus grandis
  Intron number 1 from transcript Egrandis_v1_0.005678m (loc us Egrandis_v1_0.005678m.g) derived from phytozome v7.0 (c hr-ID scaffold_1; pos 29882374 to 29883058)
aagcggaaccactctcaggtccgcgacatatcgccctgtggcttcgatttttttattttatttatgttccgtcgaatttgacgttcgatgttaatgccgcgcgtgcgtgctgtgtttcgtggctgtgcgggatggtgattaggataaggcggcgacgtagatgggttttctttaggggtattgcttgccggtttgggaattcaatcggttgtttcctttcggcagaaagcgtattggctgggctgtttcctggttttagtggaagtccttgagatgtggtaggattttgttattgccttgagagtttcgataggggaatggggaaggttgatatcttggtcagtaagagatttccggtctaaatcatcgaaaaagagctggcatgtgtaatttttagttatgttaaatttatgttggtgcttgggactatagtgtttatagctcaatcgatcaggctcacctgtcgcttgaagatgtagggtttaagtacacattgtgggatgagtttgaaagtatatgtgatgcgacagagcatttgagtgcataatgcttcttcgatggcatagacccgtcatgttggcttatggggggttgttttttgttttattttcttttttgttggtcttagatatatatgtcttctgtagattgcattctcacgcttgatatttctcaggtgcggtac

SEQ ID NO: 94135 - DNA, 585 bp, Eucalyptus grandis
  Intron number 1 from transcript Egrandis_v1_0.054007m (loc us Egrandis_v1_0.054007m.g) derived from phytozome v7.0 (c hr-ID scaffold_8; pos 52024349 to 52024933 reverse strand)
tatcaagccatcgaccatcgatcgtctccaaggaggttttgttggaaaatccaatttggcctcccttgcgtttaattcctttattgacttcatgattaagattcattagtcacccactgtttttctttggaaaatgatattgcataggacccttgatcttgacgtatgataagcaaaacaatcaaccgtctcgaaaaataaggctccaaattctttttcaagcacgtggtccaatgcgacccatgtaattaacttgatctattagaatcggactttatgtcaatatgcggtcactactttgagtaatggatttgctaattgcatctaaacagtattcccggctcattttctttcttgtcttttttttcattatgggcgcatgcatgaacattgcttgctgcaatctttttcatcttcttactcctccttaatttctacccctccaaatcagttatctagactcattctacttgatcaaaccaatcacttagtggctttatgcatgagtttagatggatcaatcaaattcttttcttctttttctcgagtcatgacaaacttaatatgcttgcaaacaggtttaca

SEQ ID NO: 94136 - DNA, 788 bp, Eucalyptus grandis
  Intron number 1 from transcript Egrandis_v1_0.017008m (loc us Egrandis_v1_0.017008m.g) derived from phytozome v7.0 (c hr-ID scaffold_10; pos 2986813 to 2987600)
ttccagtccttcgctgacgtcgttctcatcgatccgtaagcctcatttgtctttgtaaaaggtctcgtttttaatcatctgtcggagctgaattcgcgcaaatggatcgaattcctttgtttttttcacttgggtctcttttgttttatgcttttgttggcttaattcccagaaagtcgcatttttgtggataaagatgcaatctttctacgtgtcctgtagcacggggcattcacttcgcagctctcgagcgatgtcattggttgagttactggtgatctagagatgtaaaaaattacgataacttgtagcgcaagctaatgtgggtcaaaagccgagtctgcggctccacgcttttgttttcatggtagatggttgtatatgtatggtaccatgtactccttttaaaattaaatttgtctgtggggtaatccttttgaggtgtattgttgtggaatttgttattgccgcatttgaattatgtagttacttctgccattctgcattagatgcgttagcagatagatggttatacagaaattagagaagtgaatgctctaatgcactttactctgcactgaattgtctgttctggagttgtcgcctctttgaaaacttcgcagtgcagagcaagttcagagagatagttttcaactgaaccaatgtgcgtatcagaggttgagtcttctgttttcattctcctttcacattgtgcaatttgtttctgacaataagttactcgaatgtggctaggaaggagtattttgagatcccttgggcaagcttga

SEQ ID NO: 94137 - DNA, 940 bp, Eucalyptus grandis
  Intron number 3 from transcript Egrandis_v1_0.027610m (loc us Egrandis_v1_0.025735m.g) derived from phytozome v7.0 (c hr-ID scaffold_1; pos 39128469 to 39129408)
attttagtgagtttctgggaattcctgggtatgtatgtgttgttaattgcttaactccgcgaggctgatgacttagtgtgagcatgtaggcaccctgtagaactgcaatttacctggttttgggacttgataggaatggcatttgctcatggaggttttctgtttgatgaccgtgctcttatatgcatcctctcgatgccaagagtctatcattgtttgatggtgttattgggtaatcagacgttggaaaaagtttcttgtgtctttgagtgctggagtatgcgtaaagtagtctattgggagaacagtttcctgtggaaaaagaaatctatgtagttggttatttcggatatatgttacgtatagtgcatatgtttatccgtatagtgttgaaagcaagttgaaagcaatttaaattggtcctttttcaaggttagttcagaacatgaactagaatacaataatgtctcagctgttttatgttttaaatagcaaagaaagttgagcacctccggatcaggtctttgcttcctactttctttgatgttgagcaaagaaaattttcaccatgtggaaagagtactcatagactgtgaatcaccggttgatttgattatccaacttgggcaagatggtgtcaaatgcacatgattgaattaccatatgctctctcatgttggtcaatacatactcatttgctcgaactcagacatgcatttaaagttatttctgcagaatgaaattaagtggcacttgctgaaggccatctttatgacatcaataaattttatggatgtatgtatatgtagagtaagtctttttagagagatgtgataaatgtagcggttctattcgaatgagtcaactttatgtaggcgttttatttggaaggtgttccttgagctggatgttgacgtaggggcctttttcattgatttag

SEQ ID NO: 94138 - DNA, 756 bp, Eucalyptus grandis
  Intron number 1 from transcript Egrandis_v1_0.011331m (loc us Egrandis_v1_0.011331m.g) derived from phytozome v7.0 (c hr-ID scaffold_10; pos 31536210 to 31536965)
gtttggagacttttttgctcttgttggcttggaaggtaagtgatgctgctgcaaatgcatgcatctcttgatctagatgtctgtcttcattaatggacagtatattcctgttcttgatttgttgggttttactgcagttgtgctttgcttaatgacttctgagtaccttacccgagaagaaagattttagacggctctggacatcaatgctagattatggttgatttgcacgaaatggttcaatggaaatgcgtgtatctatcctgagttttagtgtatttggaattttatttacatgaatcttcacaaggtaacttgagatggcacctctggaatgacttgtctgattatcctagttcccggagcttcccaacaagatagccaaccattttttcggttcttatactattcctatgttgattgactttgtgattactgtcattctaatttggcttaaggcaagggatttttttatttatttattgtgacccgtattatattacttgttttttggatcaatatttttacaaaaatgacagtttcaaattcaaatggttattaatgcatttgtttgctgttaggctacttctgttccatctcttactcatcttttgtgctgttgtgataatatatccttttgtggggagtatgattcttcctggtattcaggtgaagattctcgtttggtttgtttgattctttccccctggagaacaacattcttatcactcaagtaacgtcctgtgtcaggttttt

SEQ ID NO: 94139 - DNA, 964 bp, Eucalyptus grandis
  Intron number 2 from transcript Egrandis_v1_0.049903m (loc us Egrandis_v1_0.049903m.g) derived from phytozome v7.0 (c hr-ID scaffold_8; pos 169709 to 170672 reverse strand)
atcgcatcaaagagatcaagtctcgccttcgagtggtaactaatatcacttcaaagacaatactaagtctagcttcttgcatcgcacaagcattactaagtcttttagcattttactttatgaggtaccctttacgtctctaatcttttgcattataatggtcgccttcacataacgagctcaaaagtatttgtgttttctaacgtattcacaaaatatatgcagtttatatgatatttattttaggcatttattatattcagtctgtcaattagtatgcagctagtactcagggtgtacaactctgaccgaggaaaatgacatgattaatgcgcataatatttttgtttattttacgtgcgtgacgattttcctagccacccgcacaacgttacatccttgaaaacaaaaagacaattgagctagaaactggtttctttttcagatatatagatgctaagttatagaaaactagttaatttcttcatccaaagataattttgtgtttatctacatgattttagatatatatataaacaaacccaccaatcagaatttttttttatcagcttgattagttcacatacattttttagctttaattatgtctcttttaacattaattcaccatattgagcatttacttgcattatccatgacaattaatacaataaagggatttttcttgatccaacgttaaatctttcttggactttattcacattcaacaagcatgagtaacacatttgacggagaaatatatcaacattacattagcggacactatttcttgaactaggttcaagttggaactgttggcatatttactattttactatacaaaagttgattaataacccgagggcttcggatcaatcaatcatgcaacgacttaaagggcaaaatactaatgtatccttggtccttttcccttgaattttctctttataacagactatcaacg

SEQ ID NO: 94140 - DNA, 301 bp, Eucalyptus grandis
  Intron number 1 from transcript Egrandis_v1_0.038727m (loc us Egrandis_v1_0.038727m.g) derived from phytozome v7.0 (c hr-ID scaffold_8; pos 24676960 to 24677260)
caaggtataaatgtggtggttctttttataatgatatattaaactttgagctcttacacaacaccaacatatatgtagcttaaaaacaaaaaactacgcaagaccgcttggactctattatttttcattttttttggttatatttatgatcatctaggcttacaaaatatgtcttcttctaaaaaacaatcaaccaaccaccacttcctcataagtgatgaatagaagaggttcccgaccttccactacctctaggggatctataggcgggtggttgcgaatctctacataagattctaga

SEQ ID NO: 94141 - DNA, 960 bp, Eucalyptus grandis
  Intron number 1 from transcript Egrandis_v1_0.045494m (loc us Egrandis_v1_0.045494m.g) derived from phytozome v7.0 (c hr-ID scaffold_8; pos 73910587 to 73911546 reverse strand)
gccggtggctggtcattaacaaaaggaacaagaaacgagtgaaaaaaaaatgggaaaaagggaaaaaaaaaaacaacaaaaaaaagaaaaaattattgaaaatagtccactttggtgctattgatgctacgtaagccagccagtatccatgtcaatgaggccaaaattgatcgggagaaatgaattgacgtcaaatcaaaaggtttatgagtaaattgacattaagtcaaaatatataaaattaaattgacactattaaaatgtgtatgactaaattgatgcaaattcaataaatggaggattttttttacacttgtcccttgagcaatcaaccgttatttctaaattccctctttgaagtcaacataatcatcaggcatcgtgtaagtcgctcatcttcccagtcgcatggtaattcatgtttatattctctaaacgaccatatgtttaaatattttatttttaaccgtgtcgtaggtttgtccaccaaaccaaggactataaattaaataaagacaactaatgacgtaaagttaatgtacggatctttgatatttataggccgcaaattaattactgccacctataagatgacaacaaatcacctctctctctctctctctctctctctctcgttttgtgggttatggtttgtctctaaccatttttctcgtggacaacttttgaacatgtcttccctctgatcatgaactcgtgcatgacagatctcatgcaacgatagaagctagaacaacccttgtcgagatcaaccttgtccgatccatctgatcacatcacgtcgagagacttgcggattggagtcacgatcgagtacatggatggtaataacaacgaagagaaaatctctctttcttctccatcgaaatcttgatttcgggtccgcgatcgagaagacagataaatgccaataggagacccgagggcggggagggcgttcat

SEQ ID NO: 94142 - DNA, 954 bp, Eucalyptus grandis
  Intron number 2 from transcript Egrandis_v1_0.007783m (loc us Egrandis_v1_0.007783m.g) derived from phytozome v7.0 (c hr-ID scaffold_10; pos 7117147 to 7118100)
aaggacggcggcgagctgattctgtgcgaccacaagtgagtgctcctagattcccctccggttcttgtttgctgctgtgcaggttcgcgattttgggtgataatgcgagtcgatcgagaggtattccgtgtgtattgctgcgtacgaaatatatctttgtgtattcccgtggtcctggtcaagacaatatccttttcagttctttctcgtggagaaatgctggggatagtccccgtcaataacatacggtgtcgatacttctcttttgtggtgtcccacattcatcagtcttgcatggcctatgcgtattctgctggcctgtgtcgtcactgtcactgcaaaagtccctgaaaagtgacaaatttgcttgcctccttcataaaaaaagaaaatggttttgtcatttgacgcctttggattttctgtggtacgacatcctgctgaaccgccttaccgacggtgcgacgtaaccaagaccaaaagcaaggttttttgggatatttgtttttgtttttgttttttgactacgttactaccgtttttctaaatcaagtacaaaagcaaacccgtcttaaagtaaaggacggtacattgcattgtaccgtagcaccgtggaagtccttaattctgggtgcatatgaactttgccattagcaacgagggttattattattgctattatttttatttttattttacagggttatcattattcattagaaggtatttggttcttctcctggagtataaacacgttttagtgtttcttctcttttgcataaattcgttagctttctcaagcatatttttgtggatcaggaattggactctggagttgtaatggaaggtgtctatttagcaattatttcctcatggatttattctgtttctgtgcctcagtgtatactttttattgcagagattgctcaaaagtttatcattctgattgtgtaa

SEQ ID NO: 94143 - DNA, 696 bp, Eucalyptus grandis
  Intron number 1 from transcript Egrandis_v1_0.032912m (loc us Egrandis_v1_0.031612m.g) derived from phytozome v7.0 (c hr-ID scaffold_8; pos 43243400 to 43244095 reverse strand)
agctccgcggcaaagccattgctcttcactcgcaggtaccggcacgcattctcgtccggatgaccatttataaattagtcttcgtatacctaacgtttgttcatatattaaatccgtcggcttttgtgcaaattgattttattcttttagtacatagtttcagcagagtggcatctgtctcaagtaatggtatccatgaatgaatgaatgaatgaatgaaattgagataatggtttagaatggatggatattctagttcttgtatgcataaggatagatgaaattatagagattcaaaattatataggtccattagatattaaatattaaatgtgtgtgacctttgcaagaagtaggagagaaaatcaatcaatggtatccttgaaatttaaagaaaatattgttttttgacagatgaggttgtggtttacaaaaaaagagaaaaaatcagatgggttggataatttgtctgaaaaatgtgtggttaagcaattttcagactgttggcatccaaaaaataaaaattttgatattaggaggtaccaattcacttgcattttacagtttttccgcaattcgaaaatttaggaggtatgctccacttgatttatcatacacataacatcaaaactgatcatagcatacactctgtatataatcaggtgatcacagaattctgcaagtcgattggagcgg

SEQ ID NO: 94144 - DNA, 874 bp, Eucalyptus grandis
  Intron number 1 from transcript Egrandis_v1_0.017830m (loc us Egrandis_v1_0.017830m.g) derived from phytozome v7.0 (c hr-ID scaffold_10; pos 18645790 to 18646663 reverse strand )
tccagctgaactctcactccgccacgcgcgaacaagtaatggtcgcccgaactgcgtgtggcaatgcttcgcttctcgatttcgctgtcttttccttttgtttttggttgtgtcgactatagcgaaattcatccgttatgcattgttagtgttctaattgttcgttgattgcactttccggtgcgatggttttggagaaatggaataattgtgctagtgaactcagaaattaaagaaattatgctggtgaggactcggattgattttggtagctgtttgtgctgatcatgttacagtaacctgttgctgcacatagtgaacctcttcttttttgcacctgagattggtgtgttacaaccctccaccatcacccacatgcgaaatcaactaaatataaatgtggttgatgtccatggttttgaccgagccaccgatcagaagggtggttgctggagctccaacctgaaaaattcgcccttttccttttgttttacccctattgtttagcgccactaaaaattttcagactttgatcgcttttcatgttgcctggatacgaagaagcaagcattacatgatgatagagatgaaagggccttgcttttgtgctcgaaattaaagcggtagtgagaatatcgttggaagatcatactctgatttgcttgcgcttgctctttttagtgagtacaacttcttgtgtttgatcagagctccgaaggatggttgaactttcagatcaattgcgtgtgtgtttgtagattgaaatgttgagttaaggtttaatgcgtggccaactggttgaactttcacatcaattggatatatttttgtagattgaaatgttgacttagggtttaacatgtgtcagacccaa

SEQ ID NO: 94145 - DNA, 804 bp, Eucalyptus grandis
  Intron number 4 from transcript Egrandis_v1_0.016070m (loc us Egrandis_v1_0.016070m.g) derived from phytozome v7.0 (c hr-ID scaffold_1; pos 8666797 to 8667600)
ggtctggggagtggtttgcggagctgctgcttcgggtatgtctagcagactcatagtgaagttgttaacacctcaagtacttattgctatcttgtcatgctaattgttatcaaagatgttatctttacccacacatggttctcatatctctaaactccttcaagagcagtttacatttgtattttatgtggaaagctcttacgtgcatctttaatgtccctgctctgatgaatccatagttagagtgataatggtggtctctgatcatgtttattactgtgagacataaagagcatttgaaagcggttttcagagattattcatcgctgtgaaatcgaatagctaatgtttctgtcctgatcgaatagctaatacctctgttgtgcacaaaaaagttccaacattttgaatcgtgttctccagtttttctttgatcacttctccaaaagttcaatgtaatgcacgaaatggaatctatcgctgactttttattgtttgttcgctcattatatatcaaaagaaagggaatagacatgttcaacatcaagctgatgcaagggctcatttatatagtttcaatttctttttacatctttaattagttatattctgatagaaaaacctttccggtgatccgaagaaaataaggaatttcaccttttgatgccatccagacaaatgaactctatcgaatcacaggatgccgcaaaaaaatcaatttgagtaattatgctggaacttgagcaactatttgcaaattgcaataactatatcatgcaggaaactttcattggaatctggagg

SEQ ID NO: 94146 - DNA, 759 bp, Eucalyptus grandis
  Intron number 1 from transcript Egrandis_v1_0.023220m (loc us Egrandis_v1_0.023220m.g) derived from phytozome v7.0 (c hr-ID scaffold_8; pos 42400723 to 42401481 reverse strand)
caggagggtggcggtggatcccccacttctgcaaggtcaggactttaggatctttttattccagatgttcagttcccagagttgggttggccgagaaaatggcgcaaaaagagattgaacgtgatcattcatcggttgccagaacatctctggttgtttatgggaccaaaagcacgggattggactggaagagagttcatgtttttatcaaactaaacttgcggttcaagataaatttgatattttttagtctgttttccctggcaaaacatataaagaaactgcagattaataatttaaggaaaaaagttcggtttctaagggagtttgtgttcgattcgtggcgtataatctatgttgtgattgcccttttagtaagttttgttggtggggatgatacgattgcgtttctgcataataatgatgtgtgttcagttggtattgttagtaggaagaaagggagaaaaaaagaatcatctaaacatacgttggtatgggggtttgaacccgaaacctcgtcccacctcctatgtcgcagtcgtctgatatatcatggtttttgcatatccagttgtctctctttgaatctcccgtgaaggcagattctgacttaggtaccatgtggagtcacagttgattctactgcgtgctacctaagctaatcttcatttcaattttgcaatgtcagtattcttgtctctatgatcctcgatctgatacataccgtgactcggttgatgggtgcagtcaggttgtggg

SEQ ID NO: 94147 - DNA, 582 bp, Eucalyptus grandis
  Intron number 1 from transcript Egrandis_v1_0.010428m (loc us Egrandis_v1_0.009223m.g) derived from phytozome v7.0 (c hr-ID scaffold_10; pos 25258054 to 25258635 reverse strand )
cagcctcgtagttctcgttgtcttttggttctttggtctgtttttcttctccttcactttaaactgcgtaattgtatatgatctcattgtctcccctgcatgttcttcaaaacgatgacggaattaattcgaaaatgtctatttgcctctcgggcaattctctgcattgaaagattgctttttactactcaatcttgcgttcgcttccgtgattatagaatattaggttgatacagttagctttagcaagcaggatctcttgatttggtcgtcgatatgataatctgatcctagtgcgtgttcttgaattcaattgagggaactaattgggaaatgactagtgacttttacacactcaaagcttgatttatgtttttttctctaaacatgtactcagttccctgattcgagtgtatcaaggaaatacagatagttttggcttgtgagagcaacaacttgcattaacttctacctttgtttggcttgagtggtgcttgttcgagcacagaactgatcgactcgttttggttttctcctcctacttgtcaccagcagcatctttgactttgattcttgggttct

SEQ ID NO: 94148 - DNA, 826 bp, Eucalyptus grandis
  Intron number 1 from transcript Egrandis_v1_0.025457m (loc us Egrandis_v1_0.025457m.g) derived from phytozome v7.0 (c hr-ID scaffold_8; pos 41875728 to 41876553)
ggagcttgacgatctcattcagaccgctcattgcggtcagctctctgtctctctctgtctctctctgttggctgctgtacaacttgattagctctggtcacgactcaccccctccggtactgcttcgaaacgcgtgtgctgacttcaggtggcacaaaatcaatctaccaatgtaacaacccaaactctgtaaaaaaaaaaaaatgcaacaacccaaacactgagcgaggaagtttgattggaacttttctcgatactgactccaggagtcatgtttttactcttgatgattactgcaatgagtgcttatcccttttgccacttggagtcagctcgcttcatgaatggtttctacttttgtctctgttcattttggtgtaaaggaatgaacgctcgcctttattaaattagtgggtgtgccttttggggtaacccccaacgcattttagatagcatattttgttaaaaaaaaattctgggtagtgaaaataatgcacaatatggtacgtttatcgatgccctctttcattaattaggtttaaacaatttgatggcagggaacaagaagttcagaaatttacgatcttgttctttccttttcttccgtttttatgtgatgaaactataattcttataatatttagcagtgatccaataattcttatgatgttaattttcccctgaaaaccagaaggagccttttcttgaacagaacttctctcaaaaggtttcctaggcaaacatgattatctcaccataacatatgattaaccaccggaaattttgtgcaggagagggaagactgtgttggagaccggaggaagaa

SEQ ID NO: 94149 - DNA, 651 bp, Eucalyptus grandis
  Intron number 2 from transcript Egrandis_v1_0.017943m (loc us Egrandis_v1_0.017943m.g) derived from phytozome v7.0 (c hr-ID scaffold_2134; pos 4360 to 5010)
accgtatcgacactcgcgtccccatcgaagtcactgtatggatcccttatcaaactttcacctcgcttgagactttctctgagccatatgatgcatcgtcatgttgttacaagtttgttgaattttgttaaatgacacttaagttcagctgatagcagagttcaagatgcggcacggtgttgttcaagggttgtggaatttagtagtttagtggcttgagttttcattttgtgggcatcttttacaagttaagggtcaacaagcatggaaattactcgaaatcttcctttaagatgaaagtgctccggggttcatcctgaatttatatacgggaatcacatataaagttgttcctggactttatacggagacatttgattcttgacatattgtgaaatatgacaagtacttggaatacttcttttatttgctctcttctgtgagagattcaagaaatctacctccgttaactcaataccttgtggcttttttgtcgcattgagatgcatgataattgagggatccagacacataaaaagctaatgacataaataattttctggatcttaacatgtaagatcttgatgttgttgttctgtcatgtgaatatgcacagatcggagagctaaagaagctcgttgaagagggtaa

SEQ ID NO: 94150 - DNA, 858 bp, Eucalyptus grandis
  Intron number 1 from transcript Egrandis_v1_0.037842m (loc us Egrandis_v1_0.037842m.g) derived from phytozome v7.0 (c hr-ID scaffold_10; pos 27884744 to 27885601)
ctccaaacaaggaaagggtatgtacttgagctttattcgtacatttaatttctttatataggttcttcggcatttatttattttcgttcaattatgcatttcaagtttctacacatacgttctgtcaataaattcaaatttattcacgtacaacattgttggcatacaataatcatagatgccttatacttatcttattttattctttgtttttcttgaatttggcatttatttggttcgctgctctgataaagttcttctagtcaaacatcggtgactacattctatcctatctaacactcgtctaaaaatctagaatgtgtaacatatcttagtttttggtcaacaaaccttaagtcaaggcaccttagttttatatacggttttctagccactccaatgtccaaattttgcattgtacaaactctcattctgttcttgggactttgacaaatttcataacattagggttgtaagtggtatttattatatggtaatgctcgcttctaacattttgtgtgtgtgtgcgcgtgcgcgcgcagaagaaagtgatttattggctttgcggggaagtcatctttattgctgcagtatcactggcgatcttgctagtttttcatgaccacaagagaagaatccttgcctttggaattatctgtgatgtgttcaacatcataatgtatagctcacctcttactatcatggtacgtacacatccacatcccttccctgattgtaaaccaaaatctcagtttattagtccaagcaaagggtaatcttttcattgtttttgcccctctttctttacctttgtttgctgtagaaaaaagtgatcaccacaaagagtgtggagtacat

SEQ ID NO: 94151 - DNA, 586 bp, Eucalyptus grandis
  Intron number 1 from transcript Egrandis_v1_0.026221m (loc us Egrandis_v1_0.026221m.g) derived from phytozome v7.0 (c hr-ID scaffold_8; pos 52064467 to 52065052 reverse strand)
tatcaagcagtcgaacatcgatcgtctccaaagaggttatgttggaaaatccaatttggcctcccttgcgtttaatttatttatcgacttcatgattaagattcaatttggtctcccttgtgtttttctttggaaaatgatattgcataggacctttgagcttgacgtatgacaagcaaacaaatcaaccgtctcgaaaaataaggctccaaattatttttcaagcacgtggtccaatacgacccatataattaacttgatctattagaatcggactttatgtcaatatgcggtcactactttgaattatggatttgctaattgcatctaaatattattcccggctcattttctttcttgtcttttttcattttggggcatgcatgaacattgcttgctgcaatctttttcatcttcttactcctccttaatttctccccctccaaatcagttatctagactcattctacttagatcgaaccaatcacttagtggctttatgcatgagtttagatggatcaatcaaattcttttcttctttttcttgagtcatgacaaacttaatatgcttgcaaacaggtttacc

SEQ ID NO: 94152 - DNA, 1046 bp, Eucalyptus grandis
  Intron number 2 from transcript Egrandis_v1_0.054909m (loc us Egrandis_v1_0.054909m.g) derived from phytozome v7.0 (c hr-ID scaffold_10; pos 9715568 to 9716613)
tgctctgctcgcatcctctctccagggacatccgtgtaagtgtgctcttccgtgttttgattggtggacgggatgagacgatttctacctgtgcggatatatatattttgtttgattttgcggtcagatttggagattgggagtttgtctacggccgaagttgatatgaggtcgttgatggatgcgttggttttagtgaatttcggtgattggagtgggcggttggtgtttgacgttctgttttggctgctgtcgaggatttgacatcggtcgattcttgcagagaaacttatattgttgttttaacgttttcaaagaactttaatactggatatgactattctagtctggaaactatcgtagaaatctatggtatgggggcccttcctttgaatggatgaagggaaatgttgcatttcgaggagaaataagataacctagaggcgcttccggtatttaaattgttttgatatgttgctgcttgatctaaatggcaaaactctttctggtcatccttgtagtgtccagtgaaagtggtcaaatatgttagctttagtgacactgttgtcccaaatatgtaatgacgaaaaatctatcgttatgtcagtgtcatttcgagcatgtccttgtatcttctcagagagcagtattttaagcttaggtgctaagtctaggagggtagctcactgtacatgtaatcacagtagaactgggattgcaggtctggatatagtcctagcctgcctcatgtcctaaatatcacactctcccgtttaacctcttactggatgccctgggtatctttattcttgtctctaaatgagttctttcaaccggtattgtgttgctctttctggagggtgttttcctgaataaatgatctcgatcaacatcttgtctgattaagtatgactaagatatttactttgttccatcatcatatgcgtaattgttctattttgggtcactatatctgtcattgccattggacagtcatgacttgaggtttttgctgctgcagatagagtctctctcacttacattcc

SEQ ID NO: 94153 - DNA, 812 bp, Eucalyptus grandis
  Intron number 1 from transcript Egrandis_v1_0.038674m (loc us Egrandis_v1_0.038674m.g) derived from phytozome v7.0 (c hr-ID scaffold_1; pos 9723253 to 9724064 reverse strand)
gttggtcaacaaactgaaaggtttgctcttaacacatcttgtgtgccactatttgctttcatgtgttaatcattaggtaatgacgctcttactcagctgttctgctcactaaaatttgaagagcattctttgcataacataacctggcagattgtttgtacactgagaaaagttgcccttatagtagtaattttatcgtgttttttcctttgacaaaagcttcacattgccaatgtgcagcctgactttgattttttcccctagtaaagtttcatgatgaccctcataaatgtccaaatagatgctgatgccccagcagcaaaaacctcctttgttgagttcctcaatgtgatatcatggtctgccattagttatctccttgggcatctattgccacacaaaaagataacctcgtgaaagcctcttgtttccatgggtcatttgcaatgaatctgatggcatggatgatttgatctaaacaccgatataatgtggtattataactataaatacacaacatgattttttctgtttcattagagattttatgtaattgcatcccttgctttactggagccttgcctttcaatatataaaaagagttgatgatatagacccatcttcataatttcattgtcataggctgtgccgagggtatttacttctccaatattttactttttttagatagatttgagatgcactttgcaaacaaaactcgtaaagaatgagcattttacatcaggttgagggttgttcgactctttttttttttgcatgaacctcactcataacttggttttgcaggaaag

SEQ ID NO: 94154 - DNA, 973 bp, Eucalyptus grandis
  Intron number 2 from transcript Egrandis_v1_0.024941m (loc us Egrandis_v1_0.024992m.g) derived from phytozome v7.0 (c hr-ID scaffold_8; pos 71736469 to 71737441)
aagaactcgaatttgatctgcggagctccatcgtacacccttttgcgtttttgctcttccggattagacaagctttttccgccgaacggcgcatccgttgcttgatgtcgcgcctctcgttcttggaattctgatgatctcttgcggcttctgggtggctggcttggtttaggctgtgttagatttgtcgatggtgttttgttgggctctgctcttggattttttctgcgcgaaattgggtcttctcgtgacttttgattgccggttgagctcatcgctttcctttgacttttctccttttatgtgaagttgaataccgtcttcatcgtgaatttgattggttctttcttgggttttcttctttgttcttggttgtaattgaagaagatatgatggctttttttccattttatgaggggattcaggtgggggagctgtggtttatgttgatcatatctgtctttgaatttaaagagggtcacgatgtggtttctgtcaaatgacgagcttcagtggaattggtttccgattatccagaaatttgttattttttgtgtggaaatgttcaacatggagcttatgatacaatagagaaactctgttggtcagctcgattctacctgcttcgcacgaggactcgcttcgagcttggtggatgagagcatgaatgaacattttgcatctcagagctgtgcttttagattttgatggcaccaaatgttatagaaaagcttacctagatgaaaatagatatgtcccaattaatcgcgcactgatttccaagttgggtttctcctacctcctagttgttaattttatatgctactcattctggatatgatcatgtcatatataagctggcttgccaatttcctatgttggcctgcatatgactcaagctgcatatttaacttctttctcatctgtgcgtgctttagattcactttgtacttctgatcagtcgtcaagggaa

SEQ ID NO: 94155 - DNA, 1012 bp, Eucalyptus grandis
  Intron number 1 from transcript Egrandis_v1_0.014911m (loc us Egrandis_v1_0.009117m.g) derived from phytozome v7.0 (c hr-ID scaffold_8; pos 58155921 to 58156932 reverse strand)
actactaccggatcgccgacaacctcctcaagcaggtgcctcccggcctctcctcgccgcgttcggcgcgcccgattccgcgcgcctttgttcgcgtcgaaatcggtttttgtcgcgattcggaatcggagagtttggggagggttttttttttgccttcttttcttctttttgattgcccttaggtcgagaacgagctgggctcgtgggtgcgtctttctcgtgcgaagaatgcctgccggtgtcgcgtgattcttcgatgaccgtgttagtagtagaggccgattcgcggagttgctgatttggtattttgtagcgtttttccgtgcagctatcgctgtatgatataggcatacgtgagtggtacatttgcttattaaataatggggattgcgcagagtttagtttagcatcaatccgtgtgggaagtctgaaggacagcgggtatgtttaagtgcctgtcgaagtctttgagatccaagaggtaatggaacttggaaaaaaaagattagcttcaatttgttggaatgacgggtcttaacaggggatgatgcaatttaaaatgagttggattagctcttagagaactttccccgccgtccttctttcagccggtcctaacttccttgatactccattcccctttcccaaaacattccttgtgctttattgctacttagaataggaaatagttccgccttcaggtttcctttggagtatcatgagcatcatattttgttgttgtctatgctatttttcctggggtatggtattcttagcactttcttattatctgtatcttctcatttaccgtctaggcaagtgtgtaccgggaggagaataatattgtggatttgtatatcatccttctgaggttttcaaggtaaaaggctttgtgccaggccattactttggttctgttcctttattgaaagtacagatgcatcatatctttgatatcttttgatatctttcagtttggtgtctgaaactataccgtttcatcgagatt

SEQ ID NO: 94156 - DNA, 762 bp, Eucalyptus grandis
  Intron number 1 from transcript Egrandis_v1_0.002725m (loc us Egrandis_v1_0.002725m.g) derived from phytozome v7.0 (c hr-ID scaffold_8; pos 46708796 to 46709557 reverse strand)
gagaacgtgagctctcagctgatcaggttagttggtaactccgtatcacccttaacttgctattgatttaccaaagtccttttgttagtttgttttcgattaatgagtaacaaaatagaaaattagaagtatcgcaagagaatcttcggtactatagaatgtaacaaaagtggattgaaattggtcatgagacgagaactgtgaaaatgaaagtgttataccacattgttactggcgtttttttaagatgctcagtcgtttattggtgttctgtttgatttattattttagtcagattgtgattttagtgacttctagtttcagctaactgatacccaattcagattctcctgtcgaagatagtaggatattggtaatatatactgttgagggttgttattcgtgtttgtaaaagttctccagaagatgtagttataataatcaagtactaaactgttctcttagttttaatgatcaacatcacactagtagctagcggcatttgtagacctttatgagcctgaacactgtgtgcttttatatatggtgtgcatgattcctctgtcagaatttaaacaaaaaagaagaggtatgaaatggttgataaacggttgcttgggactgactgcatgagttgattttattaataaatttatttattctagttgctaggcataacctggtaaattcttgcataatgacaagatttcttttcgcttcatcacaggttaaaaaattcctgggtatctatcgcaaaaggta

SEQ ID NO: 94157 - DNA, 672 bp, Eucalyptus grandis
  Intron number 1 from transcript Egrandis_v1_0.004930m (loc us Egrandis_v1_0.004930m.g) derived from phytozome v7.0 (c hr-ID scaffold_8; pos 20955190 to 20955861 reverse strand)
gccacggaatccaagccaggtaggggccccatgattgaatgctcgttccttcttctttttttgcctcgtcctgcttgattttaaaagaccaaagcaagctcgatttctttagtcctcactcgcgtcggacctgaatgagtcggtttttcttaagtttgaacgttgctcgctgatttctcgagtttaggtttcagctcgagctccgaataggtccatattcgctctccaactcgctgcccactacgtgtttgaagaaatgcctgaacagattcaaatttcttccgtttgatgcaagatatggtatggaaaaatttagtttgaaaagtgagggaaatttattttgggatttgcttttgtagaaagccctttggaaagaaaaaaaaggcagatttttcattataaataatattccaacaggcggtgttttgcgattgactcatgtatattagcaccgggagcatgggagtgttgctagttttcttttctatttcttttattaatggaaaaggcaagtcaagtcaagaagcacctatataggatggttccgtgcaccttattcaaaatgccgctttctgttaaattagttgatggagtatatgcttatcgactcggagtatcagaaatgatctggttttcgtttctgtttctttattagtacaaaacgatatccat

SEQ ID NO: 94158 - DNA, 734 bp, Eucalyptus grandis
  Intron number 1 from transcript Egrandis_v1_0.053842m (loc us Egrandis_v1_0.053842m.g) derived from phytozome v7.0 (c hr-ID scaffold_8; pos 21073511 to 21074244)
ctcttgttacacggagtaacatttgcattcactgggtaagactgacaatgatgtcatcaattattcacctacattgagtttttgggttacattattttcattccttcaggggaaacatctagactaaataaggatgtcattagactcgtcaatcgttaaccttgaattgaagtttccctgtttaagcatgcatcctagaattcgatgaccattgaagaacccatgattatcggtttccagactcattcacttattgatataacggctttcttccccaatatggccctcctttatccaagaagttatttcccatcattgtttagatcaaaagaccacgtaggatgttgttttagtaatcgttatagcttgttattttctgtttggttataatttgttactctttagactgaaaagttgactcatctgaggcgcaatgttatccggcatgcctcatgatgtctattgtggcaaaagcatgtagaaagaccattggtgatgatgtgcaaaagattttattcagagatggattgcaccgtgagtcccaacgggtgcatataatcctaattcaaagaagacttgatatatcaaatttgttacaacattgctggctcatcgaatgttctgtatgtcctcgatgaatctacacattagcaacaataaattttgatgcatgccgtgcacgcatatatttttcgttgactccagatggaatcactcgttacttgatgcagaac

SEQ ID NO: 94159 - DNA, 887 bp, Eucalyptus grandis
  Intron number 2 from transcript Egrandis_v1_0.053842m (loc us Egrandis_v1_0.053842m.g) derived from phytozome v7.0 (c hr-ID scaffold_8; pos 21074296 to 21075182)
atccatttgcgagtgttctgaatctagggcctgatgttgctttttgccaagcaagtgctcaaatgctgggatgagatctggctctgtttgtatacacttaaataaattaccataccttacatttcaatttccctcaaaagatatgaaaaaaaaatgttttaatttgcaagagattatgaaaagattatatgtttctcctggtcaattttgtttgtttttaaaaggttttaggtgtcgagttctataaagtcaaattgcgagagctgcaagatttgaaaaaataaccaaaaaaaaactataggtacaattcgtccaaacaaaccggctcattacatcaaagaaggtagtgcagcttttttgagggagactgctgatttttgaaattattttggcatgcaaggacagcataagttgcagatatgagtgttgttgcggtgtttgttagatcaaaccatggaagctcttttgctagtttgagagatgttttgacgtggtcacagggggataaattactggctaagcatatgtgataggagaccaaatgtcactttagcttttgtttcttcagtaaattttttattgaatatagatatacttcaatgaatggcatgccaggatactctaagataagattgattggctctgttgagggagtcatcgtgacttggattgtcatgagggtcatgaaatctaggggatatatgacattccacactttactatcgtagatgaatgtcatcatgcgaagcaagtaagcataaaaaatgtgcgttgtgcccttattgttttgtggacagggaaaatcttttagtctttttgtactgattggtgtttgtatgtgcattattctaacttatagattttgctttgttttattagatcttatc

SEQ ID NO: 94160 - DNA, 955 bp, Eucalyptus grandis
  Intron number 1 from transcript Egrandis_v1_0.048803m (loc us Egrandis_v1_0.048803m.g) derived from phytozome v7.0 (c hr-ID scaffold_10; pos 33698939 to 33699893)
acgtcggaggcttaaattcgaccatcaggtgagttctcttttttatctttcttttttcaaaaaaaaaaataataataaacaagtgttagcatatctcagctttcttgctacaagatattgtgtgagtggaagaaagtgagaaaatctaaataatctaaatatattgaaaagaaaaaaaaatgtaaatagtttaatttttggtggagaaagatttgaatttaacttttaaaaatgtgaagacatttaaaaatacattattgtggttatgcatattagttctgaattacaattttgtactcataatttttgggtaaaaactagacatctagatattttcggatttacgtaatttagatgcattggagatcaatgaaaagccttcatcttctgtcaaattcttaaaagtgctcaagtgttattaaacagctctattcatgcgtatatactattgacaaaaaccgggcaatttttattgtgagtgctctatttaaactatattcttaaaattcgtagactttctcaatagagagtggtcgatgagccagaataatcggtgtttttgtgtgttacaatttacgagaaatcaatataaaagttacgacaaattacgacaagagtatttgtcccctggaccttggaactcccttcgtgtcagttttctaggtgtgaatgagtaagcagtaggagcttctttttctgttggtaaaagttacagggagtgacaagtgagcaaataattaaccaatcagaggccaagtcagcaataattgtcttgaaatcggattggtggcaagtgcatttgaacaagaaataagagcatcgcaacataactagtacgagttcaagaggtgttgtagtggagacgcttcattggcatagggaacatgctacccgggacactgcattggcatcacactaattgttcgtcaaaatatcccacttaggtacccggacg

SEQ ID NO: 94161 - DNA, 933 bp, Eucalyptus grandis
  Intron number 1 from transcript Egrandis_v1_0.046842m (loc us Egrandis_v1_0.046842m.g) derived from phytozome v7.0 (c hr-ID scaffold_8; pos 39933366 to 39934298)
cccgaatctccaacgaagaccgcctaggtcgtggcgtctctctacgcccggagaagatgaacagtgcttgacaagggcacgcacccggaaaatcaaaaaattcatgaggataatttcgggaaaaaaaaaagtgaacagtgcgggcgtggcatgccgaaaatgccgaaagcccaaggcaggtggagacctgccttgggctttcagccttcaaaatgttggctttgccttgaagatacttggaaagttttttcccaaacactttattttggcccaaggggcttttgatggccaaagctccttccaaagctgattccaaacggacccttagtacatagtcgatacagggacgataacttatttagatcaaacaggtcaatccaactgatattcacctgtgtttctgtagagacttcacaatgatctgcagtctctcggtcttaaaatcaaatggcacgaggataaaataaaatctctgagggctcagagcaacatattatatgactctattcttgaaaagcgaggtatgttatctgaaatctgatgcctgtggcatgcatgcctattagaccgttcagagctttttatatggaagtcgaaatctggcttctttccttgcaatatggtcacttgtgatacagaatatgagtttaaatgaatcagaaggcaagaccttgaagacagcctcatatattcgtaatgggttagcatagtatgcatgtcatcaagtggagcgaggtcatagagtttctcaaaggaaaagcaaagcgtggtggccacttctttgatttttatggtgtcttctaacatgtttcttgctgactgatcatttctcagtcattcttggcatgtatcattcttctgctgcacctattgctgaagatagtagcctttccaatggaggtgaggatgaaacaacttagcaaatattgaagc

SEQ ID NO: 94162 - DNA, 823 bp, Eucalyptus grandis
  Intron number 4 from transcript Egrandis_v1_0.001863m (loc us Egrandis_v1_0.001863m.g) derived from phytozome v7.0 (c hr-ID scaffold_1; pos 13096075 to 13096897)
ctctctcctcaaaagtgccgtttgaccgataagacgtatgtagtgcatctttgagttttattggtgcatcttgttcagctatatactgtgtttgcacgcgataaatgctgaatatgcttcttggtcattggtcttaagtgtatagctttttcttatcggaagaatgtggagaaatttagaattggatgctatagattgctcaatggtacttttcatattagagttgaatatttggcgtcatactcggacatggtggccgttgaggatgagaatggaagataggttctgatttggttgtggacttgcaagagtgggtgttgaattattatttgatggtagatgagcaataagaagagaattgctttggcattcagatggtgttaatggcagaggtgaagatgagttgggactagttgagttactcttgctttaattgttgaattatatttggatgtatatgacatcgttgtgtcatcagacatttgtgagctatactaagactatgaaagatacgcccattttagttgactctatatgatgttcttttggataattattaatatttgttttttgttttttgtttttttttttttgttgctattggtatagttacagcaaactgttatcttgttctaaacgttgttgacaatttgagtttcttcttggccctgacatcaccttacaactggcatctggatgccttaagcatgattgtttcaatttcttcagcaactttgaattgttgtgttgactacgaagtcagatttctcctgcgctgccctgccacatcaaaaataagaattataattgtatacaattaggt

SEQ ID NO: 94163 - DNA, 410 bp, Eucalyptus grandis
  Intron number 1 from transcript Egrandis_v1_0.051901m (loc us Egrandis_v1_0.051901m.g) derived from phytozome v7.0 (c hr-ID scaffold_8; pos 54399394 to 54399803 reverse strand)
cccaacaggtgactacttttagcattccatctcatgtgccttgtatcgttaaactcgatgcatttaaattggtttcttttctaaatttgtgttagtcttgttgaaattgaattgtatgcaattgaaattatgcagcaaaatcaggctaaataatatcaccatgtcaatttttgtcccatttcattcccagcaagcaacatttttccgttagttcaggtcattcatttaccctaagttccagtgctagtttatcaaaatggtataaatcgttgaggaacgcatttagaataggtctgtagttttcaatttggtcttgttagagcatagtttggcttaactcaattttctaactcattgccttttgactttcaacgaataataggcaagaaggtcagtttgcaaaaacaatc

SEQ ID NO: 94164 - DNA, 704 bp, Eucalyptus grandis
  Intron number 1 from transcript Egrandis_v1_0.010067m (loc us Egrandis_v1_0.010067m.g) derived from phytozome v7.0 (c hr-ID scaffold_1; pos 25330686 to 25331389 reverse strand)
gcttgacaagcaggtaatgatggaatgcaaaacaaagaaaaataaaatattctcttattttctagctatttctcattcgtttccttcgttcattagagttttgacagtatgaagggggaaaacactcaataattatttgcgctatcttcttgacggaaaaatgatgtattgatataaacaaataaataaacacattagaaataagatttctgtaacttgttatatcctaggaaagataaatttaaaattccatatcagctttatggtgtagagtacaaagtaatagtcggacgtacaaagcaaatcctaaagcagaatataactcaagcatcatccgaagagcaacataaaactggttgaaaaccaaactaatatggactaccaaggcgtaagaatcaactccgtctcagcctcctatgcttttgctccggtactttcacgttactaatagaaagtcctttgggcaatatgaagtaagtcggaactttatatactaatccaacaactaatgtctgtaagtttttgaaccagcggatttttaagagtttgtcacatgactttctaaattacttgttgtatcactatcactagcattgttaattcaatataacttataaggtcaaagcagatgaatcgagtgaagaacataggaagctcatgaatgaatgggattgattccatgcaggagcccagctctgtggtct

SEQ ID NO: 94165 - DNA, 804 bp, Eucalyptus grandis
  Intron number 3 from transcript Egrandis_v1_0.012221m (loc us Egrandis_v1_0.012221m.g) derived from phytozome v7.0 (c hr-ID scaffold_1; pos 9001256 to 9002059)
cagggccattcgctcgaggtatattgagctctctgttttgttattgatgatgcaacatgaaagcaagttctttcataattttagtcaagttttgacgcgattagacctgtcatggaggtggtcgacagtgaggtacagtttgtaaagtggagagtttctgatcacggtctcaccggtcttgttgaacagacagttttgatgtacaatgctcggtctttgctcttaaaattttcacatttgtaacttctaatgaggtgtcagaaacggcaattcggacgttatcgttggggatgtacatgatttttctgggctatggaatagtgatgccgtgaatttgtgaagcctcatcacatgcaagcacccatgagaaagcattaatcttagataaaaagttgtaattttggttgaaaattgaaacattttttttttttttttgatttgtctactgcgagtttgcctatactgaaatcaagaccttgcaggataaagtatgttggctcatctgattatgatatgataatggcgtgaagcattggatcccaccaaaaagaactccaaaatgcaagaggctgcaatcttatatcttgattggactagtatcaggttgggggaccacctgagaagatccatcaagtcagcctcggtcacgcatgttctatcttgaggtttgaagcatcgtttgtttgtttttttttttcttttccctattgatgtctagagatttggtatgctctgtatctatgtgtcaatatgctaaattcatttgcagaggcctttcaagtgttctatagaggattgccctgc

SEQ ID NO: 94166 - DNA, 1007 bp, Eucalyptus grandis
  Intron number 1 from transcript Egrandis_v1_0.015821m (loc us Egrandis_v1_0.015821m.g) derived from phytozome v7.0 (c hr-ID scaffold_8; pos 58782834 to 58783840 reverse strand)
agtcggtccccgccgacatctcccgcatcgaatcggtaacgcccgtgattcttaagccgtttggttttttcgcgagttttgaacggcgctggcagtcttgagggtcgttttctgggtttctgtgattgggggaggggggctttcgtcggagctggactccggtgagctcgatccggatcggatggttggtcgagttcgggagttactttcagattttagggcctgatttttaattgaatctgcgtgctttgcgagggggatgaagtcgtctgtttgccgtggattagctgctgtcggcagttactagatatcagatgatttggacacagggttgttgttgtttttgggatttctgctttagagaattttggctctgggatctgattttgtggcatcttttcttcggtaggaagttcggctcaagtaatataggctaatatgtttaaatttggatttacttgactgacggtggggatttaacatgattggggaggatgattggcgttttcatgcttcatatggagtttattagctgtgcaatatcaaagattatatctttgaattttgcggtgttgttcatgtaggtttgatgttccccttctaaataatcagcttctctttgaaatttaggcgtcatatgattgatgaactgaggccttttatgattttgtgatggcgtctagatcatgctttggatgcgctttacttttggaggagtttgggtgcattttctcttcatgggtttcatctagaattttcataattatgacagaacaagatgaattcaagagtccaagcgtgacatgtgaagaagtttgatagctagtaacacttgtggatctgaatatggagattctgctaattgttttctgagtctgcaagcttgagtctattcaactctatttgctggtctcttatttgattgaagttgttcatgatgaccttaaatttgtttcttatctaattttttgttctgcaggttgtcaactgccttcagactgtgaacg

SEQ ID NO: 94167 - DNA, 592 bp, Eucalyptus grandis
  Intron number 1 from transcript Egrandis_v1_0.026287m (loc us Egrandis_v1_0.020610m.g) derived from phytozome v7.0 (c hr-ID scaffold_1; pos 17561203 to 17561794 reverse strand)
cttgctcctggtttacctgtctcggccgcttcctggtgattcttttacgtttccgccttcaatgttggaaaacgtcgtggttgtctggatcggtttcgggttgggttctgtcgtgtttctcctgaacggtttgaatcgtgaggagggtcgacgcttgagaaattgttgttcacgtggttggaatttgatttggtgggaagtagagggagtgggattcgtgtagatggagaggatcgtgaattggtgttttttgtgtcttctatatgtttatttttctctttgtgaaggtgtctgccaagaatatggaatgctaaggaagtctcaactgtagtattttttctgtgatatctcatagttgaattttccgtgtagggttaattttgtcagttacatagtgacaacattatttggtaatttgatatcccctcgagctgactatgtctttgtggatgtttgatatgttacttctctagtttcttgaaggaaggtagtgtttgggaggtattcaatgttttcattgatctttctttttttctttttcttatattgtacggcagaggttctggacaaatctaaggctcacattggcacc

SEQ ID NO: 94168 - DNA, 1048 bp, Eucalyptus grandis
  Intron number 1 from transcript Egrandis_v1_0.004567m (loc us Egrandis_v1_0.004567m.g) derived from phytozome v7.0 (c hr-ID scaffold_8; pos 58918531 to 58919578 reverse strand)
cctccaccgaccgccctcctcccccgcgctctccggtgagtcctcctcctcctttctcctcgtcgtcgtcgcgcgcgcgcgcgcggggtattgtcggctattgcgtgcggtttgaattcgaatcgaattcgtgtcgggcgggatttgggggggatctgcggtgtgctcgcgtagggggctgcgcgcgtggttccgcgttctcttgagctgctttcgtgggctttttctgaggttttttatgggaactctctattggggtgctgagagatccgtggagaagtattgttcgcgcagtatgctgcgagtgatgttgaggcgtgcggcgattataaaggatgcgaattgtaatggatttgtgtgttttttggtcttggtttcggggcgaattctcggggaccagtgtaggagtctgaactgtgtagggaaagtaggccggtggaattctgttggttgtctttgtgacgtggtctgtcttttcttcactttgatcctctgttggtctttgtgttcttttcccttaatgtgggaatatttggtgtgtaattggaagttttttttttttttttgcggctttgaaaacaaacgggcatttcacatagggctacttctgcatcctgaaattctgctaaattcttgatgctaatcttggtattagctcgcgagtctggaccctctggctctgattctagtgggaatactttgatgctttgttgagaaggaatgagctttttcaattcaaaatgcttattcagttttctggtatctcttcgtgctggctttcctttcggggcatggagtataactgtcttggtggaactcattcatttttctctgggaatttgttcagggaatttgttccggttgttgatgcttgtttgacttggtagaagctcgtgcgacttagctactcctagtagctttcattgttgttgtgtgaccgagcctggttaaagatgacatttttaaattccgtttctttgctgctcaagttgttggcagttaatgtgttctgtatcctgtcttctactaatcaggtggcagttctggg

SEQ ID NO: 94169 - DNA, 708 bp, Eucalyptus grandis
  Intron number 1 from transcript Egrandis_v1_0.005412m (loc us Egrandis_v1_0.005412m.g) derived from phytozome v7.0 (c hr-ID scaffold_8; pos 48467465 to 48468172)
gtacagctgaccatcctagtgtgtggtggacccaccgtcccacgagcctacggagtctaaatgatcgatgaatgtgttcggctagtggaccgtaggacagtttccttgggaggactgatctttttgttagatgtatacaaactagtgtgtacataaaagtgttttggttgtaaaattgttccagcttttctatcttgttgctgtcgggggtatcgtttcacttccacatatgcattaaaataaatggattagcgacgcattctgggacgtcgcaattttatcgaccattgagaaatgtgcgcgtgctcagggatctggggcgtgacaccgagtctcaccgtgcttcccgagcagctcgggccgacgagccttgccgtggcttgacttcttcgagggcaaccatccaaaaggaagaagaagaagataagaaaataggagaaaaaagaagagagaaaaatagattctagaaattattttcaagaacaagaaaatacttttttttctacttgtttctattccaaatctatttcaataagaaaaaaatagattttttgcttttggaattctattttttttttcattcgctgaaataaaagaaaaaaaaattattccgtaacagaaacagattttaacataatacaggctcatgtatgaaccgcttagctcaaacgagtcgcgaccgttttcccttccgctcgctccagcgcc

SEQ ID NO: 94170 - DNA, 767 bp, Eucalyptus grandis
  Intron number 2 from transcript Egrandis_v1_0.028540m (loc us Egrandis_v1_0.028540m.g) derived from phytozome v7.0 (c hr-ID scaffold_10; pos 578706 to 579472)
agcgtctccataatcggccctcccgataccctatagtgagttgggaatcggctctctgtgtgatctgtcgagctcggatttttgttccctttttttttaaactttttgatgtggcagcgtgaatgggttggttttgttctggcaaaggtgcttcctttcgttgtgtccggttccgaattggtctagagaagtggatcatctgtttcgatggttatagaaagatggtgtttcgatagggaatctgtttattgggagctggagtttgtctcgattgtcgtgatgctttggtccgactattatttgtgcgttcttgaatcagaatttggctgctctagttgtttgaaagacgaaacttggcagtgggcatggcgttaaaccgtggagaagtgtgtgacttggataccgcatgcttagctaattgtttaattgatggatattacttgatgcattactttgactgcacgtggtgatggggttggataaatttcctcgcatactgttctcaactttgacggtcaatttctttgactagatgtatgatatgtgccatgagaggtagtggtgtgtttcaacaatctcatatatttggtcagtgattttttttttttttgttgggaatgtgcttaatacttgtgacaatttggtacatttatctagcatctacagtgtctggactgtattatgtattgaaatttaaaacttgacatttttcttctattcatgtacaatattattatggcagtgaaggaggtttctttagtgcgata

SEQ ID NO: 94171 - DNA, 342 bp, Eucalyptus grandis
  Intron number 2 from transcript Egrandis_v1_0.038729m (loc us Egrandis_v1_0.038729m.g) derived from phytozome v7.0 (c hr-ID scaffold_8; pos 66074204 to 66074545)
cgctgggagctgctagggtacgtattaatcattagatgatgcaatgctcatattccaatcacacaatgaaccaataagcttgctaggaaactttttttggggattcacgtgatctatacaatgaaaggaaatacgttcgacaagaaaagaactgaaattttaaggatacaataaatcccagtgatagtttacgattgactgggttaaccaaatgtgttttgcggtctccatccttgccatctaaaagctctctttttcccctatatctctaactatcctgtgtttgttctgacttaatgattttgattactgcagaactccacaatcaagctctttgctctg

SEQ ID NO: 94172 - DNA, 488 bp, Eucalyptus grandis
  Intron number 1 from transcript Egrandis_v1_0.051569m (loc us Egrandis_v1_0.051569m.g) derived from phytozome v7.0 (c hr-ID scaffold_10; pos 14387672 to 14388159 reverse strand )
ctagcagggtttaatccactctgatgacattaagcttacaattcagtcaaaggtcaacttcaccatctggtaacctcctccacgaggggtaatctgcctggaagccggcgtttgacttttattgagtttgataatggttctttcgttcttttcgccttatgatgcctagagtactcttttactgcctttcccctagcttttattgggattagtcacgacaaattatgatggtttgcagcttggtgctattcctcaatccttatcagtgaaaattgagtggttctttacatcgttcaatttccatcctcctaagaatttcctctgtagatccccctggctacttaaccaaaagcgaaaaaaagaaaagaaacaaaagaaagattaatgtgtgctacatttgctttgtgctcttgttcaaaatcccatgacgcaactaaaccgattgcatatcaggtcttgctagagctggcaaaaatcagaaacaagat

SEQ ID NO: 94173 - DNA, 570 bp, Eucalyptus grandis
  Intron number 1 from transcript Egrandis_v1_0.051924m (loc us Egrandis_v1_0.051924m.g) derived from phytozome v7.0 (c hr-ID scaffold_1; pos 38579669 to 38580238)
gggttctctctctctctctctctctctctcttctcggatttttcacagtttctaggcattgcatgttaattcctggagctgattctcgtttcctgcttcgacgtgggtttgctactttggtagtgttgatggcgccatgagctagcgcagggattgtcccccgctgtatatcaaagtaccgggtcgaaaccctttatgacaaaagtgaaatggtggactgggtttggtgaaataattgattttgttcatgtccttttgcctactacatggatactgctaccctgcgctttctttgtatcccattaagcgaaattgagttgcattacgttccctagagtctggttatattagttagtatcagaatttcgtatcatggcggcttttgagagtttttacagttttgctcggttatttgattattttctgagatgaatatgataacttataagtatgactatcgtactaaggcccgttggagttgcgcatgttttctgaattgataaacggcatgctagttttgggtttgcaaaaattctttttagatgctaattgtattctactgatgcagat

SEQ ID NO: 94174 - DNA, 563 bp, Eucalyptus grandis; identical to SEQ ID NO: 93797
  Intron number 2 from transcript Egrandis_v1_0.026151m (loc us Egrandis_v1_0.026151m.g) derived from phytozome v7.0 (c hr-ID scaffold_10; pos 23032671 to 23033233)

SEQ ID NO: 94175 - DNA, 929 bp, Eucalyptus grandis
  Intron number 2 from transcript Egrandis_v1_0.010129m (loc us Egrandis_v1_0.010129m.g) derived from phytozome v7.0 (c hr-ID scaffold_8; pos 20198332 to 20199260)
aaggactcgggatctcaggttggttttgtgttgcctaggagaatgctggttctgtcttgaaattgttgaggctcttcgttgcattcggttgctattgaagtggttgttaggtgccaattcaagaatccattctcttttttagtgtgtttctggtccggcttacaacttatggcttgaggttatttacttggactttgaaatgattgtcctgtgataatgagatttactcattgtttgctttgttggaatgatgaatgttttgatttggatcctccgtgtggttccaacatgttgttcaactgagctaaagcaatactcattgttttccctgctaagtaaacaggagcgaatttttggtactaaagagtggagagatcgagtttatagattagttcctgcagtttctttcttttgggcttgtgagtggagtgcctgtgtcttgtttagggattgactatcacctaaattgatctagctacacttccggctcgcaactatctgatctaggacggggtttctaaatgtctgtaagtcatctgaagatgaattgagcatgttaggattaatgatcgggctactggttcttcagctcccgacctaagtgtaagaactgtgctccatacaaagtggaatttgaaatttttgcctttatctatctacagccttaccttcagcacttttgggcagttgcgcatttcactgttgctttgccctttatgtttttaagccccagttgcttctttgcttttgggttgtctgacattattgacaacctccattttacttcaaatatgtgattgcaagaatgtgcaatcatgctctttatcatatagtagacttcaagttgcttggattgagtcgtgctgtttacaagtttgctgttcttacttataggtagtgtccgatcgttctcgcaaatctctaaggtc

SEQ ID NO: 94176 - DNA, 650 bp, Eucalyptus grandis
  Intron number 2 from transcript Egrandis_v1_0.042666m (loc us Egrandis_v1_0.042666m.g) derived from phytozome v7.0 (c hr-ID scaffold_8; pos 19352087 to 19352736)
aagaggtagagaatcaaactctaaattatccttggatggttagatccactttttgttctaaattgactagaaagaaaaggcacacatagatgtgtgttgaaaaaataataaaaataataattattaaggctccgtttgtttctcgaaaaatgaatgatttggaaaatattttcctgcaaataattgcttgtgtcgcttatgagaatgaataaattaaatatattttcattttctatgaaaatagaagacataaattgttattgaagatgaaaactttttttttattgactaatttttttttaagctatatataaatgatcatttttttggataggtatattccaaattattcgttcttcgctaaataaatagaatctacgggaagaaaattaagagatttgtgttttttcaggaaaagaacttgagtcgttacaagagtagccgtacaatggtctatccaatagatggtacaatcacttaggcgtgtaatttcgaattaattctactctatttaacatggaaaataaaggcaaaggaagaaaaagaatatgaaaactaagataaaagacaaaatttccttcatgacaactctcaatcttttcacgtcgcaaacagctcatagagaagaagttatttgacaatttgaggga

SEQ ID NO: 94177 - DNA, 751 bp, Eucalyptus grandis
  Intron number 1 from transcript Egrandis_v1_0.001931m (loc us Egrandis_v1_0.001931m.g) derived from phytozome v7.0 (c hr-ID scaffold_10; pos 6515266 to 6516016 reverse strand)
tccgtcatcccctggaggtggaggtgctggaatcagtacgtgatcttccttacatgatttaactattggctactatgttaatttctttagttcatgacgtatgccacgatgggcatgcatgagtttgtatctggtgtctaattgatgttttaccatgtgaaccgactcggatgggatttgtgggagataattagtcaaaatgcctagcaatatctttactactcgtgactactgctgcaatggaggagcagctggcttgttctgttaattgatgaactagtacaccagatataaggagttacagaattgcttgacgttagtaaattgaatgacattctagtaccatgtaaagtggaaaattttggtgggtcaaaaaaggaaatggatatctttgggctcgtgaatgagaatttttctaggagttggctattgttgagtaattgcacatgtttttgcttcccttcccggtcaactaattggactttctattcttgagagtagcgttaaattttattatggaaatgtgagcgcaaactgtattattctttaggtgtttggccatggatctaagttacgcaccacatgttcgtggaggttgagatgttgatttgacagctgttatatctatttgagttgctacttggaacgatttgggagtttttttgacaatttaataggatgacattcctcatggtgccaaatccttttggtattggttttttttttgcaggactagcgggtgccgctgctg

SEQ ID NO: 94178 - DNA, 883 bp, Eucalyptus grandis
  Intron number 2 from transcript Egrandis_v1_0.003786m (loc us Egrandis_v1_0.003786m.g) derived from phytozome v7.0 (c hr-ID scaffold_8; pos 37259427 to 37260309)
atcacggcccaccttcaaacattacatataatcaggtaacaagaaaagggggaacaattaagttgtttgctgagaaattgaactctagtagcgacgcttctggagtattgaaatctcctttctagaaacattgccctcctggctccggccattgttttcttcttcagttgtttggggtttattgtactactgcatttattagttctttaagtcttttcaaatgcgctttctggatttgctcaacactttgtagggttgtatactgggaaattgcaaagttgatagaccgtgtattttgtggtttgtcttgatttttcttcgttgaccttcatctccctaaaacttgatagttgatactgaatagtcctcaatggcataaagatccttatattcgtccccacttaatgggataaagtttgcttcttgcccttgtgatttttgtcaacatttttggtatctgttatttgtctctcatgttccttttatcttcatcttctatgctcaattgtttgtcaagcaagctaacttcagaacttgtccgatagatataagaatttacaatagagacttcagactataaacagaaaactcgtttattctaattgtgataaggtcattcatctcattctgcattgaatgctcaaatatgatttgtattagtaggcggaaagcctgtctgtgttatatgaatggtggtgcagtgaagtggggctattgattatgttctatatcattcaagttgttgcaccttattatttgtgacatcaaaacctagatgtgaataccatctcaatggtgttgcctattgctggctgagaaacagtcattggttctatttcatgatgcagctggagcaagaaatcttgaacttctctgaaggtct

SEQ ID NO: 94179 - DNA, 486 bp, Eucalyptus grandis
  Intron number 3 from transcript Egrandis_v1_0.011227m (loc us Egrandis_v1_0.011227m.g) derived from phytozome v7.0 (c hr-ID scaffold_10; pos 4788543 to 4789028 reverse strand)
cggtcatcgttgggggtacaaattactacatccaggtagagtgtacagacgcttatgctcttaacgcgagattgtaaagatggtttcgcataaattttgtcgctttaagtccatcactcgtcaaggtcaattttttaacttagtttcctgactgaatgtaagtgctcagtttctggactatgagattatttagttgccaatgcctgatataggatagctatattaatgtctctacatcttctgcatagcttttgtgcttatgatgctctgcctgattctaccatgtgaatttaagtgaagtatctctttctggaaaacagaacttttgatcttctttttactcaatttgggtctatagtaattggtagttcgggagatggattctgatgggtatatcctgcgagaaatttgtttgctttaggtgttggttaattttcttttatctctttgttgctatctaggctcttgtgagtccgtgtcttctgg

SEQ ID NO: 94180 - DNA, 908 bp, Eucalyptus grandis
  Intron number 3 from transcript Egrandis_v1_0.031096m (loc us Egrandis_v1_0.031096m.g) derived from phytozome v7.0 (c hr-ID scaffold_10; pos 19044262 to 19045169 reverse strand )
aggtaaaagagaagctctctattttcggatctgtgagctaatgtgatactgtgctggatcattctgttagctggatcaaaggctgcaaggtgatagcgataacggtgaacttttatcgcttgtttggctactataccagagaatgaagaaagattattttcccctgttatcttcgcttatgttcgattttgatttgatgaaatagagctatggttcatcttgagtagcatacgagataacttgaagatataaagtatcatgttttgatattctgtgactgcaattatttgtgatgtgctaattgcaaaatgaagtggatttacaagagtccatgcaattgcttctcccagaatataccgtataggcagaactagctggagatgcttccatatggtatgttgcttgagaccaatatgcgactctgcacgaatgattgatggtgctatgaactggtctcaatctcgtgaactaattctttgcttagtttttcagcatggtcgtcgtggccaccggcaaatgagtacactcaaatgcgaattgaaaagcccttcaaagcatttttgtgtaattagttctttgtgtttgtgattttgttaacgtcagtttgttctcaatttcctttgcttctctgctttcctgtgtcagatccaaaaaagaaaggagcagttgagggctcacgttctcttccccgagtaatatgtaaattgcgaagacagctcactggtcaagagcgaaatgccaagagcctatgctcatacaacatgcttgtagttattattatgaaacacattaacgataaggaatcaccaaattatacattagacaatgttttctctagaaaactataaaattagttgtctatttggatgtaaaagattcacattgttgtgtattggcaggtactaaaa

SEQ ID NO: 94181 - DNA, 963 bp, Eucalyptus grandis
  Intron number 3 from transcript Egrandis_v1_0.009842m (loc us Egrandis_v1_0.006034m.g) derived from phytozome v7.0 (c hr-ID scaffold_10; pos 19379531 to 19380493)
ttgggttaggtgattctggttaccagaaatacaatgtaatcatgttttcgctgctttctaatgagattggcatatatgctttaatgatggcatcaaacattctggccctgacttccactgtcatgcaactgctgcttctgtgcttattctacggaaaataggagaatttattgaattttgtgtaataggattgtgaccttttgaagtcctaggatgcatttatgcccagcaaagcaaattgctttcaattgaagttgatcttcaaagtatttggtgtctgatgctaattctgctctcaaggcccagcaccatctttctaataatcatagttgcatgacagcaatttgatccttagatgtacttagatgtaactgccaacattgtttgtggggatcatctggcgtctataaattttaccattaggtattctgagtgtgttaatccatcattgttatatgttccttgtcccttgtagaattgtagttcaaaggaagtgcttagagtaggtttctattgactttttatggtgccatttgctggtatttttctttccacgggaataagcaaccattttagtaattttctttttggtggaatcaagtaatgttgcatatgctttaagcataattgatagtgtgtcaagttcaatgctgtcattgtaatttagcttgaattctacccagactttgtcttttttgttattctttagtgaaaacgtatcttgccaaccatttctctcatcccattcctcttctcttcctgaataattcagcttccttcaagtttaagtgcctgggtctctcttggattcatcctagctttcagtgctactttgttaactcataccatttgttgcaatattcgtttctccctctcatttacttcagctagaggaacttatcttcatcttcatgactgatgactgcagtttgttgccaaaaaacttgataagagactttctga

SEQ ID NO: 94182 - DNA, 605 bp, Eucalyptus grandis
  Intron number 1 from transcript Egrandis_v1_0.021103m (loc us Egrandis_v1_0.021103m.g) derived from phytozome v7.0 (c hr-ID scaffold_8; pos 15101458 to 15102062)
gagctagcttggggattggagctgagccaacaaaggtatggtttgaaatttgtgtatctctagaataataatttttccaggttcgtaagttcatggtatgacatatggttttaaaaaccattaacatgatgttgctatttgtaatttattattggaacagttgtaggaaattttctctttcctttatttagtctctgattaagaatgaaagataatacagtctttttccgaatcaaaacaaaatccattagccaacattagcttagaatgttgaggtagtttgcgttctacgtagaaatcagtagccaaatatatgctacacgttataataaggatattttcattaggatcatcgtcaatataaagaatgcattgtgcgttgtttattactgattgacaaatggaagattacttgtaccgaattaactcatcacacaaatgtcattcaatccaatgttaaacgggtaattttttcacagaagacctaataataatccaaagagggacaaatttgcaattagagattaagctatgtgttagtgttattttgttatatactcaataaattccttcatcttacgaatgttttatttcaataggtttat

SEQ ID NO: 94183 - DNA, 635 bp, Eucalyptus grandis
  Intron number 1 from transcript Egrandis_v1_0.042684m (loc us Egrandis_v1_0.042684m.g) derived from phytozome v7.0 (c hr-ID scaffold_8; pos 6039861 to 6040495)
ctcacaggtgaaagccgagagggtcctccatcacttaaattcactacagcttgaacttctaagagcatgaatgatgtcgctgttttcactaagatatgttccaactcctaaaccatttttgccggagctttattagaagtactgcggatgggggaagagggaaagtatagtccaaaagtagtgcgtaaagtcgttatcatataggtcaattccaacatccgttgctaatcgaacactacttgttaatgttttgttctccactgttgtcaactcgcataataaatactgttccgatatgaagttaagatctaatcacttgtatttagttgaaatctacttatgaaatgaatatacttcaattgcctatatacgatcttggtttttttctcgtgagctaaaatggcatacttgttccggtaaataatatgatgggcataactaatcacagtgggaaaactttatttaaacttgtacttttgagtgggcttggtcatttttttcatttttcatttttttttgatatggttggtgtagatttgcacttattctcaagctataaactcgtgttctcatgaacaaaaatttgacaaaacttggcagggctgggacagctatcaataccgtacgccttggag

SEQ ID NO: 94184 - DNA, 793 bp, Eucalyptus grandis
  Intron number 2 from transcript Egrandis_v1_0.020568m (loc us Egrandis_v1_0.020568m.g) derived from phytozome v7.0 (c hr-ID scaffold_10; pos 8227549 to 8228341)
acattgattggcttgttgggtgggtcatagctcaggtgcttgtcaatcttaattgttacttccagtgacttagtttatgtcattctgcatttgtaatatcaacgtcgcattcttctttctttgaatttgaatgttctttcattacctatactctcttcaaactgataatggtatttatatagatcatcttttttattttctttaagttaggcttagatacttgaaaatatgaatttcatcactcctgccatctcaatgttaaaagcaaaagaagtgagttaccgaaaaggggaatggaactgttctgcttcagaactcatcctgtgtcttttactatcattgtccagtgatttaaggttaaacttttgtgcaattacagacatagcttacttgattaaatcttcaatctgttttgcacgtaaactttctttccctttgcatcgaactagggcatcatccttctctctcgcttgaacagaagggccaatggatttgctgtgaaaactcttctcacttcaggggttgctccccaaatagagtgaataaacagagatccaaagttccattctataataaaaactctaaaatcatacccgctattcctgggttctgtcatcaatgttggtcctatggactgtgaacagttttgcctagtctgtggcgccttccaccacatcgcatttgtcaggtttcttagtttcattaattacaaaaaaaagtaaaaaaaaatctttttaataattctcttgttcttgcagcgtgcaggttgtcttggcagcgcgcttgctatcat

SEQ ID NO: 94185 - DNA, 421 bp, Eucalyptus grandis; identical to SEQ ID NO: 93466
  Intron number 2 from transcript Egrandis_v1_0.033791m (loc us Egrandis_v1_0.033791m.g) derived from phytozome v7.0 (c hr-ID scaffold_8; pos 8403088 to 8403508 reverse strand)

SEQ ID NO: 94186 - DNA, 533 bp, Eucalyptus grandis
  Intron number 4 from transcript Egrandis_v1_0.023566m (loc us Egrandis_v1_0.023580m.g) derived from phytozome v7.0 (c hr-ID scaffold_1; pos 33970578 to 33971110)
cctggtgatccaagctacgtgcttagcttgatcaggtaataatttattaaatttctataactctcatctttttcttgggaaggccctgcataaagctatgtgcgtttgagtattctctccggaatttaagcagataattgaaatttccaattgcgttgattgccaatgcaaattatttaaattcaatatgctattccaggacctgccaggacctgagttcctcattcgtgggtttggtagctgatgtttccattaatgtaagttgagaatatacctaagtccaaaattctgcagagaaatatattgtgtctggggaatttgttttcagttaagtgaatcaatgtggttgaattggcttatcctaagagaagaacgtgaaattctgctaaatcttgatgtgcacgcttgtgtaagaacagttttgatcagtatattgtctgacttttagggtattttcaatgtttctgcttcaatcttttgcaaattggctacttgcaggggccaaccaccatctaaaatagaaattgaggctt

SEQ ID NO: 94187 - DNA, 983 bp, Eucalyptus grandis
  Intron number 2 from transcript Egrandis_v1_0.053369m (loc us Egrandis_v1_0.053369m.g) derived from phytozome v7.0 (c hr-ID scaffold_1; pos 28371203 to 28372185)
ctctgggcattgcaaaggtaccactacattaatctgtcacacttgaattcttttttctcccttccagaaataccaaccttgatctgtgcgaccattataaggatgatgaaacaactattgctcttgagactttaaccttggcagttttttttgcttttgatagttgagccttgagaatctttcatatattaattcattatctttctccttctcctaggttagttccagaaaatgctgcttttcatgcatgttttctgtttgtttttggccaattgctaattttgatatttcagtcagtccatgtctgactgttattaaaaggattcttgtcatgacaccaataataatacaatgcaatcgtcactgaaccatcaatcttgagaggttgagcttcttgatagaaaaacgattgttttgtttctatatacactcacacgaccattagctaaatgaaagcgcatatgcttgaggtctaagtattgtccttttggacattttcttcatctctctctgccccctgcctatcttctaagataggtatgagataggtacattttagttatgacctgataaatctaaagaaggatcagtgtcataaaaaccgagaacattttatactcttaataaggtcacacatgcaaggcacatcctcattcaccgagcttgagacctgcaagttagaaaaagatctccactgtgaatgataatcaattgtttctgaaactgatgataatttgcttacttttttccttagttaggacattccctatgcaagcatagcactttacaaagagcataaataagatgacaatatagcaataaacaaaaggacgagactacgaaatcaactgtcatgagaacagaaacagatacaaaatcaagaaatcatgggatcattatgtgagtcaaaatgaaatgtccattgatgatatggagtgttgaatccaggccttccttgtggggaaggactttggagctctgcc

SEQ ID NO: 94188 - DNA, 707 bp, Eucalyptus grandis
  Intron number 1 from transcript Egrandis_v1_0.015914m (loc us Egrandis_v1_0.015914m.g) derived from phytozome v7.0 (c hr-ID scaffold_8; pos 59181180 to 59181886)
cgtacggattgtctgagaaacccgccgtcttgaaggtaagaaagagagccggagaagagagagggggggggggggggtggggttcgtgtcttttttcgggggaaatgaggtcgtggttgcgtttattgtttgtttagtggtgatgggtcggagagttcttggctcgattctttgtgatttgaccgtatccgcttatatatacatttttagagatgggatttggtttttctggttaaaaaggggtgaagggtgttctaatgatggatgcgttttttgtgattattttaatgggggttgactgaaatctgtgaactttcgcttatttaccacttgaaaatatcgagtggcgattcgctgacacgggcctttgaggtttgctttatcagtttggcgacggaattggtaatttgcagcacagaatgtgttcatactggatgctgtattggcttctgagggtgaatcttgcttatttgggtatcacggggacttcttggttttgtaggacagctttccctttctttccttttttaccttcttgtgctgcaattgtcattccatgtctaagctagacttttgaacgagtattgctggtctggtagtccaatcggctaggcctatgaaagctatatggagtggtatatcatctattcacgcttctatttcactcttcaggttcgggattggtacttggattctttccgcgacgt

SEQ ID NO: 94189 - DNA, 1012 bp, Eucalyptus grandis
  Intron number 2 from transcript Egrandis_v1_0.030878m (loc us Egrandis_v1_0.029637m.g) derived from phytozome v7.0 (c hr-ID scaffold_1; pos 32507508 to 32508519)
tgcctccaaggcttctggcctcggcgttaagcgaggtattgggctaaccacaaatgaacttgtttggccatgactttacttggccgtggattgtccatttccaggacgaccgatttaaaattgacaaaaagaaaagattcattgcccgttgtgacattagcatgatcaggattagagctgcttgatgtggaatattttacttgattgcatggggggtttaactgtgcataaaatttacagaatgtagcctatcataccataggcatccaaggtggaaggaaagttttgaatttggttggtgatttcaaaaatttcggatattgaggtgactattgttagtcgtaattatttcagaggctccgacagtctgtgccgaaactctccgctgttgtgaatattcaaattcatcttatggcttcagagagctaattcaaatttaactgcatattctcatctccatctttctctgcctactatttatgtcaatatgagcctcgaaaaattgtgtaatgagtacgcatatctttatatctggacaatgcaacatgtcattttgcaactcatctgcattccctctcttttactatgtaattctctgccgagtttaaacttaagtgcaatcaaaacatagcttttcatatggtctaatgagacattttgttatgctttcccaacccctcaaactccaaactcctaataatgtttcccaagaccaactctagctttcctctttacaagtatttcttggttttctgtttaagctcgatacagtgtctggggttgggggatttttccagtggtaacttaagccagtgctctagtggccatggctgaagctcatgaggcgagtgaatgctagcagttgcatgcattgtttagccacatgagaaaaaacaagtagacaataagcagccccgagcagtggcttctttttttcgttgttgggtatctgattgaaacctcttcttaatgtgtaggtcactgagagttctgccagatctcagttgcttcc

SEQ ID NO: 94190 - DNA, 547 bp, Eucalyptus grandis
  Intron number 2 from transcript Egrandis_v1_0.016195m (loc us Egrandis_v1_0.016195m.g) derived from phytozome v7.0 (c hr-ID scaffold_8; pos 23974448 to 23974994 reverse strand)
ttcctctgtcttactacaccggccttttgggtatgctctttgatcatctagtgtaatatctctttcagtgttaaagaatgagggtaatgggattgccaagatactttgttctatctgtttcattctcaagtacggacagcctctagctatgcaaggaaaaagcgtgtgtaatatctctttcagtgttaaagaatgagggtaatgggattgccaagatactttgttctatctgtttcattctcaagtacggacagcctctagctatgcaaggaaaaagcgtgcttcctttgaattttacttgtagggatcttcctggttaataagccgtatgctctcgttgaattgtctcaacaatagagccctgccaagctatcttttgtgttgagagaagtgtgtaaactgattatttctcatccatttgtcaggggcatcaccttcggtcaattaatcagatcatttgagattttgctataacataacactcctactcttatgcttcagcaaatctgtgactcgtctaatttcaacaaatgtatactttccagga

SEQ ID NO: 94191 - DNA, 1016 bp, Eucalyptus grandis
  Intron number 3 from transcript Egrandis_v1_0.025230m (loc us Egrandis_v1_0.025230m.g) derived from phytozome v7.0 (c hr-ID scaffold_8; pos 1079559 to 1080574)
atttggtatgtaacagtttttagccttcaaatgatgctgctcattttgttttcgatttggtgcaatgactattttcgtataatttttggtgttcatgcttctgatagatttcttagttactactatttttttccccagagatacaagcttgtaatttcatgtttacctgctgcctcctttgttatgcatagtttttgttgcatggcagtgatatttgcattttttggagatcaatgcctcatgatctgagaacttcaaaactcattgataacaggacaaagcacacacaccgatgattcagatattagcatctagataggatggcaaacatcaaggatgcattttctctcatgccgagcaaacatgctaatatttgcgaggatgggagagggaattcatttatgagtcatctcttcacatgccaatgaagagacaattaagcatgggccatgagattgttgggaaaaagaagaagcatgagccatgagcagatatttaatcaaatgtcacatgctctagagagctcatggctaagggttgctgctttcattgcatatatacttatccaaatcaagaatttaactcgtctgcatggcaatgaagagagtgcagcaaggatgaatcgtgagtgaaaatgttaatgaaatccacattatgctttggagaggtccgtattcacaaaaagtgtttcatggctaaggattgctgtctccatacctattgtttatcatagtttgttttcaagtttatggtgttgtgtttgatttgattgttgtgatgtttttcaaacaaaactggagattaattgtgacttgttcaaattttatcaaagttgaatgtatttaattggctaaacagtcatcatatctagtcattttattgtttccctttgtctggctttgaggttgtctgaaataatttctttgaagtttttgttcctttgagagcttgctgaccatgtatatgcttgaccaaaatcaggtagatacacacatacaacagttggatcaatatct

SEQ ID NO: 94192 - DNA, 481 bp, Eucalyptus grandis
  Intron number 3 from transcript Egrandis_v1_0.050209m (loc us Egrandis_v1_0.050209m.g) derived from phytozome v7.0 (c hr-ID scaffold_8; pos 53855882 to 53856362)
atcagattttgcttaacggaaacaacatagctatcgtaagaaacaacttcttccttctgctgatattgatatggctatctgttttgagcccttgcatcgataaggatgtggtcttgcctaaagttttggtgatctactaactagtaagcaacaatcgccttaacatcacagaaacaatcagccactcagagagattccttccaatatgtagactgaaaatgcttagacgatatattgatgaatttttactgatcttgattttgtggtaaaagagtcatcattccctattctttacaagaatctggtcctttgtctcaatcaaacttgtgtccacctcttgataaatataaagcgtcagttgtgtggcagttatgttattgaaaagctagaattctgctttcaagtgcttgaaccactcaagtgatgatgccttcctttttttcttaatgcagttagtccctggtggctcccctgatctgga

SEQ ID NO: 94193 - DNA, 881 bp, Eucalyptus grandis
  Intron number 3 from transcript Egrandis_v1_0.008031m (loc us Egrandis_v1_0.008031m.g) derived from phytozome v7.0 (c hr-ID scaffold_10; pos 9925034 to 9925914)
gttcttcagcaagtacttcttcggttactggtggggtctgaacaacttgaggtatgcacatggcatccataccgatatgagggctcattatgaaccattgattggtggatgacaatttgcatatgagcctagcttcaagaaattgattgcatcctatatttagtgcatatttgagatgctccatgcctctgattcctgtgaaaatgtgggactaaaggttgacatcattcaactttatgttctcattgacaaaaaagaagtagaaagcatgcatttgcagtaagtgtaaatcctacgttcagcaccaacatatcagattgaatggttgtgtctttcatcactgacaaggccctgtcctgattcatgtgaacagtgatatagggcagaaccttactccaagcacttatgtcggtgaactactctttgtaaacatcttcgccgctcatggactacttttgtttgcactcctcattggcaatatgcaagtaagctctatcaacactgtctttatgtctttcctttgtttgttttcatcttaataagcaacatcataagtagattctggcagcttccatttatcttactgtattttacctctgaaatcaatcaaagcatcttgagctcaatattttctatccctggaaagcaattttttaagagggttcattccatggctttcttatttcaatgataccgccttcatcactggcaatgacagatcaacaacagtatcgttttcacatggtttgtgaagttcctgatttctaggaatccagaatactcagtgatcttatcataccataatctatggccttgataaaatacacttttacctttaatcgtcagcgatacctccactccacgaccattcggatagacca

SEQ ID NO: 94194 - DNA, 697 bp, Eucalyptus grandis
  Intron number 1 from transcript Egrandis_v1_0.031612m (loc us Egrandis_v1_0.031612m.g) derived from phytozome v7.0 (c hr-ID scaffold_8; pos 43243399 to 43244095 reverse strand)
agctccgcggcaaagccattgctcttcactcgcaggtaccggcacgcattctcgtccggatgaccatttataaattagtcttcgtatacctaacgtttgttcatatattaaatccgtcggcttttgtgcaaattgattttattcttttagtacatagtttcagcagagtggcatctgtctcaagtaatggtatccatgaatgaatgaatgaatgaatgaaattgagataatggtttagaatggatggatattctagttcttgtatgcataaggatagatgaaattatagagattcaaaattatataggtccattagatattaaatattaaatgtgtgtgacctttgcaagaagtaggagagaaaatcaatcaatggtatccttgaaatttaaagaaaatattgttttttgacagatgaggttgtggtttacaaaaaaagagaaaaaatcagatgggttggataatttgtctgaaaaatgtgtggttaagcaattttcagactgttggcatccaaaaaataaaaattttgatattaggaggtaccaattcacttgcattttacagtttttccgcaattcgaaaatttaggaggtatgctccacttgatttatcatacacataacatcaaaactgatcatagcatacactctgtatataatcaggtgatcacagaattctgcaagtcgattggagcgga

SEQ ID NO: 94195 - DNA, 496 bp, Eucalyptus grandis
  Intron number 1 from transcript Egrandis_v1_0.044500m (loc us Egrandis_v1_0.044500m.g) derived from phytozome v7.0 (c hr-ID scaffold_8; pos 27609128 to 27609623)
ccggcggtccagcctcgtcgacagcaccaccgactcggaaacacagcattaattgcataattatcaactttttaataaaaatttgaaccattctgacatactattgctagctgttgatgaacaacccaaatctactagatgcaatagcatgttgatgaacaacccaaatccactagttcttgcgtctgtctgtgatgtacgcgtctattaagaggctgtgagagccaatttaataaacggatcttgctggtaactgcaagaagccattgaagtttttctggattttcttttccataaaaggtagagcaatgccataagtggaacaaccatcccgtttcctttaggaattgcaaagcgaagagagtatggtatcaactgagaattgtttttcccccctgaaaactcaaacgtcgactgaaaatctgctgcagtactttggggtttcaagctctacaatggaggagggtcatcatcaagcgcaccaagtaccaaggtt

SEQ ID NO: 94196 - DNA, 909 bp, Eucalyptus grandis
  Intron number 1 from transcript Egrandis_v1_0.050892m (loc us Egrandis_v1_0.050892m.g) derived from phytozome v7.0 (c hr-ID scaffold_8; pos 72082066 to 72082974 reverse strand)
agaagaaagaagcccacagttgtttttgttttgggtgagcatctacttttaagtttctgcaacttactctaggataacagggttctttatttcatcagtatggtctttttaataataattaattccatctgagttagcttctattagattctgtgatactattgttctattagttgattttgttaagtagcagaaagtagattcattcagatctttcagcaaagttgcttgagggatgcatcgtgtttcaaattttcactattgcttgtctttcgtttgaagttttgatccttcccctttggatcaaatgtttggtgcttgatttagagttaggcgagatatttttttttttttgttggacgaatttcaacttttttactcaattttttttctttttaaactttattttatttcttcctcccttttttcagcattatctttctattttcttttatttcaatatattctattccttcaaaactgaatgagcattcagtagctccataatgttaatctaaatacaaaagattgatttgaaatgcatcatacgttattactaaggggcataatatgtgaccgtttgctattatgcacgtttaataatttttgcttacactcacgataaactggggttcatgtttgtcttctggatggagaatattagagttgcctttttaatggccggaaatttaaatgtggagggcgattcaatgtatacacatcgaattttgcttctacagattttgatatgggttttaaaattctttgaacttattggaaggagttttttattttattgcttcagaagacttctaagttcttctttgccaaaaggtggaggctctttcatcctttttaatttagctttctttaatttgtaggtggacctggcagtggaaagggcacgca

SEQ ID NO: 94197 - DNA, 899 bp, Eucalyptus grandis
  Intron number 3 from transcript Egrandis_v1_0.047814m (loc us Egrandis_v1_0.047814m.g) derived from phytozome v7.0 (c hr-ID scaffold_1; pos 33248961 to 33249859 reverse strand)
atttgttcgattccataaacaaggtatgcatttgcatgtcaatctttcatttgaaatgattaatgtctcggatctttacttctagaaaagtctgatacattaccaataaccggagaaaaccatttcaccaaaccggtagctccaattatgctgctcaaagtccatatttctgaaactttatcctcaacctcccgagataaatttctagaaaactcatgtaatttggaatgcttgaacatctcatggattctcaaccatgaaatgctgccatgtcaacttatgatacgattttggatttgcaagtaatgtaagttgcgagagtgaaatttgattatactgcatgttattattcctgctattgccctcgatgaaagcataattagcagaatatggttggtgttctgtgttaagttaagcaaacattcattgagtaataggcagcctgtcgacagactcaccggtatttctgttatcctcttcttttattacacaaaaaaaaaaaaccttaggttcagcagtttctttcagtacgctgtttaatttatctttgattcaaaggtgatcttggtttatgtctcttcatttctcttcaatcatataatcatgagtttggctcacggaactcaatatttgtagatgcaggatatttcctttcagtaaactgtaggccaattctcttttcttaagcatattaaagccttatgctgtttacgttttccaatctttgaattactttctttcatgcatccctctttctcttccaataaattgtgttgagtaagtattgagaaagaaaagaaagataacatgcattctctgtgaggttctgtctgatctttctacattgcacttatggtcctcacaacactcaggaagtgggtcgcgaatttttgttgcga

SEQ ID NO: 94198 - DNA, 458 bp, Eucalyptus grandis
  Intron number 1 from transcript Egrandis_v1_0.017643m (loc us Egrandis_v1_0.017643m.g) derived from phytozome v7.0 (c hr-ID scaffold_1; pos 23589265 to 23589722 reverse strand)
tccagcgcaattaccaatcaaatttgcaatagttggtatgtgaaagcatataatcatcggcaaggattttcatctaggtggaaaatttgaatgtgtagtatacgagaagtcatgaagatgaatcagagtctaaagttctattgggacaatttttgccaatttttggtttgttttagtgtttgatctggtcccttcacattgcttttggagtgttgtctagtaggaaacattttaatgctgcaactctgttcatatcacgagcagaagcctattctttttccctcaatcggagaattggacagagcttgcatctgaaacatgttaagcttgcatctaaaacatgttaagtttcaaaaaatgcttcttcataaaggtgagtttgacatggcatgatgcaggtgaccttggacagacaggatggaccaattcgacccttcaacacatagtgcaatcgaact

SEQ ID NO: 94199 - DNA, 668 bp, Eucalyptus grandis
  Intron number 1 from transcript Egrandis_v1_0.035020m (loc us Egrandis_v1_0.035020m.g) derived from phytozome v7.0 (c hr-ID scaffold_1; pos 12120773 to 12121440 reverse strand)
tcactgcgagcaaaaattgtaacctatccccaccctgcccccgccccgccctactgaaaagaaaaaaaaattaataaaccaatccttccgatgaaaggaactaatgaagcttccgatgacagacaactggatgggcaggctccgatattaatcgcgtaatttttatacatgaccacctagtactcattctcacctctatgaagcatatacagcgacatgtgattcaatttaaatactcaaaccaccaggagcaaagacacccatccaacaagaatgccttgagtcattatccatcatgatcttcaaatatctagtatctgtaagtcgaacctgactgtgggggtgcaggcggtaatagattcggtgtacgccggccactggcatttgatgccgagctgacatcaccattttgagcagggtcactgttccgccgactgtggttcgtcccaaaccgagatgaatcagtgtgtccattggaggccgcatggaatgcgctcctccagtcatcaccagatgagggtccattacttcttgggctttctgcgcaatatagatatgaataacatgagcagctgaggtagatttttcttccttcttttttcaattaccaggaaataagtgcaatataggaagcactgcagtcaagtctctgatagtaaatcgagaat

SEQ ID NO: 94200 - DNA, 614 bp, Eucalyptus grandis
  Intron number 3 from transcript Egrandis_v1_0.021304m (loc us Egrandis_v1_0.020621m.g) derived from phytozome v7.0 (c hr-ID scaffold_8; pos 49951355 to 49951968 reverse strand)
cggttagtcccaggttggtggttgagttggtgttttcaccgttggtcggtttgttgcattctggttgttgctgtgatgtcgccgactggttcgattaaaggcgagcatttgcgtgtttgcgaaattcaggttaggctttttagccattgtagagaaggactgtatctcatagggtgtaaattggtgcggagtcgggacatattagcctagtccttctcctcctgcatagatgaaccgatcgagatgtgtcgggaggagtctttctgctgaattatggatagagcaatctgttttttgtcaaatgttgatgtagctgcctgtttatatgccgcaagtgtctaaacttggaaatgcatacagatgaatttgttcttctttgatatgtcgacagcaatcgtaggtatgagtgctgttctggtgtaggatatgcttttgcagggttggcaattggctagtcattctgttccttgaggtgatatctcattgtctcatggagtgtataaaaaggaatttaccttacacgctgggagcatggattgagacatagctccaagctcgagagtaaggttcagtttgagtttttaacaggcaatgcttgacgacattttgcagaa

SEQ ID NO: 94201 - DNA, 944 bp, Eucalyptus grandis
  Intron number 1 from transcript Egrandis_v1_0.018501m (loc us Egrandis_v1_0.018491m.g) derived from phytozome v7.0 (c hr-ID scaffold_10; pos 7720379 to 7721322)
ggcacctgcaacccgccgactctaagcttctcgaggtaacgtcagcttcgtcttcttcgtccggcgtcgcgcacctgtcgcgaagcaaccggtagaactttcctttttgaggaaactaggccggctctcgctatctccagcttcaaaatttgtccttttccaccgcacgcacagtcactccttctcgctctgcggtaccagttatcgccctctaattcatagcggatggagagaattgcgtttgcctttactagttgacgatattgaagagctttcgaagctgcttgaagaaagtttgaccctttgacactcttcgaactcgggttcttttcttttcttttcttttcttatatttttccgtgatcattgctcgagaggtcccgaactgaagcagctgatctcacccgaatggaagaagaagattgacgattttttctactgatcgcaatccgtttatctcttggtgaggttaaggcattttgagggtggtcggaggaattcgagttcctagtgatcagaacttcccaaaacttgtttttgggtcttctttgccttcatttcggacaagtagtcacttgtagtttgaaatcccagatggagcggctttctgacgagaaaaagagattaggatccaggaatgctgcagaaatagcagcgaatttgagttccgatcgtgaagatgtcgaatgtggagcaaacttcactaggaaaatagctgattgattttatattaggttgtctcatgcgtgtaattagtcacctagatgtgtgcattgcgtttgtaaccaccaattagagccccatttgtggccaaactttcatctattttgttttgttttttactttggagagttggaggattatgattgtgctctaagttattgcaaagcggatcgagtgcgaaaaggttgtgcttatttctcgcgtttctctctcgtagagtg

SEQ ID NO: 94202 - DNA, 935 bp, Eucalyptus grandis
  Intron number 1 from transcript Egrandis_v1_0.014390m (loc us Egrandis_v1_0.014391m.g) derived from phytozome v7.0 (c hr-ID scaffold_8; pos 15908233 to 15909167 reverse strand)
gctccgtttgaccactagtccttggccacctccaggtagctcagctggttcgtacgatgtaactgtctcgtcccttttacccatttctaactttttctccagcgagtttcaagctttgagcttgggattggatcgggctggctttctttgtaacgcttttttggaaacgggtgtgggggcattttgctcttggatgcgggcttgtcattgggttttggtttcaatgcttagtcttgctgtgcttggtcaaaagttgtgtgctttcattctctggtatttttaagtttttttttttttttttgaagtattcttttcgtgggagcggctggcatccctcttctgggcatattgagcttcagaagaagcgtaaaagcattgggtttcattttgtttgctttagcgtttcgtgtcatttccgtggtgttggcgttctgatctgctgcagtagtctggagtacccatgacaggagccccctgatctcaataactcaaaaagttcacaaattggcgaatttgatggatgtttgctccccattaaataaaaacatgtaaagttgcttaaagggttgtcctttgcactttggagttatttttaatcattccatgttagatttagcttcctattagtaatattcttgtgttcgcgatagactcaagtcctgtttggttagaaagctgcggaaatgcacttgttttcagtagcgatcaattagggttgagttgcaaattccaagggtatggacactggaaatagtttctcattactcagctagaaaagtacgttgtcgtttagcagggatgaagagggttaagggatggtgcatgttcattgctttctttctctatgagttcctctataagactagatatctttgttgatcttgttgttccaattttagcaggtcaatgaacaaagctgctttgtacaggtagaa

SEQ ID NO: 94203 - DNA, 911 bp, Eucalyptus grandis
  Intron number 1 from transcript Egrandis_v1_0.013729m (loc us Egrandis_v1_0.013729m.g) derived from phytozome v7.0 (c hr-ID scaffold_10; pos 8600882 to 8601792 reverse strand)
ggaggctggtccgcgaggggatcgaccgggataaggtgaggttcgtctgcgattttcttctctctttgtcctgcttttatctgatcgagaaatggtcgtaatgatacaatgtgtaatcacatttgtagtctctgatgctaatttcgattgctttcgatggataacactaactctcttgttaaatgcacttcatttctatttgtttgcaaaatggattctttgctgtgcgatgctaattttgcatctgaagttgctcctatcatttgcttcttgctccttcacacttaccctgtttacaatagatgtgttcttgcgtttcttgcgtcctagttctgttagttgtgtttccggtccagttggttcctgtagaggttgttttttcaaaagtttcgttgttgtaacttgatttgattataagtataatctcttacttactgcccttctctaaataaaagcgttatttttacatggatttttattaggcccacggtcggtgtacgtatgatttacgcatcccccattcgatagctgacgtgaggattttattctgttctggctattgtgagttatatgtgttttgatggaacaagaaaatatctggaaagaatgtcctgaagatgtggctggttccttttgttttgtcaaaggttaatttgttaagttgaagattgtatgatgaaatgttgccttgcctgtcaacatctatatgcatatattcagtagaagtaagtagaaagaatgcctgctcacttctcatctctttttccgaaaggattttctcatcgcatctaacaaagttggcaatctttgtggtggcactagtaggccagaacctgaagctcttctgactgttatcttctccctttgaacttgtaggtgctccggatattacctaaaaaatcattgtccat

SEQ ID NO: 94204 - DNA, 658 bp, Eucalyptus grandis; identical to SEQ ID NO: 93613
  Intron number 1 from transcript Egrandis_v1_0.016470m (loc us Egrandis_v1_0.016314m.g) derived from phytozome v7.0 (c hr-ID scaffold_8; pos 49014206 to 49014863 reverse strand)

SEQ ID NO: 94205 - DNA, 897 bp, Eucalyptus grandis
  Intron number 2 from transcript Egrandis_v1_0.004977m (loc us Egrandis_v1_0.004977m.g) derived from phytozome v7.0 (c hr-ID scaffold_8; pos 58377892 to 58378788)
acatttcacatctgattaattggatttgttgccaggtttgttattattattattatattcttatcaaacagggtattttacatctgataaactggatcttccatcaggtttgttgttattattattttcttatattacagggtatcggaatcattacgattgattaattcccgcatatatccgtaaattaccttgtttacatatatcaagtagggctccatccatttaatgcttagggtgaccctaaagtcactatgggtggcgatgctttgaattgaaaattttcaaaaacttttagtgttcttctaaatagggcaattgtgagctcgtgttcggcttgtcctttcaccgaaataagaaataccaacaactaaagtaatgtgaaaattgaagatgatagtccatgatcaactttataagagaacgatcgattttgagagatcaaagttatgtagtcgaatttcattgtgttggcgatattggacaatcttacttaaggggtgtttcgccgaaattggatcatcggtgatatatctttcactaaaggttaggtctttaggcctttttaatgaattgggttctgtggcaattttgacaggaaacaatttgtgtgacaatgatgattaatattaactaaagataaatctaaagaattgagaacaagaacgataaaccaatacttgagaaattgaataagtgtttttgatagccgatcttttacaactgtttcgctttggccttatatagactagtacaaaaaataaccatcgacttaagaaatatttatgctgaataattaatatgcttttatatatttaagatgtttttgattgatttctgaagtaaaggaaacaaaaatgtcctcctcctcctcctcctcctcctcttcttcttcag

SEQ ID NO: 94206 - DNA, 785 bp, Eucalyptus grandis
  Intron number 1 from transcript Egrandis_v1_0.016198m (loc us Egrandis_v1_0.011509m.g) derived from phytozome v7.0 (c hr-ID scaffold_8; pos 31162732 to 31163516 reverse strand)
tacgactatcgcaagctgagcatcaactttggcaagtaagttgcagcctctcttctctgcaaagcttgctcttttcggcgtgtcgaagcaatgtgagcgggatattattgcaaagtatttctcaattggcaagcgacttttctcccctcgtagagaagtgtgctgtgtctatcggtgttggcatgctgtctcggttttttcagtagtaattcacacaagcggacacttttacgggaccgtatattggtaaacgcgaaattcatacgaaagcagaggaatttaacataaatcatgattttggcacacgtactctatacaaagaatgatgctttgcgataaacaagatttcatggactcaaattcgactagtgaacacaaatcgacaggccttaatatgctaacatggtttagactcgtgactcacttcagtgtttatggtctaatggggggacttgatgcatcgctgcggtttgtctttgtaggcggtacgggtatggttgccgtgtttacatgtggagatgattgtttatggatgtgatgctgattatgaataaacaagtacacttgttccttcggctaaaaatctttcacatttgtttgttcggagtccatgtagcataagtctatagttgtgttcaccttcaagtttctttgtctgataactttagggttaaatagcttgacgtgcttgttttactttgattttccttttccatcttgctatttgtatctcttaatagaattggctctaatctaactttttttttaccaaacctgcagagaag

SEQ ID NO: 94207 - DNA, 816 bp, Eucalyptus grandis
  Intron number 2 from transcript Egrandis_v1_0.023404m (loc us Egrandis_v1_0.023404m.g) derived from phytozome v7.0 (c hr-ID scaffold_1; pos 11460187 to 11461002)
agcggaacagcttacttgcttcccttcctgaggtttgtttctttgttacttgcattgtttattcttttctttctttagttgccttgtcctaggaggctgattgtaatgagtgatgacgacagtcgagattggcactgcactgatgccatacaacttgaaatccctcttggcttcaactggtttttctgggaacttcacagcttttgctaacattatcatgctacatctattcctaacaatggtggcatagatcagataccttaaccacttcagacagctcaagactttccagcttatgacaaaaaaaatcaatttctagtcgttaatgcttatcaaagatcatcaagagttcctctaccaagagcatattttcgagattcggtcgtaaatgtgagtgccatttgtccttaggtggcatagagcacctgatgccccaaacttatcttctctcccttttgagatccattcatccgtacaaacttgttgaaccatcaaaactgaggcatataattgactgaaagcatgttaacttttacattgagattgtggctccggattatcttcctactatttggataatgatttctctcatgcttttatgttaaaacaacaatttctcttgtgatgctttttaaattataaactaaaataggtatgtccaatatgttgcacttttcttgaagaattgttgctggctttgtgcttctatgtatcaatatgcatgtggtaaatttttttgtaattttgcgtcaagtaccattatatgcccttaatctgaattgatgttggcatttgtcatctaacagaatcatcagg

SEQ ID NO: 94208 - DNA, 921 bp, Eucalyptus grandis
  Intron number 2 from transcript Egrandis_v1_0.019717m (loc us Egrandis_v1_0.019717m.g) derived from phytozome v7.0 (c hr-ID scaffold_10; pos 31787622 to 31788542)
gcgccggtgctctggcggagacgttcaaagggtcggtacgtaaaacgggtcgagctcttgattattcccgcactggggttttcggtcagatcaagattattgctgcgggattctttacctcgtcctcgggcggcttttttcacctccacccggaaccgatgggggaggcgtcttgtcgggacgcgtttctctacggaaattcgtcagacaacatgtcgtcgattggttttcttgctttctttgcggccgctgttttttgcttcgaaagtttcggctttcatggctgctgcaagggtttttttcccccttggtcttgaatgtgaaccccccctgtcacgataaaacaaaagggcgaattctggcgccatttgcgatttctggaatctcttgttttgactttagcctgcccttttttttttttggggtctctgtgtttcttcttcttctttttcactttttggtacaacgaagggtgggtccacacgtttggagttctgattgctatgttttgcacgttcaggaaataataagtgtttggcaaagtaagtttttggaggaaaattaaatgaaaaagtttaagattttcacgtgacaaccttgtgatgtatgcaatgcataacctggtactctaaaaatcgaatttttggtttgttaggtatgcggagcacgtcttaacacagcccttgatattaacaaagccacaccatttttcgcaccttttgattaagactgactttggtaatggctctttgataagtaactagcatgtgggtccatggaaaaaccgtgcagccacttccttcaaggaaaagatctacaagcactcacattctcaaatgcctaaaatttacgcgtgtccttattcaatttctctcccttctttcaggtgattgatctcaaaacgcaactgggttatttcaa

SEQ ID NO: 94209 - DNA, 601 bp, Eucalyptus grandis
  Intron number 1 from transcript Egrandis_v1_0.000389m (loc us Egrandis_v1_0.000389m.g) derived from phytozome v7.0 (c hr-ID scaffold_10; pos 4861150 to 4861750 reverse strand)
ctattgaggttggttttcatgagaatttttttactttctctaatgtttctttttcacgttcaattaatcttgagtgttgttcaatgaagtatcagtggcaaactcaacagggttgtagttaggcagccaagattgggtaggtgactagatcaggaagaggtatttggtcacgtctgggttttaattgttttgcagactttaggagaaagaattttttgccagtttcttatatgtggctgcgatgctgcctttgacaatattgagtaggcgggttcagcgggcatgagatggcggaagatataacatttgattgcaaatatgcaggcaaaaagtggaccttatagtgaaatggtgcgtctttgttgcttaggtaattagaacaaaggaaagctgatgttatgggaaactgaaagaggtagagaagagctaacccaacctaagagcggttcaaatgttgaaacacagagattgataaatcaatcagtttgtttcttttcatgtcttcagagaaacggcagtgtctgattcattcgacgaggtgaatttaacattttctatgcatcctcaataacattatttatgacaacagggagctattggc

SEQ ID NO: 94210 - DNA, 408 bp, Eucalyptus grandis
  Intron number 1 from transcript Egrandis_v1_0.025167m (loc us Egrandis_v1_0.025167m.g) derived from phytozome v7.0 (c hr-ID scaffold_1; pos 28104792 to 28105199 reverse strand)
ttcgaggacgagtacgtattccgcctcccgcttttccctccgtttcgtgcatcgtcgtcgtcttcttcttctctgggttttttcgtgttgcggttgttaatggtcggaggattttttttatggtttgatttcgattcggttctacgtttaatgggtccgcggccgaatcgaaggggggattccctggtcgtttcgtcgtcggaacgtcgcgacacttctgttagctgagcgtcgccttcgtatggattgcctgacgtttatgaattcgattagcaaattggttgttatatttcatttctattcggtcgtttcatttcttcagatctgctgcttcttttccttattattatttttatttttgtgtttgttggtttgctcacctttcgtcccgttgtgtttgtgatgcag

SEQ ID NO: 94211 - DNA, 760 bp, Eucalyptus grandis
  Intron number 2 from transcript Egrandis_v1_0.021873m (loc us Egrandis_v1_0.021873m.g) derived from phytozome v7.0 (c hr-ID scaffold_1; pos 29585933 to 29586692 reverse strand)
cagataccgccaaggaaaagtgcagcttcttacaggtgcttaaacttgaccgattgaggaaaaaatactgctgcagtttttattttgcagcacagggaaaagttgatagtaagcctgcagttgcgaccagaatattatgtgatctgaactgacaaaagggttaattgttggaatcataatcaggactactctagtcaacttgtcagttgcaccggtgaagcaatgaaaaatctatcaaaacctatctctgcaagttgcagctatctcgaagatggcagatgcagaatccctaccaacttagtgttaaagtttacggcagccatcaaaatttgtattagatatgaatcatggaaggataggagcgaatgctttgtggacttctaattgataacatcatgagtttttttaactatggtaaactgaccatatttggttgcaaaagcacaatggttgctgcaacgtgtcttaggcagaaaagtgaaatcaggacttgttcaatgcagaaacaatatggtgtgatttttcagatatttccagaaacaagaacatgttgctgccactcatctcatatgcatgaatggatgacaactattgatagttcatgacattaggttttgagttgttttttgcaatataagtttgataactattcctgtagaagatggttggtgttgttagacttgttggcattgtcgtttgctttatgtcttccaacacatccaaaatgattaagcatgctgctgaaattcatctagggctg

SEQ ID NO: 94212 - DNA, 821 bp, Eucalyptus grandis
  Intron number 1 from transcript Egrandis_v1_0.021873m (loc us Egrandis_v1_0.021873m.g) derived from phytozome v7.0 (c hr-ID scaffold_1; pos 29586655 to 29587475 reverse strand)
tcctgttccaagtctccgagtgttacgtctatctggtacgcgctgatcatcggaagaaagggcattcctttccccgtttaatctatcaaattgtgtaaattggttgctgggttgcgcgccgattttcgaactctcgtgtttttttgctctgactttgtgaattctcgcccgtgcttgagttgatcccggtgtgaattggagtaatatgcgcttagaacttagaagatcagtatggagatgttatcgatgatttcgccattcgcgatatgtattattgttttgttcatgattgaatcagtgttgcgaacatttgaattagcagataaccgcggcgatgttgtatgagaaccgcacttcgaaaattgtaataattgcaaatttccctttacaggcaaaggttaattccatgtcaatcaacctcagatcaacttaaaacacgagaagggggcctttttttttttttttttttctttaactgtgactttatttttttgcgcaatcttgtgtatggaagatttcactggatgttgggcagaattatggggctttattgaatggagaattgattttattggggaagacagaaactgtggttaacacaatggccaaatacaggaacactttctaaagaatgaaattcactgggattgtagtttcagatgatagcagagcatttttattttttttttaatgatttttgtgcttgtaattattttggagttgttgattctgtaaaggggctattcttcatgtatgcagtgctaaatttgtgtgcaatttttgcagataccgccaaggaaaagtgcagcttcttacaggtg

SEQ ID NO: 94213 - DNA, 899 bp, Eucalyptus grandis
  Intron number 1 from transcript Egrandis_v1_0.022771m (loc us Egrandis_v1_0.022771m.g) derived from phytozome v7.0 (c hr-ID scaffold_8; pos 41698264 to 41699162 reverse strand)
cctccgtcggattcaccaaggtgatttgatcaaatccgtaactttatacgtgtttcttatatatatatatagagagagagagagagagttctcgttattggatatttggcaatgataaaggccttttcgctagtgagtgcaattgggtttttcgatttgacgttgaacttgattcccggtgttcttatttcaacctctggtcaaatttcagtagtgatggggtttgtaaacttgtgcagactgatataaagtcatgcgagttaagagatttaagtttgagccgtacggctacaatttgcgcaaagttaaacaggattggtctgctataaaccattgattaatttgcctctggatgttttttctctctgttcaaacagattgattgcaattttccgtacaccgaatgattcctttcgtcagtaatatcacagtgaacaggacttaaatctgcacgtcgtgatcttttttaatctgtaatctaagggacagacattgtccttgctgcaacagttgaaactttgtcagatgtgcttgcggttttttgctttgttttagatgcgttaagcatgaagtctttgacgtgtagtcctgcagacttttatcccacgtcactcccttgatgatgtctcgcaaaaactcagttagtcgatacctctttgaatctcagaagttattaagatgtgagacatagtcggaaaagaaaatgattggaggaactcgcatacttgaattgaaaatagaacttggtttctcttatcttatatgttttgttttttgaaataattctatttcttttaagtgcatcatctgcacaatatcaatctcaaatctttgtttggtaatgtttgtgactagtccttcaccatataccttcctctaacagggtgtcgacagctccc

SEQ ID NO: 94214 - DNA, 635 bp, Eucalyptus grandis
  Intron number 1 from transcript Egrandis_v1_0.010796m (loc us Egrandis_v1_0.010796m.g) derived from phytozome v7.0 (c hr-ID scaffold_10; pos 12589553 to 12590187 reverse strand )
ccgttcctctcggtcgggaaatccgcctacggaaggttcgtttccgcgtgccgcgtttcgttttccgccttttaacgttttgaactttccggtcgggagttgattcaggaggcgattccggttgcttgtttgccgtggttctgttgtctgaagtgtgcgtggagttgtttgagctcgagctggcggctgcagagctttatggaactttgcttaggattgaatgtcacgtcgaatttgaaatctgctacgtatagaatttcacgttatgggacaattcgagttttttgatgatgcgctttgagtttgtcttaagtttcgagttggcgttatgcgggttatcgtcctagtcctagtcctaaatctgcaatcatgtcagccttctcttatatctgctctgctcaacacaagcgtgaaaagaattaacaacatgtcagtttctctagcattgtgcttgtttaggaaaatttttttttgaagaagaatacaagctctcttgagtgtctgtgtgtgtgtgtgtgaaagagaaattatcctactatgctccattcttttactctaaattgtgctcgacttttatctgtgcatgatttgttgatgcaggtccctgtttgcttcaaagtcgataagagcagggg

SEQ ID NO: 94215 - DNA, 1010 bp, Eucalyptus grandis
  Intron number 2 from transcript Egrandis_v1_0.039581m (loc us Egrandis_v1_0.039581m.g) derived from phytozome v7.0 (c hr-ID scaffold_1; pos 5145335 to 5146344)
acttgttcttgataaataaccaactgcagttactggtgattatcgagtgaaacctacttgaaatgagtgcaattcgtcaacctaggatttatggagtccgagcatgctgattctgaaactgtcacacctagaaccatcatgaacaagaatttagatgacttcattcaccttgtttgggagattcatattcttaaggatcaccatgtggattgccggatgatttggtatgtaagagggcatgttcatgtgctttcaaagtagtttcaccaaagcaaaatgttcaccttttctttttaatagctcaatgagattatgatgatttctgtagtcatattctgaaattgctgatggcttggcctcctccttgtagatgattttaagcaaaggagaaaagagaagcagcaggaatccgatgacgaggaggaggagtgcctcaacaattacgaggatctaagaaagtaagcaacgtgaatcttaatgtgttacatgtgaacagaatccctgcacacgaaggtctcctaatctctttcacccccacatcttcgcacgtttctgtccttgcaaacataaacagcaacttcaatagattagttcaattcagccttcacctgatttacatacactctcttgaaaaatgatctgtagtgcctttgtcgcactgattcatatgtcttgacaatttgcacatgtgtgaaccgggtcggattgagatttcaagcgattttattcatttagtgttttcaatgggtagttcagtcaattgagcaagactgttcattgttttaaggaagaacattttcatttgaaatgtgaatgcgcatgagatggaacttatacatgcgagatcgatgttatgtatatttgagcttgaattgagatgatggaactattcattccggtagaccgcaattcctaaccgcttctaatttcatggacacaatttgcagcctcttggaggagttcttttgggaacagttcgaggaatacggtcaattggaagcataccgctt

SEQ ID NO: 94216 - DNA, 163 bp, Eucalyptus grandis
  Intron number 1 from transcript Egrandis_v1_0.012700m (loc us Egrandis_v1_0.012700m.g) derived from phytozome v7.0 (c hr-ID scaffold_1; pos 31695575 to 31695737 reverse strand)
gcatattgttcttcaagcacatcgcactcatattagtaagagatttgacttttgttattcacctcttttccagctaagcttattggattaattcccaattttcctccataaacagcatttacattctcactgcatcttctctatcgtgctttgagcagaaaac

SEQ ID NO: 94217 - DNA, 1010 bp, Eucalyptus grandis
  Intron number 2 from transcript Egrandis_v1_0.009939m (loc us Egrandis_v1_0.009013m.g) derived from phytozome v7.0 (c hr-ID scaffold_10; pos 7493267 to 7494276)
gaaggtattgtctccgtctcagatccaattcatgcttcgatttctccggtccgatttctttttattttttatttttatatttttttaaaagatgttcatgagttaggatgaggcgattgatcagcctgccattcttttttttcttttcatttttcatttttaatctgggtggctggttgtcggcattcttgtcgctgtttaatggatgtcttcagcgtttaagtgggtctagaaattggagagagcgagggagaggagggaatgcattccctttttccttttggggattccttttgggggtttccggctgaatcgtcttttgcctgctcttccgttgattcggctcgaatcgctgggaaatcaggacgtctggcatttccctttgttgcattcgtccccacaatgcttgcttttcgggcattttttaagattatattgctcttttttttttccttggggtagggaaattctcgattagtcaatggagctcgtgcatcgttcggttgctcgattgcatgtgaggagagggtttcgggaggagagactttcgttctgtatgggtagaagatttggggtctaggtttgaatcgttatccttctcaccctgatctttctgtgcgattttattagataggaatgaacttttttttacattgtttttatcaaaacaaagaacactgtatctctgaagtgtatagactattcattttaacaagtggaaggatagacaaatatagcttgtaggttaaagagatgagaagctattctggattgtagttcgaagaggtgttatgatctcttgtgatctttgtttttatgatgaaagtagcattcaacttatttgtcgttgtagagattggttgttatcgagctttttacaggttggacatttctttgaagatatcggattggtttgttgtgagaatttcaatcttccaatagttgttttgctcatctccgtctcttgttttacagagtcaagcgaagcacattctgctgaggagaaggcg

SEQ ID NO: 94218 - DNA, 678 bp, Eucalyptus grandis
  Intron number 5 from transcript Egrandis_v1_0.001507m (loc us Egrandis_v1_0.001507m.g) derived from phytozome v7.0 (c hr-ID scaffold_8; pos 48374511 to 48375188 reverse strand)
gttgccaaaccttgacaaaattcatctacagccaggtaaactatggtctagtcctgatcctttagtaaccaaagttcttcccatcttgcttgatgaaagggataatattaagtatgaggtgtttaatttgttgggcgcttttaaagtatgacagtagggaaggcatttacacgtttgtgttcagcaagattctctttttgtggtttctatgctaaaataatttgctaattttacacattgaatttggagctcattctatcttctattgtaagcattctaagcttgcgtacttgttgacccacgcttctcttgactaggaagaaccaaagtcctgagggtattgtgtcactagagtttttagatttgtttctaatatattaacttcaattagatgctgtgaaaagatagaatgatatattgtcgatgatgcttgctagtattgtggtagctgattgctttctgacattttgtgggatggttggtggatgataatgatgcttgtttttctcgtacaaactcctcataagatgtgaagtatgctatttccttcttgttttcttattttgatttaccactttgttcgatggaaattatcctggctgtaagggagaattttattcttttcttattgtctcgtttcctccatgttgtgttcttcaatgcagtcggattcaactt

SEQ ID NO: 94219 - DNA, 437 bp, Eucalyptus grandis
  Intron number 6 from transcript Egrandis_v1_0.024444m (loc us Egrandis_v1_0.024444m.g) derived from phytozome v7.0 (c hr-ID scaffold_10; pos 13736582 to 13737018 reverse strand )
atagtctcactttactggtcatttttcattttcaggtaagctttgtaataaaataacttatttaatggattacttgttaattcctaatagctcttgtgagtgcactatataaagcatggacatcgttgtccccgagtctgtcgcaccatctcaagtctttgctcttatttagaaacttcttactgaaaaggagatagattagaggattgtactatattttttttgttgttgattaatgtaaataattcgtttacattcttttcccagagaagtggaaccaatatctttagttcagttacttttgatttatcaggatactctgttcttttggattcatgaactatttttaccactggttcgttcgaatttgttttgataacctgaatcaatggtttcttgcagacttgtgtgcctgcaattttacctcctctaaagga

SEQ ID NO: 94220 - DNA, 1022 bp, Eucalyptus grandis
  Intron number 4 from transcript Egrandis_v1_0.024444m (loc us Egrandis_v1_0.024444m.g) derived from phytozome v7.0 (c hr-ID scaffold_10; pos 13737300 to 13738321 reverse strand )
tgtcattctgcagttgaaactataggtaatatatgcacatatatactttcagaaagttgtcgttgtcttattcttgagcttgtgcttttaagttttcccatttgtcaattacttgcaaaggtgactgcaaggacttcaattttacaagaaaatatttaccagcaaaatcagacttattagttcaaatggtgaacactgatgtgtaatatatgagaaactcgaatctaagaatttgcgattggcctttgtatttagagagtcaaagttctgggaattaataatgacacttgatatctcattgatttcttctccgttctatatggtgaaatgtgaaagttgcctttgtatttagagtgtctgtggtgaacgagatgttccaatgcaccaacatcaacagtttttgcactttaaataataacttttaggggcatattgctaatatgcaccttctgtaaattggcttttgcagcttttccagtcttacaccaagttttctggctttgtactagtttctctgtgtcacttctgtgcattgctgtatgctcactcttgtgcttcttgtgcttcttgtccttctctctaatgcatcttacacgttgaaaccttgcctggccattcatgtaaacatgacgtgtgattcatttaccacctatttgtattagcttcatacaagaatccagcagcttcatatgctaggtgacatttcaacaagataaaacatctccgacggccaaatatctagtaatccagtttatacttcatcccgatggctagtatgcttattgacttcaactttcaagtcactcttcttctgactgtaagggagatgtaggatttacattagcaatttttagatgatgtcttgtgatgcaatttgtttccagaaacaaaaggcatagtgagtttctgcttcttgaatcggtttgagatgttgtaactaggagagattttgatactcattagacatcataaaacaatgtttggcaggtcgatatcaaaggctccaattcatctccactgct

SEQ ID NO: 94221 - DNA, 940 bp, Eucalyptus grandis
  Intron number 1 from transcript Egrandis_v1_0.024444m (loc us Egrandis_v1_0.024444m.g) derived from phytozome v7.0 (c hr-ID scaffold_10; pos 13739184 to 13740123 reverse strand )
tgacgtgaagagaaacactctcctgcttctctcaggtactgctgcgaccgacgtcgttctctttccttcgtctatcttttgtcctctggccagtactttggccaatgctacgtcccgatattgtgcagatgatcgtatttgtaagcgcttaagctgtttttggcggatcactcgtttattctcagtgcgctttgattctacgcagcaaaaaaagaatgtgggtctgacgtcaatttgattatcgagctttttttgaggatttcacgagtaattcttcgatcattgttagtaatgattgtttccattgaagaacatgattggggtgtcccctttttttatggtactgattatctttcgcatttgatttattttgatgtcatgaacatgacaaatgcaaactgctggttccttttgtcttgggttctatgatgagttgattcgtaattctcttatctgttcatgtataaccaaagaactacttatagttaaaaagaaagccggttagttttgataactcttttcttgatgctgttttagtgctcagatggatagattacctttatcacctcatcatctccatcatacccactttctagaacatcctctctttcaagaaccactctcccaccctcacatttattatgcacccaagggatttgtgctcatcatgctagaagttacagttataaaagcgctgcagttgaaggatttcgtacattaatattggacagtaattaatttcgaggaaactttccttttcatgtagtcaatggctcctttggagttttccacgaaacacttttgcattaaaaaatttccttggaaagaatggattcactatactgctaggatgagtgcctattgatattattgatttgccgctctctgttatggactaattgcgatagccatcaatccagcagctttgagctctgtttag

SEQ ID NO: 94222 - DNA, 728 bp, Eucalyptus grandis
  Intron number 1 from transcript Egrandis_v1_0.031470m (loc us Egrandis_v1_0.031470m.g) derived from phytozome v7.0 (c hr-ID scaffold_10; pos 36579354 to 36580081)
ggagcgtgtgggcgcagagctccgcattccctcaggtcgttctccgatctagctaagctatgcgcgtgcgtgttcgcgatctccggtttgatttgatctgcgtttgatcccgtcttgtcggttatggatgcgcgagcaatgatgagatctagagctgcgttcgtcgtccgatctcctggatgatgatgatgatgatgatgatgatgatgatgcggtcggattggattgatctcttggtcgcttgatatttgatcatcgtacgcttgcgtgatcggaaacggagatgtttctctaggaatcgatgtctgttgtgggaacagcatgttgtcctcatctgagattgatctcgatggtttcaacattctgcattgcgcaattattggataatccgatgcttgttaccctccctttttagctaaccgtatgatcatttcgcttcgttgtggtatcggttcgatggacagaaagatgtttagcgggttagcgggagctaagtttctcgtcgatgtgcgagcattacgttagtaatgcagctcatgacgagtgcatagatgatctttcgggggggccggcggggaatcggttttttggggttggtattttgtatgtcgccttgataatgcaactgaattgagcgcctttctctgtattgagatgagatgataatgtcgcgtcatcccttttctttttcttttctctagtttaagccacaggagattgctgccatc

SEQ ID NO: 94223 - DNA, 428 bp, Eucalyptus grandis
  Intron number 1 from transcript Egrandis_v1_0.014863m (loc us Egrandis_v1_0.014863m.g) derived from phytozome v7.0 (c hr-ID scaffold_10; pos 35248581 to 35249008)
gctcggacgcagaagaacaaggccacaggttcgtgctttgtattttctgctctattgcgtatgtgctgaaccttgtggatacgcatgaatttcggatcatgtagaatttaaaacttaagaattccaacttaagaagaaaggaattctgtccatgctctgtctaatcaaacttgatgcatcttgttttcttttctgtcaactttgttcgaaaaatccgtgttatcggtttgcatcggtttgcattattgtccgcatgcacaccgacatctgcgggttattgcattgttagtcctatttattgtttgttgtccttttcattttattttttttgggtccttttttgtggaatacattatggaatttatgatttaattttgcgattttaatgtgtagagtatcatcttggtcagctcaaggcaaagatagca

SEQ ID NO: 94224 - DNA, 938 bp, Eucalyptus grandis; identical to SEQ ID NO: 93610
  Intron number 2 from transcript Egrandis_v1_0.013465m (loc us Egrandis_v1_0.009532m.g) derived from phytozome v7.0 (c hr-ID scaffold_10; pos 7379404 to 7380341)

SEQ ID NO: 94225 - DNA, 837 bp, Eucalyptus grandis
  Intron number 1 from transcript Egrandis_v1_0.023785m (loc us Egrandis_v1_0.023785m.g) derived from phytozome v7.0 (c hr-ID scaffold_1; pos 24253792 to 24254628 reverse strand)
cttttttttccctctgcctctttttgcttttatattttgatgtatttctttttcattttttgctgcaccgctgtgccttttcctttgtttcctgcttgactttgttgtaaatcaggttcggcgcacgtttagttgtagttccactgcataatgggggcataatggaggcattcttgatgctgtaatctgtagcgagagcttgtaaatgactttgaaattaatgagtaatttgttcacatatgtttctaattctttaatcctctggatgtcagttcttttttacagattatttaacttatcccatgtcttttcgatgtttcgcaattcttgtccacgtgctgttttatttgatcgtatttcctttagacttccccccctcaggtttggtgctagttttaggtgcctctagacatgaaaaataagcttctttcttcactcatccttaagttcgaggctggttttctgtcttgctactcctgatgaaagaatgtctcccacgagtttcctccgccgctgggatttcattcgtctcctgcaggtagaaattctcaggttttggtatattgttggttcaatgtataggttcccatgatgggttatattttattccttatgcagattatgcagctaaaagattttctatgaaccgaagtgcagcttctcctgtttatgaagactgttcatttttggcttgtatgcatgaatgatacatgctaatctttcagactataatttctccttttggtcttttggtaatttttacaaaattccattccctattcattcttggactttcatataatgtgttcaggggttccgcaagattgacactgatag

SEQ ID NO: 94226 - DNA, 680 bp, Eucalyptus grandis
  Intron number 2 from transcript Egrandis_v1_0.052662m (loc us Egrandis_v1_0.052662m.g) derived from phytozome v7.0 (c hr-ID scaffold_1; pos 8153961 to 8154640)
gactcaccatctaccatatcaaaagccacttgcaggtccgccatcttgccctctctattcttatcgttttacattacatctcatcgatcatgtttcaagaaagtgtaatttgtatcaactcgttcgaaaactcatcctagttgtattttcctcacgtggttgtttttcctacgtccgacgcttcgtctatttcttgtcctttgatatttcacacttgtacgttttgcatagagcacatggacatgcgtttggctttctacacacgagggtacattgatgtatatgcaaagtatggagtgcaacttttcttttatatctatattaatggatgggagcaatgtaatttgtgtactgatgatatattttcaatttcagaagagcgataagactattcaaaataaaaaacaaacacttattcgttcaatcttgcaatgttattacagaatagagatccttcaaatttagtggtacatttatccggtgatccgattgatagattttgtagggtttcggtttctatttgaacttaaggagtgaaagaccaatactcattgttacaagggtggtgaaacataggtctcgtcccttttaattctgtatgtaatatcttaacttcctcgacattatcaccaatgatttttccttttttttttcttgctattatattgcagaagtacagg

SEQ ID NO: 94227 - DNA, 892 bp, Eucalyptus grandis
  Intron number 3 from transcript Egrandis_v1_0.028402m (loc us Egrandis_v1_0.025843m.g) derived from phytozome v7.0 (c hr-ID scaffold_10; pos 7002591 to 7003482)
tagaagaggagaacataaagctaaagaaagagaaggtaaatctggtcttaatgcttggtctgcgagggctagtacaatcgtgtagaaagaagttatgcactgtctgactacttgtttctgtaagacaaggtaagactaggttgggcatagactaaacagttattgtaggaacagttctttatgtagagtattcatctaatgagggtctcttaatcttttgctttccctgccagagagtttttaagggtcgatgtgtccaataactagtagaggtttgattgtaaactataaaaagctacagtaaaaagctagaagccacaacctacaatgacacccccttaagctataaatttcatgagatatttgaatgttgttcaatttgcattaaattccaagttctctttgctgattaatgtacttggtaagaataatgatggtaaatggaccctctgatatggctattttgttttccatgatttgtagatttcaccctcagtcaaatgcttctgcatgataagggccaaactatgtgaggcagagtttagttccatcttactaatcttcatgattcggtggtcctgttctgggaatcttatccacgtgtctgtgtacgagtgatgaatggactttaaaaaacttcaggcatgccacaatgattataatgtttttttttttggcaaaaaaaacaatgattataatgtttatcttggcaacaatgaattttttccatggatctaaggattcttcctttttgcagtcctaaggcctaatttgttatagtctttcctctatcagctgttgatttccatcttgcatatgacttagtggactggacgctaggtgttggtgctatgactactatttgactaatgactctttttcagggactaaa

SEQ ID NO: 94228 - DNA, 670 bp, Eucalyptus grandis
  Intron number 1 from transcript Egrandis_v1_0.020400m (loc us Egrandis_v1_0.020400m.g) derived from phytozome v7.0 (c hr-ID scaffold_10; pos 27705304 to 27705973 reverse strand )
aggcagtgggtgagtggcaacaagttactacagttgagccatagatttggagtttgtctgttttgttatctactttaatgtgttttgccttgcctaggacctctttgatagactgttattgttatggtgtttctctttttgattttagagtttgtgaatacaattattttaacataatcttttcttgggagatgaatgaaggggtattatcaaatttgttttttcttggtgaatgtttgactggtgggttggttcaaattgagtttaccattttctctgggatatggatatttatatctgtgcatgcatgtttatgcccatcattgtctaagaaggtcaaggaatttattggcataatcaaagactcaattacctgtgtgttgcttttgtgcatcaatatcggttactcgaacaacctgcagctaaattactcataagaagaccaagaaactgcatactttctggtttcacatgctttaacaatcagtctatgcctgattatcctgaaagctaggaagcatattattgtttatcaaaccattgacctctgctctcattctcaaatattttaatggaagtgcggcaattccacactagcgccttttgaatttatcttttatacatctttatattaggcttcaaattggattacataacctttactgtgcct

SEQ ID NO: 94229 - DNA, 773 bp, Eucalyptus grandis
  Intron number 1 from transcript Egrandis_v1_0.030866m (loc us Egrandis_v1_0.030866m.g) derived from phytozome v7.0 (c hr-ID scaffold_10; pos 17804330 to 17805102)
cgaggtgcgccggcgagcaatcctctctcctctgagtataattcccatctcttgcttcttgatttatttcttccctgaagttttctgggttctgtttttctttatccgattaacgaatgaaatcttccgccaagggatctttcctgctgtaacgctatccgctctttccgtacgtttgttttaggcattttcttgagatgggtgcttcgttctggttgatttggagggatgttgtgaggtcatctgtgggttattgggtggaacgaattctttggaatgatttttttttttttttgaatggagttgtgcggaccacttgacggttatttatgggtaacgtttctactggatgaatgtaaatttatatatttgtatatttgatggaaatttctgggattctgctcgatccgctcatttggaagatgttcttattgcctctttgcttcttcttctgaagatggtttgtatggattgtatttcgtttttatggatatgttggatcgatggaggaacttttttattttttttgaaattggtgagtctttgttttttctctttgtagcttgatattccagatgcccttctgaatctttattttattttattttattttggatggtgccttttttttgttttgggcagagttttacaattcgtgcttgtgtcatttttctttttctctgcattgtgtttctcagcttgattgtcggcctttttgtccttcgatttggttttcaggtgttaggggcatctggaatattgagcttataaga

SEQ ID NO: 94230 - DNA, 745 bp, Eucalyptus grandis
  Intron number 3 from transcript Egrandis_v1_0.041439m (loc us Egrandis_v1_0.041439m.g) derived from phytozome v7.0 (c hr-ID scaffold_1; pos 35367297 to 35368041)
ctccagagtaagcttagtttgtacaaatgaccagcatgtctttgttttatcttttggatggagtcaagatggtcgcatgcttagaggaagtaggaaaatattagtaattttacgtgcatataaaaggtatcgaagaagtctatggctatcagagtcgtattgtaagatttagcaattacggcacaacattaaaacagcaaatgatctattagttgggatatccatgaatatcagaatcaaattgtaagatttagcaattacggcacaacattaaagcagcaaatgatcatatttctacccttgaatgcattccatagagtaagtgtttgtagaaatgcggccattaacagtatagtagggttaaaaaactccttaagttctgtaaatttaagaatagggctatcaaatggtcgactgcgaaataccatgaatggttaaggtcagtggtctctacttggagtagtcgctgggagaaagaaatagctatctttattgcatttgaaagtagcagttgtcctataattaggaattttgggggaagcgattgtctagtttttcatcaagacattatcaaatagcttcctgacgtagctcatctctctttgtgacaagaggtcagtcatttggtttggtgtctgtctactgtaaaatcttccctaagtagtgactacctactgcccagcctaagagtcagattgttattctcggttacagttgtaaggaactcttgctctcttttgcagat

SEQ ID NO: 94231 - DNA, 656 bp, Eucalyptus grandis
  Intron number 2 from transcript Egrandis_v1_0.040547m (loc us Egrandis_v1_0.040547m.g) derived from phytozome v7.0 (c hr-ID scaffold_1; pos 16422575 to 16423230)
ctgcagtttgagaagcctgacgcgaaggagattgggtaacagtcaacatacctgcaacatgtttcattaaaaacctcactgcttagtctttctcttttttaatgttaaccccattgtctgaattaactcatttgctcttgagtaatcatctgtacgtacattgcatctcaatttcctgttaaatgtcttatcttcgtaggatgagtaatgcttggtatggaaagtcttggcagaaactggtgcacatattctatgttcccacaatcaccaattatgcgacgctgtaaacacaaccaatgatagcaagatgctgcgaaatttcatatactgacttttgtactatgttcaaaagcaaaagaaagatcctcatgtgcatatctattgcctatgtttgctggtgttgtttttatcaaagccctaccatcgcgctttctttcttccactgtggagtcttcaaaaaaatataggtactcgaaaagtagacagttctcatcttcaaggcatatttaatccactcattttgatatttgcgtgaatcttggcgagtatggtgttatctgtttctaaaatcgatggatgccaatactcctagatacaaaacaatctacttgaggagttctaatatttgtctgggctcgattctttgacatcaggta

SEQ ID NO: 94232 - DNA, 948 bp, Eucalyptus grandis
  Intron number 1 from transcript Egrandis_v1_0.000573m (loc us Egrandis_v1_0.000574m.g) derived from phytozome v7.0 (c hr-ID scaffold_1; pos 16243578 to 16244525 reverse strand)
actccaaacaggtgatgttttgctctgtcctcttccttacgattttcagtaaccctgcttttcttcatctcagtatagtggccattgttgcaatcgttgttgaaatcgcttctcgtttatgtggaagaaaggttgaatattacgaaggacatagttattggactcccttctttgttgaaatgttcgttcatccagcacgtacgtttcaaacttaattgatgcggagacgatgtgaaattgtgaaagtagtaagatgaaaatctcgtctcttctccttcttttttgacagccttaataagaatatacaattattttgaactttgtaactttgttgagtcgaacctggtttgccccagctatcttctaataatctgcaccttgactcaactggaattttcatagaacatccttctttaattactttgttggaaggaagtttgtcggatgtttggaaagaattctgagcaagggcatgagaggaaccaaccgtttagcttaactgtggtgttcgcggtgccactggaaactctgctacctccaaaagcctgtatttttctggagattttgttttgaatgtgcatgttctttatgtagtgtatgagggatagaaagtcctgggatttggctgagaaatgctagctctctgttgtgccagcgtatttttgcctctgttcacctcctatgataatggactgtgttctggttgctgtgggccttttgcatcattttttttgcgttcgtcccatttcaccaagtgcatcatatctcttggcacactctcaatttgtttcttttaacattagtttgaagaactgtagggaacatgctcttggtttgtttaacacagaaattttaagagaaaacagtgaaaattggatttgtcatctttgggatggctttgactgaactactgtattcggttcatctatttcaggtagcatccatcca

SEQ ID NO: 94233 - DNA, 719 bp, Eucalyptus grandis
  Intron number 1 from transcript Egrandis_v1_0.024671m (loc us Egrandis_v1_0.024671m.g) derived from phytozome v7.0 (c hr-ID scaffold_8; pos 33860271 to 33860989 reverse strand)
ctgctcaaggagagatcggcggagcctgaccatcggttagttagcaatctctctctctctctctctctctgttcttccattcatttgtttatgtaccaggtagcatggcccttatgtttgggaagagaacatgtcttaaaatttttcttttttgggagattagaaaaataaatattttatgagagccggtgcattatttatatgtagtcaaaattatcgaatttttttagattaaaattgtcaaaataatgtacgccgtaatggtttcataaggcactgctttcataaagttatatcgaatctttaatccgaacttttctttggacaaattttctcttttccctattattgttgacataggattggataaccatccgtcgttggatgggattgttaaatgatcgatgtgtaggggattgtctatcggttctaatagtcgcacgtagcgcaatttgatgtcataaggggaattttttcgcgatgaaaagacattagtggggttggatagaactgtcgtgtagaaaattttgcataacccgttcacacatctcatgaggacttagttacgcctattctttctccatgagcagattgacatatcaggaacaatgacatgcgagcgacttgctttttgctactttgaactgatgaaaagaagcttcacaatccattcacgtcttcttcttttcatacttgtgttggcagttgtaatagtccct

SEQ ID NO: 94234 - DNA, 440 bp, Eucalyptus grandis
  Intron number 1 from transcript Egrandis_v1_0.015726m (loc us Egrandis_v1_0.015726m.g) derived from phytozome v7.0 (c hr-ID scaffold_8; pos 59143988 to 59144427)
cttggccagcaacgaaaggatcgattttgattgaggtaatgcgtctgttcgtgcatgtctgaacgtgggtcgatcttgtcctgctgggtttttggctgctctgctttgcagatctagttagtgttgtttatgtctctttcttgttaggtgggcgtggcttttctttgcctttgaggtttgattttatttagttaaaatgtggggttgtcggtgtcgttgtttgggtatggtgaatgattcccctctttctgctcctccttgttgtgtgctaacgttcaatggtgcttgtttcggatcggacttgtgggcgccccatttcgtggaagtggttttttttggtactttgttttaagttgaatgtcctgacaatacgacgttgaatttttcatgccatttctttggcagctcagagattttgggaacttcaagcatagctccat

SEQ ID NO: 94235 - DNA, 499 bp, Eucalyptus grandis
  Intron number 2 from transcript Egrandis_v1_0.046862m (loc us Egrandis_v1_0.046862m.g) derived from phytozome v7.0 (c hr-ID scaffold_10; pos 38788859 to 38789357 reverse strand )
aagggtttaacatctctggtcgaccatttgaagagggaggtttcaaggctgaaaattgaaagaaacttttatcgagcgttaattgtgttcttattctcttgtgtagtttattcaaatgtgaagttaagtaatgagaagaagttagtatgtctaccatagtcaaagtttgtatgtctaccatttttgtatgaagcagaaggttttgttgtaatccatggtagaaatgcaaggttggagttggaatgcattaattgtgagcacttcagaaatgcaatgtttgcttgctgcattttttatttgccctcctgatttgtgttaagagaactatacaaagtactagtgatgtcaagaacagagcaaggaaagaaaatgtcgagaacaggggaaggaaagaagctaacaaaaatgaagaaagcaacaatagagattatagcacgtgtagcatgtttacattgaggaatcagtattcagttttaagcgtgtaaagtcaaactttctg

SEQ ID NO: 94236 - DNA, 890 bp, Eucalyptus grandis
  Intron number 1 from transcript Egrandis_v1_0.028453m (loc us Egrandis_v1_0.028453m.g) derived from phytozome v7.0 (c hr-ID scaffold_8; pos 14331673 to 14332562 reverse strand)
ggctcaccggcgtgaaccctctcgcccaggaagtgcgtctcggtagcgacctagagttttagggttttcggagcatgcaagggggtgggtttcgtttgggggggtgattttcgggggaagggttggggatccctcgctaggacttgatttttgcccggaattggggtatgaggatttcgctgaggtctttggaagtgatgtttgactttgaggccgttcctcgatgaggctttctctgttcaatgtgcgcgaagatggttcacgagtcatgcgggaagctacctttttgcatgtgtagtttatcgttcgatgtcgaggcttccccttctgtattaagatgaataccagttttgagaagaactggtgggtttaacatctgatcattgctggctatgcctgcaaaaagtctgtgcttttgtttccattcgccagtaaggtcttggggttcaagttaactgcgatttcacgatgtgtttggaaagattattgaatggtgtggtttatggttttgaaagttcggttttttaagtgtttttctgtcagtcaatttttggaagttgcaaatgtattgattcttcatatttcacatagttggcaggtttgtgcatctccttgttatgctaagtttcgtccaattaatgcatctctcccaaaaacatataagatcagtgtcttcttcttatttattaaagaacaagaagaccgtattcttgtaattttggtttagttgagctgcacttcagaagattaaatctcttatattgtccatgctttagatggctctaagttgatttatggtggtttttcttccaaaaaattaaattctactaacagatttctatgtatgattttcaggcggctggagcattgtcaattaaaattggtaagtc

SEQ ID NO: 94237 - DNA, 917 bp, Eucalyptus grandis
  Intron number 1 from transcript Egrandis_v1_0.027057m (loc us Egrandis_v1_0.027057m.g) derived from phytozome v7.0 (c hr-ID scaffold_10; pos 22143830 to 22144746 reverse strand )
gacggcgtcgagttcgaggtcgataagattcccgggtaaatcatccgatcccgacgcttgttcgcgatcggaagcttttccgccgagaatttgctttcgttgttcgaaaccctttctgcccacgaggctgaaaggaatggtttttaatgggtttatgttcgtcttgcgaattgaagtttggtggatcgattgggcgtggatcggaaagcgtcttgcttgacgatgctatggccagaaaagggagaccttttgtttctgggtgtagagaaattcaccttgccggagggaattttgcgggttaggcgttggatggcgtggtgggattgggaggaggtggttatgataaatttgtctttaggtcttgtaaattgcgttggagattagggtttgagtcgagaatggttcctaatcttttgagaacagattggttaatctaagtaagaaacatttattatttggatgtggaagttcttaaaaatagaataggattgaggactgggacgcatttgaagaaggcatgaatcgatgacgaaggatgctcagtgcatctggaagttgcaaagattggcatgatctgtgtgtggtctcctgggtttattgtagactttagcatatatgaaggtttgcatgggaaatcaatggccagattgtatcaggggttgctttatattttttatgcaatctaagttgggttgatgatattgccagtgtgatttgtcatttgtcattaactgaaaactgctgtcatttgcacgtttaagatcgtgttattggaatgtacgtgttcaaaagaaacaaaaagtttgctcttagcaattgaaggttttttagacattgtgtcagacagattaatgactgttcttttggatccattgtcattagatcccaagggggtcgtgtgaaagcaagaggaacta

SEQ ID NO: 94238 - DNA, 805 bp, Eucalyptus grandis
  Intron number 4 from transcript Egrandis_v1_0.029845m (loc us Egrandis_v1_0.029859m.g) derived from phytozome v7.0 (c hr-ID scaffold_10; pos 12811137 to 12811941)
gccgcactgaaaaacgagcatttgctgcttttaaaatatccttcaatgtttgggttatcttttgtttttgggtgaaagtttgatgcatttatgttggagcattgagattggtgaggtcaataatgtgaagatgatgtttttttaaggttttcattgcatttgaaggagtgtacttcactgtcgattttggctaacaagattagtctaggttttatgcaagtacggtaatagtgcaatgaaaatttccatacttgtgctctttgggattggactttgtatgaggctttcatgggatattgtgcatgattcttcctaggtgttctggggtttctatgtttttgggtcttctttgctggccggtcattgtagtttaatatcaaggcaatgtagcggtgcgatctcagtttcttgttatagttacaaagatgtatctgctggaacaaagtatacatattgggttaattgtttcttctggcatgcgcattgaaaattttgtttaggatctctttattgtattattatgattaagttgccacctaagtgatcttgattgggagaacagagaactgatggtcaactctgttgatgtttgaagccttgattgggatagtttttttgacattgatgcatgaattcttggctttaaaatgtgtcaaaatgtttctctgtcattgttatgatgacttatagatgtagaggccattaaaagaggtagaatagaagccctgtcacagtgctttcattgagttttttacttaattgaaggacacagagctacgagcttagcagattcatctcctgcatc

SEQ ID NO: 94239 - DNA, 819 bp, Eucalyptus grandis
  Intron number 1 from transcript Egrandis_v1_0.003747m (loc us Egrandis_v1_0.002369m.g) derived from phytozome v7.0 (c hr-ID scaffold_10; pos 4265458 to 4266276 reverse strand)
ggtcagctacattttccccgacggcagctcgtacgttttcttttgcttttttctctttctttgggtttttaagagattcagcaatttggaaatgcatatgcagtttgtgggcgtcaggaatttgttcttgccgtacggaattgtgttctggtctgtatctttttgttcaattgctcatattgcgttagcttagtgagtctttgaaagatgagtatgctgattgtgggagtgaattattaactgtcattgagattggcattatttgaaagattgagcatgaggtgtaattttattagtttgagtaaattgatcctatgtggtccttttctgtataattatttcaaattcggttttacaggtgctaatccatttagtatgtgcagtgtttgcctgctatttttcccgtccacactatagtctatagtctctgcaattgcttgtaccatgttgaattcagtggtttcagaagattgaccttggtggttgttatgaatttgtaaagttatattcagttgttttggatgtgattgtttttggagtcactgttcattctgcggtatccctgttgactgttcgtaagtatgttacttattcatgctatggttgataccagaagtaatcatcgatgtgttaacctatacgtttgtgctcactctactgtcgtgcttggtgtagctttcaattgaattcaacctcgattccatttcttttctattttaatgacaatgttgataggatatgtgaaaattgtgttctggatggctaagctgcttttggctttgactcattgtcgattgcctgttgtattttctttcaggt

SEQ ID NO: 94240 - DNA, 635 bp, Eucalyptus grandis
  Intron number 1 from transcript Egrandis_v1_0.040000m (loc us Egrandis_v1_0.040000m.g) derived from phytozome v7.0 (c hr-ID scaffold_1; pos 38524232 to 38524866)
aacagctgacttacactgctgaaaggtacctttcaaaagcttggttttatcactcgacctcttatgtttgggaattgtgcttctcctagcagattcaatagcttggcctcttaatatacactactttcttttctatgagctcttactataatctacatcgctactttgatattagatatagactagtccagacagacctttaacctttcttgttaatcacgtagttgtttgggagaaagttcgtgaacttttttctctgacaaatgaagcaattgaactctaccccatgataaactcttctttttggaaaaattgattattaatctgctggatatgctgtgtggatgaggacaacttgtaaatgcatttaaaaattgtcattcagcaatctccgtctcgggttatgcctaaacaaacggcacttccagtgagttactaagttgccaaataattctcatcatcgttattggaacatgtgattgaaatcccccacccttatctagatccaacgacttctatcttctgcctcccttcttagaagtaaattttggttttaaaaaaaaaattaattgttacctctttgaaatgattgttttttacatgactgcagttgcccgctcgtcaaacgcgtggta

SEQ ID NO: 94241 - DNA, 731 bp, Eucalyptus grandis
  Intron number 2 from transcript Egrandis_v1_0.006090m (loc us Egrandis_v1_0.006090m.g) derived from phytozome v7.0 (c hr-ID scaffold_8; pos 16435072 to 16435802 reverse strand)
attgctgctggcgaattcaccatcgagcgatcggggtgagtgaagatttctcgttcaattgcggctttgttagaatttagtgaagagaagcaagaattttgatgggtttagcttgtcccccatggaaattgttcatctgggtgtgttcactgggagacatgtttcctgctttggctgatattatgcaaattgtgacagtctaatggtctgcttagataccaatgaagaagaaagttcacatctaggtttccacttggcgttaaagttattgccagctaatctgggtcatcttcagttttttgccagaataatcatgtgtttgatttctagtagtcttgttcatgtacgggagatgtatattgtgctaaagagagaagatacagaacatttgaccacccctgtttcaagacatccaaagattgcattgaagcaaagtagacatagagatctttgttcttttttcctgagtaaaggaataactcatctacttaagaagcagaccaatccagtgtcaagccaaacttatggtacttaaaggcgttgagcagtgatattctcagatttgctgggaggaggataagaaacagattacaactactacaattgttatgggagtactttaagaattggctttatttacaagcacccaatatatctttgctgattatgacttttgttcccccttcgtcctgagtccccctctggataaagttttccatctcaggtgagga

SEQ ID NO: 94242 - DNA, 695 bp, Eucalyptus grandis
  Intron number 1 from transcript Egrandis_v1_0.053875m (loc us Egrandis_v1_0.053875m.g) derived from phytozome v7.0 (c hr-ID scaffold_10; pos 21286969 to 21287663 reverse strand )
ggaatagatccaacaaaattttgttgtcttccctcatcagcaactagttatagctttgttaactcgcatttgtctccaaatgcttaaagttaaggacacccagtaataatgtcaattttgtgtgagatttcaactgatctgaaagcatagtgctgagggttcaatcattcaataatatataggtttgacctttattacttttagcagtttaaaactgcagactggattttattatgcaaaagagagacagagaaagggactagattttttttcttttttttttttaaatttgctgtgacaaagaaggacattatagaaatgtagagactgagatgcaactgagggaaattagttattctcaactattgccataacaacacttgtgacttactttttcatcaaccatatcgagttatacctttaatatcaacatctgtgaaattggtcccaacatcagatcaactcgaaactgttaatatacaagcattgcaatctgctagtgttgcacttgtataataatttctaagttatgcttacatcaaagaaagattgtattatatcaaattaactgtgaatcccctgacaaaacctctctgttttttttattgtgaatctgatggttttctcttgattatgatagtttgcttagttatgcctttaatgttgaaagaatactggtggaagtctttgctgaa

SEQ ID NO: 94243 - DNA, 981 bp, Eucalyptus grandis
  Intron number 2 from transcript Egrandis_v1_0.019347m (loc us Egrandis_v1_0.011599m.g) derived from phytozome v7.0 (c hr-ID scaffold_10; pos 22729954 to 22730934)
ttaatttgttctcagttgcatcgctttacagacaggttggttcagagtcccttttgtgagatcatgctatgtttttgtatgagaagaaggctcagattttttggggctaaattgctattccagctacactccctacatgtggagaaccttaaaaagaagtttaactttttctcgtcatgctgtgattcctttctgagcatgttcatcgagacctcttgttagacgctgaccaattggcaagtggtttctatgccgtcacatccagtacagattaggggttggtatagctgtccctgctttttggacattttcctccatatgctcttttggcttttaggacttgagatatcgtcagttacaatccccaatttatattatctgcaaaatgattatagggccaggttatccattgtaaagacagaatcatgaaccaaaatagtaatgtgcgttagccctatagaagtggatgcctctttgagctctaatatcctagtttagctgtagcctcattttttgggacatacactaaataacaaatttatgaataaatctgattcagtaggttgtacatacatcgaccatcatcgtctctgtacatctgatgcactttttgaaccatattttgaagtacatggtgattatttgcagtatgcttatttatccccttctccatctttattctccataggcttcgtatgcaaattagtgagtatgctagcacatatagcgacttaaaacctattgaatctaaacactttgacatgtggttggaaagagaaagcttcctttgtgcgctgttaacatcatgcacagttcttacaattctgcatttcaaattatattctataaagttatgttgtctttgacttttcttttgccttcatagaggagtaacgcatctacgctgacaagggtttgctcctaattgagctctccaatcgtgcaggagcaagagccttttttatctcccacgatagaggg

SEQ ID NO: 94244 - DNA, 624 bp, Eucalyptus grandis
  Intron number 2 from transcript Egrandis_v1_0.032293m (loc us Egrandis_v1_0.031724m.g) derived from phytozome v7.0 (c hr-ID scaffold_8; pos 12024482 to 12025105 reverse strand)
ccgagaacaaaagcgaaggcatttcaatttcattggtactatcacgtttcattcatgtttttgtgagtgcctacgtgagaatattttcccctttcttgccgcttcacatggcatcttctttactatgcttggccattgcacgatgagttcttgcccaaaagaatagttcttaagataagaagctcttttataactgcccctttcccctcctttagattgtgtttgagtgtgtcaacttgtaattttgaaatgcttggatggtaattgcagtatagttccttgagcatacgttgatgaacgataagtaactgctaatgatgtggttgggagagccgtacatgaatgctcaaactgtgcgaaaaatctgaaattttgcttgctgaacgcttttttttttttttcatttccagatggaacacaagtgtctttggccttttttctcttcagttttatttgtttatttttgctaaggcatttttatttagttttattctacaaaatatgcacaagaggtgttgattcaatgattcattcatgcctcatgaatccataatatgcaatgtaaacttccttaatgaatcatatttgttagggaagttgctgcgagaagttgaacccgagtta

SEQ ID NO: 94245 - DNA, 545 bp, Eucalyptus grandis
  Intron number 3 from transcript Egrandis_v1_0.018695m (loc us Egrandis_v1_0.018612m.g) derived from phytozome v7.0 (c hr-ID scaffold_8; pos 35429665 to 35430209 reverse strand)
aagaggcaaaaatcttttgccaatttgtaaattaggtaagtgataaataattcgtctgagcagctactctataaccaatcagattcatgaattataacctccttttcttcctgtcttactaacaaagagtagttacctgttcgatgaatccgctgctttctctagcatgttaacttgatagactgtctgaatgagcgtgtgaacatcttctgaaagtgcaaaaaatatacatcaatttgtatacactttgctttgtctatacatttcagggcatgatctgaattatgcattaagggtaaattctcccatcgttttagatcgtctatcttattttatgaacttgttcacaaccctcataatgtttcatcttgatcagttttcattggttgtatgtacttttgcagcttctagttttgactttgctctatgcattgaatttcttgtctgatctgcatgagagtatgtttctgcagcaaaattaaggctgtgtaattcccatgtagttggttctaaccattgattacttgtctcttatgcagcaaaaa

SEQ ID NO: 94246 - DNA, 563 bp, Eucalyptus grandis
  Intron number 2 from transcript Egrandis_v1_0.018695m (loc us Egrandis_v1_0.018612m.g) derived from phytozome v7.0 (c hr-ID scaffold_8; pos 35430366 to 35430928 reverse strand)
tctgccagcgtctcgaggtcagtttgatgcaatttctgtttcttgttcatggcttgcgctgtccgaaagatactgatcatttttcattgtatcaatgcaattgttgtttagttactttttgtatgcaagacaatgcttttagtctttcattgtatcaatgcaattgttgtttagttccttactttttgtatcaagacaatgcttttagcaaattctagggaagatccatcttttcccaaacttacccggagtctcttgtaagataaacatgataattggcagtaccctaatatccctttcttatcaatgtgtgaatagataatgtgcgtgtcagtgcatttgcatggatatgcgttttagcttttagctcttttttaaattttgaccaattggagttcttatgttcaactatgctaatggtttaggaaatttgcccgaggatttgatctctgcagtttttggtgcaatatcaaagccattattataggttattgcgaaagaaattgaaacactagtgtcttgatttaggaaaagactggaggtagaatcattcatagagttgg

SEQ ID NO: 94247 - DNA, 560 bp, Eucalyptus grandis
  Intron number 1 from transcript Egrandis_v1_0.045512m (loc us Egrandis_v1_0.045512m.g) derived from phytozome v7.0 (c hr-ID scaffold_10; pos 8951731 to 8952290)
cctcttggagcttgttagtacagagcttgaccccagtaagtactgagcatttcgttttaaacttgaatacaacttgtaacaaaaagcagggggagaaataggatgactttgatggaaacgtagtcttctactttttgaaaattttgcgatgttcacaatttgacttttatttgaagtgaaacattcgaagtttttcaaggtcaaaaatagccatattatacgaatttgtaccaaaattttaaaactaaatgcctattattaggtttggagaaaaagttacagaagtacagaagttgttattgacttgcaataaacaaggatgtttgatagttttacttatcaaccattccctaaataaattctccatgtacgtaggtttaagttagagatcatgatctttgccagaaaaagatatttgcaagtactgcaaaggatatatgtacaaaatgcaaaataaaattgacaactgcatggtttttgcccatatttatcatatttgaatatagtcctgaacttcatttacagagacgggacgagagaaggggacaatcaaagggtac

SEQ ID NO: 94248 - DNA, 893 bp, Eucalyptus grandis
  Intron number 1 from transcript Egrandis_v1_0.004489m (loc us Egrandis_v1_0.004489m.g) derived from phytozome v7.0 (c hr-ID scaffold_27; pos 91970 to 92862 reverse strand)
gttgtcaaggtaccttttccattcttttcattagacccacctcacatccgaacgagtgctcctgtttagaatcgtggataattatttccataagggcggccatgttaaatggatccaattgcataagtaacccagagaaagaaattcttagaaacttcaagtcagaggaccaaattttgacttgatggatggtacatgtttcaaacgattctcctagtaatcacgtaacatttataatcttaaaaatcatgaaaatctagaccgttaaacacaatcatattttttaatttcctttcggatgcacgaattttcattgcttgaaatttaatatgacctatgaagcgcttagcaataatctgtaaattttcacagcaatcattccagatatagctagacattcttctctcttaaattttgtccgtacacttgttttacaaactgaagtggttgactgcaattgagtttataaacaaatggtccataccgaaccctcaatatgaatcggtcaaattagcttgtaaatcaatttcatgtactgatattaatacatccagtattattctgtatttatagacaattatttttgaatttttttctatgtgatatgttattctagttagtaatggcacaattttgttggataattcttaaatcttctattctaaacaaagatcaagtgcttggttaagcttaggctcctgagataatgacctatcacttaaaaagtgtggtgaggtatcacgatcttaggaaaagcaaagcaactcgatatgtcctctcaaagattgaaagcgttgataaatcatggaattctatttactttttcaagtttcttccaattgaaatggtgtcggattgctttttctatttggattatgttcctccagatatca

SEQ ID NO: 94249 - DNA, 958 bp, Eucalyptus grandis
  Intron number 1 from transcript Egrandis_v1_0.020571m (loc us Egrandis_v1_0.020520m.g) derived from phytozome v7.0 (c hr-ID scaffold_10; pos 29064451 to 29065408)
cagcttcgttccagccatcgccgcgtcggaatcccgtaagtagtttctctccgaaattccagttcctctggcgaactgcgctagggtttatcggcggcgattcccgcgaacttggaaatcgccgtctccatctccatctctgtccgcgcctgccgcgacgacgacgacgaattcgtccgcctgttgcgaatgtacggcttggatgggatcgaattgacgtctttgctcgctcgttagctctccgtgtttggccagtgtctcttctctgggatcgatcgtttttcgcgttgaactcggcgagtgcgtggaaatggttgtgcgggccttgcaatttgtgttcttgtggttttcatgttccgtgcgagataagatagtgagatagagggccgtatgtacactgtccctgttcgtgcttgcgtgatgaccgcgctgtcgcgggcgttgcgagggataatggcatctttggaggctttggaatttagtagatacttgtgatggtatgtgaagtgtttaacaaactatgtatccgttccgagaagtgacaatctggatgatggagatcttcgggtcggtcattcatggtacttctatagaggtgcaaagctaattattatttggtcatacatatggtgagagttaaacaagtgctttgtggagttttctggtgtatgaaatcttctatgggtcccttggcttttttttttttatcctttttgggtgaactgggtccattgatgtgctggtttttctctctgattctttctttcattgcgtagaaaatggacgaacttttgttaccctgcactatgtatataagttcgatctccccgaaccccttagtgttgctacttgctggtatttgaattgagtactgagcttgtgcatcttgttcctccattttgcagattgtgctttccttttgggatttgaggcaagcagggaactcatctgacctgaa

SEQ ID NO: 94250 - DNA, 571 bp, Eucalyptus grandis
  Intron number 1 from transcript Egrandis_v1_0.004721m (loc us Egrandis_v1_0.004721m.g) derived from phytozome v7.0 (c hr-ID scaffold_1; pos 352680 to 353250)
aagcaccaagagaagcagctcgcgctcaagcgaaggtcgtctctgacctctacccttttgattgtccgtcttttgtgggtcatagcttcaatgcgatggagttcggaggggttaggactgttgagtggtttgacaacgaattgggtccccagaacagggagaaaaggagcagctttgagtgttatgagtagtctgattaatttgggggcttctcgatgaagtgctctgatgcgttggagatggaattctgttggaccgatgagagtttgtggatattgtttgattcttttctcttttttctggccgatttttagttgaatttgatgcgacaagattgaagtagcggaatggattgaagccttctctctcgaattctctcttctatttctctgttttttattttttccttctgcatattttctgttttcttttttggttttaaattggacggcaacgcgctgctcgggttttctggtcaattcgatcgactcaactccgatgaatcaataagatatgcaatgttctctgtgtgagttgacggtactgttttgacaatgcgtgtaggtggttg

SEQ ID NO: 94251 - DNA, 862 bp, Eucalyptus grandis
  Intron number 3 from transcript Egrandis_v1_0.015456m (loc us Egrandis_v1_0.015456m.g) derived from phytozome v7.0 (c hr-ID scaffold_8; pos 25155040 to 25155901 reverse strand)
ctatttggtcactggtgtaagaatctgcccctgttcatttatgatgttccagatattgaaaaggatcctctataatgtatcttgttgatatgatgcctcgatgaaccggctgcatgttttttattttaattttaaaatatagtaaaagtgtttgtatatgtgtgttagataaagtttttcatgctaagccaaatgtatgtctgtgggtgaaaagtgctttccccactgcatggtgtttagggccttgtggaaaattaatcataagttgcgtcaagtcaagtaggtgagagattggaacttggggtttaggggccaaagcttgcgtgtactttctagaatagaaatgagaagatctggtaacacagaagtagagacagctcaaaaagttgttgaatgagatacatgagttctagcatttttagttctccgttttttcgcacttcctgcttttacttgcataaagcggtcatgtgaatatctgtatcacaagcatcacagttggcttaatggaatgtgaactgaacctaatctagctcctttgcaatggtgtctggtttgacaccgtgtggacatcatataacttgttgagttcctttcttatgccctatcaaccgaaagtgcttctttggactcttgtttgttaggtatgtcacggcctaatttttgcaaccatgagatccatctttggtcttaatttattttttccttagtttttccaccaattttatccacttcatgaatctttctcttgacgtcttggcatatatacgccatcttcacttttgaattgaatgtttttgctttgtggctgtcattttcttcggaagtctgctgttcatcggagctttgctgtagctgataa

SEQ ID NO: 94252 - DNA, 403 bp, Eucalyptus grandis
  Intron number 4 from transcript Egrandis_v1_0.020637m (loc us Egrandis_v1_0.019874m.g) derived from phytozome v7.0 (c hr-ID scaffold_10; pos 7097406 to 7097808)
acattgacaatcataagaggacatacgcggagcaggtgagttttctgacttgttaatctagattgcctactgaaagttgagttatttgaggcatgcagtataatattgattggtccttggctcccagacttctaaagctattgtcatgctgactatcagctatttcccttaatatgcataaatatctgcctattttgcgaaataggaaatctttgtttttcgcttcttccttttttccagatgacagtttcttattatggatctgctcctgaattgtgttttgatgagttgattccatcctaaaggagatgtagataacacttactttgcttcgttgtgcagtattgtcatttttttttcataaggtcactcttatcttttctttgcacgtggcaggagtttt

SEQ ID NO: 94253 - DNA, 758 bp, Eucalyptus grandis
  Intron number 1 from transcript Egrandis_v1_0.042311m (loc us Egrandis_v1_0.042311m.g) derived from phytozome v7.0 (c hr-ID scaffold_8; pos 44253471 to 44254228 reverse strand)
tgtgcaaactgattttgcctgtcattggtgagtccttatcacaattcagctggaaaagtaggtcagctggtctggtgcgagttgtgttatactaaacctgacaagggacttctcatgtagaaactcattcataaacttttttagactttgtctaaatgagcgtggaagttgcaggtaatgttcaaatttattaggaaattcaaagctgcagagaaactataaaatgaagggcgaggcactgataagtactcaggttgcatattaataatcgagggagctgtttttgtactgcattttcttcttgtctgtcatagtcagatcctgctagaagctaacttccatcaccataatcattcttacggtcaggcattatgatttctgagatactcctagtgtaaacaatgttcttaacctgaattataataaattaagttgaattccaatcaggctgatggtagttttagttgtcttgataagaacccgcatacaagaagcaccaattgcattgtcatttgcttttgcagaaggcactgtgctcatttcttttattctgattgctatgcatccttcccatgtacctacagattttaagaatttaactgttgtacttaagaagcaacagatttatcgtgtacagaacataatcattacatgtacacttgttttgtcatactctacatctaaagctttgtgattacccatggagagctttctaatatatggatttcctttgtttttcagaaaagtttggtactgct

SEQ ID NO: 94254 - DNA, 667 bp, Eucalyptus grandis
  Intron number 2 from transcript Egrandis_v1_0.025604m (loc us Egrandis_v1_0.021135m.g) derived from phytozome v7.0 (c hr-ID scaffold_10; pos 29453850 to 29454516 reverse strand )
caggaggacctcaagcgtcagctttttggtacaaatttttcttctctcctgattattctccaaagcttggaatttgcattagctgaggtggtggaaagccttttttctcttgctttcaattattagttttgtaccgagcgtaatacagcaattcaaatgacttatttttttgaacaagtaactctattttgggggcagtttgtgtgaagtaaagtaggaaggaaaggaaattaaatttggaggctggctagttgggtggtgaatttagtgcttgtctagaccctaaagatcttgaattgagaaatgcctggcaatatgggactcaccagaccttactgttgcaagtaacaatgtttattttggggaattgtagtcaaatgtcctcacgtgacttggaagccctagctgacaggtactagttgcacaccgcagtttctgaatcagttaggattggcatttgggtgtcttggactctaggctctttgaaggctcgatgtgtcttctgagagttacaatttcttatgggacattataattacgtgcatgaagtttgaactcgattatctgttacaccaattgaccttttacttgagaaaacaagtttaactgccggttatgttttcatcttgcaggtttaccaccaagatacagagattctgtgcgggca

SEQ ID NO: 94255 - DNA, 485 bp, Eucalyptus grandis
  Intron number 1 from transcript Egrandis_v1_0.018701m (loc us Egrandis_v1_0.018701m.g) derived from phytozome v7.0 (c hr-ID scaffold_10; pos 34668335 to 34668819 reverse strand )
aatatcctcactacatcacagaaggtttttgttgggacttgatgttagaagctcgttattacagctttaatggtgtaatttagtttgtatattgtaaagggaaaaattatagcgtattattcaataaaagtctatatatacattaagtaatcagcaacaaaataagccgtaaagccctaaagaccactttacccttttatacctctaacatatgtcatgattctttggaatggcttttttgttggactctctttgttaatcttctttttgatcttgtcttgcccatcatagatcaatttttgcacatatcttggttcatctttgcctgcttaattagatattaccataatgtctctttgcctttggcttataatactctcaaacaaagcaatgttctctactttgttggttcttccttttgaattttctttttcccttattgttctgcagatagaaccaatcgcaagtggaaatctgcctcctgg

SEQ ID NO: 94256 - DNA, 821 bp, Eucalyptus grandis
  Intron number 1 from transcript Egrandis_v1_0.053453m (loc us Egrandis_v1_0.053453m.g) derived from phytozome v7.0 (c hr-ID scaffold_10; pos 12447772 to 12448592)
aaaaagtatttgaaacaaagtaatgaaggatgacaaattgttgtttcaattacgttaaaaaatgaactgaaattattgtcaaattagataatttgatataaattaaatttagaaaacatcctagatatttatggtatatgataactcacctcggcaggaaagaggaaaagattagatttttcaagatccacgatcacaattgaacaaaaaagtctaaaatatgttccaatggaattactttatcaaaattgaaaaatgaaaaatttccccttaatttttttttcttaggggtcggaaaagataactaaattgtagtttcttcattaaaaaaaccacggacctcataaagtactaggggatcagtaagctagtctctaggagcgaggcagtagtcgcatctatggtcttggcaaccccgtccgcagcttgatttgcatctctcaaacggtggtctagacccaaatttttgaaatgggccattaatctgtaggccggcaaagctggttcttgcctgtcaccgccaccgccaccgccaccgcccttatcaggtcgcttcaagctatctgactccaaaatttaagttgagagaaagcgcacgcaccgcctctaggagcgcccagaggtttcaatcttgtcccaaccgtggaagcacaaaccctcttcgcagctcttccggtttgatctctgcagtgacgatgtcttctcctccttcttgttcccgcaacatctgccatcgcttgtgcagaaaacgcgggagagctcacatggaggatggaaccaggaaacgtccatagtccgatcttccgccggagattctctcc

SEQ ID NO: 94257 - DNA, 948 bp, Eucalyptus grandis
  Intron number 1 from transcript Egrandis_v1_0.023756m (loc us Egrandis_v1_0.023756m.g) derived from phytozome v7.0 (c hr-ID scaffold_8; pos 54773746 to 54774693)
gtccctcggttttcgcaggtagcgtgcttgtcgtcgtccgttaggcttttcttttttcgctgctgaggaatctcgacgtggattgtagatgccagactgatgggttcttggtcagtagggggccttctttaggttgagtttgatgtctagatatggggcggcgggtggagaatttgatgattgatgaggaagtctgaataacttattcgagggatgtgtacctggtggtgcagtcgagttgaagcggagggatgattatgctgtcgggatcgtgcttgttgattgagacgccgtaattttcatcgtgtttgcttcgtatatttgatattggagacatgattctgtaatagaatgaatcgcgtcgaattgtttcttctagtctagcgcttcatgttcttcaatgtcggttctgggttgaattagtttgttgatacaaaacggagctgcgtttctcttggcagtataaggttttgatgcgaccgtcgttggaactcacagggccagttcgtggcaacagattgcctgcttccccttgttcgataatttctagtttaccgtattcttctgaagcaagtgctgaaatggaggaacccacaggattttttgcctttttccatataatgtgtgtcttgacacattgtggagttctttttccgatatttggttcttgtaatatcatgcagagaccgtgaaggagatgtatgataaaattcttgagtccgctaatatgaaaagaacaatggctccaaacgcatggacgtggtcgatgattgaaaattgcaagaacagagaggatatcagagcttctctttgatgtcttgcagaacctacgcagatttgtcagttgacttcttgctccatttgagaaataaagttttgatttgtgactagttgataaatcaatttgtttttttctttcatcgcagagattgtcaaatcttcgtattc

SEQ ID NO: 94258 - DNA, 758 bp, Eucalyptus grandis
  Intron number 1 from transcript Egrandis_v1_0.025640m (loc us Egrandis_v1_0.020311m.g) derived from phytozome v7.0 (c hr-ID scaffold_1; pos 34075558 to 34076315 reverse strand)
tccgacaggtgagagctctctctcctcttgtggcgcgggagctccggtgctagccggttcttgcttgagcgaagggcgctggttttggagatgattacgaagtgcgagaaaatgaggggttgtgcaaccttaattggacgtgattattttctcgatattcctggtagatttagcttgaagcgtgggcgatggatcggactgtcttggttacacgatcgccgtagctttttcatgtgtttgcatctattcgagtgtaaatatctaaactcactaaagtattttggaagcgagagctggatatgctttggaaatcacaagatgaattgatttgactggaattgagatagtttgggattgctgttgcagcttactttgtggggaatgatctaggtttagggcttttgattgctaaaatatgattatttaagggagagttagccgaagaggggaaggggatagaaccttggtttgatttggttagttatgtccaagtggcctttctttcattgtgatcatgacatagaaatgtaaccaggtggtattggattagaatcttcgttatattatatatgatgactacatgttcttgatagagagtatgttctttgcttgctatcgccagtggtaaattttagtttacttgccataaagaagaatctaaactgcataacatagtttaaattcctaatttgtttttccattaatgtcttacattgcttatttgctttcaggttgggccttgttgcaaccatcaaggt

SEQ ID NO: 94259 - DNA, 938 bp, Eucalyptus grandis
  Intron number 1 from transcript Egrandis_v1_0.030307m (loc us Egrandis_v1_0.030307m.g) derived from phytozome v7.0 (c hr-ID scaffold_8; pos 65803332 to 65804269)
gcaacgacctcgccatccaagcttctccttcccaggtcattccatcaatttctcccccacacatttcttcttcttcttcttcgtcttctccgtcgtctctctcgcccacagctccggcgtgtcgccactgagatccatgtcgatcgtcgttcctcggcttcatccatcgagtgaaatagctacagcagttgcttcttcgcgtgccccgccaagcgatgcttcgtttagatggctatgatgccgtgttaggtattggctcgtttcgctcgatacggtgtccgattgagaaattctgagagtccttgcaccgattgccgagtgcgtggagctttcggcagtggatttgaggcaggactatgtcgacctaggtcgggattggccctgtcggtggtgattagaactcgacgctcataaaaatctgaagtgactaaaagaatctgatactgttgataaggtgattcaaagatcgtaagactgcggcaattcactgctgtagccaggagaactatcagtggtactggcggaaaattgtcaaatgggaaaaccataggagaaaaaccctatggataacctcctacggttgctgcttctatcttgctaatgctttgctggttttccttgttactttgatggtgttatatggatttttgcagcactcaataactgaaagcacgaatgcgctccttagcatatttcttgtgtgaccatactttgcatgacttccttttgcctcgtcacattcagctaccaaaaaacaatagaagttccaagttctaagctcatgtttggcacttggcactatttgatgtattagaattgaaatagcatagatccatgtacaaatatcaccttctcacttgtataaatcagattaagattctaacattcgtactcgaccttcagatttcctttcacacactcagttcatcaagatctgc

SEQ ID NO: 94260 - DNA, 880 bp, Eucalyptus grandis
  Intron number 2 from transcript Egrandis_v1_0.030307m (loc us Egrandis_v1_0.030307m.g) derived from phytozome v7.0 (c hr-ID scaffold_8; pos 65804339 to 65805218)
cagcggtctcctaaaggtatatcgtctttactcatctttctagtatatttgccagtttatagttgtaagcaacttaccgatgcttacctagtactctgtgcaagctgtctgttctgtccttagaatgcctattacgaacattgattatttgagtgtgcaattaccagacatcaatgcctcaaaagttcaatgggctctgcagtgcttcagtggtaaagatctttcagttgtatgagtggtgctccgaattcattatgtttgaaatggtgtgtttgatggttaagatcgcaagctcgttgcacatatggaaaagttagttgattcccttttcccccaaaaaataatcttgctccaattctatggaaaaacagcagaaatgaagtcttgaaaccgacatgtttgttgagaaaaactgactgcaaggtgctgtgagaagcatttattcttcatgtcatatgtgttcacggagacgagcttttacagtttctcatcatgtaaaagcggcatgaactctgtcaaaaggattttgcagtgccccaatgtgacctataaagccaacaaattcagaataaagagatggggaagtttatgttaaaaattagattccactgtctaccacttttacttctttttttgttggccacttaacattttaagtctttgtgactcagtcgtgctaaccacatactattcagtatgttattgaactgtaatataaatagggggccggcacctgtcagacctgcattaatttaataataagctgcaccatgcagagatacatgtttatctcactgtgccaactgtgagtttttgttcatgcatatgtgatgttgtcatatgcatgcaggcattaagaaaacatactggattacttgca

SEQ ID NO: 94261 - DNA, 606 bp, Eucalyptus grandis
  Intron number 2 from transcript Egrandis_v1_0.024921m (loc us Egrandis_v1_0.022631m.g) derived from phytozome v7.0 (c hr-ID scaffold_10; pos 7155145 to 7155750)
ggaggctcgttcccgaacgccggcaagtggtacgagtgtgtgtcctcacatctcgccgcgaggttcgtttctctcctcgatttggccttatccgaggctttttatgttgctcgcttgctcgattttgcttgatttggaacttcctttttggataggatcgcttctagtagtttgcgtagtgatcgattcgatgattgtgagtttcagatgctggttcttggtaccatgtttcgtgatttagcttcttagcatcagtacccaaaagggtcatgaaaagcgaggatttttctgtgtttatgaatgcctattatttctatagacttgcatgaaagcatattcggaggcccttatcttcaattaaaggtcaacaatattgatcgtctgattttcttggtatggtttggggaggagatcagtgcatgcctgcgccgtgtactttgaatttgtcgaagttgagaaattttcagcattgttgcatctcatcttgttatagcattttattttgattttagagtcgaatgcttcctaatgtctcctacttttgttcaattgtttagcttccctggcaaagctgctggtgttagagtaggtggcaaaggtgctcca

SEQ ID NO: 94262 - DNA, 900 bp, Eucalyptus grandis
  Intron number 2 from transcript Egrandis_v1_0.045437m (loc us Egrandis_v1_0.045437m.g) derived from phytozome v7.0 (c hr-ID scaffold_8; pos 47108549 to 47109448 reverse strand)
tcattactggtatggatggaatcactctcctcttccgtattttgatcagaaactaattgaactagggttatgatgttaatgagcctatcatctcggtagataatggtctgcaaaacaagtcatggttaataaacaacaaaagcagttttgttaaatgaagtcattgaattaatcattcgtttcatgcctccaaaagttgttttgttaatttatgtctattttaatattgaggctcaacgcgtgcaattagcgaattcgctcatctgatcttttcttcgttctgtctaaaaactatgtacttggagtgttatatcaagaagttgacttttactgtattttaactcatgttatctaccgaagatacctggaagttaacatcaaccggccaaaaactaattgggttggccggataagtcaacggggttaaagtaatacgtccagattaatctctgaagaacggccattgcgttttttttcctaatctattggacaaaaaaaaaagaaaaaaaagatagacttcgaactctagccgactaccaaattttctagttgatgcatgtatctacacatggaaaaagacagtgatgtcctcagggaaaaagcacctcatatgtactatatatgatgccttcgtatcggactaccattataaacaaaaattaatgtgttacaatatagtaacgaatttaatattacgtttcaaaatatagagaccggaataagtgatgactatattttgatgactttgttttggtgcataagattattttctcattctaagcatcgaattacacaccatatatatcatttcttcataattgcttgattgttgacgagagaatttttttgttctttcttttggtaggaaccgggcactttttgacttgctctccccacgaa

SEQ ID NO: 94263 - DNA, 792 bp, Eucalyptus grandis
  Intron number 1 from transcript Egrandis_v1_0.006733m (loc us Egrandis_v1_0.006733m.g) derived from phytozome v7.0 (c hr-ID scaffold_10; pos 2133510 to 2134301 reverse strand)
gcccaatctcgtgccaggtcagcggtcaaacccctctctctctctctatctgatggttgaaatgtcagatgctcttttgttccgttcgatggacgagaaaaatgcaagggaccgtgacgtttgatctcttggaatttggcgaaagatactgtcggaccaggatgatgacgtggcaaactatttttgttctttccagtccgtaactttacaaagtgtttagcagaaatggcttctttgacgctctccttttcccccgttttaacacttttcagctatcgaatcctattccgcttctagcattaccgttgctttttccttttctttacttccactagcataagttcgatgcactgtgaatcgaagaaaatcacttctgcaaggggtctttcccgaacacgttgcatctacatgtgcccggatttcgatcacgagctcgcttgtgggaacagtttcttcgaccgatggtgcttcttatgaaaagtaggaaacgtagaaaatgctgggtaccgcggtcattatcggcccgtggattaggaagaataatcgccgcgtctcaagttgacaggcatccgataccactgaggtctacatcacaatgtgatggtgtgggaattaatcttacaaattgctacatgggacaaaatactagtcacgacatgcaatgcatattgttatattgatgaggagcttgacattcgaagctgagtacgatctgcaatgaatctttgaactttgtatctagcctgcaatttagtcattgacgagggtgatatctcgaatggcaggtgcacc

SEQ ID NO: 94264 - DNA, 956 bp, Eucalyptus grandis
  Intron number 1 from transcript Egrandis_v1_0.038976m (loc us Egrandis_v1_0.038976m.g) derived from phytozome v7.0 (c hr-ID scaffold_10; pos 20634671 to 20635626 reverse strand )
tggtcgtaattgcctcggaaagtgctgtttgcctggtaagttccctgtgatcacactcttcctttccttttccttttccttttggcctatgaaaattcgaacattctcgctgattgtttgcggtttagtcatatatttgaagatgaatagattgtttttgttgggacgtttatcactttttgtgcatattagaagatggttcgatttggatgtttcttttatgccacaaagagtcttacatagagacgattgggtgcattagctttgataaattcatattattttaattagttacgtgtttcgtccctatttctttgatgttctgattgttctaaggccagtgtagttttcttgccggtaaagatttccatttaagttcttgggctttgcagactatttaccggcaattacgcattgtatttggctttctttgtttcccacctaagttatgaccatgaggtttcaaacttttgattgctggtgtataaagctaattgtgaaattggaataaaatgaggtggatcatcttcttttttaaccatattatatgctggaaggtgaactcttgattgagcttcaagttccatgggggttttctgatccttatctaattggagggatgcatattttttatagcaatggccagcagcttttcttgatcttcaaccattctccactgcctggagaagggacaatatagaaatcaagaatcaaagattagagaaaaataaaggctgtcataccctagaggatcaaaaagcagcactatattcaattaaagccgtgtatatataaaattcattatatgtggtgagagagagagagagagagagagagagagagagagaggatgcggatgtttggttcattactttctctatgttggcactgacttgtacctgatttaattgctaattgcagcatcagaccttcctctgtactcgttcaaggtagcc

SEQ ID NO: 94265 - DNA, 763 bp, Eucalyptus grandis
  Intron number 1 from transcript Egrandis_v1_0.012665m (loc us Egrandis_v1_0.012665m.g) derived from phytozome v7.0 (c hr-ID scaffold_10; pos 29015486 to 29016248)
gctcagccggccggcgctagcgtggaggtccacgtcagtgatttccaattaaaattgatcagaataactaaatttgaaaattatcataagacaaaattgataaaattgaaaattattgggtttgaattaactgttatacaataggtttaagacttttttggacaatttattgggctaacatcatgtgaacatcccttcattggaaaacccaattaaaaaaaaaaaaaacttacaatcataggtagagagaaattatatgtatatgaaaagaatataaccccatagtcaatgcacgtgaaaatcaaattaggagtgtggcacataaaatttgactagtagggtggaggcagacacaaaagggtagaacctttgataccgtataggaaagttcaacccaaaaaacttaagttcattggtcaatagaggccacatgtgtataaaaaaacatatgaactctattgacacgggatgtggaatatttacatatgcatgatgttgaatttaggattcagttttttttttttttggtcagtaaatttaggattcagttaaaatgctacgattggcgggctcctttgcaaatatcccactgttactttgggagcaaaatgctgctactttcttgtctagtgattctagttttaggtaaatgcaaatgagacagcaattttttttcatcctaaggcaagatctaaagtagaacaaatgcttcatgatcaatcacgcagattgaggagaaactagcgaagcagaaggaaatcga

SEQ ID NO: 94266 - DNA, 716 bp, Eucalyptus grandis
  Intron number 1 from transcript Egrandis_v1_0.045257m (loc us Egrandis_v1_0.045257m.g) derived from phytozome v7.0 (c hr-ID scaffold_8; pos 69391733 to 69392448)
cgctcgcttctcgcctcgtttccaagtcccggcaggtgaggagcccccccctccagatccgcgcgccttcccccctctcgccgttcgtccaatgccgtcgcgaatttccgctcgattgcttttttggggggttctttgatctgggcgctagcaatttcgctagggtcgagcgattccgaggcgaaacgccgcgctcggttttcttcatcggtggggagacgggttgtgccgatggcgctctacgttggccgtggagatcgggaattttgcgttctgcgaagtcgccgctttccgttcgggcggttgctgatgatccgtgccgctttagagcgcttcttgtctgttgctcttcgttgcggggcgatttgattcggcgattgtgtttctgtgggcttggatagatctatgcggtaactaggacgtaatcgacctgaagttttggcttttagcttcttcctcaatgttcctttcggttgctgacggactttagagcacatgattagcattgggaggcttttctttcccactgtatttagttaaagacagcgactttgatatcgccgtgtctactttggatggaaatggctgtcgtattgtggtctgttagcggtagccttctgcgcatttcgcaccactgtttagtttctcgatagatttgtcgatttctcggtgggcattgtttaatttgacgcgcttctgcttttattcactcagtt

SEQ ID NO: 94267 - DNA, 593 bp, Eucalyptus grandis
  Intron number 1 from transcript Egrandis_v1_0.015891m (loc us Egrandis_v1_0.015891m.g) derived from phytozome v7.0 (c hr-ID scaffold_1; pos 25162311 to 25162903)
ttgacttcaagctctctcagttcaaagctctccaggtactccacaatctttcctgttcttctgttccttttttcagagtaagattagtttgatctcaagggtcatgtggcccattggcactaaatcacttcctcattattttttcccttttttttttttttttttgggtctctagaatgggaggtgtgtgtgcactgtggagcatattcacttgattaaaagacttctttttacacaaattatgatctttatctcctttgttgtgattgatgcaatcttcttccattgatatgtcaagcagacaaatgttttaaggaagttatgcaaaagtgtggcaaaaattgtcatccatcacatatagttggaattggtattgtttatcatgataggtttggattacagaaacgctgatcatgattatggtgcagctatactgtgcattgaagaaaaatgaaacttagcttcaacctttttctcttgaactagatccagtttgcactactttttatcaaaattatagggctactgcatttttcagcaatttgattgactaatttcttgctaccatttttgccacaacaggtaccaaaagg

SEQ ID NO: 94268 - DNA, 658 bp, Eucalyptus grandis
  Intron number 4 from transcript Egrandis_v1_0.054547m (loc us Egrandis_v1_0.054547m.g) derived from phytozome v7.0 (c hr-ID scaffold_1; pos 26636502 to 26637159)
aagaaaatcttcaagaaatttaaaggtcagtgaagcattgttgaaaatttcagtgcctttggtttcagtttctcaatatgcaaaagtcatcacataatgcggttaatctagaaagaaacgtgcgtgagtaacgtcaaaatccggtctccgccattttcttaaatatctctaagtgaaaatggtccaacatcatccgttggactcttaccaaattattcttgcatcataatcgttgaaaaagaattctgccggcttcagtcctgacagttttctttagttcgctttttacatctaaaataagtcctttctttatgcatcaatttcatgtctttttacagaaatctcaacatcagatgacttgaaaaattcacgttgagtaagtgtcttaacggatgcagcacttagatcatggcaaattatcttagatcacacttgtatccgtatgtgtttgaaaatcatgcattctccatttgatgacacaaaagcatagatcacctcctccactgttttttctttttaatgttctctgggaagcacatggtattgcctttgcaaatcataccgctttatcctttgctgaacgtcttctgcagctactcatcctatatttgatctctacgcaggagttggcacggttaagatacatagagacaaggag

SEQ ID NO: 94269 - DNA, 740 bp, Eucalyptus grandis
  Intron number 1 from transcript Egrandis_v1_0.053056m (loc us Egrandis_v1_0.053056m.g) derived from phytozome v7.0 (c hr-ID scaffold_8; pos 43981849 to 43982588)
ccctggacaaaaagacccacggcctccacaggtcactaggaaaaggattctatgaatcgtgactaaagacggagaattttggaagatttttgtattctctcttcaatagtttctaatttacagtccctgtaaatataatacaagatgtgcataatgaatggaagtaaatgattctatgaatcaatctaaatctaaatacaaatctaatcattaattgatttgtgtacaatcataatcaaatcaaatcttctgtcgaatatcatgagcaatcgccgcatatcttccaacacaaaagatcaacaggtattctgtcttatgagaatagataggtggccattcatatacatctttgaataatatacacgtcaataggttccaaagtaatgcaaaaaatacacccaacactataccaaaataaatttccaggtgagtttgttgcacaactttgaaataatgaaagatcatttctcccccaaatatagtttcgatcgaccaatatccatggaagcacagcctatgttaaatcctagaaaatatgatatggctcagcagtgtgcacatttccttgcgaaatttgattgattttgactgtcatacaagtagtaattgtatgaatctacatattcgtgtgtgtctctatatatgagtgtgtattacataaagatttggtcacaaaaaatggaatctattaatcttgaatgacagtttacgagcagctacaccagcttcatagcacttgc

SEQ ID NO: 94270 - DNA, 759 bp, Eucalyptus grandis
  Intron number 1 from transcript Egrandis_v1_0.021096m (loc us Egrandis_v1_0.014140m.g) derived from phytozome v7.0 (c hr-ID scaffold_10; pos 22998590 to 22999348)
ggcgcttgaacaagcctgctgtgaaaagcattcaggttttcgcctctttcttctctgcttttatcttttcttttttgttttcccccatttgtaaagtctctttcaggtcttgctttaactgcttttgagtatttggtcgctgcgggaaaaaatgggggacagtgagaaaaagggaagggaaatcgcaagctctttgtttttggttgcacaaattcagcggcttcatattttctcagaaatgaaatttgagtgattggaataagaaatgcttttccttggatttgaaagaggttttgagtgagtatgaacgctcacctcctatttcttgggtctgacaaaatcatgacatccttatttaaaagagattgtccttttcttttcggttacctaattaaaattgactgcagactaaagaatgaagcaaatgggtgccttcttcatcgtatagctaaaaagcttttctgggtcagttgggatcctggtgctggagctccaataatatcctgactcctgagtcttctgaatgtgaaagcacagtctggaaatgatgtctatctggccctcttagaagcttggatgagcatgatgaaataataatgtacttggtttctctagataggactgaactgcaaatatttaactcacttgtaccgccttttaaagctgtgataaatgcttctattctacaactgttttctaatggacatggggtttcatgtttttgatcttatgtattttgtaatgtgcttcagagtccag

SEQ ID NO: 94271 - DNA, 456 bp, Eucalyptus grandis
  Intron number 1 from transcript Egrandis_v1_0.024035m (loc us Egrandis_v1_0.024005m.g) derived from phytozome v7.0 (c hr-ID scaffold_8; pos 48203675 to 48204130)
aaggtaatcttgagtttcctctttgccaaacatatattctagtttggtcggaagaacttcatgagtctcatgcctagcatacttctatttttttccctttgaagctcatttgagagaatatttagttatcatattagtcagagtcctttttcaaaacatggatttttgctgacaaagtttattttcgtgtggatacagaggaggagaaataaccaatgtctctaattcccttcccccctctctttcaaaatctcctatagtggagaattatagtgcttttatagtgctttggcaggcaactatcatggccttggttactttgggtctttgaattttcatttctcttgctactcgttagatttatggattcattatgattgcattgtggacgtcgtcatgactgagcatttaaaacttgcagaggccgagaggtgccacaaagaacaggctgaaaga

SEQ ID NO: 94272 - DNA, 553 bp, Eucalyptus grandis
  Intron number 2 from transcript Egrandis_v1_0.038037m (loc us Egrandis_v1_0.038037m.g) derived from phytozome v7.0 (c hr-ID scaffold_10; pos 35393935 to 35394487 reverse strand )
gacgaaagtactccctttatccatttgtacttttgtcgggttttagctcatttgctctgtttttcactggtagaaatatatgagcacaaggttgatgtgagtcgcagacaggtctcattacaatcacacatccagagaaagaaataaagagtcagagaaaagaaagataacggtcgaagaggagaggagagagacaggggagttgggggaattgttgtgaagaccacttaacctaatatgttcatacagattagtgacttctctgtggcatttgtctactgtcattgtcatctcttagtgtccatggtgaacctcaggcatactggctgggaaatagctatcatcttagcaagtactggacattcttcactaacatgaaaacatactgaaaaattgctttcatctaagcaagtaccagacattctttgctaacatgaaaatatacataagattgtcatgatttcgacctgtggcagataattttgatcagtttctggaattcttcttttgattagtttctgggattcttctttgagtgtagagcttttagcta

SEQ ID NO: 94273 - DNA, 778 bp, Eucalyptus grandis
  Intron number 1 from transcript Egrandis_v1_0.035229m (loc us Egrandis_v1_0.035229m.g) derived from phytozome v7.0 (c hr-ID scaffold_1; pos 37973833 to 37974610 reverse strand)
ttgaatattgtattcaatcaacacaaaaaaaaggggttgtataaatagaacctctgtttctatcgaagttcctttaattgttcatatgcaccaactaattatgaaatcgcattgatagcctcgactcgagtcctattctatattcaattcatttttgaagtgaatattttttcattgcataagaattcatctgattctacttgatttttttgaattgtattgaatattgtattcaatcaacaaaaaaaaaaaaaaaggaggtgtataaacagaacctctatttctattgaagttcctttgattgttcgtatgcaccaactaattatgaaattgcattgatagcctcgacttgtgtcctagctcgtctgagagctagatttgactcatttgtttgtctcttaccttcagcttttcttaagttagcttccactagttcaagagtttcttgaacttcttgtggatcaatatcactaccattttctgcgtcatttactaaaatagtaatctcattattgcctattctagcaaaacgacccatgagagccattgttaaccgttagtcgttaaggcgtattctcaaaatacctatatctacagctgtggcaataggtgcgtgatttggtaatacaccaatttgtccagtattagtagattaaatgatttctttcacttttgaatcccaaacaattcgattaggggttagtacacaaagatttaaggtcatttcttcaatttactctctatttctaagttcgtagcctttgcagtagcttcatcg

SEQ ID NO: 94274 - DNA, 619 bp, Eucalyptus grandis
  Intron number 4 from transcript Egrandis_v1_0.020221m (loc us Egrandis_v1_0.020221m.g) derived from phytozome v7.0 (c hr-ID scaffold_10; pos 20312866 to 20313484 reverse strand )
ccaattgtggcaaaagtgtgtttctatttccacaggtaacttttcatttttttcctttcacgacagattgacagtttaatgtccataagccgtttcgctatgcaatttaataggggtactagcactttcaagatgatccgttgtggttggagtttaattcatatatggtccatttaatcatggcacacaaagtctcatctttgtttacgaggcttatttttcatgtggccaatttctcgtctttgaagacatcacatcttatgatgcgctctgcttggcttgtcatggagatctttgagtgtgatgtagcatttgtgcagttttttttgttcatgtgctcctcttctattcaagctgtactgactcttatatatttcgactttctttgccgtggtctctcgatttaccaatgaagttacactagtaatggaccaaatctcacactagaaacttcgagtcaagagttgtgtttaaggggttagttaggattctgagtataaggaaatgttattaattctcagtaaattctggtggtcaccacagaacaaggttgtgtatcttcatcataagtttttagttatcgcgcatctaattgtgctctctgtcaatggtcagtgtt

SEQ ID NO: 94275 - DNA, 962 bp, Eucalyptus grandis
  Intron number 1 from transcript Egrandis_v1_0.000683m (loc us Egrandis_v1_0.000683m.g) derived from phytozome v7.0 (c hr-ID scaffold_10; pos 5278661 to 5279622)
tccggccgcgcccggctcctctcgtcttccgtcaggtatttcccgccattctccgccgcgaaacctaagcattttctctcttcccccccacctcctcccttcgccgcctagggtttaagcaacattcccaagcttgcgacttttccgtctggggaaggagctcgttcgattctccttcgtgggtctttgtttctttcttcccgtcggtcgagcggaattcgggtaattggggtggagttcggacaaatttagcaatttccggttcgattcgatgttttcggcggaggcttcgcgaatgaggcgagctcgttcccgcgatcggctcgggctttgtcgttgttggagtgggggggatttggctgaggtcgatcacctgcggacgggccgtcatcggtcgttggtggcttcctgttgcgtggtgctgtgtttgcgtgtgggtagagtccgtgagcatctggtttccttgctccgatgggaacttgcgggcatttctgggcactgcgattttttttttttttttaaaagaatgaccggccttttctgatcttgagaagattataaatctgctggggtttcgattaatttgacgaattttgtgggttggtaatcaaagatggtgactgaacagaaaaagttgatgcccctagcatccttgttacgaaaaaggaaagaacctcaccttttacctaaagtgggaaattgttcatgggctgggcaaggccagttattctcagtcgaaaattaaaaaccaagctaattgctctgaggagcattggtggactctaccttcctgttcttcgccctgtcctcctggaggcatattatagccttatcctagctttctcgtctaaaactggggcagcgctgataagtttggtcatttttcgtgtacaagtggttttctatttttctgatgtacaagtggtgtatgattatcttaacagctttttgaggatctggaa

SEQ ID NO: 94276 - DNA, 1029 bp, Eucalyptus grandis
  Intron number 1 from transcript Egrandis_v1_0.010713m (loc us Egrandis_v1_0.010682m.g) derived from phytozome v7.0 (c hr-ID scaffold_10; pos 29730485 to 29731513)
ggacgactggttccggccctggcagggagaggcaggtacgtcgggctccttttttcttttttttccggttctgattttgggtccccaaggatttagtccgcgtctggtgggagatcgagggaacgaagagatggattgcggccggccaaggacaaccggccgccgagtctccgccggcggcggagggagagaggccgccgggaacggaaaggtgaggagaaagtgcggggaaatttacctggggagagcagaaaaagcgaaaggagcggaaggagcgaaaaagaagaaaaaggggtaggacaatgtggggcggccagcggccgggcggctgtgcgccgcacgtgtgcacgtgagcctcgctactttttccaggcggcttcgggccaggcgtgctcctctgcgggagcccgcatgggatctagccgtgcgacccgccgaagttctaaactggacgactttaatgacagtgcaagagtttccggaattggattgtgtccagtagataggttgcaggatctcgtcatgcgattacccattaagagaaagatgatctcgatcctgcaaaatcttagcttctgaaggggcggggacagagaaaatctgcacgaaagttttgtcttttcgaagtgttggaggagtaaaatttaatgggtgcctgcaaattcttattagcaggtgggataaatgatttagtacgagaatgtagacatcgatattaccaagatttttcgtgggggcagtgatgtttccttgccaagatacatatgaggtgcgcagatatgcattaagaaattcttgtcttgaattcatggtgctcttacatcgtttttctgttccaatggctagataaccgaaacttgaagcagctcggatcgaactgaactgaaccaagctgaaatgactcgattcaaatgcgattagtttgatgttttttgagatgtcaggcgcggtttattaaagttcccatctttctgcgttgatgttgtgtttacagattacagtcaagtattgagagaaagtggaaaaacc

SEQ ID NO: 94277 - DNA, 344 bp, Eucalyptus grandis
  Intron number 1 from transcript Egrandis_v1_0.017067m (loc us Egrandis_v1_0.017067m.g) derived from phytozome v7.0 (c hr-ID scaffold_1; pos 39575060 to 39575403)
tcgtcttcttcttcgttgctttgcttctctccgaggtaaatgaaactcaattattcgcgctattctcgaatacccacgatggcgttacgtgcaattgacctgtagattttgattccagtccgctgttgttgttcttggtcagccgatttgggctccgcccgtcgacatcgttgtcgattcggggaacacacttctgggttgatcatgtcttgcgcatggcaatttttgttggttttttttcttctttttcctaatggaaagggaggaattgggttgactttatttagcattggatcaaaaaattcgcaggtgtgtggaaaccggctgggggattcagggaagta

SEQ ID NO: 94278 - DNA, 669 bp, Eucalyptus grandis
  Intron number 2 from transcript Egrandis_v1_0.017067m (loc us Egrandis_v1_0.017067m.g) derived from phytozome v7.0 (c hr-ID scaffold_1; pos 39575535 to 39576203)
gtacaggtacatgtgtatggcatcatgagagcatccattcttttgatgtttccttgtatattagattgattgcttattattagcatttaagagcatttttttttggttaaggtctggtccaggagttgtagaggtagcagagctttccctgttatgtttggggatctagcctgctcaagtagcaatcaaaagaagagagctggagttttttatcctaggattgaatgttgataagttgctgaaaatgtgctaagtgcaaattttggtttgctagttatctgcttcaagagattttttttcttgaatgagttatatttctttttaacaaattcttgtacatttttatggaaccttcttttactattcatgaagtagttgaatatgatctccctaggataaccgacgtaaaaatctttagccatgtacttaaagtaaaaagaaaaaaagttggatcacgtggattcattgagatcataagtatggctaggaaaatgtgtggtgaaagaaatccatttcgatatctcatcaagatagtttatttctgtgatattccagaatggcctcgaatgtttctttcacggagaatcaacttagtgcttgggactctgtcaatgttctctctaactaatcattgtgccgtttgtgcagtggggccggggggaagccctg

SEQ ID NO: 94279 - DNA, 829 bp, Eucalyptus grandis
  Intron number 1 from transcript Egrandis_v1_0.001976m (loc us Egrandis_v1_0.001976m.g) derived from phytozome v7.0 (c hr-ID scaffold_10; pos 38011175 to 38012003 reverse strand )
gcttggaagagatcaggaacgagaacgtcgacctcgtacgttcgactcccccctcctcctcctcctctcgtttttttgttttttttggccgatccttcgttgttgcctcttcccgttcctgctttgttagcgatcgcctctttgcttccgagtctcccggatgattccgtgtcggattgacgcctgcatgtgccttggatttgaatttatcgttctgtggattaagcattccttctctgcgggtgcagtttagcgttttgatttaagtttttggatcagtgttttgctgctactgcggttttgtgtcgtgtgatttcgcgatgagtcctattttgcgtgatctctcgattagtctcttacggttctttggcttctccacgtgtatagtgcagcaagtgaaagtcatgaccatatattttattcgctgaacttcatcgaccgcttcctgagtaatgcttacattggatagcatcgtcattgcctcgttcatatatgtgatcgcgcttggcttctattgtttcagtcctttgttcttcgcaccatttttctttgggtccgtttcctccattgtgatcggctaagcattatgttaacccatgattggtttaaaggtgtgtctcatgtttctgtcggatagttgaattggattgtcttagatctctacttttcgcggcagaagaatacacctttttaccaaccttcataaccaaatttgctccttaaaatgtctgcctagcggcatcttttttgttgcgcagtgttggttaaaggatcataaatctgaatagatactgtttatattattcttcccaggagcgcataccagtcg

SEQ ID NO: 94280 - DNA, 474 bp, Eucalyptus grandis
  Intron number 1 from transcript Egrandis_v1_0.000747m (loc us Egrandis_v1_0.000747m.g) derived from phytozome v7.0 (c hr-ID scaffold_8; pos 6407903 to 6408376)
acggttgttcggggcgtttccagcactgaaaccaggtctctctctctctctctctctctctctctctctctctcttcggtatacttttgtcgtctgatcaagaactgggttcggagttaagtattgagttgttttatgcaattcttgatccaaggtttgtctaaggtttgtctgagtctctagtgtggatggagtttatgtggggtctctttcttgaacgagaatcggtgcggaaaaaaacgagtttttttgagttcttcttgcaatagaggctagcggcattaattatctgataccgtcttgagttgaggtttctcttcgaatgcggtgttaaatgacaaagaatgatagggcggtttgtgtgaaaattgctatttaagttgtttcgacaaggtaggaggctcctggtagaagctataacattgtgtgtttattgcagagaaggggagaagaaggggaagaagatcaaatcaa

SEQ ID NO: 94281 - DNA, 787 bp, Eucalyptus grandis
  Intron number 3 from transcript Egrandis_v1_0.004543m (loc us Egrandis_v1_0.001202m.g) derived from phytozome v7.0 (c hr-ID scaffold_10; pos 9200153 to 9200939 reverse strand)
gaagatccggcagttgcagaagtgagtcttccattaagatgtcatccttgatcttctataactttctgcaccacttgttgcttcagttagctgaacatttaagatccttgacacacacatgcactaactcaggcactccttatgacatagaccaagtttatcaaggagaaaaaattccagatgaatagaatgtatattagtcatatgtaatttttcaggcctcagaaatagagctgggtggcaagttgcagtcctgagcattagagtagtcacatctttgttgtagaagaggtaataatagattccagtcatgctaagtggagactcttgcagcgtgttaaaatgcattgtcaggagagattatgtatcacgtgccctatgactgtggccaggttgagctagtccttattttcaaatcaaatcactcgctagtttaggtcgacttcgactttaatgatttttttttaaaaagaggacaaaatttcccaaggaccgattactaccttaccctaatcttgattgagtctttaatttcctcttgatctactatgttggcttcattctgaaacaaccattaaacttgaatattctgcaaatacagaaagttctttctgaaatagatactcaagttatggaagctccagatacttattatggcttttaatatttctaggcctagaagactctgtgcattgttcctttgtgttttagtttagtcgcagcatgtttcctttttttttttgtttccttttattaatgtaaataccttttttgtagttggaagata

SEQ ID NO: 94282 - DNA, 1041 bp, Eucalyptus grandis
  Intron number 1 from transcript Egrandis_v1_0.007174m (loc us Egrandis_v1_0.007174m.g) derived from phytozome v7.0 (c hr-ID scaffold_10; pos 17574698 to 17575738 reverse strand )
aagtcttttacaacaagacccaggtgcgtggttgctgcgaatgcattcgttgatgaagcgagtcgtttggtggtgtttaagggatttgggtctttgattggttagcggtagttttcaatgctttaattttaccttttgctgagatttatccccaagtattttaagaaagaggtaagacagactctgggtctggtctggtctggtttggtttggtttggtgtggtgtggtttttggcgctgggattcagtttcgcacgtgatggcttgattcttgtgcttgattttcagtcgggctgttgggataaactggcaaaaaaaaaaagggtttttagctgggaagtgagggatcaagtggaattcctgaacgctttttcctgtttcaagtttgagcataggtggtgattattccgatagctgcacccgacttgagcaatgccttgttactgtttttgtagccttccgagatgttctagttaaagtgcctagccattgacaatcaatttaatgaatttctacctttttcatagttgaagatgaatgaatgaacttgttttgcaaagtggcactggtatacttgaattatgtttgatgcgtctcatggtgtgagcaattactaaatgcaccagacgtggtgaatggggtataaacaagaccgtaagtaatctatatcccgcatcaaaaaaagttcagtgtggaaagtcatctcttcttcaagactcaaaaagacgttctctgtgtgtgttgttttggtgttcagtattcttcatcttttattcgacaagttgttatctagtcagtgagtgtgaggggaattttagcctatctcattgtaacttctttacacatacaaaagctttccatgaaaaagtcatgtcatgcctgcattatatttattctagtagttttttctctagaaaactgcaactgaaaatataacaaggttgtagatgtctcttgtatttaattgctccttgaaaggatcctgattgttctctcttgtaatcaggttaacaatagggacttatcgattgcggttctgag

SEQ ID NO: 94283 - DNA, 1013 bp, Eucalyptus grandis
  Intron number 1 from transcript Egrandis_v1_0.017967m (loc us Egrandis_v1_0.017967m.g) derived from phytozome v7.0 (c hr-ID scaffold_8; pos 24059821 to 24060833 reverse strand)
tccccagttaccgcgaatccttccatcctggttcggtaaggacgccgaagtcttttcgtttcagattctcatcgaaagaaaatatgggtcatcaactcggcgtcaactgatgttcctcgttgtcgaaactgggggaggtgttgcataaaataagctccgaatgtcggatgttgtgggttttcttgagtacgatatttttgtccttttttttcaccactttgttctggggattaattattttgttttaggagaatgttgtggtgtctctgctggtggttatgtcgactagtgtagaggtgttgcataaaataagctatatttctgttcattttttttcctatcaaggctcaatcttttttagctctgcaagtgtgacccaattggtggtgcctttggaagtgtagagatggttataagaatggaagatgtatcgaaaagcctagtgtgttgaaagaggaaagaacctcgctttcgctatttgtcatagaattttacatgtcaaacatttacacagtccgcataaatcaaggtgctaaccaacgatgctttatcagtcccattcatgtgtaagcatgatgaatggtgacagaaagcttgcgcatgaaataggacaatgatatgtatttaatggaacataaaataaacatgactctggaataagcagagttttgtttgcgtcctttagcatattgcttaggattctaatgtatcactgtgaatttcacttctattcctgctgcgatgttaaaattatcttcctcttcttctaggtttgttagaagttatattaagtgtttagggagctgcattttgacttacctcagttcaatgtgactggagttgcaaacttttaaagtgaaagggtttctggtgattgcaacatgtttgattatcaaattatctttatttccgatctttccttcttgtaagttcaatgtctatttccgtttgctaaatgtgtttccacttgtattctgaagtatgtaaaacattgatgcagcctattattggat

SEQ ID NO: 94284 - DNA, 619 bp, Eucalyptus grandis
  Intron number 1 from transcript Egrandis_v1_0.054363m (loc us Egrandis_v1_0.054363m.g) derived from phytozome v7.0 (c hr-ID scaffold_8; pos 20321050 to 20321668)
aaagagctattggtgtaccgagtaatcacgcagaggtgttcttctggaaaatttctcgtttcttttaatttatacattagaattgattgcattattttcaatcgagaaataaagtttgatctatatttaatggtaatccttatttatttttcaaatagcatgcctaatgcataaaaaatataatgtaccaattgtgaaaagaagacatacttatgaatcaaaccctttctcaaatcagcacaagtatcatcatacttgcacaattgactcgtcttgtgtagcacactgcaattgctagtacatctttgatgtgcgtagtcaccaatgattatttataatttgcaaaagaaaaaaaagagaggcaaaaaactcactgattgcgaatgccatttcctgcaggccacgtgaagtttttttattgggaagccaatagagaaagctaactttttctaaagagatgagatgctttactttccgtctaagaaaaagaaaaacaaaggactaaagatctaggggctaagcttgttcgtccctcattgctcgtttattttaacctcccctgtttgtttcctgatcctaatggctgctgcttcttcttccaagctcagaaggagttacg

SEQ ID NO: 94285 - DNA, 929 bp, Eucalyptus grandis
  Intron number 2 from transcript Egrandis_v1_0.010117m (loc us Egrandis_v1_0.010117m.g) derived from phytozome v7.0 (c hr-ID scaffold_8; pos 26039740 to 26040668)
aaggactcgggatctcaggttggttttgtgttgcctaggagaatgctggttctgtcttgaaattgttgaggctcttcgttgcattcggttgctattgaagtggttgttaggtgccaattcaagaatccattctcttttttagtgtgtttctggtccggcttacaacttatggcttgaggttatttacttggactttgaaatgattgtcctgtgataatgagatttactcattgtttgctttgttggaatgattaatgttttgatttggatcctccgtgtggttccaacatgttgttcaactgagctaaagcaatactcattgttttccctgctaagtaaacaggagcgaatttttggtactaaagagtggagagatcgagtttatagattagttcctgcagtttctttcttttgggcttgtgagtggagtgcctgtgtcttgtttagggattgaatatcacctaaattgatctagctacgcttccggctcgcatctatctgatctaggacagggtttctaaatgtctgtaagtcatctgaagaagaattgagcatgttaggattaatgttcgggctactggttcttcagctcccgacctaagtgtaagaactgtgctccatacaaagtggaatttgaaatttttgcctttatctatctacagcctaaccttcagcacttttaggcagttgcgcatttcactgttactttgccctttatgtttttaagccccagttgcttctttgcttttgggttgtctgatgttattgacaacctccattttacttcaaatatgtgattgcaagaatgtgtaatcatgctctttatcatatagtagacttcaagttgcttggattgagtcatgctgtttacgagtttgctgttcttacttataggtggtgtctgatcgttctcgcaaatctctaaggtc

SEQ ID NO: 94286 - DNA, 862 bp, Eucalyptus grandis
  Intron number 2 from transcript Egrandis_v1_0.054896m (loc us Egrandis_v1_0.054896m.g) derived from phytozome v7.0 (c hr-ID scaffold_8; pos 54146524 to 54147385)
cgccttctacaacgtctgctgagattccttctcaggtcctctctctctctctctctctctctctctctctctctcgttgcgagttcttgctttttgtgtacgcgtgtctcgctgtttgtgggctcgccggtgagatcgagtttcgtgcttgagatgggtcggattctgccggcgttgcaagagatgggtcgtcggcgtttaggcgtttggcttccgttttccggttgttgctctggttttagctggttccgtgcaatctgagctcttttggctcgagaggttgtgccccctgctccgtcttccgcttccggtgctctcgccccccgcgagaattttgcttgagctgtggtttgagatcttggttaggcttgagtgagagaggtatggagaactatcgaaaaagaaagaaaatagaggaaccccgatgcgggatgacacgagtgcgattaaatttgagtcgagcgcgacttaggacattgcgacgtgttttctggaattcgagttactttcgtttggaactgatgatcgacgcggtgacggtgacaggatatgatttggcgcccattcggaggctttgagaagtttgcagatagtgggaagattagcaggaactatgattattttagaaattatacaactgcctccaaaagatgagagctttacctcgttgaacatttgattggttttcagaatttgcggcaaaacaaaacaaacttaaaaatgagagaaaactcaatgctagatttacattgtttgacctcatgtgtacgtccaaagaaaggatggacacaaattcactgttgaaatattagagttgaaaggcatgaagtaaaatcatggcatttctgtgacatgcagcttg

SEQ ID NO: 94287 - DNA, 1023 bp, Eucalyptus grandis
  Intron number 1 from transcript Egrandis_v1_0.015692m (loc us Egrandis_v1_0.015692m.g) derived from phytozome v7.0 (c hr-ID scaffold_10; pos 4770603 to 4771625 reverse strand)
gctcaccaacaaggtccccctcgatcaacagcaaggtattcccgcgaaacccctcttgattttccgacctcctcctcgcgcccctggtgttcgattgtcgtcgtttcggagcttttcacgaatttcgggtgggatgttgtgcaggcgtgccgcatcatcttttgggcaccgtgagcccgaacgtggagttcacggccaaggcgtttagggacgctgctgttcctgtgagttcgcctcctttgaccgacgattacatgtgaatctcatttttgtgttttggtgagattgaaaactttggtttttccccgaatttcagctcattgatgagatcttgtctcgaaataagttgccggtcatcgttgggggcacaaattactacatccaggtagagtgtgcagaaccttatgctcctaacgcgagattacaaagatgggttcgcataaattttgtcgctttaagtccatccctcatcaaggtcaattttttaacttagtttcctgactgaatgtgagtgctcagcttctggactatgagattatttagttgccaatgcctgatggggatggctgtttaatgtctctacatgtcctgtgtagtttttgcacttatgatgctctgcctgattctaccgtgtgaatctcagcgatgtatctgtggctggaaaacggaacttttgatcttctttttactcaatttggatctatagcaattggtagtttgggagatggattttgatgggtatatcccaggagaaatttgttctctttaggtgtttgattaattttctttatctctttgttgctaactaggctcttgtgactccgtttcttctggatgattcgatggatcacatgaatgacggccacttagatgaaactcctggtaattgttactctcttgcttgtgcccctgcggttattgtacattaacgattgcttcgttgaatctcgggtgatgagcatgacgattgcgaagttgacttcaatagagacagggaggctcccacctttgatcgcttgaaag

SEQ ID NO: 94288 - DNA, 817 bp, Eucalyptus grandis
  Intron number 1 from transcript Egrandis_v1_0.012089m (loc us Egrandis_v1_0.012089m.g) derived from phytozome v7.0 (c hr-ID scaffold_1; pos 21202738 to 21203554 reverse strand)
ctagtaagtacgtcttcgccatttttagctttccgggacttgtccgagttccactctttcttgttgcgaacgacgaaccgacttcccggccctgtttctgtttgattctcggttcccttgaactgtgcatggcttggttgctttccttagtcttgtgggttcgtgccgaagttcgtacttgtttgagagatggcaattcgatggacttctagtcgtgcctatgctcgttggttctttgctccaataatgttcttcttcttcttcttcttctttggtggtggtggtatcgataactggttggatgtttcatcaactcgtgctctttcactttgttcttgctctctgagatggtttgtctacttgttctagagtttcgatcttttcctaatctgatgttcaggttgggctggttgcctgcattggattctacagttttttgcgtttcttgggacattttcttcgaatctgtcccgtacagcgattttgctgcttgtttgctgaatattactggcgttgtacggtggaagtggccgatgtactctcagactatgtttctatccggtgtctgttattgtttctcctggagttcaccataaatttagagggctgatatagtttgcaattaccaccctttggattcattcatatcagcagggatggcttgctgaatctgatgcttgtgtatgtgtggaaaaatgagttatatccattcgcaaaataaaaaaaaaaagtttctgacaatatactcagtttttaatttcccgtgaatcatttgtgcctttccagggagcattgctcttgcttctggcactgagca

SEQ ID NO: 94289 - DNA, 911 bp, Eucalyptus grandis
  Intron number 2 from transcript Egrandis_v1_0.007153m (loc us Egrandis_v1_0.007153m.g) derived from phytozome v7.0 (c hr-ID scaffold_8; pos 36849616 to 36850526 reverse strand)
ggcaaaaccgttgaaggtcgtgattgccggagcaggtgaaactcctagctttgggaatctctgaaatgtttaatttttgtgcgctttattttattgggtcgctgatttgcgccactgtgcttcagttttacttatggttctcttggtttaacgctctcggcactggttgcagtgactgctttttatatgtagattatctagtgaagctaatttacgtaaaggacggtgtttgccaagctatatatcacgtcgaaaagtcaatttccggaaccacaactggaacttataagctatgtccatctatgaattgctacctacccctgtaggtttattatgttttgaataatttgtattgttatcaatacatgggtatccagtaggaataacttatttcttatgactattagcaagtggcgatgctgcactccaatagtgatgctgtctgcgctgttgttggaggggagaagtatttctacctatactttctttgatggaatgcctttgcatgaaattctagcgccaagtgtttatcttggcttgagtaactataaggggagaggttttggggatatgtcttgtattgatcatgataaacttcagttccttttgttttcctttgttattagacattcaaagttgcgagcatgttatgttaagttggattcccttgtttattgctgtcactctatcctaactaatttcaaaggaacaacaagcggtaagattcttcatttcctttctagagaagacggtccaagagagaacaatttagtttcaccatgttgtatgctttgattttagaattactttcagtacgtgatgactgctgctcttttctgatgctagagttgactctttcttggaggtaaattacaggtttggctggcttgtcaacagcaaagtacttagcc

SEQ ID NO: 94290 - DNA, 855 bp, Eucalyptus grandis
  Intron number 1 from transcript Egrandis_v1_0.038387m (loc us Egrandis_v1_0.038387m.g) derived from phytozome v7.0 (c hr-ID scaffold_1; pos 3761706 to 3762560 reverse strand)
tcaaggctctttattttggaggcgtttcaaaaaaagtaggcatacgacgtacaaaaagttcacgcccttctttatctcgaaagataggatggggggaaggcgaggaagaaacagatgtagaaatagaaacaactttcgaaacgaaggggctcaaccctggacaggcggtggaaactaccaagctggagtcccatttttataggaacttctgtaccagaggaacccttaggttttcggggcattggattctcaccaatgtttgcgttactcaagccgacattctcgcttccgcttcgtccacccctgctctcgcgggtgcttccctctaaggcggaagaattgaggcaaatctagctctcagacgagctaggacacgagtcgaggctatcaatgcaatttcataattagttggtgcatacgaacaatcaaaggaatggaatacatatggtgagctacaacaatggttaaagagcctaacatagctaggttaagagataattgagcatgccatgacgttgttaggatctcgtataggcctttatggccctggcctgtaaatggactttgataggtgcaattgctgctgctcgtcaatgagaaatctttataactattactagcaatcaaaattcaactttgttttctgttatcaaatccatttatcttcaaaaatatttgaaaactgttcatgtataaaatagaaattctttattttgatccattaccaaatatcaatctattcctttgttttgtacttgttatattatagtcaattgaatacgttgtggaagatcccctatatggataatacacattccagttgaccgagcctaattctaattgttttgttccgaa

SEQ ID NO: 94291 - DNA, 866 bp, Eucalyptus grandis
  Intron number 2 from transcript Egrandis_v1_0.025532m (loc us Egrandis_v1_0.025532m.g) derived from phytozome v7.0 (c hr-ID scaffold_10; pos 29366692 to 29367557 reverse strand )
aggtaatctaaacttctctctctgtgcaggcgcactcatttgtgtgcgtactcaagtttggttgtatcctaatgatagttttgtcttttatgactcttataatggctactgatgattattcacatgtatagcaatctgaataagttctggaacagttggcttggctctgcattgatttactcaaaatagggtaggatgcattatgcggatttgtcatttgtcggagttagaggtccattaatcattgaattggagaatttgttgaatctccctcaaatgttgtgtgatggtatgtactgattgattgataaaagcggctttacaataaggttcatgatatttctggagcaatgaattttatcagtatgatagaggacttaggcaaagttgtaataattcccgagtcaaacaacagctgtgggcaaactgagcacctttcttgagtactagctcattgaatggaggcagacttccaaagttgtcttggtttagtaatggaataattgacaagcagcagctttgccacctgctgtgcataatacttccagatgtttgagtcttcaccttccaaattagattgcatttatttcaccagaagtccctggcacccatcaatggcatcaatctctctcatctaattctctatttgctgttctgtttcttgttatttttatttttgtgcttgcccccttcatgtctttctttgttgtatcccatatccctccatgagtactattcgagttgtgttaaacattaccaatcgatgcttagatctgagacctagtgcatatcatctgaacggttttcatcaattgaaatgaatgtttccagtcaaggctggcgctcacaccagagcagataaacaa

SEQ ID NO: 94292 - DNA, 626 bp, Eucalyptus grandis
  Intron number 2 from transcript Egrandis_v1_0.021541m (loc us Egrandis_v1_0.021541m.g) derived from phytozome v7.0 (c hr-ID scaffold_10; pos 24855839 to 24856464 reverse strand )
attggtatatgtggcgaagtttatccagctcactgctcctttttttgcttgtgtgcatgtatcatcattgtagtaagagtctcctctgtcgtctttgtacttgcacttatttattgggtcaattgatagattcaatttgtttttacccttaaaattgtgaggcaatctattggagagtttttctttaatggttgcatatgaatttatcggatcagacttggagatcacaaagaagatggaagtgttaacttatgaataagcttgtatcatccatttaatggagtgtcaccatacgatatcctaaggctttgtagaggcatgtcgtaccttccaaactcatacttgtttgtagttaagaatataattttactctatagtgtgcattaccaggtatgatgctggtttatgtttttctcaataatgtcttgtgtcatggcctcttaattctgataatttcttcaggcacctttgaacggttttgtggaattctttatgaaggtggaatagataagcgagttcagtttttgattgaaggcctctttcattagaaaagctaagtttcaggtcactaaccccaatatctctcaccagggtgagaaagtacgttttttggtccggagaggcta

SEQ ID NO: 94293 - DNA, 863 bp, Eucalyptus grandis
  Intron number 1 from transcript Egrandis_v1_0.045493m (loc us Egrandis_v1_0.045493m.g) derived from phytozome v7.0 (c hr-ID scaffold_8; pos 29753056 to 29753918)
atacaggtctatcatcttcaggggatgatccttcaagttaccaaagacttgttggaaaatttatttacctcaccgtgactagacatgatatatgttatgaagtgcaaacacttagccaattcatgcatagcccaaaactatcccatacgaatgattcccttaaagttgtgaggtacctgaagaaatgcccaagacttgggatactcctttcttgaggctataacatgaagatggccacctattgtggcacggattatgcaacttgccctatgagtcaaaggtctgtcactaccttatgcattaaacttagggaaccatcactttcgtggaaattcaagaaacaattcattatgtctttgtcataagttgaagctgagtatagagtcatgggtaaaactgctggtgaaatagtgtggatacgaaggctacttctagatcttggggtacaagataaaggaccaaccttactatttcatgacaatgatgcggcacttaaattgcagcaaatcccatagcacatgaaagaacaaaacacatagaggttgattgttacttcacttgtgacaagattcaagaaggaataatcaagactagaggaattggaattacagaacaaccatcggacattttcacgaagcccctatgtaaaagacaacatacacatctattgagcaagttgggtgtctttgacatgtacaagctgccagcttgaagggaagtgttagaagatgtgcttgaaaagataattgatttattgcattaattatagatcgtaattaattgacgtatcaatctaaaattagatctgatttcctttgatctttttaggaaatactatttccttttatttcccactcttggtg

SEQ ID NO: 94294 - DNA, 485 bp, Eucalyptus grandis
  Intron number 2 from transcript Egrandis_v1_0.006522m (loc us Egrandis_v1_0.005095m.g) derived from phytozome v7.0 (c hr-ID scaffold_1; pos 29335794 to 29336278 reverse strand)
tcgagcgggagcgcggcatcaccatcgcgtcgaaggtcagtttgtgctttggttctggtggagtttggcgcattgaggtgttccctgagcttcgcgaatgggtggtgtgaagtgtcgattgaattaccatgcagcctaattgcgtggttgagtgttgacggggccatagtttagtgttttggattaaagcgaaggtgaaatgatcttctgtaggtggatgagcaaggttttggtttaatcgtcattgtgcacactgattagtgcggtggagttgatgcgttgccgtgcaactttgaagcacctgtttcgtttttcatttgacttattctttgattagtgaattgttgatagattaaagtcctaacctttgctgtttgggtaataaagttttatattttcctgctgaggccatgttgtttatgttttagattacgtgtaaaatgaacattttcaacttgggggtatccacaggtaacgtccatcat

SEQ ID NO: 94295 - DNA, 646 bp, Eucalyptus grandis
  Intron number 1 from transcript Egrandis_v1_0.020973m (loc us Egrandis_v1_0.018741m.g) derived from phytozome v7.0 (c hr-ID scaffold_1; pos 16544619 to 16545264)
tcctcgtaagtgcggactctaatcctcagcgctcagctttcagacttcttttcctgtcattggtcaagaaatttcaaattctatagcagatttcccggctgatttttaatcctttccttattttgcccccatacgtaagaagtatctgaactgcagtgtcaatgattcgaaatggattcctagagctgaaataatgggcatagtgcaagcacccaaaaaaactatttgagcctctgctgcgagaaaggcgacaaatgtcgaaaagtcagaagatctattgacaaaatacacattgggtactgtgatgttgcattacatgtccatttataattattttcactttttccacaaacggaaacaaccgggatagtcatatacatgagggtcagctaagctttttcccgtaaataaaaaccccaggaatggatgaaaaccttagtcgcaagcagaagttttgctagggtattggtctgggaagatgagatattttagataaataagaacattaggaatcaaagaagaagtctctcatttactacggactacagtgcccgagaacttgcatcatacagtcaccgacgccagctagccaactgaggcattcattaatggcggtcgtagctttctctcgcagaacgtgatcccc

SEQ ID NO: 94296 - DNA, 756 bp, Eucalyptus grandis
  Intron number 1 from transcript Egrandis_v1_0.007188m (loc us Egrandis_v1_0.007188m.g) derived from phytozome v7.0 (c hr-ID scaffold_10; pos 1140822 to 1141577)
ccactgcaagctcatctcgagggggaatctcgtcggtgagtctttttccgtctacgaagtgttgatgttcggagggaagcttctctgagcgtcgaggatggagagggcgtggactagatgtcgggttgttgcgtgctcgttgattgattggatttgcagcgagtctcgtcgatagtaggccatcctatgccgtgtgtagtatggtcctatttctggtttgattgtggataatcatgttcccgatgctattcttagcttgtgaaatccccgcggaagttgttcaatgttcactggtgggcttaaatgttactctcgctggtgatttactactggactgaagaagaacatagaaatagaagtacatgacatccccatgtaacttcaattatgctttctgagattatcgagagagagagagaggagcaattagctgaatgtacttgaccgcacgaccactgtagacgcgcaagattttactccgtccacagttggtggagcggtcgaatcactggaaggccctatgatattactggagagccctatcgttgcactttgtttttcttttgcttcctccggtagtttgctgttctaatgactgctaattgttgtgccttccatttagttgtgtcttctctagaatatcggcactgccatttagtttgttctgttagtgattagtaatttaagagcttctcgtgtgtgtaatgtctttttctcattctggattctcttgctgatcctgttggcctttcttag

SEQ ID NO: 94297 - DNA, 1004 bp, Eucalyptus grandis
  Intron number 1 from transcript Egrandis_v1_0.017128m (loc us Egrandis_v1_0.017128m.g) derived from phytozome v7.0 (c hr-ID scaffold_1; pos 28250368 to 28251371)
cggtgtttctcaaggtatggctgcatgcatttcgcgtaaagttacataaataaattactcaaaaacttccttaacaacgtcaaaagattaaaattaaaattaaaatataaaaaaaatcgatagagggaattgtggaaggctgaccatagcgacaccggtgtctgatggttaagctgatggcagtagtcccccgcctcactcttattgaatgcttgcctcatgccacaattgttaatataacccatgatggttctcccttgtgggtaagtcgcttccttatacacatttgactcggcccaccaatagtgaaatgggcacggcttctattttttgtgagccaattagaatgtcagaatctgaactattgacctatgctccgatactgcatttggatctctaatccataagcttaggcctactagagggagattgcacgtaaatgaggcatagtataataacgcatttaagtgatgcgaagttcttctaacaatggctgtcacagttttacacgttaacgatgacctctattcactgggctgtctatcaacatggcaaccaccatcacgatgatcacctattgaggatgaccaccacaataattgtctcatcagttgtccggactacagatcatgtattcagggctatatcctgagttggtggaatcaaaacattttaaaaactcacgcttaaataaaaaaaagaaaaggatgatcgaacttttagcctctatctaaatcagtaattttttttgttcgattgaatatttcaaactatcaaaattcatacgcgaacaagggtaaaaattaatggccggaataataacattgaaaaattgtcgaaaagtttagaattaatatgaaaaaatcgaaaaatttgaagttaaattggctgtcgtacaagtttatgagtttttttaacaattatgattataagcatgtataattctcgtgaccatgcactgaaacacagtgggttctacacgactggggagacgaagactgcgt

SEQ ID NO: 94298 - DNA, 565 bp, Eucalyptus grandis
  Intron number 1 from transcript Egrandis_v1_0.043720m (loc us Egrandis_v1_0.043720m.g) derived from phytozome v7.0 (c hr-ID scaffold_8; pos 17199016 to 17199580 reverse strand)
ccggcacagcgattgcaatcgccagattaatctgggtaagtgtgcgtgtttcgtcctttctctgtagttataattctgatgatccctgaggcccccaaatgatgagatgagcttctgcctagtgtggattgtagaatttttgtgaaattttctgtgttgatgcatgaaatcaacctgtttttggcttggctgctcattagtatatttgctgtacttgagacatgtaccaatgctgcttgtgaatatgttggtaatgatatgaatgcatttgggcgagatgaggaactttgcaaatccttcacatgcggcgatgtcagcaccagattgacattgtaacttgtgtgatttgggtgcaagctatattcttcggtggaattgaatatagaaacttagtttgagatacctgggcagaacatggaagttttgtcaagaagactcaatgagagatgttgccacacttcgttattatctccttttcaggctttgtagaaatttcttttacctctggccacaatttgattgatgccattattttcacgcaggcaaaggaggagttactcacaac

SEQ ID NO: 94299 - DNA, 1051 bp, Eucalyptus grandis
  Intron number 1 from transcript Egrandis_v1_0.040841m (loc us Egrandis_v1_0.040841m.g) derived from phytozome v7.0 (c hr-ID scaffold_1; pos 9050021 to 9051071 reverse strand)
accccctcctcctcctcatcagagacaaggaccaggtaacggacgggcactctcaatttcttggtcactcagctagttcttgattcgcatggtagagctgatgattcggagctaaaagaattcacctgggttcgcccctgtttctagctgtaattgcttttctcttttgggtttttcaaggcttacacagattcatgtgcttcttcagcatgtagaatgagaaaaggaactgagcagaacaaaacaagggagaatttagcaggcttatgtcgtcgatggtctagaaaattgttggcgagggtgggaattgaaagacggtttagttgtttctcaagcactagagctttcaatgtcagaagattcagacaaccttattagggtcctgagaattaggatcctactggattttggagcaaaaacaatgtcagaggcagcaaaacgatgtagatccatataaacttatgagaaaatgctactttggtttgtcactcgtgcaaagccgatgcgtgttcgattagaatttgttcttctgcagaaaaaaccaaaaaggcttaactgatcaaacgatgcaattcgaaaaacagaattcgattagaatttgttcttctgcagaaaaaaccaaaaaggcttaactgatcaaacgatgcaattcgaaaaacagaatacgagtaaaagggtacagaatatctcatgttgagcatgtgagaactcttatctgtccggttactgatgtgcggtaggatccccggattcatagtatctactcgcgtagctatcactcaaaatgataagtcaagaactgtgtatcgctttgttgaagattcgagtcgatgtcaatagggagttttcggttgtacaaacgacacatttttggatgttcaatattgcaattcgatggtctgtttcgccttcctgaactctttcattgtttagcatggcttctcacatctagttgtacagaagcatctatcttctttacgaccactgaatcaggattaatcttttggactgcgcagaagatcagtcaactcctgcatcaaattgcacagat

SEQ ID NO: 94300 - DNA, 1023 bp, Eucalyptus grandis
  Intron number 1 from transcript Egrandis_v1_0.026629m (loc us Egrandis_v1_0.026629m.g) derived from phytozome v7.0 (c hr-ID scaffold_10; pos 2798353 to 2799375 reverse strand)
gaagcccctccgcctgccttcgaagctgggcaacagtctctctctttttctcttgtctctcggcatacgtttgtgtcgtgtggttgggtggtcaaaggtcgaaactttaataggaacatcgcgaaattttttaccttttggcgttgcgtgagaggcgatgtgcgaatcatcaaatttagcggaaaggttgttgagtgctggttcgatgattgcttgtttctgttgtctgatcgttcgatgattatgactgactcagtgttggtgagcatccttttcctgtttgtgttttttcaagggaaatttagttttagttcgctgaggatgcattgctctgattagttgtatctttttgtgttttctggagtgatcggataaccttctcatggacacccttgcatgcatgtgcattttgtcattgcgtttacgtttcctctgaattttgtgtggtatgggcgcatcttatactctctggacatatgtgattttggtgcttttgtgggaattcatttggaaagaaattatggacataaaagcatgaccatggcgttgttctcttcacagtcccctgcaagctatcgagggtcttagataaggtacctgcaaagcaccagcctttacgcggttcttgactgaatttacttgtggttgcttggtaaattttattgagaaagatgaaatacttcccttttagctggtcctcatggacccttgggcgaaaaaacattaaacatggtgcgctagatacagcccagacacggccctcacagttggtgtgacttttgtaaattgcattagacgtgaggtatggggggtcttagcaataattgtcctgatctttgatattaggaatttggctgtgtagcgaaggtgcttttgttcactcaatcttgacaagtttataccaaaagttttgtgtggtcttcttcttagagcatatatttctctcaagccagttttagtgttatgattgttctcttcacaaacacagcccattatttgtgacttggaagaaagtggtcacta

SEQ ID NO: 94301 - DNA, 568 bp, Eucalyptus grandis
  Intron number 1 from transcript Egrandis_v1_0.051691m (loc us Egrandis_v1_0.051691m.g) derived from phytozome v7.0 (c hr-ID scaffold_8; pos 17092181 to 17092748)
ggtaagtaattgatgtttgttatatgtcaaattatctacagctgaaaaactgatagatattgttaaattagtctttttaggggctgtttgtttgtgttctttcttccagttcatgaacacaattttatgtttttttattttgggaaacaaaaaaaaaatagaaatgcgtttgtttgcgtttttgttccaaatctatttttttattttcgggaataaatttggaatagaaacattaccaaacacacccttaattgaatatacaaagcagaaataatgctagatagtagacacaatagtcaaatatcaaaacttcaagctagcagattgtttgaagtcgattcttgctgtatggacaatgagaattttttattttagataaattgtgcatttcatagtatccgagtcattttgtcttcaggcgcaagttcaacctaatgtgttacttcttttcatcttattatttgctaatcttgttatgtaattttccttatgatgctagaggttgaattcttgccatggctttgaaatgctaaatcatgtttctctttcctttgagtgcttatcagtg

SEQ ID NO: 94302 - DNA, 362 bp, Eucalyptus grandis
  Intron number 4 from transcript Egrandis_v1_0.026529m (loc us Egrandis_v1_0.026529m.g) derived from phytozome v7.0 (c hr-ID scaffold_1; pos 22977006 to 22977367)
ggaacagaaataagaggaatctcttcgctgacagggtctgtgtgctgtctcattttttttctttatgattcttcaaacttaagtttgtatgttgttgacaacgaaaatgatgtatcccctgaaatgagtacaaaagaaatgaatagatggctaatggtatactattaatatctcatttgctgcatttgaattgagtgctagattttagaggaagtgtagtttgacgtggctgcagttttaacttggtcttggcttcctgcgtttgatttgttagacgtggggttatgtacgtgacacacgtgttctatctctatctaaagacattcatattgatgatattttccagatttttgatctatttg

SEQ ID NO: 94303 - DNA, 263 bp, Eucalyptus grandis
  Intron number 4 from transcript Egrandis_v1_0.029424m (loc us Egrandis_v1_0.029424m.g) derived from phytozome v7.0 (c hr-ID scaffold_10; pos 26383736 to 26383998 reverse strand )
aaggaaagccaaagagcttgtgggaggaattggcggtgagagttgcttttaaaatgttgctacatttggaaaaacaaaatctcttctgtgctattcgtgttagaacctgtttttatggcaaaaagtaatagcaatgcagaataattcaacctaatgtcttctatccttggggtttgagagacatgatttgaggctaggaccttatgctttgaattttgttgcttgaaggatatcggtgaagaatttgtggagtttctagagaa

SEQ ID NO: 94304 - DNA, 977 bp, Eucalyptus grandis
  Intron number 1 from transcript Egrandis_v1_0.048904m (loc us Egrandis_v1_0.048904m.g) derived from phytozome v7.0 (c hr-ID scaffold_10; pos 5400575 to 5401551 reverse strand)
ggtttggtcgcgttgctaataattgtgtcgagctggtgtgtatcatcgtcctcctactcctcttcttcttctttcagaggtgatctaagcagaggcaaaaggcgcctttgacttttgggtcggtgtcgtcgtcgctggttctcaatcgggtcggatcatccgttgtctttccactccatggcaatgttttcccaactgggtacccttctcgacctgtcttcagttcagtccagcgtttcatttattagtcagagagagagagaggtgatgcacctgcatttttgctccttcaatgaattcttgaatacctgggtgactctctgctgtgccgttcacgtttagaaagtatgggtcatctctcacatttaactatctttggtgatatgaaaaggtcttttttcctccaaaagttcaaaaagttcctacagtttagctagttactacgttggattgctgtttgatgacctgaagattcatccaatccaatgtcatagtgacttatgtctccctaagtggtaaccatagatactattatcaccccacttaggaattcctgaagtttcagtatgttgatcatcagattaaatctttcatgccaagggaaaattgcttggaagattctatatggttttcatcacattaaagcgtctctttctcgaggggaagttgtgttttatcagtttccatacatttttattctatatgtcataacgatgcagtgcttttcttctctttcttgatcgttgggtgtttctcaattgttaacttcattctcactttgcttgtcattcattttgtgtcccttttctgtcacacttcgctaattgactgttcaatcttttgaagcataatgctcctctcttcatgcgataatcagacctgaatattataaaagcttgtgtatttgccaagactaatgatcaagtgaactgcctatttcaggtcatataagacaactgtcttcattgggcagccac

SEQ ID NO: 94305 - DNA, 878 bp, Eucalyptus grandis
  Intron number 3 from transcript Egrandis_v1_0.038794m (loc us Egrandis_v1_0.038794m.g) derived from phytozome v7.0 (c hr-ID scaffold_1; pos 13461564 to 13462441 reverse strand)
gttgttcagtacgtattggtatgtggagtgcagatttctctttttcaagctgtaggaattatgtttgcaggggttttttcttacatggtgatgtcgtcctcatttgtattagtgctcagtggtcctaatttgaactttatttggtatattttgttcttgaactttttctgttaagtattgatggatctcacacttatatagacactgaaatagcatgcctttggaagaaaaaaccaagttaaaatgggtattatacattgaagcatacatttctgctgccaatggttattcctgatgatgttcagctcacagtcacagttgcatagagctataccaacacaatgatcacctgagcaatttgacatccttattttactagagaggaaaaccttttgagtgtttgctgtgatttggatggtgtatcttggcctaaactgattggtgcaggaggaagctggacttaaaagttacctgcattgttctagcctacagggggataaattactggctaagcatgtgtcgtaggagaccgaaatgtcactttagcttttgtttcttcaataaattattttattgaaattcccatgcataatccttcaatgaatggcatctttggagattctaatttgagatggattggatctgtctaggtagcgattgtgactttggattgtcacaagggtcatgaaatttagtggatatatgatattccacactttactatcctcgataagtgtcatcatgcgaagccagtaagcattaaaaatgtgcgttgggccattattgttttgtggatagggaaaatcttagtctttttgtactgatggcgtttcattatttgaacttatatattttgcttttctttattagatcttatc

SEQ ID NO: 94306 - DNA, 706 bp, Eucalyptus grandis
  Intron number 1 from transcript Egrandis_v1_0.000060m (loc us Egrandis_v1_0.000060m.g) derived from phytozome v7.0 (c hr-ID scaffold_1; pos 36258560 to 36259265)
aattaaagtggagaacatttttctcattgttggtgtttctttcaatggttgaaaacttttttcttgattagtttatttttttctttcaaaaaccaacataaaaaaatttgaaaaacattttctaagaagatgttcttcgtgaaatgaacgaagccttaatggaaaacttcaaatttagtcgagcttggaccaattttattatcagaattcgacattggcacgtggattatggataagcttgaggcataacttgcattaaagctggaacatcttcatattagatcgagactttacgaaattacttcttttataatatgcggcgggattacggattaataacttaataatttcgcactattccaatcgaaacaaaaaggagaaattacagaatttcaaaatcagaagagcgaaaaaataaaacgaaatttggcctaaacttctttcaaagaattcatggtttcatataggcaagtaccaattcggattttgtaaagtttttcttttacatcttctcttttcttcttttcctgtgcgaaacttcttttgcctccctccctttctctcgcttccttcgccgcgaccgtccccgccgtcggtcggcggtgcagtggccactatttaatcggccctccccggatccgaccaccgcaaaaccctaattatctccacaggaagagagagagagagagagagagagagagaggac

SEQ ID NO: 94307 - DNA, 907 bp, Eucalyptus grandis
  Intron number 1 from transcript Egrandis_v1_0.024207m (loc us Egrandis_v1_0.019694m.g) derived from phytozome v7.0 (c hr-ID scaffold_1; pos 6146817 to 6147723)
cgttttcaggtactgcttgtgtctttgttctgggacttgttgcgtgcaacatatgtgatgggtttccaaggatagaagaggtttgcaggtcctctcgttttattttttgagtgtgggcagctctcatttgtcatggctcactacagcaaggaatctcttgttgtcaccatagcgagtgtcgacactagcacatgttagggaacctggattttgtatgcgttttcaggtactgtgtgtgtctttgttctgggacttgttgcgtgcaacatatgtgatgggtttccaaggatagaagaggtttgcaggtcctctcgttttattttttgagtgtgggtagctctcatttgtcatggctcactatagcaaggaatctcttgttgtcaccatagcgagtgttgacactagcacatgtcagggaccctggattttgtatgcgttttcagttactgtgtgtgtctttgtcctgggacttgttgcatgcaacatatgtgatgggtttccaaggatagaagaggtttgcaggtcctctcgttttattttttaagtgtgggcagctctcatttgtcatggctcactatagcaaggaatctcttgttgtcaccatagcaagtttattttataaagcaagaaaactctgtaaggccacctcttggttcttaataattatcactggaactcgtaattgctgtgcatcaaatttgtgatgttcttaaactgtaactttgtagatctcatacctaagtttggtaaattgtgatggcgttctgactgtgagctgattctcatgcactcttctaaaagacttaaaagccaattctttattctaaagaaacattatcagttgtttgattttatcattgtttctcctaaagaaaggtacaaagcttcgaattgcggattttgtcca

SEQ ID NO: 94308 - DNA, 1006 bp, Eucalyptus grandis
  Intron number 1 from transcript Egrandis_v1_0.055253m (loc us Egrandis_v1_0.055253m.g) derived from phytozome v7.0 (c hr-ID scaffold_8; pos 68118731 to 68119736 reverse strand)
gtgaagagctatagcgccggcaagttagatttggcgtcggtggttgtcagttgaggttgtccaagattaagtgacctcctgcgagggttgcgcgaccctagcgagggctgcccgacctaggtggtgtgcaacccaagcaatcatcgcctggttgcttgaggtcgtgcgacctcaggcaaccttgattgatagcctccaatgctaaatttggctcacaggtggccatagctcttcgccagaccggcaaatagtttggtcctttttttaataaaaaataaaataaatagggacaaaattggaaatttaaagaattagccataatacttttgaaaaaaaaaaaagagtttcagcatttgtccaaatattgaaaactcaatactagtttctttcagccttcaaaataccgacttttacttaaaaagctttttaaaaatagttgtcaaatggtctaacatttttctaatgggaaattttttgggaatgttaaaccaaacacacattcataatcttattcgaaataaagtcttcttttaactctttacttgggaatatgacagcaattcatgcccccattcggaatttttccgaaagtttttttgttttttttttattgagcaaaatttcccaaaggtgattgaccttgcacgtaatattacatttacgccggaggtataaccactttggcaagcaacgatcgtcggcaccctcagcgaaggagttgcccactctttgaagaagatgtccggttaagctccggggaacgggcttgaatcccgtcgacgaccgacccccccggccgacggcggccggcgttcgaccgcggcggcgataagcccggactcctcggcgtgaacggccgttcccatgctgctccctctgcggaccgctcgtctctcccggcgctccttctcgtcttccccgctctcgagatccgactacgttcgcgctcgcctcgactccatcctctcgagccgcgccccctcgccgtcgtccctcctccagtccc

SEQ ID NO: 94309 - DNA, 704 bp, Eucalyptus grandis
  Intron number 1 from transcript Egrandis_v1_0.025700m (loc us Egrandis_v1_0.023154m.g) derived from phytozome v7.0 (c hr-ID scaffold_10; pos 19841135 to 19841838 reverse strand )
tgtgaggtaaatccacttttgatcttctctaaacatcatgttatgcttaaggtttctgtactcgttcatgttttgctttgatgttgattattccaattttattgtggcgtcaatactatgttagattgatgtcccagtaacacattctctgctgtccttgtagctttttggtgcttgaccactgctcaatgcttttatagctgttttgtattggcttaatagtgggaacgtgttggcagttgtgttccttcgtatcatataccttactgtgtagcgcttgctcctcgctatttagcttctgaataaccatcacaacagattgtcactctcacattgttttgtacttgattggtctgtatattattgcgcttttttcacatcaaactgtaatgatccagctgacctcacagaattaattatggaaacagaaacattagtagtcgatgtcctgaaaagatacctaacagaaacttctcttcattttcttgtgatctttttctatttaagttaattatcctccatgccatggtaaaaataagaatgtcaccgcagtttttggccatttccatgatggatcagtgtcgtccagacattgtgcctacttactaataataagctgttctctattgcacttcttaatgatgctgaacatttgatactctgacgcagggagctcattgaggttttatctctttcaagttggt

SEQ ID NO: 94310 - DNA, 912 bp, Eucalyptus grandis
  Intron number 1 from transcript Egrandis_v1_0.008889m (loc us Egrandis_v1_0.008889m.g) derived from phytozome v7.0 (c hr-ID scaffold_8; pos 66926621 to 66927532)
gcgaatctggcgtgcttgattgtttgctttagtgggtacggtctctgcgaattgttttcgcgttaaaaagttcatcttttgctgttagtcgtacagtttgatgactgcttttgattgataatgccgcgcttattggggggtacgacgttttggttgcatgaatcttccttaatggaagcgtcttctctcggtgatgactgcattgacggtgctcgacgaaatgcttcagagatgtttagtttttctttgttgagttctgtgcctctttgctaattggtgacctttcccttccaagttagtgtacctgggcctattaatgtgagccgcgtaattatggagagtgtaggttgaggaggtagattaccgggaactcgcatcatatctagtccccactcaactgttttagttttagatacatgaggatgtctatgttgggtgttaaaaaatttattcttatgcttgtttgggaagagagggagcggagcgatagaatgagagctggtggaggaatgctggaccagatttcaaaattttccctcacacacatttcaattttgatcccatatatattacccccacataccccacgcccgcctgccccctcaatcttactaggaattatttaggataagttgaatacatgggcacctgacttgggttcattcctgtaaccttgtgttgttttatatcgggctaaaattaggtgaattctgcatatatctctctgattttgacatgcagttttcttgaattttagtaaatatggatggacaagattgtttattaatcctgatttataagaactcagaatctgactgaagttagagatgtatatttgctcttttgttcattattctatgttctttttctgctacaggaacaaaacttaactacagaactagttggcctgtc

SEQ ID NO: 94311 - DNA, 403 bp, Eucalyptus grandis
  Intron number 1 from transcript Egrandis_v1_0.036656m (loc us Egrandis_v1_0.036656m.g) derived from phytozome v7.0 (c hr-ID scaffold_10; pos 28561147 to 28561549 reverse strand )
acggtaagatccattcctctgtgttaccattccattttgcagtctttttcttgcatcatcatccatctttgacccttgttcgtgatgaaaagttgcattttttgacgttaaattgcagttcttgagaggtgcaatttgttttttgcattgcaacatttgttagattcctagtgaaaaggaaagtatttggtcattattgaatatcgtagaagatgatcgtcaggtggtctctgcgtgatccattattgaaaatttctgaagaaaaatgatgaatgactcagaccgtgctgttttcgttttcaagttgatcaagtcgagggatgacatcgcaaatatcgctcacatatatgttggtcattttgcatcaggatcagggccggtctttgccaaaatttggcgagtg

SEQ ID NO: 94312 - DNA, 630 bp, Eucalyptus grandis
  Intron number 2 from transcript Egrandis_v1_0.048489m (loc us Egrandis_v1_0.048489m.g) derived from phytozome v7.0 (c hr-ID scaffold_8; pos 14911716 to 14912345 reverse strand)
aagaggtagagaatcaaaacctaaattatcctaggatagttagatctactttttgttctaaattgactagaaagaaaaggcacccatagatgtgtgttaaaaagaaaaattattaaggttccgtttgtttcgtgaaaaatgaatgatttgaaaaaaaatttctttcaaataattgattgtgtcgcttacaagaataaataagcgaaaaagattttcatcttctaccaaaatgcaggacataaattgttgttgataatgattttttttttctattgaataattttttaagctatataaatgatcatttttcgaaagatatacatcaattttttcactctttgcaaaacaaatagaacctaaggaagaaaattgtgggatttgtgttattttaggaaaaaaacttgaatcgttacgggagtagccgtattgtggtctattcaatagatggcacaatcacttaaatgtgtaattccaaattaattattctttatttaacatggaaaaccaaggcaaaggaagaaaaggaatacgaaaactaagataaaagataaattttccttcataacaactcttaatcttttcgcatcgcaaacagctcatacagaagaagttattcgacattctgaggga

SEQ ID NO: 94313 - DNA, 630 bp, Eucalyptus grandis
  Intron number 2 from transcript Egrandis_v1_0.010272m (loc us Egrandis_v1_0.010242m.g) derived from phytozome v7.0 (c hr-ID scaffold_1; pos 17099022 to 17099651 reverse strand)
gccgagccgaaaatcaaatacgatcgccagctccggtactccgcttgcagcttcctgtctatcgagtgcttttgttgtagctcgatgtttcctggattattcccgtcctgactcgataaaaattagaatatggcagatttgatttagcgagagtggaagagaactttcgcagacctaattttgttttgacgagagtccgaggttgcacttggcaacgcgttgagtggaaagttctgtgtgtttgaagtttttagctacgcttctgatattggcaattcatccattcgattgcacctagggccttagatacggagaaattcacattttatcgattacttcattttgttggaattgcattacagtttgcctgagagtgctgaagtgttcattgaaagaggagtttagttttttcggtattgatcgacttaatgcaacatggttcgcttaaagaggtggaggtcaacttgatagagaaacctttgccatttctttgttaaatgtcgatggtctttaacttgcatgtagatcctttggtcactgtaaagtactctgtcgtgtttccacatgtttttatgtgaatatattgatacctcaggatctggggtgagcaaggtcaggctgctctcgaga

SEQ ID NO: 94314 - DNA, 946 bp, Eucalyptus grandis
  Intron number 2 from transcript Egrandis_v1_0.018442m (loc us Egrandis_v1_0.018442m.g) derived from phytozome v7.0 (c hr-ID scaffold_8; pos 67846183 to 67847128)
cccttaagcatccaaatataatcagatttaaggaggtaattctccgctgattctagcgggtttggctcttgccgtcccgtgcttcttgtgatcaagaaatgcatgtgagaatgaggatagggacgtttttgagtttattgtagctgatggattggaattgggatcacattcagaaagcaacttcaaggaggacttgaaaaaaccggaaagcaagtttttctctttttatcctttcttctgaatgatgttaggtttgagattgaatagcaaaattgatattctgaccgtctgaatgtttacttgcattctgacacgttttctcatcctccctatagctggtaacgttgccccttttggcttatcctctgaacagtcccatctgtgctatttcttcaaatcacttacttcgcacttatcaatatgcattaaagatgtgaacttgctagacatgggtgatgaggataatttagtgtatagattgtattttgatggccgtaaacatgttttttcatcatgcgattactctagtgagtagttgcccaaggcagtggtagtcgaaatacaaataaatgcacatctttctgaaagactggttatgagttggttagtataagatgatggtgattaataagtgcttgcttgctcccgcaagatttgcgaatatagaaaaccaatgacagtgtgtgacttttctctttggaactttttcctgccaaatattcgttgcaactggcaaaggcatctgcaaaaaagtttccttgctgtaccataacttttagtagtcaagaatcaaaagttgaaacaatttggttgtgcgtagccgctggacatcggtggatttgtatgctgtttcctcttgtcgatagtgcatgaaatttggaactttgacggtagtgagtattgttttgcaggtcttgctcacaccaactcatctggccatcgtcat

SEQ ID NO: 94315 - DNA, 846 bp, Eucalyptus grandis
  Intron number 1 from transcript Egrandis_v1_0.047817m (loc us Egrandis_v1_0.047817m.g) derived from phytozome v7.0 (c hr-ID scaffold_1340; pos 10158 to 11003)
cctccaccgaagagaaggtctctccctctccctctctcacttttgtgcttaaaagtgtagcaaactattgtccctttgttatcttaaccatgtgttgttcattagtttgcattttgagtgcttaagcaaatcatgacaggctgtcaagcctggccataggggcaaaaactattgacgcaattcgttatctattttgcatttacgagcaagcaatggtcgagattgtaatgggtattcccattgttattgtacgaagtttgtgttttcacttattcgccggatagctaaagctttctaacaaccttacatgttagcccttcatcaaaatttagggaaatttactaaaagaaagtcttatttagtcctaaaccttgccgaacaaaatgaaaaaacaaaaagggaaaaaaagagagagagagagagataaaaattaaaataacaataataaattcataaaaaaattataaaaattgtccatgtcattgccgttgtgccacatgagacagttgatgtctattttagcgattttcggtcaaaattaattaaattggaaaattatcaaatggtttataactaaattgactaaattaaaagatttatgactgaattaacaaaattataatagattttagattttttttgataattttctctcaaaatttaggtaattaatgcatttaagaagacatgcaaaaagaaaaaaaagaaatcaattcttaggaaatttatgtgacggcgaataaaaatgaaaaacttttagtagattacaatttctctcatttgacgctataatctaaggaaatttgtgtgaatcaccaatttgcgcagatatacacagcaaagttg

SEQ ID NO: 94316 - DNA, 358 bp, Eucalyptus grandis
  Intron number 2 from transcript Egrandis_v1_0.011680m (loc us Egrandis_v1_0.011680m.g) derived from phytozome v7.0 (c hr-ID scaffold_1; pos 32850897 to 32851254 reverse strand)
gggtctggtgaaaagagattacagctggaacaaaggtatatgttactttttgaattcaaatcaattagctgatatgacaaacttttttcttgtctatgttcatatggggtagcaaccagatattcaataaacaagcaaaacgtgctatcattgattaagagccacttcattattgtaaatagaacaaagatatcatgacttttttttatatgacactgattaagtgcttgtcagtgaggagatataagctaatgcttccttatcagcaacctttcgtttgcattccctggaaatttgacaactgaattggctaaatgttgcagtggccaatctcctatacctggagtctccggcagga

SEQ ID NO: 94317 - DNA, 297 bp, Eucalyptus grandis
  Intron number 1 from transcript Egrandis_v1_0.011680m (loc us Egrandis_v1_0.011680m.g) derived from phytozome v7.0 (c hr-ID scaffold_1; pos 32851298 to 32851594 reverse strand)
gaggtaactaaactgcggatccccatcacttacgaaaaaatcaatgttgtctcctccgtaaagttctcttgtccttcattctctgactgaaggatcaaagcacaatttatgaaacaaatgcaatactactatgcacttcctccaattatagcagcagaatgaacatcaaatcttaatcattatgcattttgatctgttaagcaggtatagacaatatattcaattattttgatactttgtcttgcctctcctttttcttttctcctaatgtagggcctggctgttcttctttggggt

SEQ ID NO: 94318 - DNA, 948 bp, Eucalyptus grandis
  Intron number 2 from transcript Egrandis_v1_0.039304m (loc us Egrandis_v1_0.039304m.g) derived from phytozome v7.0 (c hr-ID scaffold_10; pos 2329331 to 2330278)
tgagaatatttggcagattcagctgcaccaaccacgtggttcaactctgaagtatctagtcattcaggtttgatgcttcaacttaatgcttgaagtttttaagccataacatcgaattgcgacgttcttatcggtattggatatgttgatgaattgtatgcggtaggagtgcctaaacagtgcaggttgtagtgattcacaatatataaaagagttgctgttttacttctctaagggtgatactctttctaagatgtttgatttatgaacttcccccatccgcatattattggtagagcagcaatttttcctctgtaatagcacaatggttttatgtgcctgtcaagctggacactactaattcttttttttctttctgtggtcttatttcaccagttactaggtgcccctcggatccacgaagaagattcctgctctctcaaatattttatggcaactgctgatgaccattgggttagggaagttgattttaccccatctttctgtattggccagtcttcctctttgtgtttggaacttcagcatcgtcatcagcttcctgattttggtaagtatctcgatcgctacaaagaacagagtaggtggttcaccctgaaaagtgcccctcctcgtacttatcgttcagatcttgaacctgttgtgcttccacctgctggagttgcattgccatatggaatcttgttcaaggtctgttccttggttcagcatgggtatctaccatagcctgttctggatcgaaaatttttccagctggttgatccgagaagaatggacatgaatgttgattgcatagaacatgctttggaaaaactgggtcgtctaaaagattgctgttaccatcctgtaacttggcttgaggagcaatatcggcggtttctgggttctgaccaagtgaccataaacctacagccggcactctttctctag

SEQ ID NO: 94319 - DNA, 665 bp, Eucalyptus grandis
  Intron number 2 from transcript Egrandis_v1_0.028372m (loc us Egrandis_v1_0.024099m.g) derived from phytozome v7.0 (c hr-ID scaffold_10; pos 263745 to 264409 reverse strand)
cggtcacgtaaaatatccatttgaataacttatcaatctcattgatatgatttgctttctgtataatggagggaagtttcaaatttgattttcttaattttacttcaaataattacaattgagactaatgtattatctatatctataccaatatttcttatgaaaagtgcgttttgtcttactgttgaatttctcatttagccctcatttacatattactttcatactacaaagcaatttctcttaaagagaaactgaagtaaaaatatcaagaaaaagagaggttaaggtggaaaacctaacaaccaactttgcactaataactagactcggtgaaatttctgaattgtcttttcagtgcaacaacaaattctatcgttctctcatttgttttaacttaattttgagtgaatgcttaattttagttattgaaagaatcgcaaaattgtaaggacgtctcaggaagaatgaaaaatagccgctcacaagcatgcattagaactagttattgttgacttcataagaagtttcgataatttctgacacttaactgatggaattgtatagtaattctgaatatagtagtaaatagcccttacagatatataacattacaatctcattacaggattatttaacgcatgcaattcctacagaaaccagtg

SEQ ID NO: 94320 - DNA, 937 bp, Eucalyptus grandis
  Intron number 1 from transcript Egrandis_v1_0.007394m (loc us Egrandis_v1_0.007394m.g) derived from phytozome v7.0 (c hr-ID scaffold_10; pos 5146073 to 5147009)
aaagggagtcaaaggcaaattttagtgactttcaggtaagtacttgttgtcttgttgttatcttttattttcgctgattgctgtttattctggtaatttgggtttgtaagcctggctttgctcaacacttacaaggaattaaaaagtgatcatttgcataacgatgtcagcagcagcagcagcagctacgtccgttaagattaattcaccaccatagcactataacactgctactgctgttacttagcagtgtcgtaattgccagagagttctcaaagactactttcttttttattcagactgctgagttctcttaatgtgcatattgaagtaaaaaccataaaaggtttgtgggcttttggtttgatctcggtctcagtctgtcgattatgaagtagttgtgggttttggtctgatcggtgggaccttggtctcggtttggctctgttttatgtgctatgttctcttcgttggctcatggagcagataacacaaaaagatagagaggagggagaagcagttggacttatttcttattttgaattttatttttttacctaaattaagtttactctggtagagattttatgtttgtacctgatttacattctaatgcaacattatgaagaaaagatataaatgtgtatgtaagtaattgacttttgtgggtacttaaacaacaaatatttgttaaatataatgctatcattttagaatattgcttatcttagtaaaacaatgaattttatatttttcacatgtgatgagggagcatcaaataattcatgccgcaatgcctgcaacccattacacaatgttcgatacaccccgcttctgcgacaaccgcaatgcaacagcaacctgcaactgctatttgtttcctcgtttgcttctgttcgcttactaatttgataaatacaggattggcttgaaaagc

SEQ ID NO: 94321 - DNA, 584 bp, Eucalyptus grandis
  Intron number 1 from transcript Egrandis_v1_0.035319m (loc us Egrandis_v1_0.035319m.g) derived from phytozome v7.0 (c hr-ID scaffold_31; pos 125275 to 125858 reverse strand)
aagttacatccgcatatttatttatcctttgatatgttagtttatccaaggaaacttccagagacttttctatttactaccgacggggtcctgtcccgaggcttaataaagaagacttattttattttattagatgcggctcgattttttattttactcgtactttatttattttaactgctttgtttattttcatcctattcccataactttccttagtttttttaatgtcaaaaacatttccattcgttacaaaactgatatatgaaataaatctcaaaagtcatagtaacaaaacaaacccatagatcttcaaaataagcaaaaaatagaaatcaatgcatttcggcatagcatagttgggggagatcatcacaaactcgtcctttaaggacatatctgtaactggatttaagcgaaagaatcaatggccaataatcgaatcacaaagtaccattagtgataaacacacgccgaaatttttatctataattatggttttacctttcggtgatatacacctaggttcagtgtcccctaatgagacaacataaacatgttaacaaatctcagatctgacacct

SEQ ID NO: 94322 - DNA, 788 bp, Eucalyptus grandis
  Intron number 1 from transcript Egrandis_v1_0.042501m (loc us Egrandis_v1_0.042501m.g) derived from phytozome v7.0 (c hr-ID scaffold_1; pos 33145988 to 33146775 reverse strand)
cagcgctataaggacggtttccgactcgtggccgggtactacttcgtgaaaaaagtccttctttatctcctcatttccatgtctctgtatttagattgcctgtgcgtctagtgggttccatccgcattggttccttctccgtctctctctctctctctctctctctctctctctctgtgaatcggctcagggaagtctccggcgaatagcgagttgagcgagacttgtgaagattgattgctcggtgtgtcagcttcggctggtgttaatttcggaagtgaatggaacctcagttttggctgatgcttcgttatatctagtgctttgcaattgccataacaagcgatcattctaggaggttcaattttcgatgagcccacaagccgagacattgtttgccggactttgatcctgtatggagattgtaagagcaacttcacttcctttgctatgctgatgccattgatggtttcacaaggtcactcggtctgatgcgttttgatcaactgtgccgtacttaagatgtaccagaaacagaggagttcacctattcagagcaaaaagaaaaacgagcggtcttcctcttggaagtgtcggtttacgagcttgaatctcttctcctgcaaaatgagagagctttgtgtttgacgtatggattccctacatgcagtaatttcaataggatttgtgggcatttttgtgctttatgggaaataatacaacagtgtttaaattactgactggtggaaacaggtgtgttcctttcaagtatagaagtgctgttgaaa

SEQ ID NO: 94323 - DNA, 410 bp, Eucalyptus grandis
  Intron number 1 from transcript Egrandis_v1_0.016288m (loc us Egrandis_v1_0.016288m.g) derived from phytozome v7.0 (c hr-ID scaffold_8; pos 35799413 to 35799822)
aaagagtacgctcttaaacagaattttcttcccccgaaaaaatcaatatgctcttcggtaaaaaagaattgaatcgggattctttctcgatcttcaacaacattagtgtttaatatgtaaaaaacaaaatacttcaacaacattggtgtttaatatgtaaaagacaaaatactttcgattcggtaacgtatcttttgatgctttctaggctcgccttccgcgttcttcgttttaggggtccgattaagtatgagatcgtttttaaaggaacgcgtttccccacatgacatgatgacaaaaatcacccaatcgaatcatccaaaacccaaaagaccagcaggtcgacaatggcctccttatccatccctttcacagaaaccacagagagagcgagagcgcttcacttgcta

SEQ ID NO: 94324 - DNA, 407 bp, Eucalyptus grandis
  Intron number 3 from transcript Egrandis_v1_0.016288m (loc us Egrandis_v1_0.016288m.g) derived from phytozome v7.0 (c hr-ID scaffold_8; pos 35800339 to 35800745)
tttcgatcggggtcatcattctcactggaaaggtactcttcgtttctgtaatgtcttgattttcttcttgtaatccgcacttttctggaaagtgatagcagagcaggctgatgctgcaaaaatttcgggttcgcggttaaattaggccaagtaagctagccttcctcattcatgtcttgagaaaacttgatggggtagtcttgaaaatagagatcaattttgaacttttgcaaattccattgtcttttgttcatgaagttaatgtctcgcatgtaaagtggaagctgcatcaaaatgtcggtggctcatttattgagtgaatttcagggtcgtgcaatgccttattttgtttcttcaacacataatgtttagggaaccaaggcattctgcagcggtggtgaccaggc

SEQ ID NO: 94325 - DNA, 826 bp, Eucalyptus grandis
  Intron number 1 from transcript Egrandis_v1_0.002491m (loc us Egrandis_v1_0.002491m.g) derived from phytozome v7.0 (c hr-ID scaffold_10; pos 4957908 to 4958733 reverse strand)
ctggctcagccggggtcgtcccgacgttgcccgaggtgagctcagactgccctttttgttttcttgggtcttggtcttggttttgggttctgggtctttagcgtcgcgcgtcttcttgcggatggatgtagttggaatcgagtcgtgtgggagagttcttctttgattccgtgggcgggcgtgtctgcttgcgttcgtttcgcgcggtcttttcgtttcgctccgctggtcgggttctgattcttaatccgagagcgagtgactccgacgtgtcttgtcttgttcaactagaagggtcgtggtgggtgggtgggtgagttgggattgcttttttccttttgttcgtttggcgagcagatcggcggaatctttgtgaactttctttcggagtggcgaggttgattgattcgcgcgtccgcgtcgtggagttaggacgctgagcagtttcgttcgcttttaaataatggaaccgatgttgacttactgagaatcttggaaggaaaggggacaagaaacatcgtgttggctggttccatcgcgggttttaactgattgatactgtagccctgtttgttttaactttgctgtttgcttcttctctgggaatcattgttgatccaaaactatggactggttgtacgatcaattcgttgattgaccgcttcttcttggtttggacatcttgacacgcctgctgagtgctgatgtgtccaattttgacgaaacttcatgtgcttgatagcttctgaaggacggaccataatgcttactaacctttagctgttgttcagggagacgtgaattgaactgacggcctttgacattc

SEQ ID NO: 94326 - DNA, 506 bp, Eucalyptus grandis
  Intron number 1 from transcript Egrandis_v1_0.029213m (loc us Egrandis_v1_0.029213m.g) derived from phytozome v7.0 (c hr-ID scaffold_10; pos 20743389 to 20743894 reverse strand )
ggcaagcaggtactggattttcgtgctcttttctttgttcttttcgcccgctgtttcagcaaaatctcttttctgggtgtgttctttggcttatgataatgctgattttcagatgttagtcagatcgagcccgtggttagtacagtggtgcttgttgtggttgttttgaatagacacggcgatcttgagcacgaatcgtgatagttgttgtcatagatgaaaggatgactgcagttgtgttcttgcccgaaaaagaatcaatagtccatggctagaaagctgaaactaatccaattcttatcaaagccagaggaaatctaccatgccttcaattaatgctcgattcgatctgatttattactgcttttcttgtcgacatggatgaaatcatggtgcggtaactaagatcaaagcccgaggccctcagtttcgttggcttgaactgataaccctgttgtctatgtcttgcagaaactgaggactcgtgttgtgaggaagaatctcaa

SEQ ID NO: 94327 - DNA, 635 bp, Eucalyptus grandis
  Intron number 2 from transcript Egrandis_v1_0.022376m (loc us Egrandis_v1_0.022376m.g) derived from phytozome v7.0 (c hr-ID scaffold_8; pos 64075614 to 64076248 reverse strand)
cccagatccagggcacgtagctgtcagattcacaggtaccgggtggtgtgaaaattgtggaagtctcggttgttgtttttttgagattaggaaatgtgaaatgtgctgcgattagaggaatctgttcgagttttgccttctgttctgtgctttgattgcggaaaacgagcgtcgagtgtggatttgtcttggctgaggctgtctacgcttttgagcttggcatgcgtgagctgccaagtcgtgaatcgggcattgattaggaagaggaatagtggataattcgggtctgttgtcagtacgatttaccttttatcagtagtgttcctgctgtttatgagatttagatcgtcttttatgggtggagaaaacgtcgggaaaagcccgacgttggtagctcttgcaggaggaaattcctgttgtttgagtcaatgatttgatgcataggttcgattagaggatcagttcagcttgtccagttctggatttgaaagccactcagcctttgttgagatattatctcatggcaattgatgtctctaatgattttcatcgacgtcatttttatttatttattcggagctcaatagaaatgatctttttctcagattcaaatctccagactttccctccatccg

SEQ ID NO: 94328 - DNA, 484 bp, Eucalyptus grandis
  Intron number 2 from transcript Egrandis_v1_0.038086m (loc us Egrandis_v1_0.038086m.g) derived from phytozome v7.0 (c hr-ID scaffold_8; pos 29780579 to 29781062 reverse strand)
attacacggacgagatcatcaaggggttcgtgcaggtgagcgctctctctctccccctttgcttaacttattcggatttgtttggcttttaaaagcatcattgttcgttgttgtgaaaaaaatcgtgaagcagcagcgatatctgtaaatgaaaagaaacaggagaaattaacacaaggaaatatgtgattaagtgagtttgacttacttcggcgggtagatcagcagcgataaaatcacaatgagcaagagattgactgattaaagagaagaaattttttttaaaaaaatacagtttttgtttgctaggagtgatttacatcaatacatgaaaacaaaatataacatttttaaatcgacagacaatcttgtttgctggaaccgacacatcttcagtcacaacggagtgagcactcgctaatttgctcaatcaccccaatatgttggagaaagcaagagtagagatcgacactcaaatcggtca

SEQ ID NO: 94329 - DNA, 359 bp, Eucalyptus grandis
  Intron number 2 from transcript Egrandis_v1_0.010985m (loc us Egrandis_v1_0.010985m.g) derived from phytozome v7.0 (c hr-ID scaffold_1; pos 32819735 to 32820093 reverse strand)
gggtctggtgaaaagagattacagctggaacaaaggtatatgttactttttgaattcaaatcaattagctgatatgacaaacttttttcttgtctatgttcatatggggtagcaaccagatattcaataaacaagcaaaacgtgctatcattgattaagagccacttcattattgtaaatagaacaaagatatcatgactttttttttatatgacactgattaagtgcttgtcagtgaggagatagaagctaatgtttccttatcagcaacttttcgtttgcattccctggaaatttgacaactgaattggctaaatgttgcagtggccaatctcctatacctggagtctccggcagga

SEQ ID NO: 94330 - DNA, 300 bp, Eucalyptus grandis
  Intron number 1 from transcript Egrandis_v1_0.010985m (loc us Egrandis_v1_0.010985m.g) derived from phytozome v7.0 (c hr-ID scaffold_1; pos 32820137 to 32820436 reverse strand)
gaggtaactaaactgcggatccccgtcacttacgaaaaaatcaatgttgtcgcctccgtaaagttctcttgtccttcattctctgactgaaggatcaaagcacaatttatgaaacaaatgcaatactactatgtacttcctccttcaattatagcagcagaatgaacatcaaatcttaatcattatgcattttgatctgttaagcaggtatagacaatatattcaattattttgatactttgtcttgcctctcctttttcttttctcataatgtagggcctggctgttcttctttggggt

SEQ ID NO: 94331 - DNA, 736 bp, Eucalyptus grandis
  Intron number 1 from transcript Egrandis_v1_0.042433m (loc us Egrandis_v1_0.042433m.g) derived from phytozome v7.0 (c hr-ID scaffold_8; pos 69300457 to 69301192)
gggaagtgcgagactaaagaacattgcttttgcaggttgaactatgaatccaagcaagcacatgtaaaacgggtctaatcgctaattaggattataaattgtgagagttagcgatgcagttcacactgcaaaacggagacaatagcacctacataagctatatatgcgatagagcggaccgttagggaataacgctactgcaatacgtgcatgtcaacgatggctgcttcaaatttgcacaactgcatgaggacttcattctctgtttctcttcttagttttattttctctgcggatgagggttgtgcacacagagtgcaatacaagtctgagagccaccacatcttccaagtcagttctctactgccttctgcttcttgcaaaacttcatctactgctattgacaaaactctctctctctctctctctctctctctctctctaatacatgtaatgtgggtgaatctcatttattgatcataatatatgctggcccgtctctatcttagctaagactattgattttcaaagcatcaaccttgcgtgaggaaattaatggaaagaaaaaagctaaactggcggatgattttggagtgaccaagtccctaatagaaattcacattaatggatttttacatttgattagctccacgagctcttatagcctctcatagtgacatcatgatggaggtgctatccgataatcgtccctagaagtagtgcacaaacacggtcc

SEQ ID NO: 94332 - DNA, 692 bp, Eucalyptus grandis
  Intron number 1 from transcript Egrandis_v1_0.017166m (loc us Egrandis_v1_0.017166m.g) derived from phytozome v7.0 (c hr-ID scaffold_8; pos 9126422 to 9127113)
gaattggtcttgaagctctttgcctctcaccttacgtaagctcttttattcctttataaaatagaaaaaattcatagcaattgaatataattgacatattatcatcaagcaacaaaattcatattcatgtttggcataaacataatataaaaacaataaaaaaaagactaaaaaaaaaaaaagagcccgatcgattccaaagtcaaagtcaatagaggctgttcccgatttcaaaagctaacgagttgaattccgggtttgcggaaccgattttcaccggcatgatcaccacatccaaaatcgcccaatccgacgtcatcgaccgcagtctagaagcttcgacgactctatgcaatgcattttcctcacgttggagtcaaaatcattgacaaaaagtgggaagacgacgcgagcaacatgacctaaaaggacagcaaaaggacaatcgcttaggcgaggcgcggagggcgttttcgtcatttcggccggcgacgcaagtccgcataacgaaactcccatcgatcgcgagagggggcgcccaacaacagaaataaccactcgctcgttggggagaaccaaccccccccctttcccgaaaagtgaccccccgggcgaaaccctaaatccggaaaaacaagaaaagttttcgagcgggagattccgcccatcgctttcgattccgctcccggcga

SEQ ID NO: 94333 - DNA, 832 bp, Eucalyptus grandis
  Intron number 1 from transcript Egrandis_v1_0.047588m (loc us Egrandis_v1_0.047588m.g) derived from phytozome v7.0 (c hr-ID scaffold_8; pos 21285446 to 21286277 reverse strand)
cccggggaagccaagccaggtagggcccccgcgattgagttctcgttccttctttttctttttttgcctcgtcctgcttgattttaaaagagcaaagcaagctcgatttctttagtcctcattcacgtcggatctgaatgagtcggtttttcttaagtttgaacgttgctcgctgatttctcttgagtttaagtgtgagctcgagctccgaataggtccatattctctctccaactcgctgcccactttgtgtttgaggaaatgcctaaacagattcgaatttgttctgttcaatgcaagacatggtatggaaaaattttagtttgaaaagtgagggaaatttattttgggaattgcttctgtagaatcccttttgaaagaaaaaaagtcagattgttcattataaataatattccaacgggcggtgttttgcgattgactcatgtatattagcgcgattgactcatgtatattagcaccaggagcatgggagtgttgctagttttcttttctatttcttttattaatggaaaaggcaagtcaagtcaagaagcatctatataggatggttccgtgcaccttatgcaaaatgctgctttttgttaaattagttgtcggagactatgcttatctactcggagcatcagaaatgatcttggttttcgtttctatttctttattagttctaagtgatatccacatgagagataaagttgcaacccgaccagacactaagcattctgaggaagcacatcaaccttcatctcctctaaaggccgcttctttgaatttgaaagggaattaccacgtcttcctgagtttccgaggtacg

SEQ ID NO: 94334 - DNA, 646 bp, Eucalyptus grandis
  Intron number 1 from transcript Egrandis_v1_0.000114m (loc us Egrandis_v1_0.000114m.g) derived from phytozome v7.0 (c hr-ID scaffold_1; pos 35656915 to 35657560)
gcagctcgaggacgacgtgcctgatttccccagaggttagagggactccggttttttcccccttttgcgtctgtggaggttcctcattaatcggagaggacaggaagagtagtgcgagcggtctcagttgcttttttgcttgaactgtcgtggcgcggtcggcgcatttgtgatgggagctcggtgtggatttgtcctgggtgatctaattctagacctattgtcggaagatggttatcttctaatgtgtcgaggtttaggtacatttgtaagttgtaattacttagtaatgtcccaagaggtaaactttggagctgtctgattggacttcccaccatttcttgatgaagaacgtcaagaagaaaactttcagcgcattttgacgtgtagaatttatgccgatgcaaatcatctagttcctatgcctctcgagtcatttatcacttatcagtttttaatggttaggttgagttctgagcttgttcgccatgttcataatttatttgagacctgaacccatttgattaaaaataaatggcaacagtagctatggataactacttaagtttttttttttttttttttaagtgttgtttgatttgtatgttcaggtggcggaagtttgctcagtcgaaaagaacgtgaa

SEQ ID NO: 94335 - DNA, 475 bp, Eucalyptus grandis
  Intron number 1 from transcript Egrandis_v1_0.045339m (loc us Egrandis_v1_0.045339m.g) derived from phytozome v7.0 (c hr-ID scaffold_8; pos 49163123 to 49163597)
cccatagctattggctccgaacaggtatctctctccatcgttcatctgattacaagatcatttgattcatcctcataatccgaccttcttaggctagatctcgtaaggcccggtgcatccgtgtggggactgagtgcaaagataatttcttgttggtacaagccatcattttcagaaagataatttcaaataattcatttgctacaaaataaacggaatatcatattttatcgtacttatcgcgggaaatacatactaattacctaattttctatggaaaatcttttaccatttcagtctttgtgtcatatcatcagcaccttttcctttttttttttttttttctaattggtattatgtttttttaatatcactgaataatcatccaaaagagaagaaatctgatcgtatatctgcatataattttctttctatctcaggaacaagacagtgggcttcaactagtgcacctcct

SEQ ID NO: 94336 - DNA, 872 bp, Eucalyptus grandis
  Intron number 2 from transcript Egrandis_v1_0.026699m (loc us Egrandis_v1_0.026699m.g) derived from phytozome v7.0 (c hr-ID scaffold_3538; pos 1094 to 1965 reverse strand)
aaagtgaaattcaacaagtgagtttagctgtgctaggaaattccgtacggataattctttggggaaccatggctctttgtataagtatgacatgaatcaaatgctcgtgagactgcatcatttttgagtaaattggacatggtgcagtttctagaaagtatcctctaggaaaatgagacaaagctgatttcctgctaccttgtgacgactcaacccacaaaaagaagtttatatttttcctttcgaaatactggcaattttgcattaaaatttttgctgaaaatcaaggttgcttctaccgatcatgcttattggtcattctgctaatatcaccacttatgtcttgcatttgtgattctatgttccgagggagtcactaaagaagcaactttttactctcatcacggattctatttttcttctcttcttattacctgggacttgggagaggtactgggtttgattgattaccattttgatggctccatccctttgagaattatacagtaaatactcagagggattacagtagaatgtcttgaatgcttttctggacctgtggtcctcccaattgtatttgttaagttttttttttttgcctgtggggtgtgtcaagggttgtgatagagacaagagattatcaataaccatggtttcctgcattcgtaaacttttcagagaagttgcttaagggttgtttggagtctgaagtccatcagctgaattttgcatctatatataattggagcgaagtgcattgtaattttagagccttctttgaatgcagggaactcttctttctttgttaatattacttcctttatctgaaaattgcagatttgatttttcaaattcgtacatttggtttgaat

SEQ ID NO: 94337 - DNA, 328 bp, Eucalyptus grandis
  Intron number 1 from transcript Egrandis_v1_0.026699m (loc us Egrandis_v1_0.026699m.g) derived from phytozome v7.0 (c hr-ID scaffold_3538; pos 2035 to 2362 reverse strand)
gttgtcttgacgatccccagaaggctcagtctaaagtgagctcgtaattttatccctgaagtatttccccattaaatctacgggtttttgcgctgtttcttcagtaattttggagctgttgctactcggagtgattaaagtttgtgtttttacgctgtctggactccatgtttatgctaagtgttttctcttgctaatgggtgttgattatgtggttcttttgaatggtttgggggatcgcagcttgatagttgggggggggggggcttctttattgatgcataaattgggataaatatcctcatgaggtttggttttggttgtgtag

SEQ ID NO: 94338 - DNA, 400 bp, Eucalyptus grandis
  Intron number 1 from transcript Egrandis_v1_0.019676m (loc us Egrandis_v1_0.019676m.g) derived from phytozome v7.0 (c hr-ID scaffold_8; pos 5942890 to 5943289 reverse strand)
gctacacgaaggaccagctgctcgctcgtctacaggtaaattatcccccgcccgctcgagacccgtcccaatctcccgcactcgacccgccgttcgcggccggttctgtgtccggctcactccccgacgatcttcgatgcacacgcggtcgcgagcttcgagaaattcgcttccttttctctcgccctcttactctgtggtgttcaatcttcatctgttttgaatcgtatgcgtaacgatcctgcattgcagactagctatgtagcagcgtaatctacggccgacttgaagtgtaccgccttgttctgttaatcccgaccgttaatccggatgttcttttgttttttttttgggggttcttgcaggagcttcggattgagttctcaaagtacgaacatcc

SEQ ID NO: 94339 - DNA, 866 bp, Eucalyptus grandis
  Intron number 3 from transcript Egrandis_v1_0.046669m (loc us Egrandis_v1_0.046669m.g) derived from phytozome v7.0 (c hr-ID scaffold_10; pos 31519736 to 31520601)
ttcctggaggaggccgatttcggtcttattcttaagtaaaagtccgtttagttcataatcctacttcctctagcatgtatctgtctatattgagagcttaagatatggagagacagtttgactttgagtacctttttcaaataaaagagaaaacacagaaaacgaagggggttctaagaatgtactatagagctttgaagatttcaaaatttcatgatggttggaggagaaattataggacggacactcaaactttgattaacatatcaacagaatcatgaagggttctgattaatcgaggacttatgtttaagtataaggtaatgaaaagagttgagaaatttttattttttttatcaaggaaccgccagagatcactcttcagagaaaaaagttgagaaaattctgtacttattgactagagaatcaaatattcaacattcctattgagatttattatgacattcggatcttaatatggtgcaaaaatttatgacatatatgtatttatgtattatgtgttaatagttagttttagtttcatgtcatcttctaaaattattcatgacaataacgaaatgaagatcaaaagtttgtgggtctacttttgacgatatgttacttaaactcgttttgtcacccaaatttctttccatccgacctatacccaatgtaatgggtggtttctaagcatcccataaatttcatggtttctcctaattactttcttaatttctctctccattgatttttcttcattacttccagttttttacagcaactatttcctgttgattctgtaaaaccaacgcagctttctgtttcgtgcaggtcaagcagatttgctaggccgcaaagtataaaat

SEQ ID NO: 94340 - DNA, 486 bp, Eucalyptus grandis
  Intron number 1 from transcript Egrandis_v1_0.002875m (loc us Egrandis_v1_0.002875m.g) derived from phytozome v7.0 (c hr-ID scaffold_10; pos 15225502 to 15225987 reverse strand )
cttttcgccaaccacgagttatttccgagatcctggtaagtcggtctatgctaacttattagtgtcgcctttggcagatcagaaaagaaatgcagtctgatttcagtctattaatttcgatgcacgacgactttatgaacctgtgtttttctttccttccaccgacgtggacatgattgaatgaccaattctgggttctgctttttgtgcatttcgtattatcgtcattcaaccgataaattgcatttgccagtcatctttccatctacaaattccaggttagtgcagcagaagaatcaccttaatcatgtttgccatcaaaacttaggtgaattttatatagatcaggccactgcattagttaatgagagccaaaagcaaagatacggtactgcaaaagtttctgtatgcgcataaccgcatttaattagatttgatcttcctgaaacagggaggaatactgctagggccatcggtcctcggcag

SEQ ID NO: 94341 - DNA, 830 bp, Eucalyptus grandis
  Intron number 1 from transcript Egrandis_v1_0.046025m (loc us Egrandis_v1_0.046025m.g) derived from phytozome v7.0 (c hr-ID scaffold_1; pos 32975617 to 32976446)
cgcttcgaagcctctcgtgctttggctcaaccgaggtaaaatcatctgtatttaaaaaaattaatctactatttattaatatcatttattgtttcaatttaataaattcaactctatttcaataattcataaaacttgaaaaaagaaaaaaaaatcacattctagatctacgtgtcaaacgtgtcggatgagaagagaaaaaattgagggtgaattgtgtatcaaagaaaataagagtaaaagaagaagggaataattttttttttttatttccccatttattatcttttattatttttgttttattttttcacatatatgcattttgacccattatttattgaagattcttaaaattgacctcattcgtttgaatcacgtgtcaaaaactcgcatgtcgaaattccaactcaagtattggagagtgtcgggaaaattgactaggtgtcggatttttcaacacgtattgactgagtatcgaagaatgttcgaaagtgtcggacacgtgtcagagtgtcccacgcgacacaaaaacttctgaaaagtgtcagtactccgtggaataaaggtgggcataatttcaaaaaaacgaaaaagaggagggcgcataaagctaatcctgtacttttagcagcttaaatacaagttcacatgttgtctctcttcgcaaaaacttaaatcgataggaaactgaatcggatcttgtatcagatatatcattttcaagggtgaatgtgagattgatcccattcgctgtgatgtgattccaacttcaaacattctgtaattggctaattcttgcatttttcgatttatttccagaagcaaac

SEQ ID NO: 94342 - DNA, 528 bp, Eucalyptus grandis
  Intron number 1 from transcript Egrandis_v1_0.036345m (loc us Egrandis_v1_0.036345m.g) derived from phytozome v7.0 (c hr-ID scaffold_8; pos 63156322 to 63156849 reverse strand)
tttgtgcttcctcctcttgctcatcctctcttgcggtactaacttttaccattcgccaaaactttgggccagattgtttgatgcttccttgtacttgatatatgaccatgtatctacttcttgcattactccgtgcaagaaagatgacaactttagcttttagattactgccgtcttagtaactttatgcatgagatctgcaaatataggggaaagcatcagtatatttttgcaggtaaattatgtacacttgtgcagaatggaaggtgctgtctttcagcagcaaacagaagatgagatcaatactttttccgatatcagagagctaatcttcttttgagttctatccttcctgttcataagcagtgataggaagcctgctcttgaattaacagcagtatcaatgaaaggatcttaactgttttggagaaaaagttctcacaatcaaaagcgcgagttcttttaacgtgtaactactgtacataaaatgggctttctctaatgatctgaactgtttaatgccaacag

SEQ ID NO: 94343 - DNA, 587 bp, Eucalyptus grandis
  Intron number 2 from transcript Egrandis_v1_0.045284m (loc us Egrandis_v1_0.045284m.g) derived from phytozome v7.0 (c hr-ID scaffold_10; pos 38580700 to 38581286)
cttcaggtcagttcatatgctttttgagtattaatccccaaaaaacaaaatgttcgaatctctctttcatacaaggcaatgtctcaatggtttgttgacaacttcttcaatacagcttttccatattatgtttcacttgtgcatatattacatagatagtttagaaatgtcggcatccgtgtctctagtgataattatgccgtgcaaccaagttttctggctaaagaaaaatgaaatcaagtcgcacgtattgaacatgcaaaagagtggtagtatatttgctgcttttagtgtactaaatgaatatggtacttaaacagaagctcgcggaagttaatgattgtccgttgtttctctaatgatatcgttcatgctcgaaattccggtcatgtacttcaaattaactagccctgtttgccgtgggagaggataaaggaatctataatagcacgaaggtgggggatcctttctgcatctctttgaataacaatttgtccatttgtttcatgatttttggtgattaattgtaattccatggcaatgatggagcagcaagtcccggggcatttacgggcggaagcagcaga

SEQ ID NO: 94344 - DNA, 770 bp, Eucalyptus grandis
  Intron number 1 from transcript Egrandis_v1_0.054268m (loc us Egrandis_v1_0.054268m.g) derived from phytozome v7.0 (c hr-ID scaffold_8; pos 29689076 to 29689845 reverse strand)
tttttttttctctactcttccgacactctctacatgtgagtccgaaatgtagattacttgttttttcatacaagttttatagattattggaatgtgattaaatttatcaaattgaaacacttaatgatattaataaatggtggattaatgttattagtgtaaattcattatacactctttcattattatttatttacttgtaactttgaatcaaattaatttgattacaataatcataaaagtgataatttattatgtatatatataatacgtgtcccaacatatcagaattctctatttttttagaaacaacgcgttggtatatcgtgtcgtgtcgtgtcgtgtcgtgtcgcgtcgcgtgccgcctatcaatatcggtgctacttagttgcccaatcacccccatcgattataacgccccttcgagtgtaatgagcacatggtgtggagagtttaactcaatcactccctccctgcctccctccttttataaccttttaccgaccaaatcagcagccacgactaattccaactgacgagcaacctctcttcttcttcttcagtttcatggcctgaggagctctcctcctacgcctctcctccgccaatggaagccctcccctgcacggcagatctctgcacgttccgatccccggcctcccgcacctccaccgccgcttggccacatggagccgatgctgaccacccgctgcttcatgtttccaacgattccagcttctgcggttcattgctgcggatccgattcacag

SEQ ID NO: 94345 - DNA, 356 bp, Eucalyptus grandis
  Intron number 1 from transcript Egrandis_v1_0.024586m (loc us Egrandis_v1_0.024586m.g) derived from phytozome v7.0 (c hr-ID scaffold_8; pos 46721983 to 46722338 reverse strand)
agtcccgctaaagatcctgcaaagccacctgccaagtgagtactttgctcttttcttttgagtaatcttttaggtagatttggtccatgtaaatccaactccctttcaccatgtattactcgttcttgccatttggagtgtactcatccgacaggtcacgtatacttgtgtctcctattgaagaaatggtgattttttccatttattttggtggattaaagaaaaagtcaaacagcatacaaaacctttcggaaattcctgaacttgtttatttttctcatactaattcttcgggttctttatgaactggatttcatgtagggctcaggtggtgggttggccgccagtgagatcgt

SEQ ID NO: 94346 - DNA, 922 bp, Eucalyptus grandis
  Intron number 1 from transcript Egrandis_v1_0.037936m (loc us Egrandis_v1_0.037936m.g) derived from phytozome v7.0 (c hr-ID scaffold_10; pos 4234100 to 4235021 reverse strand)
gagttctggggtaagctctcgcgaccttttgcagttgctcgccgcgagcttcgcggtgtttctgtgtgtgcgtgcgtgtgtttcttggcattttagtagttctcgcggcgtcgctcgtggtttttctgttacgccgctgctgctgcgttttgcttcgaacgtgcgtgggtgctggtttgttgctcgtgtcgtccggacacgtgtggatgtgctctggcgtgtcggggcgttttgctggtgctgccgaggtttcgcgtgttgttgtctggtgagtcggagggatttgatcggtcgtgtttgattggctcgacgggatttaccgatgccctgctgatttattgtgcgcctttttcctggccttttattgggcactcgctgttttagtgcgtttgcgaccgtggagagcgtcggtttcgcttttgccgggctttgtgtcttgttctgctcttggaagtttgatttttgccgtttctgtagttttttccctccaaaataaggcattgtgcatgtatctatgcaagccatgttgattcgtttgggtgtgttttcttgttgttgcatgagaatgcgttgtgtctgaccagtaaatggtagtccttactgggttcgctcttgggtacattcgtttgatcttgaatggtcatcatcgccagttcaaatgtttctgaaactgagcgactgtgttccaaactacttcaaactttagatggatccttgttttaatagctgtattttggacaaaagcgagaataaatgctggcagatgattggatgagactgactattggaataattagcttgctctctctctctcatcagcttagccattctcatgggctcgatctatgttttgttctcatgaaatttcattgcttccatttttgcaggagttgaagtgaaggctggacagccccttaaagtc

SEQ ID NO: 94347 - DNA, 679 bp, Eucalyptus grandis
  Intron number 2 from transcript Egrandis_v1_0.027161m (loc us Egrandis_v1_0.027161m.g) derived from phytozome v7.0 (c hr-ID scaffold_1; pos 25946866 to 25947544 reverse strand)
atcttcgggtaaaaccgaccagaattatgatgatccccgccttttttcttcgaaaaacatgccaacatgggaaatgctaacaattccaagccctggtttccttagaaaagtgttaaatcctcaattttaacaagagcaaatgagtaggtatttgacgcaatatttatcttgaacttctaatatttcatttcggaaaaagtatgaataacgtcatttttaaatcaccttatttaattttcaagatattcaagatttaaattaattaattttctgatttaaagtggagtttagaccttgccatgctccaaggtgttctgtgtcctacgtatgcaaaaaatgcataagtagctcccaatcgatatggctacggaataggaaaacggatcttggaacaacttcaactttcatatgacttgggtttgtttgtttgtttgtttttttttttcctaaaccttctccgacatgaataatacaatatgctcagaagctttaacgaaaatctcattatggacccacatgactatggtaaaagctagtaaatattcgccctttgacttcatttaatctgtaataagtgtccaaccggggaagatgaacggtctctccttgacgagaaaatatcaatagagaaaaataattgagcaactttctttgtatcgattgcagcttcggtgggacg

SEQ ID NO: 94348 - DNA, 694 bp, Eucalyptus grandis
  Intron number 1 from transcript Egrandis_v1_0.019058m (loc us Egrandis_v1_0.019058m.g) derived from phytozome v7.0 (c hr-ID scaffold_1; pos 39158341 to 39159034)
gaagaagaagcataagtttgagattgagagcccaggtaaattaatgcagagttttgaatgttgaccattagttgaggatcactgcttttgtagattcttttcttttctttgcaactacgaagggttctggtttactttgttcgagtgatcttgactttacgaaagaataagtttaaaggagcagcacccaatatatcgtgcattgtaagttccttctcatatctggggctgctaaatagattattagcatgcaagactttagaggttttagcaatgttaaatttctgtctttaatgtatgtttcggaggagacagaaaaaatatggtgtaggctacacttgtcattcaaagcgttttaactaagccttagaattcttgtaattttgttaatgagctagttctgaattactgttggagtttgaggtcagaaggcagtaaatttccacggtattcagaagtagaaaatcatctgagcaagccaagtaaatatgaatgagtaaataagtgaattgcgtaaggcaggagatagtttagcttattgtcatggtggcagaaaccgtctgcaaaattacttgtgacttttcgtattatgaatttccgctatataaatgtaatttatttaattgatagtgatttctataaagcatctaattttgtaggtgagaagattgcttactttgttggtgccaatttc

SEQ ID NO: 94349 - DNA, 725 bp, Eucalyptus grandis
  Intron number 1 from transcript Egrandis_v1_0.003722m (loc us Egrandis_v1_0.003722m.g) derived from phytozome v7.0 (c hr-ID scaffold_10; pos 35818607 to 35819331 reverse strand )
cgacaacttatacgccgtttttcccactcagcgtaagtatatcgcgtaccaaatcgcattgctcacatgatgattatgatcctagcattcaaagcttctgctttataaatcccaacatataaaccgtacccctcacgtgcaccttgtaaaagctacagccatggagcagctgacggtttctgtcatggaaaacgatatttttcgagcataaaatcaatcacatctagcctagcggctcgactacttgcagagtaggcgagaaatgtatccactcagttatgatgaactgaaaagaaaaaggaaaatgaatattacagatggctgcgcaatccaagccttttttttttgttggcctcattcttaatgactccccatataggaatatagaaacatagctttgtgcacaagctcttccttctcttcagttggattatcaagaattgttgttgatgctcaagacaaagatggtggtcaaattctttgcccaagtctttatagtgatcaaagccacaacttagattgaattgcattgttatctgcaaatgtcttaaacagttgaattggaagaatttttccgtgacacccagaagaatttctagttttgtttgtgtgttatgataacggtgctgtattttctggttggagagatgtgcgtttgatctcaagcttcgtgattgtcgtttttttaatgctcaaagttcaaattatgcagtgtatattagcat

SEQ ID NO: 94350 - DNA, 857 bp, Eucalyptus grandis
  Intron number 1 from transcript Egrandis_v1_0.007436m (loc us Egrandis_v1_0.006763m.g) derived from phytozome v7.0 (c hr-ID scaffold_10; pos 28150218 to 28151074)
gtcctccggcgccggcgcctcctcccgctctccaggtaccccgccccggagcgctccggcgacggtctccgtcgctctcggccttcgcttgatcccgcgtcgattgtctttctccctcttctttgcctctggtttcggcggttgtccggcgcctctcgctcgccggagcttcgcggcttcggccgcgtcgccttttgtcgtccggcatgcgttccccgctgctggggagggctcggtggagtgaggaaacgaggagttttgatcgtcgccgtgcttctggaattgcgcttgatcatgtcgaattgtgggagtgtagtctcgacatgcgcgcagagaaattgcatttgaatgagagtttagatccgacagcgaagtcccgcttcatgagtcttgatggtgaagatttttttttttttttttcggcagaaggaggagcattaggaagtcggtggccttaggcgggggattgcctagctaagtgtcatggaaaactgcatgataagatttcatagatattcacgtttacatagtgcttcggtctagttcagccctgttctgcgcttgccatggtggccaaggtgtaaacgctaaaatcggtttttctgtgcaaattcttgataatgatatttgatcctgttagctctcagtctttgtctgtgattatggcttggttagcattgatttcctccgcatgttaaactgatgatatcagtgtgtccgcctgtgtttactagttttcttactcagaatgtgcatttgatgtttatcctcacatccataccttaatcagcttttaaggtagtcgtcttgtttaattagcagcttccattttttggggtagtcacttgtctaaggat

SEQ ID NO: 94351 - DNA, 437 bp, Eucalyptus grandis
  Intron number 1 from transcript Egrandis_v1_0.053282m (loc us Egrandis_v1_0.053282m.g) derived from phytozome v7.0 (c hr-ID scaffold_8; pos 68925324 to 68925760)
gccactgacaagggcttggccaagttgtggggtgagtttgtctttttcttttctttttaacttttagtttttttatagtaatttagttctaattatttaattgtttgatttcgttttgtgccacatcattgctgcatgtcttaaaaaagtaataaaataagacatgttcacattttctgctagctaaaatggacagagtcaaaggaagtacttaaattgaactaatttgataagtctaaggatttgattgcactttttgcaagttttatgatttaattgcattttcatgaaatgtttagaatttttagcgaacttatcccattaaaatttttaggaggacaagtaattgaaaggggaatctacttgcttgaaatattcatctctttccattaatgtcaacaatcatgtttgggaagaagtattggacgaggaatcct

SEQ ID NO: 94352 - DNA, 487 bp, Eucalyptus grandis
  Intron number 1 from transcript Egrandis_v1_0.016368m (loc us Egrandis_v1_0.016368m.g) derived from phytozome v7.0 (c hr-ID scaffold_1; pos 38590836 to 38591322)
aagcatcagatccgactaccctctgcgagaaaagggtacattcctttcttctgactccgttcccagaatcccagatgttgtcatgacattctcttcctacatatcagatcttttctgggttaaacgattatctgtattttttttgggggttcttttttctcgtgtttgtcacgaagcttctggtgggcagctggtttagttatccatttgcacccagtaagacgctgtaaatcatagatcttttcctttggcggtatcgaattggttatcttctttgattggtggcctcgaatttgtcaattgattcttgtcgtggagaagttactgctccatctaggaaataatttttttttgcagtgtcaggctgaaatgaatttggctttttcgatcttcggtgattgctgtttatttactcccccgggtaatcttttcctggatctcagtttaatgtcttatggtaagaactttgtctcaagaacaggaatcg

SEQ ID NO: 94353 - DNA, 1051 bp, Eucalyptus grandis
  Intron number 1 from transcript Egrandis_v1_0.033032m (loc us Egrandis_v1_0.033032m.g) derived from phytozome v7.0 (c hr-ID scaffold_8; pos 4953799 to 4954849)
ccgaaagggtgttcaaaccagactacagcttctgatcttgcttcaggaattactgttactgattcatcaatcttgatgaaatcagcacacccataatcggtacattgttgattggtctttctttatcttttggtttctgcatattctgctctcttttctttttccttttttgggtttccatcgtttaacacatagtcatcggcattgccatgttgcaacgtgaccgattctgtgtgtgccaagtgcggaaatgaaatggtttatagaaagagcatggggacaagtcaaatagtaatatgtaatttaagtgcttttttctatgggacagtggggacaaaggcaggggccagacattttgttcatttatatgtcttctttataaggtcaatactaaatattaacacaagtagaatttgttttttctttttatctttcactggcgatactgaggaaaccacttggagaaatctgattgggctttttattttttatttttctggtcataaaatctgattggctttcgcatccttggaaacatcacactccccccgtcccattccgtgatggcgttcatcatatggtcatcagaaataagcaatttttaagtaagcagtagctccaaaagggaatatgctctctagaggtctaaatttagacatcagcagatacagaaaatatcgttttgatcatactctcagtttttattggggtgatcattattcccttttctggtcaaagcatatttttaaaatttccatttgttgttcgatttgcatcagtttttaagtaagcagtagctccaaaagggaatatgctctctggaggtctaaatttagacatcagcaaatacagaaaatatcgtcatgatcatactctcagtttattggggtgatcattattcccttttctggtcaagcatatttttaaaatctccatttgttgttcgatttgcatcagttttgtcgtactgatgtcgaggaactgaaggaaacctgatgattattcttttcttttttgttttcgtcgtgcagaattcgttttttcttttggc

SEQ ID NO: 94354 - DNA, 542 bp, Eucalyptus grandis
  Intron number 1 from transcript Egrandis_v1_0.017068m (loc us Egrandis_v1_0.017068m.g) derived from phytozome v7.0 (c hr-ID scaffold_8; pos 68691233 to 68691774)
agcttgcggaggaggagggctggtgttgagcgaaagtaagtatggaatacaaactgttcgggcttccggggtagtttggtttctctgtttcttgcgtctcgaaagatgtgttgttgtttcgtggaagatgatggaatcgcgggtttaagtgaatatagatcgttcaaaagttcgttagtcggttggtgatgttctatggtttattgcaagtctgctcttagattctgtctcgatacttttttgagctctgtgcgtgcaggcctgcgtgtgtcaggtttgcgctgtttttggagaatcccagttttctagactaccatcattgatgagcaccaaaaactcgagtcccttttggatttccttcttgatcagtcataactgcagcattatcatcacatcctaaatttctttcttatcgttcgtgagctgatcaccatgttgattttggttttttcgatgtctgagttcgcattaagtatgcctgctggggacttatcgattggttttctttttcccttctcttccatttgcagcttggagaggtc

SEQ ID NO: 94355 - DNA, 864 bp, Eucalyptus grandis
  Intron number 1 from transcript Egrandis_v1_0.042127m (loc us Egrandis_v1_0.042127m.g) derived from phytozome v7.0 (c hr-ID scaffold_10; pos 17235851 to 17236714)
gggcgttgggtcaagccagacgtgagtatctatgtattttaattctcttcttttgttttgtgaaaaatgaataatttgaaaaatatatttcaaaaaataattactttgatcatttaaagcaattacttgataaaaaatatttctttattgatcactatttatgtctatatattttcggaaatcataagaatgttttttgttctttcatttttataaccaaaagaagcaattatttttaggaaactgttttctaaatcatccattttccacaaaacgaacgcatccgtattccccgaattacttgtcaatgtggtttgcttaacaagtgttaatatatattctagcacgtagcgtgtctaatcgtagttccataaacagacttatccatccttggtttgatggttagtgagaggttggatagttaaaatccttaactcatgggccgacaagtccgcttgtgtaaagttttctttacgttgtttgtgtaggacgagaatatagcgacatagtattggtaagctaaaatggaaaaaagtctacagtacaacaatcaaaatagccagacacttccccacaggatatgtgtaggacgagaatataagtttctaaacgtacttcggataattcgacgattgagttatttagccataatatgatgtctgtaaattataaaccagagaaaatattgcatggttttcagatcatgtagacgaggtcgagcgggacatatcgataagacccttatagttaatcaaacaatacgagataatcactagcgtatttttatttttcttttacctcaagataggatattcattgacttaatatccatggccctgttcttatatataggtgtatccactg

SEQ ID NO: 94356 - DNA, 866 bp, Eucalyptus grandis
  Intron number 1 from transcript Egrandis_v1_0.047539m (loc us Egrandis_v1_0.047539m.g) derived from phytozome v7.0 (c hr-ID scaffold_8; pos 24781269 to 24782134)
gatttctacactaggggtgatcggttcccggttcggtccggttccaaggtggaaccgggaaccggaccgggaaaaccggttcccaattttgggaaccgtggaccgaaccatcggtttcggtccggtccggttcggtccaataggattggcactttcttttttcactaaataacgaccatttattaaaaaaaaagaccatgctccggaccgatcaatctcaatttggttcctgggcgatctaataaaactactcacatgtgttttcacgtgcaaaatattcaaacttcacttgcatgaatattaataataatttatgtgtttcactattaattttaagcataactatgtttggtttaggttttatagacaatctctcttctatgctttaaatgtttagtcgatgtcggactctttgaggcttgaagtgccttgtcgtttgcaagtgaggggagcaagagagagagtgagcatgaggaactcctagagccttatcccacatcgagtagaaaataaaactaataaataagttttctaagagctttggtggtctcctggccacataagaggtttttacttcaattgcaattccgattgcaacaaatttcatatataatattcatatattatatgtgttaatatattatatgtatataaattatatataaaaaaaattggtccgatccggtcggtctggttggtccggttcccaccttggaaccgggaaccggaccgccgaccgtgggaactgcccaaaaccagccggtccggtccagtccggtccggtcccggttcgggcggtttctgttgcacacccctattctattgcctgaggcgggcccacgatagccagtcgagtattcaacttg

SEQ ID NO: 94357 - DNA, 936 bp, Eucalyptus grandis
  Intron number 1 from transcript Egrandis_v1_0.036336m (loc us Egrandis_v1_0.036336m.g) derived from phytozome v7.0 (c hr-ID scaffold_8; pos 51696176 to 51697111 reverse strand)
acatgtgagttcttgggattttcggagtgggtttggatcgttcttctctgattccttgatgagcgcgcgtcaagtgtttgatcaagtgcctgatagagagatgtggttgtatcttggaccgtgttggcgtttagttttgatttttcacttgcttgaaacgaatgaagggagggtcaagatgagtttttcgatatgtcctcctttttgccttttcggttcttgactcgatatgtataatccttggtctcggccaatctttgcgaatggttctacttgtgttgtctgtggacatttttttcactttggttgtgggaacttgatttactgcgtgttattacttacgcggccgcttagattgcttgtcactgatgactactcctccaagataaatttgcttggctagaggatgctttttgtcttctagatagcatgatttcactggaaaatgattacttaagtgttcctgtaagtcgttgtttagcagttaaacttcattgaaaggaacctctctccgttgattttttggtcgtgtcctgtgaagtagctgcagatcgagataaggcatttcttgttggtttctgctgtttggaacattgacccacaaaaggcgctaaattgcagggatatcagctttggtgctgagttcatgtagttcgtagtgaatggccaatttgatatagtggggaaataaaaaaagggtaattggaacaatgtggattagcgtgaagcagcttcatctctgcagtattaggttggtacgtttctttggagtatctagagtggagcatgagtagtggctcgctaatcctgtgtagctagtctttcatgaatttaagttgaattatgcaattcaggacttcattaatgtggccagttgggtaggtgttattggaatgatacttactattgcaaaatgtaattatctcttcataaatc

SEQ ID NO: 94358 - DNA, 904 bp, Eucalyptus grandis
  Intron number 2 from transcript Egrandis_v1_0.018882m (loc us Egrandis_v1_0.012945m.g) derived from phytozome v7.0 (c hr-ID scaffold_10; pos 11332165 to 11333068)
tgtcttttgcctcacttacgatctcaaagctgtatgtatttttaacagttttgcgtgactttctttacttgattagtgtatgtacccaattatcttgactttgattcaatgttgctgcttctttgtgatgagcaagtcgattggttttcctgtgctctctattgtacgctgacaagctttaatgagaaggtcatatagcatgaggattgcttgctgaaatgttcgattgagaagaatgaatagcgttggcccttgtggccgttatctgttactttgacagtctttcttttggctgttgtgcatctaatgttcttgcttttcactgtggttgatcagtcattagattctgaatgcttgatctcctcacctaattatgatggtgtccatgtctaatggtatgttttcttgagttacggaaattcaaaataaacatgttcaagtgagaaaatggatcctgttaaaaaaagaaactaaccatgagtcgacttattggagcacttcttgtttgacacctccaaagttaatggagatgtatacgtgttcagtttgtattattactcttctgactgattcacatacagttttgacataatttaattactatgtctcttgatgctggctccatcaaatgcctgtatggttacatagatcaatcgactgacttataagtgaaataagtgctaatcctagatttatggttaagaaattcttcagattcgctgcatgtcaagtatccatttactattctctctgaggacaaatatagtttctgctattgaggtggtttaatgccatcccaatttcagtttgaactgccagggactttttttccttcaataatttgtttcatgttgttgaatgtggtcgcaggaagaagagacaaaatcttggaagaagctaatca

SEQ ID NO: 94359 - DNA, 712 bp, Eucalyptus grandis
  Intron number 1 from transcript Egrandis_v1_0.044987m (loc us Egrandis_v1_0.044987m.g) derived from phytozome v7.0 (c hr-ID scaffold_8; pos 10400011 to 10400722 reverse strand)
acggtggcgagcaacggagctttgagttgaccgtcgccgttccttgcgttggctgaggggtgccctcgccaatctggcgagggagacgcaggagagggcgaccctcgttggacgccagccatggcggaggcaagcgagaagaaaaagaaaaagaaaaagaaaaaatattaaaaagtaaaaaaagtaaagagactaaaatgcccaattccgttaactttaactaacggaaagacgaaattggtcaattttcaaataatcagggactagatcggacatttatcaataattcatagacaaaattgaacaaattaaaagtttagggataagattgtacattaagtagaagtttatggactgtttgtgacattttccctttttatatctcatataattttgccataaaaaatcaaaaccagaaaaagtaacgaatgaaaaataggttctcagataaatcccaaaaccggactgaaaagacatttcagaaccaatttcaaggaaacatggtaagttttaagttctaataagtgaaatcggttctaacacgatagattgcaaatttcaaatctagaacatgtccatcttgaaatcaatcgtcccaaacttgaagtcgtcccccattaaaactaattaaaagaggggagagagaagcaaaggcagctctagcatagaaaaatacttcttgattattgaattgaacgaggctggttgctag

SEQ ID NO: 94360 - DNA, 1024 bp, Eucalyptus grandis
  Intron number 1 from transcript Egrandis_v1_0.049620m (loc us Egrandis_v1_0.049620m.g) derived from phytozome v7.0 (c hr-ID scaffold_8; pos 14750278 to 14751301 reverse strand)
gaggattcttctttcaggttatcctttaaagatccatcaatcgagctgtgaaatgaaaacgtagtttaatatataagaatattgcaaatcaaacttgtatttgtagcaataacttccaagtataataatacactcatagttggcataattttctcaatattactcactttagatctctagtattactcatgacatcgtgtcttgaaagtgatatcattgtcatccctgactattcatgatattacttattgtctcttcgcaaaatgcaagctattaattgacaagaaaaccaagaaaccgtacctctattttgttattccaattgctagtcagcaatacatggtcattgagaaattgtgggacaagaacatcacaaatagcataactttcttacatgctcatttgtgttataactttttaatcgatcacttaaatagcataactcctttatgattacttgagtgttataacttttaaaagatattcactttaagtgctataagtttttatgcaacattggattttccaattatgaaaattgccgacatcactccagtgaatgtttttcaaaagttatgtcattcaagtgatcaattgaaaacttatgataccaaagtgagtgtcatatcaaagttatgacacttgtgatgtcattttcccaataaatcatatagtcttgaacaagtgcaccaacaaatggatgcaccatcttttttaggaaatcgactccattttgaggttaagaggagaatttcaaagatcaacgtctcatttagagtaatcttcatcaaaagagtagaggaagttggtaagaacgcacgaacgggcacatcttttgctgcttaaacttgggttttatttgatcaattataaagtaagaccttcgtcgttgacaagtaaccgcggtacgtaccttgttaatcaagtactttgttgcttaacaagcaaggctttttctcatgtactttttatttctttggaaacatatgatgatgcagaacaatcgacagcattgccatcaatt

SEQ ID NO: 94361 - DNA, 1023 bp, Eucalyptus grandis
  Intron number 1 from transcript Egrandis_v1_0.024672m (loc us Egrandis_v1_0.024672m.g) derived from phytozome v7.0 (c hr-ID scaffold_10; pos 1506245 to 1507267)
taagttgcagagcgccatcaagttcaacggcggaggtgacgattctcttcctcgatgttcttcgcttgtttttttagttttattttctgttcccggtggtctgctcggttacgcttactgttggtgatttgaacttagcgtgtggtgtgatatagttatgttgatcgatggggctgggagctggtgagatgtacgagagagagagagagagagagagagagttcagtcggctctgttttctattttgtgtagttagagaagattgatggtcgggctgtttctggaagttggatacctgaactaattatggaaattatggtcactgaactgaccttgccccaaaaaagaacaaacgatgtaccgagtgatgtggcttgatcatgctggggaagaagaaaggtactttaggaattttttgagtcttagtagatgggcaaagcttctcatcgcgttcccgttttcacatcaatttacagatttttttttttttaaacattatcgttcgtttagagtacacaatgtggcaaaatggagggcagatatgggggtgtaagctagttgagcctgctagtgacagttgtgtgatgtggagtaggatgaaacaatatggacataatcaaactgtgccgagttttttcgtcgaagatgagttgtttagtagattgtatagtgcaatgggcaaagactgctgattctattgaagagagcatcaagatcagcgcgtgcaagaaggagctgattgttctttaatttttcatttccacggagaaaagattgcaaactggacttgcgttatgtgacagtggtaaattaccgacttttagatgtccttgtgagggtgttatagagttttccacttgtcatccagacctgagctgtagtttctgtatgcaaccactgcaaagcgcctgtagtaacctgtttagtttatattcaactatggatggtagttcagagtggcttttaactttgaaatgaaaattttcaggtcacatcaaccactcgatattctggaaaaatctt

SEQ ID NO: 94362 - DNA, 389 bp, Eucalyptus grandis
  Intron number 1 from transcript Egrandis_v1_0.000834m (loc us Egrandis_v1_0.000834m.g) derived from phytozome v7.0 (c hr-ID scaffold_8; pos 35528886 to 35529274 reverse strand)
tggcaagcttgatcctgaactaaaggttaacgaaagtcaactttcatcaaatttaagtccttttgttatacatcaaaatatcatccaattatactgaaagagagaagattattcctcagacgacaggaagggtaacttacaatggacatgtcatgaatgagtttgtgccccaaagaaccgcggcttacataagtcaacacgatcttcacataggagaaatgaccgttagagaaactttggccttctctgcaagatgtcagggagttggatcacgatacggttagcaaatttgatactttcctattttatgatgtcatatttgagtttgacttggacaatttttctttttcgaataaaaaatgctgattcctttggcggcatctgcagat

SEQ ID NO: 94363 - DNA, 994 bp, Eucalyptus grandis
  Intron number 1 from transcript Egrandis_v1_0.022016m (loc us Egrandis_v1_0.022032m.g) derived from phytozome v7.0 (c hr-ID scaffold_10; pos 21192229 to 21193222)
cccgtttggttgacgagagaccttcattgataagggtgagatttgtctgcagattctttgaccccgttcggatcatgattgcgcatttgctccagcgcgtttgcttgcttctttctcttcgagtttccgccgcgcttcctgaacccattggacaccgaagttcttctcgtcccttccgccgctccttcgcaaagtttgagggttacccggagcgagcgtcgggcttaggatttgacttttgtatacaattggcacctgatgattccgtgattgcctcggtcatttccaattgctgcagctgctgggtttagtgtttctcctagtcatcgtcagaggaatgtcgtgttgaaattatcaactttgcgagttttgatgtggcgggttgtggttggcttgtgctgcaaatgcattaaaagaatcgaagttggagctgatacccggaatttgcttgaagctgtattgtgttgatttatattggcagtggaacccttttgaggttttccgcttctttgtttatttgtgcttattgcttgagattgggaagcatccacgagcagagtgcatgctgttgtggcatcccagcgggccctttgttcatacgtttggttttggcataactgactccattgagttccccaccatagaactctacttaaaatgaatatgcagtgggctaaagctgtctgtttgaacatgtagtatccttcaatctgaggacattgaatgtcattttctaatgctcgcatgcacatctatccgttgtgggtgggcattctaatgcaaagtagtgttgaactaacctattgaacaatgaaactgaaggaatcaaagacatggtcaactattttatgctattatgcttttttctccttctatcacgaagtacttcagtggaatttaaattttgatgatctctccttttttcctttcctttctgtgtacttttctcgtgtcacttactgcctcttttgttcagctctagtctctcctaaac

SEQ ID NO: 94364 - DNA, 404 bp, Eucalyptus grandis
  Intron number 1 from transcript Egrandis_v1_0.012818m (loc us Egrandis_v1_0.003960m.g) derived from phytozome v7.0 (c hr-ID scaffold_8; pos 58905458 to 58905861 reverse strand)
gtccacttgctggaaagtttgttcagaaagataaggtgatttgattctctcatgatcattttattttgtttaagtttacctcttgtttgggcgaacgaaaaggaaggttgcgttttctaaatggtcatcatgtagttaagtagatcacaactttcttaatttggatttgtatttcttgcttttacaattcagagcatgtttagagttgcgtctttgaagggaggataataaattgattcttggattctgaacgttacttggtccctgacatgcaacggaaacttgtattaatgatctgttctgatttttgagttcactgtcttgtttgtttggggcagcattcttcttctggctgtgaaaattacaggcatatcacgaatgatgaagcagattatgttatagag

SEQ ID NO: 94365 - DNA, 468 bp, Eucalyptus grandis
  Intron number 1 from transcript Egrandis_v1_0.013323m (loc us Egrandis_v1_0.013356m.g) derived from phytozome v7.0 (c hr-ID scaffold_10; pos 39041108 to 39041575)
ctgatttctttgacctcctggttcgtgcttttgctttcgtgagtaaagctgtagacttgctggaaaaactgctggatcttaggagatgccgttttgtagtggttgctgatccatttaaatgcttattgatctgtcttttggagcttgatggacctaggtttaaaagggtcgttagatatcgtagtctttcttttggaagatgggttacgccccccctgttactttagtttgtgagagaatttccttttatttaatgtaagtgctggtcgaaaaaccaaagctttttttggttagatagtggagctgaggtaagctttgcctactgatttttaccatattgttggtctgtgatttctcctggaacgtctgattcggagaaaagaaaaagaggaaatgaggcgttctttctaacttaatcaaatattatttccagaagacgtaaggctcggtactggtaagaactgcatt

SEQ ID NO: 94366 - DNA, 488 bp, Eucalyptus grandis
  Intron number 1 from transcript Egrandis_v1_0.010260m (loc us Egrandis_v1_0.010260m.g) derived from phytozome v7.0 (c hr-ID scaffold_1; pos 38059902 to 38060389)
tatccgtcatcggtaccttctccttcggcttcgtaagctttccttttttcattggagtccgaattgccttcattttggagctgcgtttatgtctgttctgtgtgtttggagatttaagcatttgcgttcctcttttgatttcacgctgatagtcagagaagtagttgtttcgcgtattttgattgctttaacggacaaaagaatcttcctttgatctatatatctgcgtggccgcatgattattgtttctatctccatacacgctgttttctgcaatgctggataacttacatggtgattactcgtctaatccaagttaaagctgaggaagtcctatggcaataacattggacagtctcaatgtatctattcactgttttatatctgttgaacatccagaagacattgttttgcaaagtgagctgcacttagaccttcaatgtcttccacttttatcgtgtcctatgaatcaatcattgcagcttggg

SEQ ID NO: 94367 - DNA, 793 bp, Eucalyptus grandis
  Intron number 1 from transcript Egrandis_v1_0.015559m (loc us Egrandis_v1_0.015559m.g) derived from phytozome v7.0 (c hr-ID scaffold_1; pos 30913758 to 30914550 reverse strand)
tcacccaactggaggcacctcatcagctccaactggtccgtccctcgcctcctcgtgtcttggtttaaagctccaactttttacctgttggatgtcgatgtggagtttcttgagtcgagtgcatatggtgtttgtacttcatggaggggctttctgaatcagacccgttacccaattctttaagctattcctcaacatgaggtgccaaaaccaaaccatggcctatttgttctgatatatctgcattctggaaaccgagattcgcaatggggttgcatcttgcctttgggtcgtagaattccatgctgtcgatttgatagttgagtgtcgtttagcatctctttcgtattgcccggtatttagttgttgaacgtttttctgctataggcagtggtgttaaattatcgagatttcactgctccttaatcaggcaaagtacgatccggttaataatgacttgtgcatccaattgctcatgatgtaaagacatttaaccttctctccatttgaagaagcatccagctatttactcactgaattatcgaagtacttaagttgatccagtttcttttcagcttaattcacaatcatatctttattgtcagcatcctatttgttttgtacctttggttgaatttcttcaatggatgatgacattcatcaaacttgaggaacaattcttagtgtcttcaaactgttacagacttaagtagccctgttaatttcttataggtggtcatatcttcttatgggagttttgacttgatgactatctttcttgcatccaggaagg

SEQ ID NO: 94368 - DNA, 528 bp, Eucalyptus grandis
  Intron number 2 from transcript Egrandis_v1_0.000537m (loc us Egrandis_v1_0.000538m.g) derived from phytozome v7.0 (c hr-ID scaffold_1; pos 36239462 to 36239989 reverse strand)
tccgccagccagatttgcaggtataatttcaaccgagccatttttctgtgttgcggcttaaggttcaatgatttgtcgaaacgagcagtgagaaaggggcaggtcaatatgctctgcgtgacactggttggcctggttagaagttatgaagactagtttgattggggacaaactgatttggaagaagactgcgaggagggttaggagtctgattaatgctaaagatatgttgctttagcctgagattcttttgttagcgcattacagactgattttttaacctaagcttagtttctagcatcatttctatggagcactgttagattatggttctttctgtttgttctcttttactttttttttagagtcttctgtctgtcttatccatacttagctaacaaattggcagaagggaactaaaaggaataagaatgttattaattcttagtttgataagtgctcaactctgtcatcacttgtgataccaaatgtgactttcgcctgtttctgtggttaattaggtcgcaa

SEQ ID NO: 94369 - DNA, 1021 bp, Eucalyptus grandis
  Intron number 2 from transcript Egrandis_v1_0.014527m (loc us Egrandis_v1_0.014531m.g) derived from phytozome v7.0 (c hr-ID scaffold_8; pos 23827316 to 23828336 reverse strand)
ttgggtgaaagatttgcatctacctttgctgtaaggtaggcagcaccttggcttctatagtgattgcttctctggatacaatagctgccgctgttgctggagctagaaattggataaagtgcataaaagaggaatttagttggttaaattgaatgctagtctgttggacataaggaaccttgtcattaaagtgatttagtgccgaaaacgattgtagttgaggaagatttcatttttttgggggactgcttgtgaccagaaaccgtgtttctctgtaattcttatttactcgatgacggttgagagtgaaaaggcacagcaggaatggaattccctccttgcctggtgtggtccgatggagtcaaatgcagtaagcaaaaattgatggggcacaacggccaatgtcccactagcaattttgctggcttatgagggagtggttagtgaatgccaaatggctatatgtcatggcaaatgagttttgtcttccgacattgatccggatcatgatgccgctcaaaatgtcaacagtgttctgtctgtgtttatgttcttatacatccattgaactagcagatccaaacttttgcctgcgtttgattcactagtttttttactgaagtatgtgaaatcacactctctaagattagctgtaattcaattcagtagcttcttactgctgttggtgatgaattataattgtgcatcttatgcttactctgggtcagatatcctaacaaaggcatctaggcagctgtgcaatctaaatttttatttagggaaatctttggaacctaacagctcagtaatctgttactgctacaagtgaaccatgagataaaacctaaagaatgaagatactcttttaagatttatgttagggggtcaatttcttgataacagaattcttccaactagccagtgcaattctctttcctctggtaaggaagtatatgtaatcttgctactctttttttaccctgcagatcctcttgcaaaagtgctgactagtattttctcc

SEQ ID NO: 94370 - DNA, 515 bp, Eucalyptus grandis
  Intron number 1 from transcript Egrandis_v1_0.009259m (loc us Egrandis_v1_0.007921m.g) derived from phytozome v7.0 (c hr-ID scaffold_1; pos 13819982 to 13820496 reverse strand)
gactcgctcaaggaggtgcgtttggtttggtttcgatgggtttttctggggttttccggttgatcggagtcgagcggtggggattgtttgattgctggtgatggactgttgagtgggttggagactgatctggatatcattaaggctttggcttggttgccgatgctaatcccttgatggggatgttaattattgatttgggctctttttcttttgtttggtgatctgatgagtccgtgtctgtttcctattttggacccgccttattgccaaatgaacaatttttgatcttgctagcgttatctttatatgccgggtacaactttgaagaactcaatagcctccttaaggtttacccggttcgtacggaagcaaaatattgctcctgatgtttgtttagttatcgccagatcagattgcttggatgctccattagcccttgcttgtcaatcttctttggtaacatatgctgaatgagaagttacatttttcatgttaaagggtgcccctgagaa

SEQ ID NO: 94371 - DNA, 866 bp, Eucalyptus grandis
  Intron number 1 from transcript Egrandis_v1_0.044412m (loc us Egrandis_v1_0.044412m.g) derived from phytozome v7.0 (c hr-ID scaffold_8; pos 29081074 to 29081939)
gatttgaatctcgtccctcgggcttttcataattagtctctgtttcaattacatcaagcctttcattaaccaataaagacatctctcttgcaatagcatttctcccttgtatctacatagtcattttcattatgtatgccattatgcataggagaagataaatctggtattctatcagcctgttttatttattagaaatgtttatttattttttctaagaagaaagaatgaaaagctaggatttcttttctttaaagaaaatataggcctaatggtatttttgtaaatacttgaggcagtaaagagcaaaaaggtaataacatgacagatctccacaggaaccaacagtaggccgtgtttgtccaaacagccaaagaacgggtctttatttttccactttcagaagtgggcctaaaattttcttaaaggataaagtactcgattttaactaggatttacccttttggaaatgctgatctagacttcacgtaggttatttttatcacagatattgcttcgcaaaggaatataccagataattgggttggtatttggacaattaaacaaaagacaagacaatttcaatgaactttgtaaagagatgaaaacaatgcctatcaatgatttagtatatccaataattaacttgaattattgataaatgcaaaatagattaacatacagcatttagaataacatgaagaatattgttttagttttggttagacttgctggttgaacatatttagacattcatctccatatttattgtagactagcttcttactctgcgattctctttgaatatttattcatttctttggattactctaaaagcactttctactcattttcccttgtcagat

SEQ ID NO: 94372 - DNA, 1031 bp, Eucalyptus grandis
  Intron number 1 from transcript Egrandis_v1_0.030098m (loc us Egrandis_v1_0.030103m.g) derived from phytozome v7.0 (c hr-ID scaffold_8; pos 52884507 to 52885537)
catcactcggggagactccatctcggcggccgccggtaagacccaaatccgacgcctcttgctttccacgcatgcttaatcaggctcatcagttctgcgtgaatactgggtagtcctctgtttcatgacatctcgcatcggattcatggcttgtctgacaccgagaaagtgaacgtgccatcaaatgtgtccgtatgtatgtcgtcgatgatgcttatgtatttgcagcggtcgcttcccgcctttgttccgcactcttattcaactttaaatgccgctgaccatctttctggaatgaacaaccatgagttctttctttttcttttcacccctttatccttgcttttttgcttgaacagtgaagatggctcttcttcgtgagctgatcattgggttttatggtagttcaaattcgattgattcatgattacttcggtactacttgtcaattactgtcgaaggaaatattttgagggagtctaggtaaggtcctcagtggatagggtaggatctaaaagaaaaggtttttttggaggttggttgctgaattagtcgtgtgataaaaagaaccagcgagaatgctattagtgaagaagaaggagaaagatgaatttgatgagtcatggcgtccgcctccagattcagcctcaacagatgtcattttttgagctctgtagagcatctgttggtgttgcacaatacagcagaacggttggcatgagctcagatgaaattttgtggcaaatttgcattagtcaaggagttttttctgcatctcaatcactatttattttcgaaaaagttcttgaagaagtgacagagaaacgggtttaaatggtttggtgaatttcttgttgcaagttagagatggccgattgctttatgataaccaaatgtttattcacattgtctcttttcatcatggaattttattcgtgaaagttgtgggttgttgaataaacattcatcgccaagccattttgtgctattttgaagggtgaagagagagtaggccagacaattatcctaaa

SEQ ID NO: 94373 - DNA, 850 bp, Eucalyptus grandis
  Intron number 4 from transcript Egrandis_v1_0.030098m (loc us Egrandis_v1_0.030103m.g) derived from phytozome v7.0 (c hr-ID scaffold_8; pos 52886409 to 52887258)
ggaatttccagaaggtcgttttctcgcttcctgcatttgcacaaataatttgatttactaagttatctcaataatacttggtctagactgttctcgtcgggtacttcaacgtcactctgttctaggtactcataccgtttttattttggctaactcggcatgaactctactgagtttgcacaactctaggttgaagtgatttcggagagtagattatgcttcaaatgggttttaggaacaaggcccggttcttcgagggattggaatagtaatttctttaatgcaccaaaccagtctccttcaaattgatctatgtatttgactgctgaatttcatgtctagcattcataacagctcgttccattttgttaggtaaaacatatctatgttcctgctggctctatgtaaggaagatatgttaggttaatgcaacttgggagttcaattacttatcaaaaaaaaaaaaatcaaatgaaagaagaagacactgggtggtagaggtattagttcttggctgaaacttttttcgaataacttgaaatttttctgcgttgtaaaaatttacagatgcaaattcattagtcccccagtcacgtcaaactatatttgttttggattggccgtgtagccatttaaactgcagtagagaaggggaaagatggaatctgaagtgacaaatgccatagcatttcagcctcgtggtttaagtactgtcgagaggaagttttcaatgacttgtgacaattttctttttctacaaactttttttcttttctttttttttgcatagttgttcttcataaacagttttttttcctttggcagtgtgactgtggttgcagcttatctc

SEQ ID NO: 94374 - DNA, 958 bp, Eucalyptus grandis; identical to SEQ ID NO: 94249
  Intron number 1 from transcript Egrandis_v1_0.020520m (loc us Egrandis_v1_0.020520m.g) derived from phytozome v7.0 (c hr-ID scaffold_10; pos 29064451 to 29065408)

SEQ ID NO: 94375 - DNA, 567 bp, Eucalyptus grandis; identical to SEQ ID NO: 93828
  Intron number 1 from transcript Egrandis_v1_0.016535m (loc us Egrandis_v1_0.016519m.g) derived from phytozome v7.0 (c hr-ID scaffold_10; pos 17036290 to 17036856)

SEQ ID NO: 94376 - DNA, 854 bp, Eucalyptus grandis
  Intron number 3 from transcript Egrandis_v1_0.040603m (loc us Egrandis_v1_0.040603m.g) derived from phytozome v7.0 (c hr-ID scaffold_10; pos 22189755 to 22190608 reverse strand )
tcttcaggaaaggccggctgagggagccccagaaggtccagcacaagaaaataaatgtggggcctgaggctggcgaggtgataatcttttctagggaccacgtctatgggagatatttttcctttttttcaccaagcaagtagtatcgacacgacaacaatctcgtattcaatgcgctggctttactgcaacaacgcagggtgacaaaagctccctcaacacgtgcatcccggggatggggcatgtcgtggacgtctttaggaagtgcctaccgaagaagaccaaggaggtccagcctatgtagtaccgacacgcgacacgacacgacacgacacgacacgtgacacgtcatttttaaaaaagtagagaattttgacacgttccaatacgttaaatattaaataaatatttttatataaaaatgcataaataagtaaataataataataaaaaagagtctagaattagtctatactaaaaaaattaatcatacatttgttaatatcattcatttttttaatttgacaaattcaactacatttcattgtaataaaccataaaaattaaaggaaaaaacaaataatccacatcttattgttaaatttaaaatttaacaataagcaaaaaaacagttaacattccatcaagtaatataacaaagtcattcatccacattatccacttcttctacacaaaaaagcagactccatctccagctcatcaagtgaaagatttgcaacttcaaacaccccaacatcttcaaatgagtcaaaggcatctccgccaatatcccacatcttagtctctccttctgcatattgtgggctttttcttgatagaagacggagattgct

SEQ ID NO: 94377 - DNA, 688 bp, Eucalyptus grandis
  Intron number 1 from transcript Egrandis_v1_0.040158m (loc us Egrandis_v1_0.040158m.g) derived from phytozome v7.0 (c hr-ID scaffold_10; pos 21269260 to 21269947)
ggaatagatccaacaaaattttgttgtcttccctcatcagcaactagttatagctttgttaactcgcatttgtctccaaatgcttaaagttaaggacacccagtaataatgtcaattttgtgtgagatttcaactgatctgaaagcatagtgctgagggttcaatcattcaataatatataggtttgacctttattacttttagcagtttaaagctgcagaatggattttatgcaaaagagagacagagaaagggactagattttttttctttttttttaatttgctgtgacaaagaaggacattatagaaatgtagagactgagatgcaactgagggaaattagttattctcaactattgccataacaacacttgtgacttactttttcatcaaccatatcgagttatacctttaatatcaacatctgtgaaattggtcccaacatcagatcaactgaaaactgttaatatacaagcattgcaatctgctagtgttgcacttgtataataatttctaagttatgcttacatcaaagaaagattgtattatatcaaattaactgtgaatcccctgacaaaacctctccgttttttttattgtgaatctgatggttttctcttgattatgatagtttgcttagttatgcctttaatgttgaaagaatactggtggaagtctttgctgaa

SEQ ID NO: 94378 - DNA, 791 bp, Eucalyptus grandis
  Intron number 1 from transcript Egrandis_v1_0.028688m (loc us Egrandis_v1_0.028688m.g) derived from phytozome v7.0 (c hr-ID scaffold_1; pos 36966710 to 36967500 reverse strand)
ggaccttccccgtacgtagcaatccttgcttcttcttcttcttcttcttcttcttgatcatctcttgtttccatgttgcaaagccttttcccattaagagatatgcctggagagagagaaaaacaaagcattgggattttcttttaattagcctcggaactttcgttattgatccagctattttttcccctgcacgtactaggcatttctaaatgtatttgctatttgcgctttcaactctggtgaaacaatgatctgagatgcttctctttcaatatttcttgcaatcttcaaattgtaaaatggattctccttcgaaacactgtttcttattaagtatcacgaatgtgggagaacagattacgacagataatgtttgatgggcttcactttttctgccccgcctgaaaagaaaagaaccaatcagaacttggggaatttcatatggaagttgtacctgttaggccctaattattgatatatatgtatggttttcttataaataggtttaatgcaatgggattcaacttttttgcagcaagcttatattttagcatgtatcaattggagatatcattccgtaattcatgatttatattttccaagcagtgttcatatgcatccactatgtacacaaagtccataatttcatgaacaattttgaacccatgcccaagtgttagaaccgttttaaaaacagttacaattccaccaaatacagatctttgatctatgctttctattctattatggaacaaaattcttttggatccagaatttgcggcagatct

SEQ ID NO: 94379 - DNA, 495 bp, Eucalyptus grandis
  Intron number 1 from transcript Egrandis_v1_0.013960m (loc us Egrandis_v1_0.013960m.g) derived from phytozome v7.0 (c hr-ID scaffold_8; pos 19227956 to 19228450)
gtcatctcttagtcttgcgccgtacgtcctctcccttcttctcttcttctgggtgttcttgttttggatttttcttggccggagctcgttctttctgattcgggatgattagtttattcgtgttagaactgccgcctttagcataacggtgtgtttgaccgtgagatgtttattaccggtttcttcgtggcttgcccctggactttcttgcctctttgtctgggcgatgtgcgagaggaattcagctcgtccgtttgagtttctgtgggacatgtcacgcaatttttgcatgctgtaaagaaatgttgaaggctgtttcgtttagattggaaatgaggtggaaatagtcaatcgagctcgaatcagctgtaccggcgtgattcctctattagttttcgtttgattattggttctcttattgaggatttgcttttgtgtttccctggtttcttttttgcaggcattcgttcggtttccatatctgccggaatctgg

SEQ ID NO: 94380 - DNA, 773 bp, Eucalyptus grandis
  Intron number 1 from transcript Egrandis_v1_0.024049m (loc us Egrandis_v1_0.024049m.g) derived from phytozome v7.0 (c hr-ID scaffold_1; pos 36149714 to 36150486)
ccctcctcaccatcaacacctcctcattctctccggtctgcttctctctctctctctctctctctctgtgcggttactgtctagttgatttttcctttttgttcacatcagtgacggaatgtttttggtgtgttgagcaaatattcgatgaaatcctcggggtttggttggaggaaatcatgctcggatgaggattttgtgcttgcttcccttttctggttcatgtttgcgcagattctacttataaaatggcaattctggctgaatctagtgcgatggcttccgattttggtggtgctttgagttggctgagactgtttcctatgattcgatggaggaaatgttgcgatcggattagcgctatggatttgttatcggcagatgcatcctctgtgcttgcgtttctaatgccaatggagatttaattaatgcactgatcatatgtccttgttagtcccggcatgtttgagaggagtagggaagtctgaaaatttatgatgtttctcgatgggattgatacgtgggagtgctactgtcttgagtttggtcttgtccttgagggattgtcgggcctggatttgtagatctagaaaatcctgtattgcaaaatgtatgatgcaccatggtcggattgaaagaatgagtttccctgtggcttgcgatggagttcgtcagaggaacctcttcaatctcgagtcctgtcaacataactggtttactaagggtgtaactgataatcttctttatctgcattgcattgtggcaggccaatt

SEQ ID NO: 94381 - DNA, 771 bp, Eucalyptus grandis
  Intron number 1 from transcript Egrandis_v1_0.001112m (loc us Egrandis_v1_0.001112m.g) derived from phytozome v7.0 (c hr-ID scaffold_8; pos 24923397 to 24924167 reverse strand)
cagacagcgctgaaactattgaattgttgacggaggtaatttttatgcttcatctatcttccttgtcgtgcttggatgatatatcaagtgcccctttgagattcattgagaaaggaagtttaccaaccatccaactgcttttccttatatttctctttgcttgatttctgactagttgccttatcttttattgtttatggatcatgaacatatatttattgagagaataaaaagttagaatacaatgatagtatctagtggggaaaatcttggttttgctgtttctcaatgtagtaatggttcaattactattttatcttccttatgacttataaatgcctttaatcttgcactttcctgtttagttctctttggcaaattgttgaaatgggaaattcagtgcggaagattttcatagaaagattgttgttggaatggcatctggccttttgaaagtggacattgcagcatgttagagcatccataattgatttcgtttgacatcatttgaaatgacactacacttaatgcaaccctatgtagcgattttttgatgggggtgattcaccagtctacgctcgaacagaatgtgagtatgggtttaccagtccatactattatctgacatcttaatatactgaggtggagcaccaatatttctctttcaaatgtcaaagtatatatgttaatagattatctgctcatgaacttggactcatgttgttgtatgttacaggaattgtttgattctgtcttgtggaaggaggtaaa

SEQ ID NO: 94382 - DNA, 732 bp, Eucalyptus grandis
  Intron number 1 from transcript Egrandis_v1_0.051922m (loc us Egrandis_v1_0.051922m.g) derived from phytozome v7.0 (c hr-ID scaffold_10; pos 32463820 to 32464551)
gagaaattcttctcatatcctcaaggaaaaaaagagtcaataaccactacttcaaattcacaagataattattccgattctttctttgatcaaaatgtacaaatcctttcttttgagattatgcccataatagtcataggcacgcgatttgtgaggacaataataatatttctttgaagatttcttatttggttttactagttagaatgtttttataatttatagctacacttgtcagagtaaggccgttactaaaaattccttcctccactacattagatagattagtataagattaggccaaattattaaatttttcatagctatgatctaatgcataactctgatgagcaaataagtttacctggcttggagaagttaatacttgagtcggtaggaacgttaaaaaggatatggcacaatgaacttcccaaaagttccttcgacaaattagccaatctcactcttaaaaagtgctccaacctacttgatgtcttcccttcgacaatcatgggtagattgcacaaccttgaaatagtcaaagtttcaaagtgtccctccttgaaatcattatttgattttggatccttgattcatatacggaacaaacaatgttgctcctcgaattggaagaagttgaggttttaagctgtccctccctggaatcgttgtttaattgggggccccttcattcaagtacggaacacaaaattgtattacttcccaaattgg

SEQ ID NO: 94383 - DNA, 879 bp, Eucalyptus grandis
  Intron number 1 from transcript Egrandis_v1_0.002815m (loc us Egrandis_v1_0.002815m.g) derived from phytozome v7.0 (c hr-ID scaffold_10; pos 36198673 to 36199551)
aaagaacgtcacctgtctctccacttcccgggcagcagcaaaaccttttattgttattccttgaaacggtgattacaaaggaaatatattgcatcagtctgctggaaccatcattccatgtgccatgcagggggatgttcattgattccttttcaatctcacaaatcaagaaaaaataatacaattttcccatgtattatgacattagtgaacaacaataatagatatgagcaaaataatataacttatttatagttattatgatgtatattaattaattgtaaatttagaatgatgtttgttaactttcttaattataaaaacacaattacgttctgagctattgtactcttaatcaaatacaagtatatattgtcgattctagattaaatcgattaatttctcattctattttatattcacaatacctttttcacaacccgaaaaataatttattaatctatgattccatatctacatttcttttatttgaggcaactaatgagattagagtcctacttctaagacattctatccatatctccacaacttcacttttccgttcgttatatcaatcataacactatccattacttgtgatgtgaacctccatttcaaacaaatgcttgattgctcttttcatatccggaatgaagagagtcctaaattctgactaatcaaaaacatggtctgatctgttcccaaaaacaaataaatagattatgaattggtctcatttgacgtggtctcaattcaaaatggaaaatttaacactatttcttggaaaagtcatgattccagcgattatttatttcattttcattttcattttctaaccttccaggtttcataagtatcgactgcggagcaccgaattca

SEQ ID NO: 94384 - DNA, 792 bp, Eucalyptus grandis
  Intron number 2 from transcript Egrandis_v1_0.011636m (loc us Egrandis_v1_0.011636m.g) derived from phytozome v7.0 (c hr-ID scaffold_10; pos 22925159 to 22925950 reverse strand )
caagggtcttcgatgttggaggtttgtttgtaaaaacaaattaagtgcattttccttgtctcacataagaaaagtgggaggaagtggactaattaataagtgtggggtttcgtttatatacttaaatgaatgattgggtgaggctagacccaaccatacccgcgtgcgggtgtgcgattatttgttcgctttgcaaacttttcgaaatgatacatttgttattttatttttattttttggtttgttcatatggacaattttcgaaatgttacatttgtttgctttgtaacctttcacgaagagttgtctatgttttaagaaagttttatatatatacatttcggttttcagaagaataagcgtgtgatcattttcgagacttttctgaaaaattatagccatcattttaattgtttcctagagagaccctggagaaatactagaattgctatttagtattcgcatttgagactttgttgtagaattgctatctagtattctcatttgagactttgttgtatccttgaagaaatttgccggtgatcattaacaacattgtggggcaaataaatccttaagaaagtgatatcacacctcaaagtccgacttgagtactctaaaagtcaatcttcattactatacccaattcgaagtcatattttcccaacattcaagaaagtgataccacacctcaaagtccgacttgagtactctaaaagtccatattcattactctacccaattcaaagccatattttcccaacattcaagacatccttgctcggggagcca

SEQ ID NO: 94385 - DNA, 492 bp, Eucalyptus grandis
  Intron number 2 from transcript Egrandis_v1_0.018483m (loc us Egrandis_v1_0.018483m.g) derived from phytozome v7.0 (c hr-ID scaffold_8; pos 10739256 to 10739747)
tgctttgactcctcgcaagccaagggctttagagggtacgcgtggattgatgcatttggtttttttctctcgagttttcattgtttaatccttcgtctgtgacgacggtaaagcctacccaattgcccaccttctgtatttctttacttgtttgcttcatgggcattcgcaatttagttgtttttgcgtttggttctttctttcttttttcagaaagttttgatttttcttcgtgggtgtggctgtcttgatgctcttgagctttgattatcaaggaacatcgttacccaagagtgtttgcgagagagttgacttagcaaacagagactattgaggtcttcctcctttttttaatagtattgttctgggttattttctatttgggtttattacatttgagctagaccagtagtttccgatagaaatcagcggatgaatggtcgcttcatttgtccaggtttagctcctagggtgccctttcccatcagatac

SEQ ID NO: 94386 - DNA, 843 bp, Eucalyptus grandis
  Intron number 1 from transcript Egrandis_v1_0.030103m (loc us Egrandis_v1_0.030103m.g) derived from phytozome v7.0 (c hr-ID scaffold_8; pos 52884694 to 52885536)
tgtccgtatgtatgtcgtcgatgatgcttatgtatttgcagcggtcgcttcccgcctttgttccgcactcttattcaactttaaatgccgctgaccatctttctggaatgaacaaccatgagttctttctttttcttttcacccctttatccttgcttttttgcttgaacagtgaagatggctcttcttcgtgagctgatcattgggttttatggtagttcaaattcgattgattcatgattacttcggtactacttgtcaattactgtcgaaggaaatattttgagggagtctaggtaaggtcctcagtggatagggtaggatctaaaagaaaaggtttttttggaggttggttgctgaattagtcgtgtgataaaaagaaccagcgagaatgctattagtgaagaagaaggagaaagatgaatttgatgagtcatggcgtccgcctccagattcagcctcaacagatgtcattttttgagctctgtagagcatctgttggtgttgcacaatacagcagaacggttggcatgagctcagatgaaattttgtggcaaatttgcattagtcaaggagttttttctgcatctcaatcactatttattttcgaaaaagttcttgaagaagtgacagagaaacgggtttaaatggtttggtgaatttcttgttgcaagttagagatggccgattgctttatgataaccaaatgtttattcacattgtctcttttcatcatggaattttattcgtgaaagttgtgggttgttgaataaacattcatcgccaagccattttgtgctattttgaagggtgaagagagagtaggccagacaattatcctaa

SEQ ID NO: 94387 - DNA, 797 bp, Eucalyptus grandis
  Intron number 1 from transcript Egrandis_v1_0.000327m (loc us Egrandis_v1_0.000327m.g) derived from phytozome v7.0 (c hr-ID scaffold_10; pos 36705757 to 36706553 reverse strand )
aggttcttgaaaaagttcagaaacaggactgataagtaagttcactttcaatttcaattgaatctaaataaaatgcttcaccaaatatttgccattttattctaatctatactaatgccctagttttctcagccatttttactaatgataaataatacagtctggaaacaatgtcttgcaattacaagggctctttctcattttctttttcttcattttttccatgaagatacgtaaccatagaagttattgcagaaaattttatcgtgatgaatcataaaagtgttttttgttatcattatgcgatctcttccagcaatgaagatgaacatgagcaaataataatggccgcccccatgtgcaccaccaaccatctgattcgatgattcatatcgttgactcaatctcatgttttttttcattgccatgttgtttgcatccattgtgaatgcatttagaaatcctaacaaacgcagcattcattatcaatttcaagtgactattttagaatattgtacattgtcatttagctaaggcagagtcgtgcttctccatatgtgacttcttgatatatatgcggccgattaattttgttaataattcaatggttgacatcacacgttgttgacaaggtcagctaattaggaggaggtcctgggaacaagaactagtcaactcaaccaattaattattcatgaattaatgtgtattacatttgaatatttgtattgtaattgatttgatttggctgattatttgcagggtagggatccaacttccgaaggtggaggtgagat

SEQ ID NO: 94388 - DNA, 1032 bp, Eucalyptus grandis
  Intron number 2 from transcript Egrandis_v1_0.027643m (loc us Egrandis_v1_0.025307m.g) derived from phytozome v7.0 (c hr-ID scaffold_8; pos 54857131 to 54858162)
caagggctctcgattttggtgagtcatctacacaagttgtgtgccaagttcaaaaatttaatatcttgctgatatatatacctggttcttcttctgcattcgattgttgctacttaccctatcattagcacaatcattttgttgtatgttgtttgttctcaaatgatctttttacctcaagcctgtcatgcttggagaacatattcagctgcttacaaaattttttgaccaccctgctggtactgttagctagttatgcttctgtgtttttttttttcccttgatgcatcaattatgtaaaccagaattttttcctacacggatgctacatgtgtattaagcatgggtatggaaataacaagacacatataacatattcaagaaatagtttttcatgtttgaatgtgtaaaggcacattcactttaaagtacatagaacattgttaaatgtgtactaacttttcttgtgtgagtaacatgttaacctgcttgacatgcttcaatgtgttttaagtggttaaaagggtcaacttattttacatgtacaaacttgttaactcgttgatgactcggacaattttaagctcaatccaacttaatatgtgtcaaatgcttattctgtaaataggtctttttgcacattgctggctctgtaagactgatttcttgaatgacacctctacttcaagttattgaattcattattgaagcttagcaaagagcattcactttttgcagacgtgtttttatgaacattaagcttcagtagttatcagttcgagctgtttctagtgattaagctcttcataattttcaagaaaaataaatctaatcaaactgcagttccatggtgtaactcattttaggagattgcagcaattaattgtcactgggagtacatgatttaatcagaacctacatctctaaatccttatttaggctaaaaaattaaattgcatggtgcacttaatccgtgatgatagaaactgagggttgacaaaattgtaggtaagaaggccttgtgggagcata

SEQ ID NO: 94389 - DNA, 865 bp, Eucalyptus grandis
  Intron number 1 from transcript Egrandis_v1_0.014277m (loc us Egrandis_v1_0.014277m.g) derived from phytozome v7.0 (c hr-ID scaffold_8; pos 71720871 to 71721735)
aacacgaaagaggaaggtaaaaaaagaaaaagcaataaatcaaagagaaaaggaaagcataaaataggatttttaaaaatgagtttgcaaatttttaccacgtcaagcccatagaagatttttaacgacagtattggagatatgtgttagacgagtggaaattggcaattttgatgtcatggaaaagaatattggatagtaatattacgatggacatgaattaagattttcaatgaaaatcctccttttcttttttgggttaattttacaaaaaatctcatatttgtacatttatgacaaatttatttcaaactaattttttcgccacaaaaaatcacaaacctgtacatttgtgataaaatttatgtctattaattttcattaaattaaataaataccacatgaaataatatatcagtacatatatgacaaacgaagtgtaataccataaactgaaaaatccgtcaattcacacgtgttatatttaattcagaaatttaaaaataaaatttaatataaattaatagatagtaaatttgttcaatttaggatttttgtggtgaaaaaattagtttaaaataaattaattacaagtgtattaatttggagtttttcttaatattaaattttccttttatataggctagttaactctagaaaaattgctagaagagcaaaaacgagagcttggaaaaggaaaagaaaaaaggaacagaaaaaataaataaaaaagagcacacattatcaccaaacagcaaaatagccgtcggatcgagccagggcccagtacgcatcgcagagaatacgatctccgtctctcctcgaagcagagaaaatttacagggcatcccagataaggtttcag

SEQ ID NO: 94390 - DNA, 934 bp, Eucalyptus grandis
  Intron number 2 from transcript Egrandis_v1_0.018163m (loc us Egrandis_v1_0.018163m.g) derived from phytozome v7.0 (c hr-ID scaffold_1; pos 5390047 to 5390980 reverse strand)
ggagaagcccgcaccatacagttttataaggcgcagtatccactagtgaaatgcagttcttgctatgttctcccttcacatttcatgtctaagtgatgctatgtactgtcgatgatattaatttgagtaattaaattgcattcaaaggggtacgaggtgggtagcaatttttttcaaaacgagcaacgtgagattagagtgactcacaacattggctgctatctacccgtttgtgatgtttctgaaagcagactagattctttatgaaataagcagaacaacaggggagtctaacagctgatgaaggatagatatggtcttctcttttgttgttgacttcactcaaatcaaagctcttttactactgatcctgtggtgaattaaatgattccatagtctaactcaaagttaaatcttataacatcttacttgtaggaagcatacaaaaggttgtttaaattttggagttcattttttaaacctttcatgttaatttttattacctcctgggtcactttagtttttaaaagaaaagactactgcatctttattaagactaattaaggaattcaattttttgggtgtctgttgggagtcatgctgcatgggaggataggagcagcaaatagctctcttttgtcatcttggaatttttctctacttcctgcccaaattatattctatcatatgaaaaacattttagtttgcttggttgtgattcaattcacctccttccctcacccttgtttaccaaatttgatggccgcaactcattacttcctcaatttccctcctttccatcttaattattatattcagttgctccctatggactttattatgctggattatatgtgtgaactttcctttggagtctcctggacattgtgctgtgttgacttgactaatggaagacatatatctcacaaagaag

SEQ ID NO: 94391 - DNA, 994 bp, Eucalyptus grandis
  Intron number 1 from transcript Egrandis_v1_0.018163m (loc us Egrandis_v1_0.018163m.g) derived from phytozome v7.0 (c hr-ID scaffold_1; pos 5391068 to 5392061 reverse strand)
ccggcggaagcgcggagacggctccggggattcgggtgagtaaattcaagttgctgcatcttcggttggttgtttcttcttacttgtttgcaagtcaacgtcggttcttgagatccgccgggatgtctctgttctcgccttctgcttgtggatgtatgtgaattgttctcatttagggcttttttgccgggatcctgttgggcgtttgaatgtcatggtctttttttttttttttccagtttgttttgttgtgcagtttgaatgtttaatggtgattggtttggccgtttgggttctttatgattgtatgaattctttgacttttccaatttttgatcttttaagtattccgctgagccgttgcattgcacgaactttccttgtgacgtatctttcggacttagcatttgcttttgctcctatttgtgcagagtattgtcgttgggaagtctggtgctgaggctatttgagtcaatgcccgtcactaagaaggtttttcagaagcttttgcattttttgtacccgtccttatcggcgtatctaggttctaggcatgcataaattttttgcaatgttgtgaaggagagattttgaatatctggaatttattgatggtttgatacgaaatggagtgcaatcacgtaagattttttacatagctgaccacacttagcggcataaggattggttattgtcaatgtccttgtgacagcagtgaaaaattattccttgacagggcatatcctctataaaagatgatgcatctattttatccttaatggatgtcacacttttaagatcttgatgcttgaaattgtttttcccaatgtctataaaaagaacagtgaccacataccatcttttgatgatgtttttctccccaaaatgaaaggaaggtctgttggtctgtggtccatttctctttaagcttggatgtgatgttacgattgaaatatatttgatagtactgttttctcttgcattagaattcaga

SEQ ID NO: 94392 - DNA, 544 bp, Eucalyptus grandis
  Intron number 1 from transcript Egrandis_v1_0.054333m (loc us Egrandis_v1_0.054333m.g) derived from phytozome v7.0 (c hr-ID scaffold_10; pos 27237993 to 27238536 reverse strand )
ccatcggcgtcgaattcgccactaggactctccaggtttcattcttttttttatttcctcctcccttcttcttctttttctaaatttttgttctttcttaattagaataatggtattttcttttttggcttgcccatttgtaattgtcttcatattctaattaatttccgcgattgcgaattggcatagcatgtgattgaattatccattgatatttcattagaagtttttcgatttcaacacattataaatcgacaaaggaaattttcttaaagcttttcgatgatttttcgttgctagtttatttcgaaatgatcgaaatcaaatcgttttttggcttcccttttcttttttttttctctaattgaatttgacaaaatgtatgtgtttccaaagcgacctagtttatccgatctacagctgctaatgaaatttagttttttgaaagaaaaaaaaattgtgtaagtaatcatttttggaaattgaatttgtaaaccaaagagatgaccatggatttaattgttccggcttatcgatcaggtcg

SEQ ID NO: 94393 - DNA, 847 bp, Eucalyptus grandis
  Intron number 2 from transcript Egrandis_v1_0.053113m (loc us Egrandis_v1_0.053113m.g) derived from phytozome v7.0 (c hr-ID scaffold_10; pos 29877855 to 29878701 reverse strand )
cgggtggtgatctccattagcgctggaacttacaggtaagtgttaagcatgagtgatccaaaacaaactgggtcaatgcgacggcttggatgatgagcaggacctcgtactgaacctgaaaatccttaccaaggccagcagctgattgaaaaattgttgaaagtcttttctataaaattgatcagacctaggcgtgccggtctcaagactggaattgtttgcccaagtccatccattttgccctttgagctggtatggctggggcaatccagttaccggggttcatcaggatgatgaagtctgccctcaatcagcaccaattgtatgtgcataagtgactcgttgaataacaaaatatatgcgggtttcacattttctaataatcggtttttataacggacgatttcacacttgactttgtcagagtcaaacatatgaaattaggtccccttttaatcttttaaggattattatagcaacagaccttgggccttccgagacgcctgtgccaaaagttgaggtatttggtaacattatcccaaaggctttgagttaaagtttagcatttccaaaatctcttagcccaatgtaactctcactcagcatttgtaattcagcatttttcgaacgatggcgtttaatgaccttcttttcttctaatcttgccttatatcctcttgcacacataaggtatatctaaatgtgaatgtaagcgcatctggtcaatgcttaaatgtcgataaatgcatgggctttgaaaacttaattcataccttcaatgctctggtcctctttaaatttaatttctttctttgagcgtagagggaaagttgagatcccagcaacg

SEQ ID NO: 94394 - DNA, 732 bp, Eucalyptus grandis
  Intron number 5 from transcript Egrandis_v1_0.026964m (loc us Egrandis_v1_0.026575m.g) derived from phytozome v7.0 (c hr-ID scaffold_1; pos 38527122 to 38527853 reverse strand)
aaggagcccctcttctgatattggcaaataagcaggtaaatttttgtgctattgaatctccctcttctgagcttgctgaagctatatgaccattttcttcctcaaatttgttttcatatcacgtgacatagaagacaattagtatgggtgctgtttttcttgagattttgatttcataagacacgaccctgtcacaggttcttttatggtaaacttttggttgaaaattatatcatcatccgtcacttttgaggttgtctctgtttccatctccttagttatagatttgtgcattcatcaacatgcttatgctgctttgcttagtgtggttccttgttttttttcttgtgacgactgtattcatttcactgagtgaggttgaatacaaggaacttcttgcatgatagcattttgtttagtaccaaaatctccataatatccaagtggtcaagatttttctttaatgcttttgtctacttcttttttcggaactggtggcatcttcttattagagcatctaaaagtcttttcacatgtttaaatttcctacattgagctggtctcttattttttatcaataacaaacctaaggtatgctctttacgatctttttgttacctcgggagtctgtgattttcgttattttcatctccattttctttggtccatgagggaaggcaattgtatgaagtttaacttgatagcaggatcttgctgaagctgtatcagctg

SEQ ID NO: 94395 - DNA, 923 bp, Eucalyptus grandis
  Intron number 1 from transcript Egrandis_v1_0.014388m (loc us Egrandis_v1_0.014391m.g) derived from phytozome v7.0 (c hr-ID scaffold_8; pos 15908233 to 15909155 reverse strand)
cactagtccttggccacctccaggtagctcagctggttcgtacgatgtaactgtctcgtcccttttacccatttctaactttttctccagcgagtttcaagctttgagcttgggattggatcgggctggctttctttgtaacgcttttttggaaacgggtgtgggggcattttgctcttggatgcgggcttgtcattgggttttggtttcaatgcttagtcttgctgtgcttggtcaaaagttgtgtgctttcattctctggtatttttaagtttttttttttttttttgaagtattcttttcgtgggagcggctggcatccctcttctgggcatattgagcttcagaagaagcgtaaaagcattgggtttcattttgtttgctttagcgtttcgtgtcatttccgtggtgttggcgttctgatctgctgcagtagtctggagtacccatgacaggagccccctgatctcaataactcaaaaagttcacaaattggcgaatttgatggatgtttgctccccattaaataaaaacatgtaaagttgcttaaagggttgtcctttgcactttggagttatttttaatcattccatgttagatttagcttcctattagtaatattcttgtgttcgcgatagactcaagtcctgtttggttagaaagctgcggaaatgcacttgttttcagtagcgatcaattagggttgagttgcaaattccaagggtatggacactggaaatagtttctcattactcagctagaaaagtacgttgtcgtttagcagggatgaagagggttaagggatggtgcatgttcattgctttctttctctatgagttcctctataagactagatatctttgttgatcttgttgttccaattttagcaggtcaatgaacaaagctgctttgtacaggtagaa

SEQ ID NO: 94396 - DNA, 534 bp, Eucalyptus grandis
  Intron number 1 from transcript Egrandis_v1_0.025734m (loc us Egrandis_v1_0.025734m.g) derived from phytozome v7.0 (c hr-ID scaffold_10; pos 17542771 to 17543304 reverse strand )
atcgtatctccgctgtactgacaacaatctcagaggtgaacttttcctcttttttcttcttcatcaaaataacttgagagttgcatgaacttgaaccaagagctgcaattgtaaaacaatagcttttacagaagtagcatggcctcatctctcttcaactgtagattggcaattaagtttttgtgggctctagcaaagatacagtttaatgaccaaagtgaatgaaattgcacgggttcaatatatgtccaaatgacgtatttggtctttatatgtctcaatatactactgagtcttcttttgaacattgtttcatggaggctgtcctttgaatgctaggtattgcttcctcattattttgatgacatatttttactcagttatatttgcgcagacagataaaagctttgaccagcgtgctttgcttgctcattacaattatactttgcttttttggctcgatcaatgtgttaactcttggaggatatggtgtttgcaggaactgcccgatattcctttgttcttaagtttgca

SEQ ID NO: 94397 - DNA, 436 bp, Eucalyptus grandis
  Intron number 4 from transcript Egrandis_v1_0.004127m (loc us Egrandis_v1_0.004127m.g) derived from phytozome v7.0 (c hr-ID scaffold_10; pos 37480956 to 37481391)
ggtgagtaggcttcctctccacttatgctttagcgcgtttcctatagcggaaaatttatgaggcctctttattttcatcttaatgattattaacttatgtgtcttactcaccgacggcctacaaaagaaaattcaccagaacataatctgtgtggaacataggattaccacttgagaactaaatcagcttatcatatataagaagatatgaggtgaagctatttgtgaacaggagagaatcggttctgtttgagacaataggattaaaaagttaatttgattaccctgaggagggaaggatcattaaaatttaatttgttgcccacaaacaggaatctcacttccttatgaatttggttcgagattgtgatgaatgacctttgttaattttatcgtttcagtggctagtaagctcaattccagcccgctgaaagaa

SEQ ID NO: 94398 - DNA, 551 bp, Eucalyptus grandis
  Intron number 1 from transcript Egrandis_v1_0.027246m (loc us Egrandis_v1_0.027246m.g) derived from phytozome v7.0 (c hr-ID scaffold_40; pos 235989 to 236539 reverse strand)
gcccccgggccagcgccagtccgtgcagcacgaaggtcggtctcgctctcggtctcggttccggttgtgttctcctctttcatcgccggcgtccggtgctcgaggccgtggtttctgtttccgatgcgggtttcgactcgttccggatgagaatcgcgtgccgcgtggggcctcttgctgtgtgtagatgtcgatcgagggatgtttgatcgtatcgcgtggaaatttgctcggcagacgaatttgaattgtgaaattgtgaacttctcgtaggtcttgtgatttggtcatgactcatgactcgaagagactaacagttagcactagatttgtgtctgtgtgctcttgagtcctggccctataaatctgtgggaagtagtgtcggaacctggttagatttcattggagatgatgttcgtatgatcattatctcgtcttcgcgtaaaagtgtatacatgctgcgtgcaagttgtatgaataatgaattcatctgtttggtaatttttctttttttttttccgcagagtacaaggtgcacgcttacaatagaa

SEQ ID NO: 94399 - DNA, 531 bp, Eucalyptus grandis
  Intron number 3 from transcript Egrandis_v1_0.017329m (loc us Egrandis_v1_0.017329m.g) derived from phytozome v7.0 (c hr-ID scaffold_10; pos 1691122 to 1691652)
ccggctctcactttcatacttgccatccttttcaggttattctccccccttgtagggattgtgtaatgcctgattgattgtgattaagattttgcttatcaattcagggttgtagtcgattgcaattatgtaagaaaaactaacacatttgcaatagagctcttcataattggaattttctccaactgctcgcaacttttcttgtaaatgataacatgcctggtctatgtcatcattgtgcttattttgagatctcgagtcctgctgttgaagtgtacctgtgacatttgatgcttctaattgaaccacgtttattgtcaatgttttacaactgaaaccctgtgactagactaccattgattcagcaatgagagccgcgcagcatgttagcaaattatgctgcaacatagtcagacgtatcaccaatagtacataaaatgttaactgcctaaagctataatttgtctactgaattaaactgtttcctcagctgagcatgatatgtatttcttcgtttcctcaacataaagg

SEQ ID NO: 94400 - DNA, 340 bp, Eucalyptus grandis
  Intron number 1 from transcript Egrandis_v1_0.007094m (loc us Egrandis_v1_0.007094m.g) derived from phytozome v7.0 (c hr-ID scaffold_10; pos 2845537 to 2845876)
cggcggcgcattcagctacctccgcgtcaccttcggtacctcgcctactcatttcatcatcttcgccttaaaaacggcaaacttagatagcaataatttcgacctttgagctctgtttttcgggtgcattcctgtcttcttcccctgaaattttggtacattctccgctgaatttatgcgcattgctttcgctccactcaaacgaaaaaaaccatttatgcttaaaataaatcaatatgtatattttcaaatcgatttgcgaagcagacgtaacggactgtctgtgaattcactactttttccaggcgagttcgcggcgttcttgaccggtgcaaatctc

SEQ ID NO: 94401 - DNA, 590 bp, Eucalyptus grandis
  Intron number 1 from transcript Egrandis_v1_0.026022m (loc us Egrandis_v1_0.026022m.g) derived from phytozome v7.0 (c hr-ID scaffold_10; pos 26991091 to 26991680 reverse strand )
cggtgaggcgagtctacagcacgggcgatctgcaggtaaggcgttgtgtacgcatttgattaagcgcgcggcctgtcctttcagtggacccgtcgtcgaatgggtcgacgactccgttcctttggacaaatatagcatacatattcgtccagcgttatgaaatttaaatttgtcccgtcgctttacaaattaattgtcttcatctcaagtcatttttttgcatcctttatggccttattaactagtgcttgcaagacacttttgatcatatcttgtaagaagattttcttattttcaatgcatcgatgtcgcatgacgtgaggagtgcagcgtattaaaaatggtaaacattctttatttagatatccgcaacctactcgcttgttaacaaaatccaactttcattgtgtctcaattggaagacggacatctattgaccctaagtatctttggtgaatctaatgataccgtttcttaattcatgaatatggtacagtcgatcttggtttcctcccgttttttttttctggtttcaaagatttactgttgcgttcatttatctcttcgtggttggtggggacagagagtta

SEQ ID NO: 94402 - DNA, 577 bp, Eucalyptus grandis
  Intron number 1 from transcript Egrandis_v1_0.004208m (loc us Egrandis_v1_0.004208m.g) derived from phytozome v7.0 (c hr-ID scaffold_8; pos 56295701 to 56296277 reverse strand)
gatttccgcgactgaaattgtctccggcgtctctggtatatctgttgtttttgctttgagtagttcttttttttcttcttgtggatgatcatttggattctggagctgtctattgtgtcttttcaagtctgaattcattgcctaagtgtggaaaaatcataagtatcaggtagccattggctctatgttcgcgttttctctgaactgatgatggctgattattgcttatgtttgtgcttgcttctgttgccaactcaatgtcctctctatttccattgagccattccctttgttttccttttctttatgtagttttcaatggataaacgtagtagcatggtatggccaatatgttcactgaccgtaaactgagctgcttgctttacttagcatctgatgttgtgtgaaaacattatttaaaaaaaaaaaaaagatctttttgctgcatgccaacaccatcaagttacatcttgcttcaaattgctatccttggtccaaacatgataagcttctctatttatcttgaatggcttgaattctaggtgcatcagaagaaaacatccgagacctctttttg

SEQ ID NO: 94403 - DNA, 1053 bp, Eucalyptus grandis
  Intron number 1 from transcript Egrandis_v1_0.046646m (loc us Egrandis_v1_0.046646m.g) derived from phytozome v7.0 (c hr-ID scaffold_8; pos 35574902 to 35575954 reverse strand)
agcttcttgctgaagctcaggaaccgcattgataggtactgtctctgtttgctctgtttctgaaacctctgtttaccaactctgccacgcctcggcatagagtccgtttggttccgagacatatctttacccaggaaaatccttatcatgtcagtgaaaattttctcgtccaggatggtgggaattgtgccttcatggctcatacatgttttgtctttttcccgagaaggttttcccagtactttcagggtgtaatttttaacgagaagaagctataaaaaccccgaatctttgtgcaggtggtacatttatcctaaaatattttttataatataaaaaatcataaactttatccattatgatatatttatcgtaaattttttttatgtgatatcaaaaatctcaaactttttcctattattcaaaactttttttgtaacacaaaaaagtccaaacttttgcctgtgtaatacatttactcaaatctttttatttttttttgggataccaaaaactccaaatttttgagataaatgtgtcacacaaatataaatgtgtggtcttttggtgtcattgtagtttcacaaaacataaatttaaggtaaatgtatgacactatataaatttgagataaatgtatcaccatggatacaagtttgggttttttgtatcacaaaataagtttgagatgaccatctgccgcggtggctctgctagataaagccatgctgatcctttttctcaaaggtgaagggttcgaaacttagcaagggcacttgtcaccttaaccgctgtcacggggtggtggttccctcgtgcggccccagggtttgcccaaccgcactcccggcgtatggggtttccctgggtcataaaaaaataaaaaataaaaaataagtttgagataaatatatcaccataagtaaagttgggggttttcttttttgtggcttttacccatttttcatttatatattttaggtttgagtaattgtggttttggtgaatctggttgcagagttggaattgaacttcctacaattgaagtcagat

SEQ ID NO: 94404 - DNA, 836 bp, Eucalyptus grandis
  Intron number 3 from transcript Egrandis_v1_0.008587m (loc us Egrandis_v1_0.008587m.g) derived from phytozome v7.0 (c hr-ID scaffold_1; pos 15634407 to 15635242)
agaaacaggcccatcttaatcacagcgagcagcaggtactgtccaggtttcgatcgagccgctcagtctgtcgatttcttttatcttgataagatccaacggaggttggagttagatatatctcgcatcgcagttcatcgatcggtagaccatacaggctatagtcaatctcatctcttcctgtatgtcaaatatagtaatgggcaacccgtgcctcacctcactttaaactggcaagtgtattcctgatccgttatcgctttttctccaatatcttaatcaaaactgagattttttccagtttcaattaattccccgttattaaacaagttatggaacagaaccacctagggattggagagttttcctaactcaaatgtcctgagaatctgttcacccattacttctatttatttattttcccttctggtgtagttgagtttttttttttttttttttccttttttcccttttttccctcctaatgcaagttctcatctcatcaatatcttaagtttatctgattatatctccgaacattacagcctgattattcctaaaatcgaagcagtatatcattgccttataagatcagctaaacatggtcataaagaaaatcaacagaagtgaaaccagatgtatcttcatgaatgattttgtttaggagagctatataaagctccctcctctctctctctctctctctctctctctctgtggactcagctgaacttgcttacccttttttcggttctctctctctctcattttattttttcctgcactgacgattgactcgttgactaacggggctcttaatttgccagagggacgag

SEQ ID NO: 94405 - DNA, 855 bp, Eucalyptus grandis
  Intron number 1 from transcript Egrandis_v1_0.016378m (loc us Egrandis_v1_0.016378m.g) derived from phytozome v7.0 (c hr-ID scaffold_8; pos 45500547 to 45501401 reverse strand)
ccgctcgatcctctggagttgcctccggtctgtaggtactagtttctcaagattctcagttctattgtgtgatcaaggacgacggattgttctgctatcgcgatcttacttcagcttcgcttcattttgctgacggttcttcatctggcttagaaatgtttcagatgctgtagttatcctatagactgtcattgtctgcggtgctgaattcccactagccaacttaaaaaatgaggttctaagttcttcctcggctgctcttacggatggcatttaaattgcagtatagattgtctacgttggtttctctgccagggtttagcgttgcagctctgtagaattctctggtctggatcatgctctagcaatcttgagaaggaaagaaagaaagatggtgattttgcggaaaaattcgatcggttatgtgagacattcgaaaaagggcaatgccttttgttggttctgattttaatgtactcatctattcctagcacctgcggtttgagcagaaccgtcatataaatctctgactaatcttctactataagctgcacgtgaggtgtgaaatagagagaattctgtgtagtttgcttaaaagaaattaaaatggagtacaagggcttaacatggttgtcgaactgttcagtatctagctgctactctgtaatttaatcatggattgaccgcaaaatcaatttgcctgagaaaatggtttgttggggagctgttaggctgtgaaacctttataaacttgatgtggttctatggttttactaatcaaaacaagtttgtaaattggaataatagagcaagccaactctccgctctgtctaatttggcatattttgcagagac

SEQ ID NO: 94406 - DNA, 663 bp, Eucalyptus grandis
  Intron number 3 from transcript Egrandis_v1_0.021061m (loc us Egrandis_v1_0.021061m.g) derived from phytozome v7.0 (c hr-ID scaffold_8; pos 53618659 to 53619321)
tttatttctaaggccaaagttagttttgcttacccttcattgttcgctggatctttatttgaagttctatgcttaatgcttatgatgatgtgccattgtatatatggaattaggttttagttgtacgatttgtgtcgtactgaaggggaggggagaaaaaatgacttgacttaatgcttgttcatttttacaccttgtaagttaaagtaaatatttacaagggcagtaggtgcgatgaatttgccaaatctcactctgctggggcaagatatatatatttatgttcacagaacatttgccttttagctttagggcatgggtggaagaatggcaatttgtgtcagcatgttgtgcatttgtaattgcgtctgtatctgttagcacccggacattgtatcatttattcaagattgtcaatagaagagagctgccaaaagaactaaggctgtctgccagcttctgcttcctcctaaattgctaataaactcaaatgtttgcgttgttgtaaacttgggaattatattacagataaatgagaaaactattgcttcagatccatttctagtttttctaatttacttgtcacgtccttcatgatgcttgttttaaatcattatttctattataggatcctattgttgctgggatagaggagaagatttc

SEQ ID NO: 94407 - DNA, 707 bp, Eucalyptus grandis
  Intron number 1 from transcript Egrandis_v1_0.003601m (loc us Egrandis_v1_0.001780m.g) derived from phytozome v7.0 (c hr-ID scaffold_1; pos 31951698 to 31952404 reverse strand)
ccgcggcgtcgttgatcgtggatctggtttgcctcttgatctcttcttgccttatcggttcgcttcgcagcgcgaagccagcgcggtgtgcctgcggggggattcgcgtgaatctactgctgtccgcattcttagatctgcgcctttacgtcgtttgtctgagcagtttctgccaataataaatccctgtgtcgttttctgctctgacgagtcgcttttttcagtgcaatttgatcccgactgggccgtctcgtccccgcgtcttcatgcaagtttcgcaaagcgcatgactttttaggctttttagcccaaatttgtgtttttgtctccacatgaaatctctgctgctgactggaactttatctcttcggctctagatagaatttgatgcaatatagatccacgctggggcatttctaggagctccagagtctctgtttttctttctttctttctttcttttccaacagaagaatgggtatgcttttttaatggcaattggaaactccttttcagttctttcattctattcaacccttaccaccttgcctctttctactttgattgcgacgttaacgggttatggagggatcggccattgtcgtatatctagtagactttatacctgagaatggtttgatgacctctggctcttttaagtcaagataattgaacattttctccttttaatatgattcgacagagaa

SEQ ID NO: 94408 - DNA, 985 bp, Eucalyptus grandis
  Intron number 1 from transcript Egrandis_v1_0.015802m (loc us Egrandis_v1_0.015827m.g) derived from phytozome v7.0 (c hr-ID scaffold_10; pos 3386523 to 3387507 reverse strand)
tcaccaataggtcggttggtgctgtcttttgtttgctttgttttgtccttttgtgaagttcacatcacttgcgtttccattttacttgaaatgggctctgtgaagaagcgcatgtttcagaagtaggtggaactgcaagtttggtctttgttttttgttgcaatgctcgtgcaatcgggggttatgctgagattaccatgacgatgatgatttgaattatggggtctagttgattagaggtgtagcgttatgttagtttacaaagcatagtgaattgcactgttgtttgggagtgttctgtggatttaagtacctggcaacttcagtgctttaaacttaagctttgatgctttacggtggtattgaggggaatagcgtaattgggctcttagtggttttctcttctaggggatagctgctcgattcattaagaagagtacaggatatggttgtttattccgtatgtccaagtaagtgcagatcgttattggtgatgcctgttgttacaaatatttgttacctactttgaaattgatgcaaaagagacaccgcaaaggcttcatggaaattcattgatcggtcagtagatgttcccacttttacattctttttagctgtgaagctgtagaactggttagttactgacgacccttagaaaccaggcttcatgaatttcaggcaccgaaggtccttagtaatttttttgcatgtcctatcgttgaagggatgcttcttcacctgttctaccatctactttatattcctctttttgtctccctgtacttttttcctggttgctgctactcttttccgaataatatttgtcaagaccgtttgcttcacatgatcttggcatctgaaatcatcttagggtaaacgcgctagcaggcatgcgtgcataacatattcgtgatctttattttggtctgaggttgtggagatgttaacttgatgaataggctggtttcactatttccaaagattg

SEQ ID NO: 94409 - DNA, 782 bp, Eucalyptus grandis
  Intron number 2 from transcript Egrandis_v1_0.006983m (loc us Egrandis_v1_0.006983m.g) derived from phytozome v7.0 (c hr-ID scaffold_1; pos 26376584 to 26377365)
acttattcgtgcaggtaagagcggggccattctgtttatccaaggacaagggagagtgaggccatgcttgtttcattctctttgaatgcataaatcagattgaaagaaatttccggttacaaaacaaggaaaagaatcaaagcaaaattgctgattcaacatcgcggtggagtcgatctttttcatgattgtgctaaagaaattattgtgctagcgcatggtcgatagcagcagagtgtgaaattcctgtcgttagtatcacggtatgagggaggtgttccagtgagcatattatttacacaggaaagcggcacaacgcatcaccaagatcctctctgaacaactccatgctggaagctttgtgaaactcgaatcattttcatcttagtctaggtttcaagcctctttttacttgacgtggttaaaacttgaaattcaagacttgaacaggttttgatgaatttgatggagaaaacctctgtgcaatggaaatgtcagttggattgcagagtgtgacatcattcttgaacgaaagttttgtgtgatcatcattcttgaacgaaagttcttctcttctgtgcttcagtaactttatcaatgttcacgttagtctgtaataactgtcaaacttcctttcagttaccttattacggatatatgtctaagccattgaatttctcattactactcaatgtgtcaaggccatgtgtatgctttctgtcatcgtttcccaggagtgctctatcggtgaactcataatgcagctctcttcatggacagga

SEQ ID NO: 94410 - DNA, 427 bp, Eucalyptus grandis
  Intron number 3 from transcript Egrandis_v1_0.022458m (loc us Egrandis_v1_0.022458m.g) derived from phytozome v7.0 (c hr-ID scaffold_1; pos 40070289 to 40070715)
gctccttttgttcctcgagaactcgctccatccaggtccttgttacgcacattgtttgttcaaaagaaaaccctcttctgggttattttgcgagtctcaccatgccgaaactttttcttactgagaattaaaacaaggcagtggagacactccttaaattttcccctgataccactatgtagtatttgttttcaaatgcctacttgtgttcaaaatgataaacgatccttaaattggggaatgatgtttgcttttggtttgtttggctcgagttggctcgtcatcctctggttttggaatattattggaaaaatacgacatacttttatgcagttattgctggcccagatacttgcaatttgaactcaattgcatacttttcaaaaaaacagttacactgctcaagaggtggagataagctcatcca

SEQ ID NO: 94411 - DNA, 971 bp, Eucalyptus grandis
  Intron number 1 from transcript Egrandis_v1_0.003294m (loc us Egrandis_v1_0.003294m.g) derived from phytozome v7.0 (c hr-ID scaffold_10; pos 7666468 to 7667438 reverse strand)
ggcggtctgcctccggccggtccggaactctgtaggtgcgcacgattgctaacatgcgcgcgcgctcatccgattgtccccgagtgaaatcaatcccccgctcttagtttctccatatagtcgcaccccgaggaggggcgagcgtcgtcggttttcccatcatcggcgtcgctgcttgggtcgatttactaatttcactgtaaacaagctcgaagtcggccctccgctcgcgaatttcggacgggattagcgttctgaggttcccgattcggtgttcttgagctttttcgccttctgttttggagatttagtgaagccgcggccttgatccgtcgcctgctctctccgatgcgtcctgattgctcgtcttgctgccttgcgtggtttgctctcgtctgggatcgaatgtgattgaatttttgcccaatgcttgctttcagtacgaaggttggagcgtcgacgggcgtgttttgaattgcgtttcaaatgtttttggacttttgacttttttcaaaatgacgtgtgactttttcttgatgtgaagtacttcgctgaggattagataggctagttttgcctgagcttttctgtttgcactgagaatttttgaagtccatccagtgccagaccctctcaagcaaggttttatgtttctttttttatcagaaagaccgaattatgaaatctgttttttttttttttttgagatcacttgaactgaatgggattgccagctttctatctgcttgtttgtgctgctgcttttcctatcttatcaaataaaggcatgtttcgttcttatgtaagccgtttgaactgcatagaatctccatgtttttgcctgtggtgctgttattattatcttagaagaaaaaagtttgtttttcagtatgacaagaccattctcatcattcacttcttacttctccttcacagcaatctggacttttaggggacatttttagttccat

SEQ ID NO: 94412 - DNA, 462 bp, Eucalyptus grandis
  Intron number 1 from transcript Egrandis_v1_0.014065m (loc us Egrandis_v1_0.014065m.g) derived from phytozome v7.0 (c hr-ID scaffold_8; pos 44196181 to 44196642)
cagcctgcgtggctctaagttcagacgaagaagaggttctctccagggtctcacgttcgtttcatcgtttttctgattcttgatttcttagtattttcatgagggcttcgagtttcttgcttttgacgaagagtgaggcacgtttttcccctattttctgaaccgggttagtctgaaggaggaaagctagagaaaagaagacaatttagtggaaaagaaccataaaagttttaagccattgattaatttatttggaaaaaagttaagaggctttgtggtggacttgtgaaggtctagattttgagatttgctgttcaaaacagataccggttctttctcggatctctagttttttcaattttgtttataatatggatgtcgatttgatttgtcatctatggaatcctatgtttttttggtgccataggtgaatctatacttgaagatcaccaagacagtggc

SEQ ID NO: 94413 - DNA, 522 bp, Eucalyptus grandis
  Intron number 4 from transcript Egrandis_v1_0.024737m (loc us Egrandis_v1_0.024737m.g) derived from phytozome v7.0 (c hr-ID scaffold_8; pos 67686565 to 67687086 reverse strand)
ccctcctgtcaagtgcccttctcttcatcttataggtaactacctgaacttggctctctttcattttactacaatccaatcgcaattaacatgctacaagttttgaagtccagtccgacggtgcccgacaacgactttagttatctatagttagttgtcacaaccaaccgcatgacgtcattaggctaaatttcagcaatcaaaagtaggatcagtgatgatttttctgctgtcatacctaaaggtctaaatgagtcctgtcaaaagaacttggaccatatcttcttttccactttgaattcggagatttcggactaaacaagaagtgtcaacatcaagatgtgcaataagatccacatgatgtaatcaagcttcttcaaacactggcaaggtcaattagccaactaggaaagagatcatggattaagtgggtacgcatcatggcctcgttgactgataaattgagaagtgtttattgtgctgttaggcgagaacgatttccagaagccagattcgatcgct

SEQ ID NO: 94414 - DNA, 921 bp, Eucalyptus grandis
  Intron number 3 from transcript Egrandis_v1_0.016476m (loc us Egrandis_v1_0.013224m.g) derived from phytozome v7.0 (c hr-ID scaffold_10; pos 27820702 to 27821622 reverse strand )
taacctctacagaatttcattccctttgtcccgttgtaagctcacatcgcctttataataattgaccatgtttctcccagtggggagttcaatttgatgttccgcttggttcattagttaataaaactgtctgtcggcatgcccctattttaaaattttcctctgggaaagatgaaattcagccctcctcatgctaggacttgactccctgactatgaacactcttgttctgtaaattctgaactgttgaaggtttgcactatgctgttcttttttataatctaaatgtaaaatgtgctactgcatcactgaaaattttgcttttaccgtgctgttggattattgctgtgactttttgatttctggttataattttgctggtttttggagtatctgctttttttggtaccccttagatttagatcatataagcagcagagaaagcttgttagttacttttcctgtagccctttgtctcctttattcttttcttcttcacttaagctgcttcatgcttttactagaccatgtttctaacttgttcaaggtgtcaaatttgcaaccctcttgaagctttgaaatatgtcctttagttaatatgatgaaacttgactgctttaccaatttaatatgtcaaaaattggtttagtgaagacaacacaactatatgacacagtcattttacttttggacaaaaatagctgtggttacctgagattatgtaaaagagctgtcgagaaaaaatctctcatctgtaagccaatataggtctaaaagtaatatcatatgcatcttcatgacgtgttagaggcattctatttatgcataaagatgaattgattaactgcagatcatttatccattaatatgaatcaattaattgcagatagcaggcccaagctaattgctggctcacctgag

SEQ ID NO: 94415 - DNA, 988 bp, Eucalyptus grandis
  Intron number 1 from transcript Egrandis_v1_0.050364m (loc us Egrandis_v1_0.050364m.g) derived from phytozome v7.0 (c hr-ID scaffold_968; pos 12905 to 13892 reverse strand)
gtgagtttcgctccaccggcatccacatcatcgaagtatgcgtacctctctctctcatgtgataggagctcattcggatgcacacccgattgctaacaaaggctatgttttcctctatttatatttttgagtgttgtgttttgggttgcgaacatcatcacttgccatttatttacaatttcatcaatcagaagattagttggaggaacagggacaaagcaaaattggctattaaggtcatgtttagtaatacttctagaaataactaatcctattctttttttccctgaacaaaaaaataatagaaatccatttagtaaattttttgttttcaaaaataaaaatctatttttcttattcccgaaaatagatttgcaataaaatcaagaagtagaaaaaaataatttcttatccttgggaacaaaaaaaaaaatttcctttttttctccttctctcttcttcttccactggccattgctagccaccgtcattgccaatggtcaccggtgattggctaggcgaggtctggcaagcttgctagagcctcgccaggccaaggcgaggtctagctagctcattggaggctcacctagccaccacgagcctcaacctcatagatctgggggaggtcaagcctcatcggtggcctagtaaggctcatctagccaccggcgaggctgaggctcgtagtggccaggcgagctcacagatctcgctcgaccgatcgccgaccacgacaatggcgggcgactgaccacaaaaaaggaggaagaagaagagaaaaggaaaaaaaattaagaattctaccaaacacatttttatcttaggaatagaaattttagacaattactaaacgtcttcaaaaactgattaattattctcaggaatagaataaaaaaatcatttttgaccaaaaattgttctcaagaacaaaatgattaccaaacacaccataacgtgattgtggcaatgaaatagggagagctag

SEQ ID NO: 94416 - DNA, 894 bp, Eucalyptus grandis
  Intron number 1 from transcript Egrandis_v1_0.026950m (loc us Egrandis_v1_0.026950m.g) derived from phytozome v7.0 (c hr-ID scaffold_8; pos 13160783 to 13161676 reverse strand)
gccaactcccgtaacgccttctcctcgcctttctccttgcctgttcttgatggtttccgccggttttttgttttttttttttttttatcgatttcgatctttattcactgctcatattagctaaggcgaatcaaaaaaggaacttgttggataaggaggctgaaactttgttaggcatcatgaggcggtcgtgttgtggtatttcgttgctgttcaggccttttaggattgcttcgcgaggggaattcggcagcttgctaaggattaatggggattaatgggtggtttaccgtttcgtagttgagctgagctttcgagctcgttgtctgctgagaagaaagacttgggagtgtaatgcgatgatgtgtttcggtttcctttcggatggcgttgtttacggacgatggttaaatttgggtgagatgggatgttgaattgaatcgcattttggcctgtgggggtgtcatggggatggaaatggcgagacgatttagtcgcgagtagcatagctcttgttcgtagagcttgatcttacccttctggggactgtttcggttgctacatgatggcgaaatacttctatgtgatggtcaattttaacgtccaatagggatggggaaaggccctgttttcgtgatttttagcaaatttcatgttttgtcgcttcttgttgtgaaatctggaccaagttcattttcttatgtggtaattttaccatttcatcgcttgtatcagttgcttttgtcttaagggtgtattgagtctcttagttgtgagcacctgtatcgtggtattatcatttctataatggaatctgttgcttttagtaggttcgttttaattgatattacaagattgtgtgcgtaggtcaaaatatcaggaagctggtcaagg

SEQ ID NO: 94417 - DNA, 656 bp, Eucalyptus grandis
  Intron number 1 from transcript Egrandis_v1_0.016990m (loc us Egrandis_v1_0.016990m.g) derived from phytozome v7.0 (c hr-ID scaffold_10; pos 30377452 to 30378107)
agaagggggggttcatcgtctcgagccatctccaagtaattacgcttgtttctttactttctaactccaaaatggtatataatttgaggtttctcttatagactttaccatggtgccatgagcaattttctacgcttcaattctcagactactaatttacctcaaaaaatttcatatggagtgatcaaacataggaaatttactgctgtttataaccatgttttactgccaattactttctgcatttccacagcagaatggtactggagaaatttccgcatacacagttatgaactgttcaatagctgggaccacttttgtggtttttatttttcagtactccatagttgcgtaggcaagcctttaatttatgtgatgggctgaaataatcaacaatttaagaaagaacgagaatacacaaacaacttaaatgttatggaattcatctagagaagtcgtaacttgacgtgtttctttaagtagtgacagcgatgcgtccctttaaatttcttcgcatggtaggaatcaatttaacttatagaatcagaaagaatattcttttttctggcttgaacttaacatccagtggactcaatcaaaactgaattgactcatggccagggcgaagcagtccaggactggcgcgaaatagtgac

SEQ ID NO: 94418 - DNA, 780 bp, Eucalyptus grandis
  Intron number 2 from transcript Egrandis_v1_0.052345m (loc us Egrandis_v1_0.052345m.g) derived from phytozome v7.0 (c hr-ID scaffold_10; pos 35059727 to 35060506 reverse strand )
cgaaaccagagccagttccctccaatagacgtaagtgttcatagactctatcaagtcagctctttcgctttcttagtgtcatggtcaactctgtcctggacatgtcttgcttcatattggccaagaatatactaattgtctcgctttaaaaggtgtcagaagagatctcctggctatttgaatctcttctttcgtctgccatcgagcctgctatctagaattgttgctttttgctttatgcgagtttgcgcatggacagatagagaggttattcgcctcaaattctaaaacaattgacttttggaccaatcgtgttagttcttcaaaattaatactaaaggttggggtcaatgaataagatctatctgaatgcagcatgctgtcctcccaaatgatctgaagtcgcctagaagttccttttaaatttgccgaagtggacttttcttggtgatgattactagttgcaatgaaatagaacctttttcttgtgaacagaaaactgaaacacaaaatcgtatttgaattcatagatttgaagaatacagtctgagcgggcaagaggtaacttgaagatttttgttcatacactgcgtagcagaaagtgctttcttttttctttttggggtccataggaagtgtttactttatcgtttgtttcctttttcttgacagtggtatagtaaatacgtacgaagatccaagtagttctgataggtgagcttacttctacacttggatcaattttttaaattagtatggttctttattgtgcagatcatc

SEQ ID NO: 94419 - DNA, 1000 bp, Eucalyptus grandis
  Intron number 1 from transcript Egrandis_v1_0.022765m (loc us Egrandis_v1_0.022765m.g) derived from phytozome v7.0 (c hr-ID scaffold_10; pos 6858039 to 6859038)
gcttcttcaacctgttggtcagtgcccattttagatctttgtgtctgttcatttttcctttttcctgcctaacctgatcttctcatgagctctttttcccccttttgataggactgatcttttttctccttagggggttttcttgatatttctgaggaagatgatgtgggtagagaagtttcggtgccgccaaggcttttgtgagattgatcgccagaatatttaaaaaaaaaaaaaaaaaaaaattctgcttcactatatactcgagcacttcatcgggttagaacttgacaattctaatcatcaattaggctggaatttagagaatggaaacaaggatactggccaatcccagtctcctaccttttttcctaataaacactgtttgtatttccctatagcttaagggttctgcaccggacgctaattacctgaaggtgactgcaactgcaacaccattttagccccactaagatttggtacttatccaaacttcagcgattcacgttcagttggaagtaaacttgagaaggctaataacactatcgaatcgtgtttaatggggattgaagcaaggagaggaggatgggggaaaagcaaatttgcttctgataaataagggtcgaggtgctttcatatgcaaaacatagtgcaaataagagcttcttgttctagtgcaaataagagcttcttgttctactgtccagctaccttttagaaatatgcatttaacaatttctcaaccgaaagtttgaagaggtatagaacattctcatacatcatttttcccgatttgatcctctcccattcgtggcctttgatgccaactttttgggattcccagtgtttgcaaaaaagctcctcaggagaaatagtcctaggtttggttgctcttgctaacttcttgtgtcatatgcagacgagtcttccaacttctgcaatttttatctgaaaggacgacagtctagtctcactctttttttcgcttgtctgttaggtg

SEQ ID NO: 94420 - DNA, 1065 bp, Eucalyptus grandis
  Intron number 1 from transcript Egrandis_v1_0.039803m (loc us Egrandis_v1_0.039803m.g) derived from phytozome v7.0 (c hr-ID scaffold_8; pos 50782250 to 50783314 reverse strand)
tcgcctgtccacggagccgtggtgcaccgaaggttaggtccatgccagctgttgaacctataggtctcgataatcggtttcggggtgatccggttattccctctctccaacagctctccttccattgttatcatgtctctctatgtcctctcaacctaatctccctcccttctattggttttttaaaagattttactagcataataatttttgaattattattataataatagcatattatgaattataaatttttgaaaaatttaactccacaatacttaataatttaattatttttataatttaaaataattttttattctcacaataaatttaaaatagtcatatacacaattctcttttttaaatcttataaggtttttgacaatgggcccccatcatttttcgaaccccgcttttcttcttctctctctctctctctcccctctctgcttgctctttcgctcttttcttcgtcagagatccatgtcctccgaccccttcccacttttcttatagacccttggtctcaggttcttcatgcgttctttctctaatcggtcgagggagagagatacggccatggagtaaatgatgggttatggaagggatggcgctttcgtggtgaaggaggaggaaagcgccctgcgagataagagcgagcttgaagcggacgaaagctccccacggtcgtgatttggatgtctagtgttcgacaaaatgcgtgaggcttcgcagagagtgagagagaatctaatacttctgggcctacctccagctcttccaagaggagctccgtaggaaaaaaattataaaataaacattggcctggtcaggatggtccggcacatagaaccaagaactatccgaaaatcactgttccactttcttgaaactggaaaactgaccggtgccctcggaaactacccagaactgatcggtttggtccgatctaaacagttccttttgcttacccctaagtctcacacattttttatatttccactagaatgatttaaactttatctagagccttcatcaattatcgaaagtttcctataaatt

SEQ ID NO: 94421 - DNA, 887 bp, Eucalyptus grandis
  Intron number 1 from transcript Egrandis_v1_0.049954m (loc us Egrandis_v1_0.049954m.g) derived from phytozome v7.0 (c hr-ID scaffold_10; pos 2610129 to 2611015)
acaaagggtcgtcggacaattccgaagtaagatcctcttcttagatatgccccgtgcaatgccctttgcttgcgatatattcacgggcgtgcacacgcaaacgaatgcatattgatcttctgtgtgtaagttgttcaggttatgtgcatacttttcaaatttatctcatatcgctgacttaatctatctcgagctaagttcaggtgtatattcttagacctatcatccataagtttcctttttcccctcgttgtaattctacgatcgtctactgcgtgcatgaaatgggcaatcacgtccctgtgcttatattctgcacacgctcgttatttctgtctgagcgaggtcaaaagtatcttaacacaagcactggctatttccatttgggccataagaaattttccttttggtaagtttcagacctggattctcaccataaaaatcaaggggaaaagttgcattctggcgactatccgtcttcaatgatgagtctgcagactacatctggttaacaaatttgtcatattgtgatcgaaggacatgaagcgtcatagaagcttcttctgaaatactgcgaacctaattgtgaattttttagatttgattgagatgaagatatcataacaagtatgattaaattacttcgcattatctttgttataaggacctttcaggattttttaagctaattttagtgtttgaacttctaaccttgatatctttcgccaaacgctttgcaaggtcgaaatttactctagggccaacaaggatcatatttcgcttgacatatttttgctcaagattcaattacctcagtaactgccaactgatcccaagtttcttgcctttcagacatccacactctggaagcagccagttgtgatcaa

SEQ ID NO: 94422 - DNA, 784 bp, Eucalyptus grandis
  Intron number 2 from transcript Egrandis_v1_0.047644m (loc us Egrandis_v1_0.047644m.g) derived from phytozome v7.0 (c hr-ID scaffold_10; pos 20189654 to 20190437)
ctaaaggttagctattctgcatgtttgcagcttgttttttgcttgaccaggtcaaactagaattcatctcccggtctctttcatctccattgaaatgcatatatctgctcttcgtgaccatgtgtacttgaaggaaaagtatagaattaaaaaatagatgccatgccaacaattgcacacattcttctgaaactttgctgcatgacgcagctggtgatctgattttgcctagtaaccatgttcatatttatgttcttactttagcatagattttgtgttgcggttggatatgataatgatatttctcccaccctggaattcttggttataagttttaaagcctgtattaggctgtcaaattggtgtccaatctatctgatcaggctaactttcgttacctgcattgatgtcgttggaaccagtgttggggtaatgttcggaagtttaaccatcacaattcatattagaatgtgattccatggattgttgtctgtcaatgccttgttggattgcaaaaccttcgtacctcctgttgaggctgggcttccatgagccataattttgatatagaaactacaattagcacaggaatgatgttagctaaacttgatccaggaaggattgagaaaatcctgtcttctttattttgcaggtgttgaaatatattgtgcaccgacagctgatgcgagggacacttggcaagcatctatgacacattgctcttgagggtggatgttttgttttatcagccaaccaattttgtcgtcggaaagactacccgcct

SEQ ID NO: 94423 - DNA, 584 bp, Eucalyptus grandis
  Intron number 3 from transcript Egrandis_v1_0.027240m (loc us Egrandis_v1_0.027240m.g) derived from phytozome v7.0 (c hr-ID scaffold_8; pos 12110844 to 12111427 reverse strand)
tcgtgaaggaaagcgaaggcagttcaattacatcggtactattccattttcttcatgttttatgagtgtctacgtgtgtttgttagaatctttttgcctttcttgctggttcacccggtatcttctttgctatgcttggccattggacaatgaattcttgctggaaaaaaattgttcttggaataagaagctcttttctaattgcccccttcccccccttagattgtatttgagtatgttagcttgtacttttgaaatccttggatggtacttgcagtatagttccttgagcatatgttgatgaaagataagtagctgctaatgatgtgctcgaaaaaggcatagatgaattgctcaatctgtgccaaaagagctgaaatctttcttgctgaacactttttgtcatttccagatggaacttaagtgtctttggtcgatttttgtgttctgttttgtttagttgtattctacagaatagggaacgacaggcgttgattcaataattcattgatgcctcaagagtacataatatgcaatgtaaacatccttaatgaaattctatttgttagggaagttgctgcgag

SEQ ID NO: 94424 - DNA, 975 bp, Eucalyptus grandis
  Intron number 1 from transcript Egrandis_v1_0.027816m (loc us Egrandis_v1_0.026087m.g) derived from phytozome v7.0 (c hr-ID scaffold_10; pos 6979099 to 6980073 reverse strand)
atcacttgcaaccaggacaaccgcgtcactcgagtgtatgcccccccacctctctccctccttctatgtgaactccggaatctgaagatgggtgtttgtccgttccgtgcggcttgcgtggcgaatctttttttgaactcgattggatgtgccgttgtgtgacgaatgggctccgtgcttctttttcgattaatcggggttgacgtttggttgacttctgattgaagttcgtggttttaagttctggatcatgttgtttgtttttgctgggtaaaaatcattctgctatagcattaatgaattgggtaagttgcctttttttttttttttttttttaagtttttagtagagagcgactgagtttttgaaaccttgatgtaaattgggtgatgggttacatcgcttttgaaagtttcagtgtcctttttggagaggcaagtttgcatgattatggtggatttcttgctatttatcggcctcacgaaaagggttctttttcctggcgcgttcttgttgagcacaaaaccagtcaaagattccagtcctagattttcattctttcccaaagaaaatttttctggtctctatttgcgagggctgttcccgttgccctttaatgatgtatctactgtagatgaaaactaaataagataaaattctgtaaaggtattgcggattggtttatgtaatgcttggattgatggttgatggtgtctcttgtactgtggacttgcttaagcctccttggataaatagagttgtttctaagttgggtgatggttctctctatttggttcctatttgataaagttacttcatgatgcataactttgtctggggtcttcatctctccttccttccttttcaatggtgatttttgtgaactgtgcttccacttatctatgattgtttctgataatatagtatgatatttctgcagagatttagggaactctaatctatctggacatctgg

SEQ ID NO: 94425 - DNA, 891 bp, Eucalyptus grandis
  Intron number 1 from transcript Egrandis_v1_0.051276m (loc us Egrandis_v1_0.051276m.g) derived from phytozome v7.0 (c hr-ID scaffold_8; pos 56856975 to 56857865 reverse strand)
actgttttgtcagggtaattttctaactcaagcattttatgtgcaacatcattacaagtgtgtttggtttagcaattgcaaaacttgggcaaatgcaaatactgtttggcaaaattttttgggcactttgaggagatgcaatttgcaccttcaaagctctttaaaggcatttaatgcaaattaagttaggagatactttaaaatgttatgtttccaaaattcaaatagacatttttccttccaactttaccatcgctcaactttcataattcccaaaatgttcttgaaagccctaatttttgcctcagccaccaacgagcaaccggtgtgccatcggtgagtagttggtgagccactaccactctcaatggtggtgactgagttccactgacaaataatttgagattttttataaaaaaaattggcaaaaaccatttacaaagtataatttgtaccatatagtatttctattaaaatttattttcaacgtgtttttaaaatacactttaccgaacagtacttgtattttgaaaaatccttttaacccaaaagtttttgcattttcccaaaaaaacatttctgaaaagtcgaactaaacacaccttttaagtattctcttgcaatgtctattatatttgcatattgatccacttttttcgcaaaacccatacatgggccagctttcatttgaataactaatcctaggaacttagaagtcgggtttgcatgattgatgtcacaaactctaaatggatatccaaataaatctgtcatagattttactatatctaattataaataatcctataaaaaatggatatttctatggtgtgacgtacggtcttctagtactcagggttgcgacgggtccattcttctcaactcgaccaa

SEQ ID NO: 94426 - DNA, 620 bp, Eucalyptus grandis
  Intron number 1 from transcript Egrandis_v1_0.021459m (loc us Egrandis_v1_0.021459m.g) derived from phytozome v7.0 (c hr-ID scaffold_8; pos 20877134 to 20877753)
gtaattgctttttcaggtccctgttccttgttagaaaaagatcaccgtattgttcatgattttgttgaatgtttccagggtttgatttgttttgttagatgacagtattcctctctgttgtggtagatttatggtatgcttattgcattaccgctctgtcgtgagaacacaacacagtgcattttatggtacactggttctggaacaccatcatcgatgcactagaaattcctctgttggaaagacgattgcttttcgtacaaggtatcattctacttgagaccctgcatctggaaatatatctcaaagaagagctctatttgccagggaatgtagctcttttaacttagtctcgaggatattaaattgactcttccgatatccaagtaagtaactttgtaaaattctatcactattgtatcactattgcacaacgcctagagaaacaaaccatgttcctcaaccctgttttcattcagcgtatttgaattatccatcctccaggtaatctgacggccttgaatggagcttttgtctatagaaatgcctttgctattgttggaattttcatagttgtccacccttgttaatcagggcccttgcaggtcggttgaaaggca

SEQ ID NO: 94427 - DNA, 795 bp, Eucalyptus grandis
  Intron number 2 from transcript Egrandis_v1_0.021459m (loc us Egrandis_v1_0.021459m.g) derived from phytozome v7.0 (c hr-ID scaffold_8; pos 20877786 to 20878580)
gttgtccagtacatattggtatgtggagtgcagatttctctttttcaagcagtaggaattatgttcgcaggggtttttttacatggagatgttgtcctcatttgtattagtgctcagtgatccgaatctgaactttatttggtgcattttgttcttgtactttttctgtaagtattgatggatctcacacttatatagacactgatatagcatgcctttggaagaaaaaaccaagttaaaatgtgtattatacgttgaagcatacatttctgctgccaatggttattcctggtgatattcggctcacattcaaagttgcatagagttataccaacacaaggatcacctgagcaatttgacattcttattttactagagaggaaaaccttttgagtgttaactgtgatttggatggtgtatctgggcctaaactgactggtgcaggaggaagctggactttatagttaccgcattgttctagcctacaggaacgtgcggttgccactttagggtgccaatattatgcaaaccgacatatttttggaggagatattgagaaaataaaaaattagagaattgatactgatgttaactttttagcatgcatgataaaactttaatgttttgcaatggcacaaataggcagttttgcttgtttcaagtttcaagagaaccctttattttctttggttttttctcatagtgacatgtttaaggaaataaaatccttgtttgaagaatggacctgatatgtgcatctaagatgggaattgttaatgacagaaaaatcgtgaa

SEQ ID NO: 94428 - DNA, 358 bp, Eucalyptus grandis
  Intron number 1 from transcript Egrandis_v1_0.044901m (loc us Egrandis_v1_0.044901m.g) derived from phytozome v7.0 (c hr-ID scaffold_10; pos 5185768 to 5186125)
tccagccagtgggctgtcagtgcagaagagtggacgtaggcttgaaataagccgaaccactataaaccttgcgttcaattttctcttccctactctcagtcttattttgattgttgtttgtttattgacgagaaaaaattgtctcaattctatcaactgtctagtattgtgcgattatcgtgagaaattactatttatacctattcacccccccctctaggtacttatactagccatatcatcggggtgcttagctcatggaacaatacggtcaatctctgccaatggttcggtatcacatgcaatcaccggcaccacaatagggtcgttgtactggacctagagaatcagaagctct

SEQ ID NO: 94429 - DNA, 997 bp, Eucalyptus grandis
  Intron number 3 from transcript Egrandis_v1_0.026253m (loc us Egrandis_v1_0.026253m.g) derived from phytozome v7.0 (c hr-ID scaffold_8; pos 35461802 to 35462798)
gccaaacttctcgaacaagacaggtttgcgattacccctgagcactttaatggaatttgctgatctttttgcacatataaccagtgtgatctacagggttgccactctagtttctaaaattcactatttgatgaaattatgactgcaacaaagattttattccttctggtggagtcattgctttctaatctgtgcaataatgacatccggataatgacatgagtgatcctaaacttttcttcaatgtttaacgtggacatggacttcttttattcaatctaatcccggactatcaaaagtgtcttgatgtagtccttcccttgaaaattctaacactgttactttacgtgatcattctttttgtaaatttgatgttagatctgccagagtaccgtcatggtttatatgtgacttccatgtcacatctctcatattagtttggcccaaaaggatagtaaaaaaaagaaataaacaaagatttgttaaattggaaaaatgaagtggcagtcatatcctaattttggcccaataaatgcaaatgtggtgacagtctgcgtcgtcaagtgtcaatttgacgcacactatcatcatgtctgtgtccaactaatgcacgtaatgtggtgacatatttaaacgaaggactatattgtgcggatttttgaaagttcaaggattagtttgaataaaaaaaatggcccaggatcacgttcaatattgaaaagaagttcaaggatcttattaccatctcattacctttatttattagttccaaaagaaatgttggaaatttctaggtgattaattttgagatgaatccctcattgccgtacttgcaagacgttatttctggaaatgcaaattgattgattttcaaatatataagagacgtaatgctgtcttatgtttgcaacctgtaaatcctgtattttttttttttaattgtcttcatggcattcttgaagacttccttctccacggaagcaatccttgagttctt

SEQ ID NO: 94430 - DNA, 442 bp, Eucalyptus grandis
  Intron number 1 from transcript Egrandis_v1_0.010415m (loc us Egrandis_v1_0.010415m.g) derived from phytozome v7.0 (c hr-ID scaffold_10; pos 4062203 to 4062644)
gaagttgcaggcagttacaatccttacgtcgttgggtattttcatgaactttcctcttcgaaattttcgatctttctgttcgtgaagttcacagctttttgattcggtttctcggaatacaagtggtccttttgttggtgcgcttcgcaagtttctgtctttttttctccttaatgaatgaatccaccgatcggtgcgtttcgcttgcattcgcttccttcatcgtgttctgctgtttttcagttgggcattgctagatttggaattcggcaattctctccctttgtcttttttttttggtccttatttcagttaagcttagcaatgattggaattgtaacttgtttgttgtggtcatactgatcatggatgtttttttttttttttttcgggtggcttatgtgtaggctttattacacaaaagtgcaactgggtaaccctg

SEQ ID NO: 94431 - DNA, 744 bp, Eucalyptus grandis
  Intron number 1 from transcript Egrandis_v1_0.024205m (loc us Egrandis_v1_0.024205m.g) derived from phytozome v7.0 (c hr-ID scaffold_10; pos 5373180 to 5373923)
gcggcaagttcgcaacgctatttttcggcaaacaggttttctcgattgatgaataagtgtacccttgaggatagtgttgtgttgtcatctatgaaataattgtggtggattactcgccagttctgaggatctattcatttgaatcgattcattctttagtttatcatctatatctatttggttggacgctcagtcgatgtggcagagatatcatgttgatgattctgattgaatttcagaaccagaacaagacctacattggaacttttgattacttacttgtaccacatatgattcagtcaattagtccctctacttttccgatttgagttattcggggtgccttgggaacctgttgggaagtggaggtttcttttagtggtttgaaaagttcctcattcgagagtttgtgctatccatgtaaattgcatagaagtgtgataagctaacatgaggttgaagactgggactagaagtagagcggccttcaggatggaactgtgtgtccaagtgacctgttagtctcacttcgtgttgctcttttagtggcggtaaaatggattttcgtgtgagatgagtaattccatgacagaggtcacaaaaacctcttaaacattcgatgtgattgtggtagccaatatacaagcttgggttcctattttgaagaaaataattctaacaacattagctgaaacagctgcatttgcacattatgactgaagttatctttgttgcgtgcagacc

SEQ ID NO: 94432 - DNA, 1002 bp, Eucalyptus grandis
  Intron number 1 from transcript Egrandis_v1_0.016477m (loc us Egrandis_v1_0.016477m.g) derived from phytozome v7.0 (c hr-ID scaffold_1; pos 23262617 to 23263618)
accataaggtatatacatatatacatacaatacatatggttggtactaggttttggttttggcgactatagtagttacttcagctggaagcgcgatttcttttgtccgacattttcgcgatgtctttcatgatcttagtattgttcacgagggtgcaggtaaatttgatctttggcgaagccgagattttcccaagggattctcccttgggaattgtacgtcgcggagttttatggactagattgcagctactttaatttgtggaataagaaccatttgcgatggcaaattctggaaattcatgattcttgttggatcaaaagatgcaccgaattgaaatttgcaattggcaccggatccataagaggggtagcataaaccgtggcatgaagtgctttctcgtgatcttattgcaacagtagaaatacacttcgcctccgtaaaatgaaaaggtgaactgtgtagtaaaggctccatggaattttaaagtagtggggcatccgattgacctttcggcagttttaaggatgttgcatttctcattgtccacctcgattcgtttggctaatgttattcctttaatggatctagatcttattcggtacccattatacttggtcatgatatggacttcgcgacttgttgaaaagtccatatcaaatttgaccaagagaggcttgagtgtggtaaatatcatggataacccggttatccccaaagtatttgtcaaaattaatcggttttaatcgaactctcagatttatttgtcttgctgtttattcatctgcttgattccatctgatgcccccttttaggagattttttccggtcgaaacattttttatctgtctaaacagtgttagttctttatgccaagaattaaataaaaaatcattatgctaatgctgggtatcatttccattgtagaaactgttttaggttttgcataaattaatattcttaatgactcttccttatgcgttgtgcagcctaatcggcccg

SEQ ID NO: 94433 - DNA, 483 bp, Eucalyptus grandis
  Intron number 2 from transcript Egrandis_v1_0.029733m (loc us Egrandis_v1_0.029733m.g) derived from phytozome v7.0 (c hr-ID scaffold_8; pos 58117966 to 58118448 reverse strand)
cccctctctggcgtggcggtccggctggccccaaggtaaaaaaatcaaatctttatcgaaaatcgagtatgatcagtttacttttttggactgatttgtgtgattaatacatcgaagggacatctctaatttgatgtttcgcttgtttaattttttttccgcattatggagtatgtgcattcgtggatcgatcgtgaacacgtggatttgataatgtccttatgaaaaaaaaaactgtgttcttgattaacagtgatacagagatcgatccagagaaatgggttagcttgttttagcgagtcttgaaatgggatcggctcgattcatagattggatctgtaaaaacatcttcttgatggcgaagcacccgttctcttttttcccccttttggtgtaagctggccgttcctgtgtttttgaccacgcgatcttgatcttgtccttgcagtctctgtgcaacgcgtgtgggatcaggagcaggaa

SEQ ID NO: 94434 - DNA, 758 bp, Eucalyptus grandis
  Intron number 2 from transcript Egrandis_v1_0.001075m (loc us Egrandis_v1_0.001075m.g) derived from phytozome v7.0 (c hr-ID scaffold_1; pos 31911512 to 31912269 reverse strand)
ctagggttggttttctctgatggttgtctaaatatatgtctcatgaagagtttattggttcctagaattactttggtgtgttgatcaatcatctctatgcaatgtgcttgttaagcctgttgttgataatcacagagcttgtcattgttctttccttggtttcttcacaatgctatttcacttttatgtttgcttcataacgacgtgatataagtgtctcatacatgatggagtggggatgttcataaagagaatggcattacaaatatctcaaagatgatagaagacacagttcggatttggtgtggttggaagaggctcaattttttctttttgaaggtcttttgtatagtgaagaacatgcaattgtgctgtaactagcttaatccagggtcgagtggggtagacctgcgtgattgccaatatagctccagttactgaagataattttgtttattggcattgagaaaggataaatgagactgggcagatcttgtgctgcattagatgagaaacatcgactttgtaactctgcatctgcaagatgcatgttggatcgagcatggcatagcattgtgtaactttgctttttgaagatatattgactatcaggtttcattcaatttggttcaatttgaaatgtagaatttttcttcccttgttctagttgtgagcgaacttttttatggatttggatgctaagctagagatttatctttgaagcaatgataattggtgatcatgcaatgctttccagg

SEQ ID NO: 94435 - DNA, 381 bp, Eucalyptus grandis
  Intron number 3 from transcript Egrandis_v1_0.055225m (loc us Egrandis_v1_0.055225m.g) derived from phytozome v7.0 (c hr-ID scaffold_8; pos 50477678 to 50478058 reverse strand)
ctgaggccaaggggcttatcaaacctggtcaggttagtggattgcaaaatactcccaatctcttgtttttatatggcggataccagaactctttaacggtgttgtttttttacatcgtgcaatattttacgaactacactggtctgttttctcacaacgaatttattcagtcttaatggtaggaagcaaacacttggtttatttgttcgtgtttatgactcttagccttgtgtagtgatattcaatgtattggtattatgcacagttgcagatgaatttagatagaaatgaagctcttctgccgatggatttttcattttgactttttaattccaaattgctgaagagtgtactgattgagcctgcaagtggtaatactgg

SEQ ID NO: 94436 - DNA, 751 bp, Eucalyptus grandis
  Intron number 1 from transcript Egrandis_v1_0.043397m (loc us Egrandis_v1_0.043397m.g) derived from phytozome v7.0 (c hr-ID scaffold_1; pos 16168601 to 16169351)
aagatcaaaggagagaacctactcagtagccacgagtctcttttagaggacgagtacgttggatggacaaattgttaggacaaattgttaggacaaattgaaaatcaagaagtgctaaacacgatatattgagcattaccttaaatagaccatgtcaaaactcaccccatatgtttttggaataacttagaaaaccaacattgttaaacttttttgaaaaacccaattgataatttctctctgactaaacagttactccaaatgaaaagagccttcattacattccaagactaaaagagatttccatcaaatccataatctataatttccatgtaattccatagctttttaacttctaaatcgaatccctcaattcaaaaatcacatgactgtgaatttatgacctaaatcttatagtgttacaaaacaaagttaatttgatttgatggggtcttcgtggagggtacgtaagaaacctttcttttcttctttctccctctcctttgtttcttttctctattcactggacgaagctgcactctcctctttctttcttttatctgtcaacatcttcttctctttctttttttcccacacttttagatcgagtcaaagttctcatgttacatcagccatgactcttgaataggcgatggccaaaatggtgaagaacccgagaataatggagagaattgaatctgaaattcacctttgaggaaaagagaggatcgacgagcaagacatccggcaa

SEQ ID NO: 94437 - DNA, 877 bp, Eucalyptus grandis
  Intron number 3 from transcript Egrandis_v1_0.022605m (loc us Egrandis_v1_0.022605m.g) derived from phytozome v7.0 (c hr-ID scaffold_10; pos 27278796 to 27279672)
tcaaagtggacacgaactccaatgtaagtgttgtaaatttgtaaaacgaaaaaagtgaacagttctctaatggcatgttgctgttttctctaaatcgtacctgggggtgttgcggggcaggagggcgtgtgatggagaaattgctagtgtccgctggcatgctgaatgtaaacttccaatgatttcctatcatataatggaaatgggttaggtgtcaagaacatgatgtgcaagtgtacacttattgagatcactggttgttttcttgtgacccttcaaaacatggttttggtttattctttatagtaatcagggaagactctgtgttctctttagtagttagtgtctgaacattataggtaaactgcaacgtgcactgctattaacgaatagtgtagtagtattaattagcatcatacttgtttctggtaatttgtcaaattaggttgtaatatgtacctgtaggaggcaagctccatgggaccctattgtacaatttttctttaatacttgagtagtcgagtcatgtgatcaattttcaggaccctgttctactatctttgtttactatttgagtggttgtgtcaagtgaatcgactttcagcaaccatggagagaaattttaaaactggggaccaagtactgtatcgtggttcaaggggattcacaaatggtgtgctgtatcttatggctgtagaaaaaggcttttcatgtcaagaagttataactcatttgagtattttagaagaataagttggatctctgatgccttacttaatgttgattatggtatcaccctaattgtttcatggttttgctgaaccttgcctcatgatacgcagcttgtcacaaaaattactgttgacgaacctttccc

SEQ ID NO: 94438 - DNA, 473 bp, Eucalyptus grandis
  Intron number 1 from transcript Egrandis_v1_0.005435m (loc us Egrandis_v1_0.005435m.g) derived from phytozome v7.0 (c hr-ID scaffold_10; pos 37502050 to 37502522)
tgtatgtgttcacgtcctgttcgctccgctttcgtttctttttgtagagttcgaggatttgtcgttctttctttggcatcggtaactttggctttgctgtttaaaagatgagaactttctttctggacaattctctttgttcggctggggaaatgttaggctttcaacttttagttttggtgctcttgatatgaatgtgaaattgcagcttagaatttgtggcctttgatgaactctctggaatgattttacaagggctctgcagtttgagtcatgggtggcttttgtaatttaacattcctcgatttttttttttttttttatgttagtgactagtgttgcaggctcgataattatgtttgccatgtcgaattggtgtggaccagcaattgatgccttaaggctttctgttaagagaatcgaagaaaacgcatttatgtgcttgctcttgtttacttctgcaacaggtgttt

SEQ ID NO: 94439 - DNA, 1047 bp, Eucalyptus grandis
  Intron number 1 from transcript Egrandis_v1_0.008515m (loc us Egrandis_v1_0.008515m.g) derived from phytozome v7.0 (c hr-ID scaffold_1; pos 8897966 to 8899012)
cctccctggaagcaaggagcatcgacccttacaaggtgagatccttttaggatgcagttgatggtcttgaattgtggggagggttttgcgtgagtggttctggtttcggttttttatgggaaggggaaggggaaaatgcgggaggtgcaggggcggtttgaggtgtggttcgatttcggaggcgctgggagattggaggaccgcttggagtggccgtgttgggaggttggtggcacggcggttgtgtacgtttgcgcgattaggtggttgattatgtgcatgaaagtgtctcttttggtgtttgagggtttagagcgctctttagtgacacgattttgtgtaagatcacagatgcggtgtagcagcgatcgtaatatttccttttgtggtaggcttaggggaaattttctcaggcagtttgaaatttttgttcgttggtaactcgaatttggttttgacaatggttgatcggttcattaggtgcaggcaatatggaaaggtgcctagttttgcttcataaattcatccaattataatgtctttgattgtcataattgtttgcaaagactattagcagaggagcatcagacattggctacagagttcatttaaaagggaaatggtataatgggagtttggcagagggttctgtggaatggcttctgctttccagtcgttgacattgtcgagctttagacttctcttctatagccctataatgttctgccgatacatagaagaaggatcccttagatgggtcaagtgctgcttaatggtaatgacatgcttttgagctatagttctacaagttaatttgagataaatcacttaatcagaagaaaaaaaagtgccagatatgataaataccatctgtatgttttaaattatttatttcggatgttcttcttgatactaagtcctaaaagatttacgtgtttctatgtgaatgccataatggtagagtgctctttaaatatgtcatgttgtaacattttatataatgtattttcaggttcttggggttgagaagaacgctagtcagcggga

SEQ ID NO: 94440 - DNA, 340 bp, Eucalyptus grandis
  Intron number 2 from transcript Egrandis_v1_0.038167m (loc us Egrandis_v1_0.038167m.g) derived from phytozome v7.0 (c hr-ID scaffold_8; pos 66102712 to 66103051)
cactgagatctaccagggtacgtattgatcattagatgatgcaacgctcatatttcgatcacaatgaaccaaagggcttgctaggaaactttctttggcgattcacgtgatctatacaatggaaaaaaatacgttcgacaagaaaagaactaaaattttaagaacacaataaatcccagtggtagtttacgactaactgggttaactgaacgtgttttgcgctctccatccttgccatctaaaagctctctttttcccctatatctctaactatcctgtgtttgttctgacttaatgattttgattattgcagaactccacgatcaagctctttgctctg

SEQ ID NO: 94441 - DNA, 384 bp, Eucalyptus grandis
  Intron number 2 from transcript Egrandis_v1_0.030574m (loc us Egrandis_v1_0.030574m.g) derived from phytozome v7.0 (c hr-ID scaffold_1; pos 6130379 to 6130762)
cttgtccacggtgaggtaactctgtcctccagagcacttgtccatgtaattgttgaatctgtggggcattggagtaggaagtttgttagaaatggaaataacacaaatgaccacctcgtttggttcaaccttatgaaacaagtaatttgagtgtaaacatttgcaatactgtgatacacattaacgcctctaatcatgaatctactggatatttgcgtgcagatatcccttttcttctgcctatgtttgttttattacctgtgataaccagaagctgaaccagaagtggattgccaaccataataggcattgtaattggcagactcgccacccaaaacatttgggacagaataaactcctctgtcgttggcggcgacataatcg

SEQ ID NO: 94442 - DNA, 785 bp, Eucalyptus grandis
  Intron number 1 from transcript Egrandis_v1_0.008758m (loc us Egrandis_v1_0.008758m.g) derived from phytozome v7.0 (c hr-ID scaffold_10; pos 29823035 to 29823819)
ggctaacgagagacaacatcaaggccatcatcgtaagaaatcaacgcggttttaacttgatcacctctcgctatcgaggaaacctaatcttgctcggttcaccaggcgatgtgtcgtgaaagaaaaaagaaaaaaacaaagaaaaacacggtttccataaatggtgtggggggggacggaaaccgacatgcacctgtcgagcttcctacaccgttcttttataatcagaacaggacttaatttggacgtgtcgctagatgtttcgcgtatatattcgggacgttagggtttccatcacattaagtaagtatatgcgagttattatcagttattattttctttttgcgctagcgaaataaaaagtgtattttcgttttcctttatggagggtggagatttaggtactgatataatatgctatactcaccgttcttggcgtagaaaattaggtataactgagcaataattgaaattggtttgagaagtttatacacaaaaaagtgggatttacttttttcattaatggtgggtcgatagtagtgtacgattaatcgcccgtatctggacgccatctctcttttgcgaattacacgtgcatgcataatttatttggagttgttaggaagacattccacttgacaattcgtgcagcctagcttttgttcttcggctgcagatcttccacgtcataaacttctcaaaaatttcaaaattcatcaacgagtgttcatggtagatgtcctttaattctttatctgttctacttgtgtttcgtttaggacgtg

SEQ ID NO: 94443 - DNA, 716 bp, Eucalyptus grandis
  Intron number 1 from transcript Egrandis_v1_0.008398m (loc us Egrandis_v1_0.008398m.g) derived from phytozome v7.0 (c hr-ID scaffold_8; pos 10083365 to 10084080)
cgattacgactccgtctggatctcctgggttacaggtcggtgcgctgttcgatcggtctccgcgtctcttcttcggctcgcttggggcaataaaatgtctcgtcgtaaccgtgaaacggcgttcggaaggatttaggttctatgattcagcatcctgtttagcgggttttaaggatgttcctctgcatgcggctttgtcgcgggagcgagttcgcgtgatctgggtgcaggcagtacgtgctgctcgtgcaatgtcgtttcgctgcaactgaattcgactatggaagttgaagttgcgaaaagttaacggaaatgctactcggttaccacggtcttttgttccataggcggatcattgctataggtttcagctcaaataaacgaaattgttagagtaatgatgatggctgtcgtagtggagaagttgcatccctggtcgtttctttggaactctcttatgttgaggtagaggagaggactaatagtgataccaacttgtgggtcaattctttatccttggtcatactgacaaggataaagtatgaccaaggataatgaaagtttttgcatctttttgaagtgcagagtgtcgtagttaggtcagtatatatggatggacttctttaaaaccaaacttctgtgttggccatggaggtctaatttggtatggtggttttgcagggaactaccaaattggcagtagcgttattccgtta

SEQ ID NO: 94444 - DNA, 634 bp, Eucalyptus grandis
  Intron number 1 from transcript Egrandis_v1_0.009162m (loc us Egrandis_v1_0.009162m.g) derived from phytozome v7.0 (c hr-ID scaffold_1; pos 670078 to 670711)
ctggcaggttgtttccgaagttcctgtctgcgtggcctttatgatctgacttacttgcttcctggtagcagttgagtttgttaatcatctgatttgttgctgtccagttagtagttcctcttcaattttgaaggccagggacagcggtgtagttggggcagtttatttccttctaggtgttatatatggtttcttgcattcaagaatgggtatagataagtgacttttctactccatctagaacacacaatgacatggttttttcatttgggaatagtgtactgctacatatactcatgagtgaatttgcagttgtgacctactatagcgaagatcgctcaatgttcagagcccttcaccaatcttataagaaacggctgtttcgttccctctcgcggtcgtttcgtacatttcctttccctgaggatatttgcagctgcatttcagtatttactgctgttggtgtcgctagcttttagtgacaggaatgctgctgcatgcacctcctatggtggatgaatatgattgattaatgggtcgtatgaagcttcagagtgttacgaaatcctatttgttctttgattttgatttttttaaccttgatttctaactagatcggagagagagtttctct

SEQ ID NO: 94445 - DNA, 683 bp, Eucalyptus grandis
  Intron number 1 from transcript Egrandis_v1_0.021121m (loc us Egrandis_v1_0.021121m.g) derived from phytozome v7.0 (c hr-ID scaffold_10; pos 5353352 to 5354034)
gacgacgtccccaccaacgtctccacggccgagaggtccttcttcttcttcttcagtatgcccaaaaaaaaagattcttttatcttgggtttttcagtatgcccaaaaaaagctttttttaatcttgggtttgtgggtgttatggtctttgttatcttactgattttgatcttccgacttgcaatcgtgattcgttaatttcctcaaactggttaaagggtcgtagctcctcttttcgaattagaacggggcgttgagctggcggagcttcttgctttagcccctcacctgcataaaaatggctgcttcttggtgcaaaacgaagaagggactagagtggggtttctttctaggtgggaaaccaatgcaaacatcaaattttagcgaacctcgcatttctttagtgatgtcaatggcccttcaatggattggacttgcggtgatcattgtggagttgtgcgtgctcggaggaaattcgtccccgtgatgctcgtgatctgttgataatgcctgctatggcttgtttccgccttcttggcggtccatctcgggttgcctttttgcaagtctggggcaaacgcttgtgactagatacaattcgaattcggttcatggggtgcattgatgcgttacaccaagaatgttgaatgatcttttcttatgcaggttggttagagctgctc

SEQ ID NO: 94446 - DNA, 955 bp, Eucalyptus grandis
  Intron number 1 from transcript Egrandis_v1_0.006249m (loc us Egrandis_v1_0.006249m.g) derived from phytozome v7.0 (c hr-ID scaffold_10; pos 4974823 to 4975777)
caggcttacctcgacgccctcccctccgccaacatgtaaaaaatctcgctcgccttgtggccgtaatgtctagggtttagggtttttcgatttctcggcgcctcgtctcgcgcgcgcgcgcgcgcatttggatgcgtctcagttgagatttttttgtggttttgatgattgccgcgtttgattatgggattttgctgatgtttgctgtgcttatttccgttgccaatgcatcgagttcgggcctactgcggagatatgattttgatggagttggcgatgtttcagctacgggtgcagttattagcatggagtcgaaacctttttggagttttaagtcttccatctgagatgctctctccatctgtagtatatgcatctttcttcatcaggcttggcaatgggtttttttatcttttgccccatggtagtttatgcttatttttggaggaagcaattctttaattgttttgtggaacagtggaggtaaaccatggcagcctgtttggagctgaaaattgtttctgcagggttttgccattgaatgcgtgcctgtgtttccttccacggcgaataaaattttgcaaagacttgagaataatgttaaaaaatctcaagcaatggaaacatgctttatactcgtcgaagtgaccaaattagtgataattttacacaaccacgaactgtggtcctatagttttaccggcaggactgcaggatagcttcgccatttagcgctttgagtgttatttttgtaattttcattttcattttatttttaattttttacaaaattttaacttgtatgagatgtatcaccaaattttatcagcaatacttgaaactaggaaatgatatcacgtagttatgtatgtagacattcgctattcttccaaaactcttgatgtctgtacgtgcaggttaatatattctcattgcatattatcatgtttcaggt

SEQ ID NO: 94447 - DNA, 949 bp, Eucalyptus grandis
  Intron number 1 from transcript Egrandis_v1_0.019087m (loc us Egrandis_v1_0.019087m.g) derived from phytozome v7.0 (c hr-ID scaffold_10; pos 15710920 to 15711868)
gtggtgatttaaggtaatgattcattgcaattgttcaattaataatacagatagaacatgagtataacttggaatcgaccttgaaacctatgacatggtaggttcttgatttcaaagtatacaaggtaaattctaagttccaggttttagaaaataaggaacctatttagcaggtagttggaacttaaaatcgctcacccctagtaaaagttgacaattgtaccaatttggggtttagcccctcgtttgtgatttttcacgatattacttcaattgaatgaaaattaatgaatgtaccgtttttggtttttagtaatcaaaagattaatttatagtaaatttgtcatatgtataccaattttggatttttttatggtcaaaaaattaatttgagataaatttatcacaattatattaatttgggttttttttatggtcaagaagattaatttgagataaatttattacaagtgtatcaatttgaagtttttcatgatattaattttatgtgttattcatctttttctttcgtatagaaattgaaaattgagccggtgggaacggttttgacgactcctctaattcgatgggtatgcttttgatgctgcggcccatatgggttttgagcaatactaatgtatgttggcccaaatagactccacttggcaagagggcagttttgagtcgtggccttgttcctaggagcctcggacatcagccatgtaagtagttgattttgggcgtatcaacctgagatccacttccatgatcacggattgcagcagaagctttttgggcaatgattgctatgacgatttgaaaggaaacctaaaatttcggaacacattgaatgtgatgactgaatgggttgttcacataataaattctaggtgtattgatcaccatttatggagttggtatttcattgcctttttattccttcggcttt

SEQ ID NO: 94448 - DNA, 758 bp, Eucalyptus grandis
  Intron number 1 from transcript Egrandis_v1_0.017540m (loc us Egrandis_v1_0.017540m.g) derived from phytozome v7.0 (c hr-ID scaffold_10; pos 1041860 to 1042617)
gcgtcttgctgctctctgtgtttctcctctacaaggtaagctttggttttctttgtttctcgttcctttttttccgttgttgaaggaacggctaaggtcgtgttgtttgtggttgtgccaattgtttgtgcgtgcctttgacctcgtggttgttttaaaggaggaggaattttaatggagaacattgacctgagcttttgagggttgtttagattagttatgagggttttggccaaccagttttatggagatcctgcaaaagcaactgaattctgatcctaggagtacccaccatttctcatgcttattgctttgcgtaacctgtcatgtatctgtgcaaagtttttgttcttcagcgaggttcgattgttcatgtcattcaatctttcaaggaacatctttagcttgatggctgcatatagtcagaaccatggtggtgataatggatggtcgagggagaaaagtaaaagttgcagttgcggttgcggttgcgcataattgatacgcaacgcttcaattttgacatggtgaaaatgtgaaaactttaggcacacaacgagtttgaaatagctcgtttttattattacattttcgtcaaatgagctatgatggcttccatcaactaataattgtattggtaagagaatgaaaagttgcttgcatcctgttttcttctgtgcggtagttaacatgtgtctcaaatttagagaccttttcaattatgaacttcactctgcaatttcgtccagacaaaactg

SEQ ID NO: 94449 - DNA, 981 bp, Eucalyptus grandis
  Intron number 3 from transcript Egrandis_v1_0.037963m (loc us Egrandis_v1_0.037963m.g) derived from phytozome v7.0 (c hr-ID scaffold_8; pos 18045203 to 18046183 reverse strand)
gctcgctgaacttcacaataggtacaaggataaaggtcggttctttcgccattttctgttcggttgcattttgttgcattcatggatgtcgtcttttgttataatgggtatgtttccgtggtgattatcatgggaattcctacatttttcgaccatgcaatggaagtaagtatggtgatgggtgactagcactatcagttgagcttgtaagtggggaaagaaaaccatagaaagaaatactgtatgtttatgccccaaaaaataggaaaaatgcaaaatcaaccagtgttggggtactcaaacatcttcatgagaagctaaatagcctggtgctgtaaatgttggccaagtgatgcataaattgtctttatactgcttttgtccgaggtatactgtccgataagatcatgaggatgaatcgagtcaaaccgaattttgtcttctacatttattaacctactgctttttccaatttctttttgtaactgctccaatgcttgatgatgcactactctgccttggcatctttgctggggttgcggtcacttctagggggttggccatgcatgcaagtaagaatcagataacttgggatgatcgagtcaacccaattaattgcagatgccaattttgagcttcatttccttctggaaatccctattcattgtcaatctgcagagcacttgttcttcgtctaatgttgcaataatctctttgctttgttcatcgtctgtttggaaatttgtgaacattcgtaataatttgtccctcatgctgtgcattgccatggaaagttctttccactggaaatttttaaatagagagtagtcattttctatattgattattccactggaaatttttaacatgcactgccgacctttccttcttagcccctcccaagatgagtttaatgagtttgaaattgaagggaatggctgctcctgggtttttctcaggattcgaaatcttggcatttcc

SEQ ID NO: 94450 - DNA, 829 bp, Eucalyptus grandis
  Intron number 1 from transcript Egrandis_v1_0.039769m (loc us Egrandis_v1_0.039769m.g) derived from phytozome v7.0 (c hr-ID scaffold_8; pos 34764138 to 34764966)
gagaataacggaatcccattgcctaagaaaggtccatcactctaacttctcttcacggcatggtgattccatgattcggcgagctcagaattatggatgaacttcgatgagctcagtgaattatggatgaactgtggctagttccttctttctcagccacatctcgcttgtctcgtctgctttctttgtgttttgaacttgcgttgtcgtcgagaaacctcgacacactttcttttctttcttaataaaagatacagatgtctaaattgcttacatagtttaaagttccttcatatcttgttcaccttactgattgatttctcctaattccgactgattagccctgatcatcttaacttcatgtccattagatagattttggctgatatcactacattttgcatagaaggacaagaattcgacaagttcattcgtgcaggaagtggaacattaagaaattagtttcatacgatattgatgacaatcctttctctatccaataatagggataaagcacaagtggaccatagttgttggcacattatcggctgtcttgctgattttggtgctagcattgatcttcattcttggaagaaaactgtcatgccaagacggtgacgaagacccaaaagctgtatccaaaaccctgagcgctaacaaggcccattccttccataaccagtatctgcataaggaaaacaaggaaggttagatatgaaaattatggtgagttttgattaacctattcttctttccacttaccgaagttggtcatactgaatttccatgtacagacatcccgatttttgaatcagaaaggcctctgata

SEQ ID NO: 94451 - DNA, 650 bp, Eucalyptus grandis
  Intron number 1 from transcript Egrandis_v1_0.008481m (loc us Egrandis_v1_0.008481m.g) derived from phytozome v7.0 (c hr-ID scaffold_10; pos 38240468 to 38241117 reverse strand )
tcccgaacaccgaagatcagatcgtcgtgcccgatgtgagaaccgttactttgagtgttgtcactttcgtcccatttttttttttgttgtttttttttttttaaagtaatttttcagcttgaggtgcttgatcacgttataataccctgtcgacttaaatgttgtgcctttatgcaatctgtagcacagaacagtgaagcactgtcttgtggagaattttgaatatgacgagagtccattaggtaggttgtcgtatgctgatactcgttatcaaagtctactgcagaattcacacataaaggtgatggattttcaacatgaagagataaactatatagtacgaacaaatttggaaatttcagtgtttgcatcttttggtgagtcgccttgagggctggggaactctagctaatatctcaaatttaaaaacactcgcaaagcagatagagttttgtgttgggcgtgcactagttttagcttttctataagtaatttgctgagttcaaatacgatgggtttcctagtaggacgatgcctgcccagtcaatcatttattcccagcaacttctagcaacaataaatttgatgtcgcttaactactttatgcacaatttatgcagaggaagagctggaagaacctatttgcatat

SEQ ID NO: 94452 - DNA, 635 bp, Eucalyptus grandis
  Intron number 1 from transcript Egrandis_v1_0.020868m (loc us Egrandis_v1_0.020868m.g) derived from phytozome v7.0 (c hr-ID scaffold_10; pos 3756337 to 3756971)
gggctcgttgacaatttggcttgacaagagtgcaggtcttctcatcttcatttcttagctagtgtatcataccggtgttgtggcatgactagtcatcacaagatttctagtaattataagcttgctcaaaattgttggtatacatatttttacctaccccttattctggcaatctaaacttttagaactacacttcattctcccacaaaaatttttataccatgattatatgaaacctgatttcaattcatttcaaacctctattgttattttctattatatgtttcaatgctttagtcataaataaaactctactctacacatgagggggaatgttagagtatataaaaattgacgccttctcttaacaatataaggcttatgagcaattggttgtgcatcccacagtaaaatcagccctagcatgatagcatatttggatagtgcatcttctttaatggactttcatttatttatatgcgctgatttagaaacaacttcttaactgtcagtccattgctttttttttctcctttaagaatctgtttgagcttataatgactaactttagctcctttttttttcatttcttggaagcaggaagtgggtttaagtctcttcgcccatatcagtct

SEQ ID NO: 94453 - DNA, 322 bp, Eucalyptus grandis
  Intron number 2 from transcript Egrandis_v1_0.020868m (loc us Egrandis_v1_0.020868m.g) derived from phytozome v7.0 (c hr-ID scaffold_10; pos 3757003 to 3757324)
ctggttatactgcaggagttgatacctctttctatgtaagagctagcataactcctgtttttttttcttttttcctaaaatttttctccttaagaaaagatatcaaaaatgcatgggacagcttatgtgcaactcccctttgatccggttaaaagaaacgtgaaatttcaacctgattatactgctaaagcttgtgtgtgacttctaaatattcttcttcttcactaaaatattattgtaaggaaagagtattggaaaatataccttacaaagtcttttctgagagattaatgaagttttggatatcatcagctctccaaca

SEQ ID NO: 94454 - DNA, 588 bp, Eucalyptus grandis
  Intron number 2 from transcript Egrandis_v1_0.015817m (loc us Egrandis_v1_0.015817m.g) derived from phytozome v7.0 (c hr-ID scaffold_8; pos 20802128 to 20802715)
gtaattgctttttcaggtctgtgttccttgttagaaaaagatcaccgtattgttcatgattttgttgaatgtttccagggtttgatttgttttgttagataacagtattcctctctgttttggaagatttttggtatgctcattgcattaccgctctgtcgtcgggacacaacacacagtgcattttatggtacactggttctggaacactatcatcgatctactagaaattcctctgttggaaaaattattgcatttcgtataatttattacgaagaagagctctatttttcggggaatgtagctcttttaagttagtctcgaggatattggattgactcttccgatatccaactaagtaactttgtaaaattctattactattgtatcgctattgtacaacgcctagaaaaacaaaccatgctcctcattcctgttttcattccacatatttgaattatccatcctctaggtaatcttacagccttgtgtggagcttttgtttatagaaacgcctttgctatggttggaattttcatagttgtccactcttgttaatcagggcccttgcagatcagttggaaggca

SEQ ID NO: 94455 - DNA, 1017 bp, Eucalyptus grandis
  Intron number 1 from transcript Egrandis_v1_0.015556m (loc us Egrandis_v1_0.015544m.g) derived from phytozome v7.0 (c hr-ID scaffold_10; pos 28409884 to 28410900 reverse strand )
agactgacgatatctgcgaagacttttgtggccgggtaattcttcttcttcatttctctctctctctctctctctctctctctcgccctttttctttccctttctctttttccacgtccttgcgaaagaagaagaagaagaagaagaagaagaagaagaagaagtgggttgttattatttccatcatcgggattgattctctcgaaatttcagggaaaatctttcctacctcttcgttgtcgtttttctgagttccgggtgatggatagtccgatttctttttttcttttttttgcaagtttggagaaatttagggagtgtgccatatgttgttcttgcgtataacctatcagttttgtttttctagcaagaagatgaaatttattgagccctagaaatagtattgtcgattgatgtcgtttcgcctttgcgtatgttttcttttcgttaaaaaaaaaaaaaattgttttcttgcttcgtgctgggggagacaatgaattccccttttcaagcagaaagaaaggtgagattttggcctttcggcgtccaatgttggggaagataatccattttcttttgggcataatcttctgccttaaaatctagattgtaaaagtttctttttttttttggggggggggggggggggattctggaatcctgctgcttcattgcctctttttattatggattattcatggcgtgatcaatttaaatattagagaagttgctctttgaatcacatgattatatctcctgaatagccaactttcagaacgtttcgatgtctccgaggtctactgaaccattcacggttttgcttgattttcaaagatttgatgctcatgttgttagcctttgatacttggatattcggattagatgccttcgattgtgatttctctttcgactggaagattggtgtctcagtctgtatttctgcccctgcattttgacttgatatcttagaaagttttgtcctctaatatgcagcaggcaactcgtgcagcccgaggt

SEQ ID NO: 94456 - DNA, 683 bp, Eucalyptus grandis
  Intron number 1 from transcript Egrandis_v1_0.014424m (loc us Egrandis_v1_0.014424m.g) derived from phytozome v7.0 (c hr-ID scaffold_1; pos 26254618 to 26255300 reverse strand)
cattctctttttcggcttgagcatcgcccgaggaggtgaacttcgaacttccatctgggtcgggcttcgtttggaactcttgtcttcttgtttcttcttgtttcttcttgtttcttcttgttcttgggtgagttgatgaaatttttaccgaagggcaaggtggatgaaagtgcgcagaaacttattttgttttttacacggaggacaaccgagaggtgcggcttactaatttaacttttttccgatctataccggagaaatggatgagttttggttgaaccgtatgttgacgatttgttttgaggcagatgttaaggtttttttttttggtaaaggtaaaaatatattaagggagggctagctatacaaaaaatcggcgccaaaaactttcagcgataatgcaaaaagcagaatgagttgtgatagctaaggttatgttttgcagaagtaaacaatatttatgtgggttttttcccccgatgaatcttgttgaaatgacgttgtgattgtttgaattgagatgacgggttttgattcttgactccgggttattgtgttccattcaatgcgaaattgttgccagatttggttgcaagcatgttaagttatccttatattctgcaaaacaaagggtaacgattgtttgagatgctcataatttattatttggttttgcgatgaag

SEQ ID NO: 94457 - DNA, 672 bp, Eucalyptus grandis
  Intron number 1 from transcript Egrandis_v1_0.018951m (loc us Egrandis_v1_0.018951m.g) derived from phytozome v7.0 (c hr-ID scaffold_8; pos 44535699 to 44536370)
gcaacccgttcgcgtcctcgtcaccggcgccgcaggtaccgtccggattcagatctgacagttcttgatgcccggatccttgttttaattgtgtcgtgggttttttctggagtgttttgagaaactgaatctgggtcgtgggtcttttgatgcggcgatctgttgtcgtcggttgtttgcgtgtcctgtgaagtgggtactgtggatttttgctgggatgttttagtttcgtcagttctttgtgggctagtgctgtgtgctgggaatgattttactttgatctgcgaaagcaagtggtgcttatgaaagcagggatcgagagtagaacaagttgagtgatccgtgctctgttggagaaagatgatccatttggcttgctggaatggcattatagtagttcagtgcttctttttgctctttccgccatatttcggataagtttgttctttcctatcagaagattggatctttaactcttttactggtgctgtgatatgccaccttgtctgcaatctgtggtttatgtttgtttatcggtcttttgggattcttcgatttattgtaccgatttacatattcatactgttattgctgtgtatttcgattcacttgtcgaccgtgatatgtggttctcataagagactttctttggccatgtagggcaaattggat

SEQ ID NO: 94458 - DNA, 805 bp, Eucalyptus grandis
  Intron number 2 from transcript Egrandis_v1_0.053027m (loc us Egrandis_v1_0.053027m.g) derived from phytozome v7.0 (c hr-ID scaffold_10; pos 22408072 to 22408876 reverse strand )
aaaaaggtcttcttccccaagaatgtaagttgagatcaattgaatgatgtctttgatacccagcccattcagaattcaactattgtaatgcatggctttgaatttctattttttgggtgacaagcatagatcttgggtttgtttgctcatagctcaccttaaaaactgccaccattttcattagaacaagaatattctgacacttatttttatggccatatcatgctttctcctcataagtgttctaatgatggaattttgttcttgctgcatttgagtatgttttgagcttcagagagtagatccatacttgctaaaactgtttacaaatgtctgcaagtatggatttaaattttgtaaagaaattacattggtccttctcatagttggcataaaaaaaaagaaaagaaaagcaagtagcaaatagtactagaggtaaattaaatagatatagttgattttgaaatttctaaagtgttttggtgagagcagcagcttcagcattgtggttggtggactggtggtcatcatgcaattattttgggacatcaataggaaaagagaaaaaaaactgaatagttgaaaatctcaaatcaaatgcagggaaactgctggtaaaggacggttgttgctttgctcggccctagttgattgttagttgctgctctacacaggctatatcgttgctctgttcaccattgtgactaagcagtttccctctccctccctccctccctccctccctccctctctctgtctctctctcgcagtgcctccgtggttgaagaaggttactgaaaaagta

SEQ ID NO: 94459 - DNA, 874 bp, Eucalyptus grandis
  Intron number 2 from transcript Egrandis_v1_0.026872m (loc us Egrandis_v1_0.026872m.g) derived from phytozome v7.0 (c hr-ID scaffold_10; pos 3293759 to 3294632 reverse strand)
ggagggaaggagccggtctcggtgcttctgagcaggtaagacttgatcttattgattccccaccttttgttagtgacgtgcttttgcggagttctgaggtggagttgaaattataggttgtttgtgggttttctgggattggagaaattagattggatatccgcccgttggtgaagcagtttggcgttgattgtagcttctgggtcgaaagttccagtggttaccttcattgctgcatgcgaggactatctgcagctaagaggaattaggcagtgtgtgattggataggaagttctggagttaagagtgaagcaattgaggttttattcattgggatttttttgtttgtgtcgagtttttcttcctctgctgcggtgggcctctccttgcagcagccatgtagtgggaatatggtcttcagttgtttggtcattttttttcttggtttcatgggaagccctggtgcatgagactgccagtgatgctgggtaatttcaaggagcagatttgaaatggttaaaagggacgaccttcgtgccttttacagttccatgggtattccttgaaaaataaaagccgatcatcatgaaacttgcctatcttttttgcttgtagtgtcaatggctgtgagggactcaacatgctattacctcgcagatggtgtagttatggttttttgatacattacaagtataagaagaaagtaaagcttttgagtggaactcattgcctgctaatagaaacttgaatgagaattagaacagattactgtgaaatagctgcattagtttgcttttgtctttgtgatcatttttatgtggattttccttcttaagcaggcatccgtgggaagggaatccaactcattggccag

SEQ ID NO: 94460 - DNA, 963 bp, Eucalyptus grandis
  Intron number 1 from transcript Egrandis_v1_0.004396m (loc us Egrandis_v1_0.004396m.g) derived from phytozome v7.0 (c hr-ID scaffold_10; pos 37081805 to 37082767)
ctttgcaaaatctggatactgggttgtagcgggtttctctgttgggcctgggaatttgcggctctagttcttgacaatgcaatgccctttttttcttttttttttctttttgcgtatgccttcttgtttggctcaagctgcaagataatcattcttgatactatgccttactgagctttctcgcatctgaatataagtttaaggtgaagctttaggaaggctgcgttttgcgctcaacgtgtttgtgataatgaccgtgccaaatggaggagatggaggagctggaggagacccgctccttcactggatcttttgacatattcgtggacggttgttttctatgactagtttggttgattgtgttttcgaactgtgtgcatcacagtttgttcaatggctgtctttgtttggttttgatcttcagcatgttttataaagctgggtttgcatttcatagtacatgctagactgatattttagttgttttggcattcaagcacacgattgacttgattgtattaatatctatatctgtttgtgacctctttctttttgtctttcttatttgctatatgatagcatcagacgtgtttctctcaatatgttgacaggtggccaattataatgtgaactttgacatcattttcatcaaggagataaacatgcgatagactgctgacagttctttggttcttgataattctggcttttcaaaggcacttgcttatatggcttttccttctacagatgatggagagatgatgaggctttgtcattatgattcttctatatggaggagaacattttttcctccaagagtggttctccatgtttgtcttgattgatatctatcagaggcatgaagagggtcgccactagtgtctcaggacatttgtttaacacctgtaggcatcagcttcactgggaatattcaagtatctcgttgctattcttcccttgtag

SEQ ID NO: 94461 - DNA, 659 bp, Eucalyptus grandis
  Intron number 3 from transcript Egrandis_v1_0.011542m (loc us Egrandis_v1_0.011542m.g) derived from phytozome v7.0 (c hr-ID scaffold_8; pos 73691809 to 73692467)
aggaattcaggtagttgtatgggtctaaagaatccagtagtcctcactggatgaagtggtaggagctggaatcacgtccttctgcattgaaggagatagtattgggcagtgatgggattgagcttggtggatggatcccattatataggtaaggaacagccctttgtgtagtagttctgttctatagctaaatcgcatacaagatgtggcttgatagtttatcatggcttagatcctcattgtaactatttgcggaactcagggtactggttcttctacttcacccctcccttagtccggatagaccccaaactttttagcagcaattggcttggcgtgcctttagaagatgctataatctcccgagatggggcttatattttgatgttgggagttctgtcctgcagccaaggcttaaaatgccttttcttgttagatgaatttcttgattggtcacgcatctctttattaaatgcgcaaaggctcacatcttgtggtcagaagcttcagccattgaaaattatgaattattggcgtcctttcatcttccaaggtgttaccacacttgtttgcatattacaccttacttttcttccaagaaactgcattttcgtttgtttaataaccttttaagagatagtgatgaagagtgcctatca

SEQ ID NO: 94462 - DNA, 865 bp, Eucalyptus grandis
  Intron number 1 from transcript Egrandis_v1_0.033496m (loc us Egrandis_v1_0.033496m.g) derived from phytozome v7.0 (c hr-ID scaffold_10; pos 1500293 to 1501157)
gatttgttaggacattgatagcgaactcggtgagattcaagacaccatagcaagagtctatggagggcagaacccttaaaacctcattcacctataatgcaagtcacgagacggctccacaaaataaagtacagttccaggggatcagggaaaacacaaatttgatcaaaatctatcaacaaacgaggactgaagacaaaatggaattagcacatgacagacaatgactgctcataccctgcactcaatcagaggaatatgcatacctatataagcgagtgtgtagaatgagaagaagctaccaattgctgatataagccacagacagacaaccacctgtcaagtaaactaaaggtcattgagaggactataactggataggcatgcgttgcagcagagaaaagaatgtatagtgatcgggattgacctatgagaccggacaacccagtggcaacataaaatggaaggaaaaggaaactaactgtacaagaacttctactatggaaatttgattagtccacagcaacttccttatcttatgtgtccaattcgttttaagaactttaattttgctatgatcaatgcctcattaagatcaaccataaggttccttcacctcgaccatcaacacatttggccaaagcatttataacatgacccaaataagccgcactcaccagtatttgagcaattcttccagttgcttatacagaacttcccatcattgaaccatcattaattgatacaacaccgacattatttaattccagaccaattcctattgtgccctcttcaaattctgctaattcacccgccattacttcatcaagaccataactacaagcaacaccgtcacctacttgca

SEQ ID NO: 94463 - DNA, 463 bp, Eucalyptus grandis
  Intron number 3 from transcript Egrandis_v1_0.016474m (loc us Egrandis_v1_0.016474m.g) derived from phytozome v7.0 (c hr-ID scaffold_10; pos 15757043 to 15757505)
atcatccaccttcaagctcttctgggcaataggtgatttaccaacccaaccccctctttctctctctctctctctccacccccccaccccccctggcccccttcccccttctgcccacaaggtctgaggaaaaattagggaaagattctactaagcgcatgaagcaaatagctttgttcataaaaagagacccagtagactggttagtttatgaattttcttcaagaaaatatttcagttgccatttaccttgcgaccacttttctcgaaattgtgccacatttgattggaaaatctatacaatgtcattcaccttatcagtgtgagaacacctttcacaaacatttattgggagaataatagatattaaaaattagtacaatgtccatatgcaaaatatatttattagcagcttagatagtagttcatatgtatattgatgggacatttacttctggtgaag

SEQ ID NO: 94464 - DNA, 956 bp, Eucalyptus grandis
  Intron number 2 from transcript Egrandis_v1_0.003354m (loc us Egrandis_v1_0.003354m.g) derived from phytozome v7.0 (c hr-ID scaffold_8; pos 632221 to 633176 reverse strand)
actgaagggaaggtgtcgccggatcccgttggtaagacagaatttatgaggccaaagtttgtttttttttttttttttttaaatttagcaatgctgaaccctgttctgcttttagatagtcataatctgagcctaaatgaagtaggacttgggcctgaggccgtgcttaggtgcatggttgggtagctcgaaagggaactcaaatgtcgtcggattgcaagttattctcggaacttcatgatggtttccacgtttggttgtcattcagaatcgctcaccgttaattaaacatgtttgatttttccaatgagtaaactgaatgcagtctcgcttaagcaaatccttcatttaagctaaatgtttacttgagtgtttagtcagcagaaatttatcggtcaatattcgtcactacaaaaaggataacggtaacccccattaactactgaatttcatagtaataggaataagttgtcgtgggatgaagttggatgggggatttacttcacaggcgtacaaaaagaattccaatcctgatgcagagtttcactccatgatttaaaggatcagatattttcaaattaaattttttcctcataatgcatcgacaaacattggaactagaactgttgagtcgcagtccattcacctgaatttaatgcgaccaactcaatgaacctcaccttttttcttttctgatagatggctaagaccccattatgtcaaagttgcacatttttttctcctgaggattgtattttgagctcgtgaaaagaattacgacctgtgaattatgctggctaattcacaatctcgcgtttagtcttggtgaatcagttgatagaatttgtatctattagttgaattggtgtcattactgttcatttgacttgagcattctggtcaattctccattcgagcattttggaataatttgttttctgtacatgcagcaattg

SEQ ID NO: 94465 - DNA, 791 bp, Eucalyptus grandis
  Intron number 1 from transcript Egrandis_v1_0.023198m (loc us Egrandis_v1_0.023198m.g) derived from phytozome v7.0 (c hr-ID scaffold_1; pos 36896123 to 36896913 reverse strand)
ggaccttccgcgtacgtcgcaatccttgctttctcttcttcttcttcttcttcttcttgatcatctcttgttttcatgatggaaagccttttccgttaagatatgcctgcagagacagaaaaacaaagcgttgcgactttcttttaattaacctcagaactatcgtgctcaatccagtttttttttttgtgccgatgtactaggcatttcttaaggtatttgctatttgcccctttcgactttagggaaacgatggtctcagatgcttctcatttgagatttctggcatttctccaaatcataaaatggatactccttcgaaacacagtctcttattaagttctacaggtatgggagaacatgctacgacagatatagatgatggactccactttttctgcccttgtctgaatagaaaagaaccaacgagaatttggagaatctcataaggaagttgtacctgttaggccctaatttatgcatggttttcttctaaataagtttaatgcgatgggcttcaacttttttgcagcaagcttatattttagaatgcatcagttggagaaatcattccataattcatgatttattttcccaagcagtgttcatatgcatccacaatatgtatacacagtctataatttcatgaacaattttgaactcatgctcgtgtgttagaactggttaaaaaacaattacgattcctctaaagaaagattacagctccttgatctatactctattctattatgtgacaaaattcttttgaatccagaatttgcgggagatct

SEQ ID NO: 94466 - DNA, 696 bp, Eucalyptus grandis
  Intron number 1 from transcript Egrandis_v1_0.012669m (loc us Egrandis_v1_0.012669m.g) derived from phytozome v7.0 (c hr-ID scaffold_8; pos 49129015 to 49129710)
aacccccccaggtacccgaaaccccttctttctgggttcctctgttttgggcgggcttttgcgcgcctggggtccgtgggttttgggcaaaggtctttgcccacttttcttcggtggcggtggggaaaagggtcgttgtgattttgttcgttccgaacggttttagggttccttctctgggtgctttggtgttttgtgggcgtgagaagttctggcggtgttgcgctggttccgttttccttcggaacttgaaacagaaaaaagcccgtgcctgttaaggggctgttaaggggctgttggatttttcgacttaattatggtgctttggctgagttggcacttgtgagcggatggaagttcgcttcgggcgatgttttttatctcatgtgggagccatcggtcgaaagccgagccaagatggctgtttgatgtttgatttagtctttggtcgattttgatttgcgatgtggttttgtaaattagtacttatttctcggtcttagatgagcaattgttatggtaaactgtcgaaggaggtcgtgaattatgcttgctgcgtgtttaacttttgtacgtcgtcaacctgaccgctacgacatcctacatgtgattttacttctccttggttatgtatctgtttcatctaattgctgctctcgtaatgcagagtggttatcgacaacaagtcttgcgagg

SEQ ID NO: 94467 - DNA, 502 bp, Eucalyptus grandis
  Intron number 2 from transcript Egrandis_v1_0.030508m (loc us Egrandis_v1_0.030508m.g) derived from phytozome v7.0 (c hr-ID scaffold_8; pos 73618833 to 73619334)
ccattgtataggtaaggaacagccttcgtgtggtggttctgttctgtagctaaatcgcatataagatgtggcttgatagcttatcatggcttagatcctcattgtaactatctgcaaagcacaaatactagttttttctctcggcccctcccttagtcagaatagagcccaagctttttaatgggcgccagatccagattaacttttgatgttgggagtttgtcctgcagccaaggcttaaaattccttttcttgttagatgactttcttgataggtcatgcatctctaaattaaatgcgcaaaggctcacatattgtggtcagaagctttggccgttgaagattatgaagcattggtatctttgcattttctgagttgtgatcacgcttgtttcatactgcatcttaccttccttcctagaaactgcattttcgtttgtttgataaccttttaagagatagtgatgaagagtgcctcttggtgcagctgacatagaggatt

SEQ ID NO: 94468 - DNA, 557 bp, Eucalyptus grandis
  Intron number 1 from transcript Egrandis_v1_0.005664m (loc us Egrandis_v1_0.005664m.g) derived from phytozome v7.0 (c hr-ID scaffold_1; pos 33673136 to 33673692)
cttcacgagtgagttcccttcgatttaacgctatccttccacctctctctctctctctctctctctctcttcttttgctttttttatttgctgttatgactgaagaggttcatgtcggacatgggtctcgccgggtacccttctgggacgcgcgggtgtttcttttacgtggtgctgtttcattgagccgactggtggggtgtttgctatctgggtcggggagtttgttaggattggtgttggcaaaagggttgtcttgggatggcgtgtagaagaagaagagaagagaaaggtttgacttttgtgggatgggagtcgtggttggtgctttgtttgattgaggggataagattagtatttgaaagaaggattcttctgcgctgttttcgtaattgaatcttagaatttgataaacgatgcggtctgcaagtggtgttgttggcttttcgtgtccgggctttcctttgtgttctgaaagtcaaactcagctcagtcgtatccgaactgcctccattgtttatataattaatttccttgggcagggttggcattctcta

SEQ ID NO: 94469 - DNA, 813 bp, Eucalyptus grandis
  Intron number 1 from transcript Egrandis_v1_0.001664m (loc us Egrandis_v1_0.001664m.g) derived from phytozome v7.0 (c hr-ID scaffold_8; pos 10378829 to 10379641 reverse strand)
tccggccgccggcatccaccgctccctctctcaaggtctctctctctctctctctccctctctatagagagagagaaaagtagcttctccatgctggcgaccttttatacctttcaatgcattctctcgatctcgcttttttgcagctgaaaagcagtcgtcttttcttccctgtgcctgaatctctctcttgtgcgtccggcatttgcgtgattcgtggctcagcatgcgtgtgtgctgggattgcagttgttttttttctttttcagttgatttttcggtgctcttcttcatgaattggctgcattggctatatctagctgcattggctgtcgccgtcgtgtgtgaatttttttctcttttgcgcctctcgaaggattttgggtttaggtcggaatctgctttctacacattgattgagttggatttaggggttcttgagtgctgtagagtgatactcctgtcttctctgtcgagtgaaatggaatcaatttaggtactttgaggttctaattgggaaatgaagctacttggtgtttgtgttaagtctttcttgaactgaaggtgctggggatctgtccagggcataatgccgactccgttgcggtagtacccgagacgtgttgaacatctgtaaacatggatcgtctctattttccctatcgtctcttgtaccaagaggaggcctttgcttgctggcccaaaaaaagagagagaataatctctttctgtggattttggtccatttcattttaatgggttgttttgatttgaatcccttctttctttcatgatgatgttgcaggcgttgaa

SEQ ID NO: 94470 - DNA, 293 bp, Eucalyptus grandis
  Intron number 1 from transcript Egrandis_v1_0.041828m (loc us Egrandis_v1_0.041828m.g) derived from phytozome v7.0 (c hr-ID scaffold_10; pos 21943685 to 21943977)
gcaaggaggttagtttcttagattttgctttgtcagattcactaacagtacatcttgatgatcacagatgggctatgtggacctcacatgggatccatcaaatcaaatactccaaacctgttggatgcatgattcgatcaactgagaacatgattactaaatctatcaccactattggaaacttcttcttatttttattttattttattttattttttcactttaactcaagtacaactgatacgacaacgatctcacattcaaatgcactgacttcacaccgacaactcagg

SEQ ID NO: 94471 - DNA, 962 bp, Eucalyptus grandis
  Intron number 2 from transcript Egrandis_v1_0.031918m (loc us Egrandis_v1_0.031918m.g) derived from phytozome v7.0 (c hr-ID scaffold_1; pos 39875023 to 39875984 reverse strand)
agccaggtcctttttgagcctttttttagagtaattagtttttgctgttgtccttgaatttattggttgttctcacgtcttgcatcgtgtttagatggatgagttgatgcaacggaagggaaataaagacagagattatgaatatgataaataatggaaatagtaaaataaatacttctttttgggccatagaccaccctggggcgaaactgggaggagatagaagtaaattcatgaatcactgtcgcccttcttttcattgatgtctgtcttgttcatttgatgagatgcatatgaagaactcccagttttctttcttgccgaacgaagcagacgaattgttaccttaagcaatttcaccagatattacgaacttggcgggtatattatgaggacataatattttccttggtaattgtcatgaataatcagttttgcatcatagatcagcaaaactgcggattgctttatttgatataaatgcttttgaagagcaaagaaatgtattcagtttatatgggatggtctggccaaattccataaactggcatagttgagcgatgctctccattgatatattagtaatgatggtacatcaacaagctcagctggactcatgttagttcagttgtattgtgcttatcacaaaccatgggtttctttttgttaggcttgtactggttttagatattacttatccaaaaaagactgttagtaatcctaggctttatttcttcttatagaacatagtatgtgtggaaacacctagtagtgtccatatctggacctgctttgatgtttagactattctaaatgacactgttactttcacccggctttgtctcctcctttagaacatctcatgtatgtctgcagatttcttgtagtgtccaccactagagctacgtacttttctaattgtaacttcactttctctgactcgataatgcaggaacatcagc

SEQ ID NO: 94472 - DNA, 675 bp, Eucalyptus grandis
  Intron number 1 from transcript Egrandis_v1_0.001225m (loc us Egrandis_v1_0.000929m.g) derived from phytozome v7.0 (c hr-ID scaffold_10; pos 23090754 to 23091428 reverse strand )
atccagtgtttgtccaattcctccgatcgcgacaggtttgcttcgtttcgttttatatattgtccgattggatatgttgaattcaatttggtcctgctttactgtaatcagttcgattttgttcatctcgttatcacaatatctaattagttagacctatcaacacaaatcgtattttcgtcgttactgcctgaagagagcagcgtttgctttatttaaacattgtccgattgtatgttcaattcaattaggtgtgctttactgtaatcgttttgattttattcatctcattgtcataatatctctttggttagacctattgacacaaattgtattttggtagtcactgcctgaagagagtaatgtccactgtttacacatggtattgctcagctgtcggcagcaccctttggtcaacttgaagtattagcttgtgtttttctttcatatactatcatttttgaaaatggctctttgaagtcacggcatctgtttggacgatgcaattaacgttttagtcagcatttgcattcagcgttggctatgagggaaaacaatttaatctatgtgcacatcaatcatagactgtcaaaaacattagaatgtgttatggttatacaccttttcttgatgttcaaaggaaatttgggcagatttcaggatttgttgccagtg

SEQ ID NO: 94473 - DNA, 938 bp, Eucalyptus grandis
  Intron number 3 from transcript Egrandis_v1_0.006076m (loc us Egrandis_v1_0.006076m.g) derived from phytozome v7.0 (c hr-ID scaffold_10; pos 7387495 to 7388432)
aggtgagggtgaggccttttcaattagcttgtgatgctcagttcagtcttttgcattatcttcagctgagctcaaaaagtttgaggtggaaatagtgagttttgtctctttaaagcatgcttcatgtcgtttccacagcgtcttatcttgcaatactggaagcattggttgtgtctgcatttaacaacttttgtgcatgactaccatctgcatgcaagtagcagtaggatgtgggcttcaagtgttgttctgggataggcttatattgctttttcatttgaattttgaaatctttgaggtgatacattgcgaaagttacagattgaactctgagggccatctttctggaaattcatgtgtagtcttatttctgcttacagtaataaagtactcagtttgtttgaatatttcttacttcaaagtctcagcatccttgcctggggatttacctaaagtattacctgccagctaagtatttcaacgagttagcattcatctttgctgatttagaagtttttagtcaagtcgtttgaactcatctagtgacattcacgtgagattttaaatggtctttttcccagctattgtggtctgagaatcattcttccattggatgtaaaacaattttgtacaggctgctaggcctaagcttctaatgtttgaatatgaaaagcatcactagttaacatcagatgtgtccccatgtgcagtagcttttggcttcttgcttagcttaatgcagtgaattccactttgtatattaacctcaaattacattttcaaactcctataggacctgcggatgtgtgctacctctgtcctaatttattacattgctttgcaattgcaagaaactgttaacattttttttcttcatacaaccaatctgcaatgctctaaataagcaatcttgttttcttacatctcaaggctcgtga

SEQ ID NO: 94474 - DNA, 952 bp, Eucalyptus grandis
  Intron number 1 from transcript Egrandis_v1_0.031645m (loc us Egrandis_v1_0.031645m.g) derived from phytozome v7.0 (c hr-ID scaffold_1; pos 12518749 to 12519700 reverse strand)
atcacgaccagccccaaggggaagtccttcatcaggtacggattccttcgttttggtggtttgctggcgtcccgaatggatgctctgtcttcgttttggtttccggaatgttgtgctggagccgcgcgatcgtttgaactcgcttagattctatgcggtttgtacgtatttccacggatgaacgcaatcgaagtccttcggatgaaacgtctggagtcggccgtgggttcgctagtggatttcctacgtcttggtttgagttttagggcttgattaagaattttaggactcaattgtgctttggagtcgaagtgtggggctagattgcgttcgttacataaggtttaggacttaaggtgcgggttactcgttctctttttatcgtagatggggtgctggaatttctttgttttactctgcatcattgaccgagtagagctttcactggaggtccgagaagtcgatgattcgttgtgaggttataatggaaatggcagttgtagtcccccctggattgttgcttgctgtggaagaactgttttataggtcgattgtatgctgggttgtctaaggaaaaaaagctttttttctattaaaatctgagtaacgagtgattttttaatactttgctgcctctaaattatgctgatgttctttctgttcgatggttcatgtaatgtaagcgtcatatttgtacctcttggtgtgcctgctttcccttttttttttttttttaatgtgccagctacctgctctacagacacgaacgcatgtgtttgcacaattgcttgaactttgtgtatattgttactggattggagacagacggtattatagtctctgtttatacatctctttcgtgcaaaccctcatcaatctcggttcgaaggttttccctacgattattgatattgattcgatttctttatcttgattccccaacttaggcctg

SEQ ID NO: 94475 - DNA, 728 bp, Eucalyptus grandis; identical to SEQ ID NO: 93977
  Intron number 2 from transcript Egrandis_v1_0.033459m (loc us Egrandis_v1_0.033126m.g) derived from phytozome v7.0 (c hr-ID scaffold_560; pos 4017 to 4744 reverse strand)

SEQ ID NO: 94476 - DNA, 664 bp, Eucalyptus grandis
  Intron number 1 from transcript Egrandis_v1_0.021195m (loc us Egrandis_v1_0.021194m.g) derived from phytozome v7.0 (c hr-ID scaffold_1; pos 20724120 to 20724783 reverse strand)
atcttcagattgggaaatgcaagttctgatctttgtcgaatcattttgctctagttcgatggttatgaccctcaaattgtttacttttatttgtcgggtcaggcaagttctggttgttagtcactgacggtttgatatgctgcagttggtttcatttgatttgagcggcgcttttttcacttaattggttgatttgattccttttaatggaaagtgaaacttggagatatatgataaagcaagacaaatctgatacagagtgagctctgtttctcctttcaaagagtacccagatggcattaaaaggcggtgattgagagtatatgcctaacttgatgtcataaatgatcttcaaattggaaaatgcaagttctgatctttgtcaaatcattttgctctagttcgatagttatgaccctcaaattgtttgcttttatgttgggtcagacaagtttcggttgttagaaactgatattttgatatgctgcagctagtttcatttgatttcagcggtgttcttttctcttcgtttgttgattatgaagaggatgagagaattagaatatatgaatcttagcacaagctggaagctttttcggtcttcaactttaagctaattgcttactccttactgtctattgaaggccctttggagacgattgaa

SEQ ID NO: 94477 - DNA, 673 bp, Eucalyptus grandis
  Intron number 1 from transcript Egrandis_v1_0.019136m (loc us Egrandis_v1_0.019136m.g) derived from phytozome v7.0 (c hr-ID scaffold_1; pos 32336709 to 32337381)
ggtagttgggtaatctagcgcccctttgtagtttcatgattcttttttctgtcctctaatgtgtatgtgtgtgctttggctggggcagtataatttcttggtggtaccaaccatgctttctcattgctttgagttcggcagttatgtgcacattcgttgctacatgcttcaaatgttcttggttattatctttctactcttgcctgactaagtactgctgtaggaaatgtcaaaattcctacggtctaacagcagcttgcgactggggcttttctacttaatttttatgaattgggaagaaaaatattttgaccacttactacataggctatgatattgtaaaatctccatcaagatttgtcatggtaatagatgtctcgatccagctaatcaactatcagtcagtatttacattgagtttatgagctgactgcattcattctcaacaaatcgtgtattaatctactcgagtttcagcaaaggatgcgagggttaaaatccttcattgacgggttataacacttgctaaagaaatttcattccagtacttgctttttggtgcatagtggcacgaaaattctatcttgatttattctatatccactttcttggtgcactgcagcatgaacatactgtgtcgatttattctatattcccatcttattatacaggg

SEQ ID NO: 94478 - DNA, 623 bp, Eucalyptus grandis
  Intron number 2 from transcript Egrandis_v1_0.009333m (loc us Egrandis_v1_0.009333m.g) derived from phytozome v7.0 (c hr-ID scaffold_8; pos 26938071 to 26938693)
gtaattgctttttcaggtctgtgttccttgttagaaaaagatcaccgtattgttcatgattctgttgaatgtttccagggtttgattttttttttgttagataacagtattcctctctgttatggaagattattggtatgctcattgcattaccactctatcgtcagaacacaacacaaagtgcgttttatggtacactggttctggaactctatcatcgatgtactggaaattcctcagttggaaaaagtattgcatttcgtataatgtatcattctgcttgagacactgcatgtggaaatatatcttgaagaatagctctatttgtcagggaatgtagctcttttaacttagtctcgaggatattagattgactcttccgttatccaactaagtaactttgtaaatttctgtcactattgtattgctattgtacaacgcctagagaaactaaccatgtgcctcattcctgtttcattccacatatttgaattatccatcatccaggtaatcttacagccttgtatggagcttttgtttatagaaacgcctttgctatggttggaattttcatagttgtccactcttgttaatcagggcccttgcagatcagttggaaggca

SEQ ID NO: 94479 - DNA, 968 bp, Eucalyptus grandis
  Intron number 2 from transcript Egrandis_v1_0.032413m (loc us Egrandis_v1_0.032413m.g) derived from phytozome v7.0 (c hr-ID scaffold_8; pos 11853815 to 11854782)
gtgccctttgtgcaattttaagcggagcactaaaggttggcatctctgttttcaatcgctcagtatacttgattaatattatagagatggttctgcttttggagtctctttttctgggtcgtgaagttggcatgagattgaattttatataaactctcaagattgtcgagcgttgcttctcagggtgggctgttgtgtcctggcctttatgtgttctgctctttttataatggtattgtctgtgttctgcccttttatagtggcattgttcaccactgttcttttatactgcaaagatttgatttgatttttttttcgtgatgcattggaaagaaatactttctttgcctaggatatcagaaagttttcatctttccatctgcaaatgttccattttgagccttctgcataccttgggacaattccccttgtaagtttgtattggttagaagtatctcagttcttgatttaggatgatgaggatgatgatccattgagagacaccctgagaatttgataattgaggaggaaaaggaagaggctgaagaaaaattctttctatgccaccctacctgtaatactggctaatatgaatttggagaaactattgtgctggccaaaatcattactcagtaggcttttcacagaatttgttactggttacagccgagaccactagtttggggaaaaattagccatttcaggttaaaccactaatgtgaaatgcatatcctagcacggttgtctcattctctgactatgtctgctgtctttttgtttggagtggtgtggctgttcagtcattgtgtgtttttattgttatttttcaaatattagttgccggttagctatttattagaccttaccaatttgctctttgagtcaatttctacttttctcaataatgtgccttatcgatgactttgctctcagatattgctggaaaagaaattaagtacagagtaact

SEQ ID NO: 94480 - DNA, 468 bp, Eucalyptus grandis
  Intron number 1 from transcript Egrandis_v1_0.022112m (loc us Egrandis_v1_0.022112m.g) derived from phytozome v7.0 (c hr-ID scaffold_1; pos 25836141 to 25836608 reverse strand)
cccggagaagttggtaatgccccaccttctcatttcatttcatttttggctaatcgatacgacgttatccagtaaggattgatatttgctccacagccgtgcgataccataggaagcaaagttattatagactctgggagatgcacgacttgtgttatgtcaaattcaaaaacttgctgcagatgacatatcgtgaactctttactattcgtgtgaaactttgtttttgctttgttttcctcgatttttggtagtaggaaatcggactttttatttcaggagttgaaaatatgggtatcgcccaccttaatgtgaatttgaaaagcttgcacgtgggtgatattgttattcgtagcatactgatcataggcttgaagaacacgatcttattttatacagtaccaaatgaaagttgatgactctgaaattttgtgtggtgatttgtatcaatcgtggttcatgaagagg

SEQ ID NO: 94481 - DNA, 385 bp, Eucalyptus grandis
  Intron number 2 from transcript Egrandis_v1_0.053147m (loc us Egrandis_v1_0.053147m.g) derived from phytozome v7.0 (c hr-ID scaffold_8; pos 47038767 to 47039151 reverse strand)
tcattacgggtatggaatcaccctcctcttccgtattttgattacaaactaattgaactagggttatgatgtcaatgagcctatcatctcggcagataatgatatgcgacaagtcatgaatagaaaacaacaaaagcagatctgttaaatacattcgatgaattaatcattcatttcattccataagttaattgattaccatatgtctcatttaacattgaggctcaacacatgcattttaagaattcgctctcataatcttttttttttcctcttaaaaactcctaagccgcggtgaacgagttggttcgagcttcgacccctcatccgggagggtagaggtttgaaacttcacacccctattgcgtgactgaagtagggtgcc

SEQ ID NO: 94482 - DNA, 695 bp, Eucalyptus grandis
  Intron number 1 from transcript Egrandis_v1_0.003593m (loc us Egrandis_v1_0.003593m.g) derived from phytozome v7.0 (c hr-ID scaffold_8; pos 48537888 to 48538582)
gtcttcttggtcacttctgttgctatactcacctggtgagttctgctctaatttcaacttgtttttcggttctccaagattttctggtgttctcagatcaaattcagcgttaccttggagtatcttcttgtaggattgtagcttctattggaactgattaatttgttgctcacaaggtcaagctggagtctatttcttatcgtgcggtttatcattaccccattttacgtttgaggttgactctgataaacgggatagtttaaggacttgtccaggtcctaggattgtagcttctattggaactgattaatttgttgctcacaaggtcaagctggagtctatttcatatcgtgcggtgaattgattttgaggacctaatattttccggacttaatagtttccatttttaaatagggttattcatgctgaaagtttagttgcagaatttgtctctggttctgggtaaatttatgatcgttcctcatgctgttcataggaggcagactagctaccatctcattttctttaggagaaatctaagtatatgttttttactattcctatgattatcagtttaaggagactttctagttgctgtaatcgaagtttgtgaatttaagttagtgcaagaactgatagtatgtggttctttttgtgcctctggaatggcagattcaggacagactttgtgccgg

SEQ ID NO: 94483 - DNA, 858 bp, Eucalyptus grandis
  Intron number 2 from transcript Egrandis_v1_0.029280m (loc us Egrandis_v1_0.029280m.g) derived from phytozome v7.0 (c hr-ID scaffold_10; pos 24372184 to 24373041 reverse strand )
gcgagttttttcttgtgagtgaaacaattattgacacagttttcactatcaattgtttaattttttaaaaatatatggcaaatattattagtgttatttttttcatcatcatcgtcgtcgtcatcattaagcagcaagagaggttaatgagcaacctcctttagtaactagaaaaattaaattgtatactcaacaattaacaagtgatttttctgaacttgatttcagtatgattatatggtaattggcttggaattgaagtagtttcagtatttacttactagatctggttgcactgatcttcatggtccctcgattacctcgtcgtcttgtattgtaaattcttgctgtgatggtttccaaattcctcctgtaattaaattgtttcctgtggaatcctgtgacatagttatttttttcttgtgccatacttaaaatttatgttctaatcaaaattttatcgtcccaagatgtcattggtgacaaaagagaagtttttggtgcacttggtattgggtgatacaaagtttctacaaatatttaaacgagtccatggctgctagatgttgcaactaggatttgaaggagagggcatattcctatgtctcaatagttttccattttcctttgatgacatgcaaatgatggcttgctgtttgttatatgtgtagcaacatacttgaatgtggggatgctgatcccgttgaatggcatcctcaggactgtgtccaaaaatttaaatttacaaaccacctttgttcattctgattatgtggcaatatgatggtttcattaattattttggtaatattcatttatgtaggcttcttctaaggcagtactgcagtccttttgtga

SEQ ID NO: 94484 - DNA, 645 bp, Eucalyptus grandis
  Intron number 2 from transcript Egrandis_v1_0.045579m (loc us Egrandis_v1_0.045579m.g) derived from phytozome v7.0 (c hr-ID scaffold_8; pos 19398279 to 19398923)
aagaggtagagaatcaaactctaaattatccttggatggttagatccactttttgttctaaattgagtagaaagaaaaggcacacatagatgtgtgttgaaaaaataaatataataattattaaggctccgtttgtttctttgaaaaatgaataatttggaaaatattttcctacaattgattgcttccgtcgcttatgaaaatgaataaatgaaatatattttcattttctacggaaatggaagacataaattgttattgaagatgaaaactttttttttcattgactaatttttttttaagctatataaatgatcattttttggataggtatattccaaattattccttcttcgctaacaaatagagtttaagggaagaaaattaagagatttgtgtctttttagcaaaagaacttgaagcgttacaagagtagccgtataatggtctatccaatagatggtacaatcacttgggcgtgtaatttcgaattaattctactctatttaacatggaaaataaaggcaaaggaagaaaaagaatatgaaaactaagataaaagacaaaatttcattcataacaactctcaatcttttcacgtcgcaaacagctcatagagaagaagttattcgacaatttgaggga

SEQ ID NO: 94485 - DNA, 1000 bp, Eucalyptus grandis
  Intron number 1 from transcript Egrandis_v1_0.014591m (loc us Egrandis_v1_0.014591m.g) derived from phytozome v7.0 (c hr-ID scaffold_8; pos 5592605 to 5593604 reverse strand)
gagcgcgatctttatcgccgtggttttggggtatgtagcaatggccgttttgtttctttttcccctttctgacgatgtgtctttcgtcgacagcagatggttttttatggtcttcttgatttgactgttgcgtcgatgatttcatgcatatgctcgtgttctttttggtttgtttcttacacatagtcgatatctgcattaggcaaatgcattggtgaagcctaatttagtcactgtttggcattacaacattgccattattagtcaatgggttttgtccgttcttaacacgaagaaaattcttaattttcgtcgtgaataaatatgtattacagtggccataagtgagatttctacaagtttttattggtttctaagttaaaggtgttgtgcaggggttttgggatgaaatgtcatagggttttcctttcaactcacatccgaaattcgtacccatatattcggcaccagagtccaaggtggaataatagatgctgccttggtttctggacttctgtttctaattttctccaagaatagctctctataggaattgagatttatttgctttttttaggggcttcctaataaagttgattatgctatgtttgcatttttccacattttatgatgtttcattatcccttttccatgaacgtggataagaataccgtagtgatggaacttaggttgttgttgggtccaagttaaatgtatgagtgtgaagtttagtgttcttgtcatccctatagtttgattacatgcagcataggcaatcatgcatccccttctgctgctgcatatgtcctttgtcggtaggttgcatatattgattttcgtggtcttgaaaattggttgaggttgttataatatggtctcgtaaaagataacttgtgaatagttgggatcagtggttgttattgataggtgcaatgtccagagttttccttttctgtgtttgttttagatgatttacatatccatcccccatggcaggcac

SEQ ID NO: 94486 - DNA, 990 bp, Eucalyptus grandis
  Intron number 2 from transcript Egrandis_v1_0.027710m (loc us Egrandis_v1_0.027710m.g) derived from phytozome v7.0 (c hr-ID scaffold_1; pos 39989302 to 39990291 reverse strand)
cattggagaagtactatcgactgtccctaccattggtaggtccatcttctttgttcacgcttttggatggccgtttcatttggaattagcctcgaaactaccctttacaatttcctgcaggcagtgcccattgttgctatgatattctatccacgtgatttgaaccgtgtactctatttcttaaagactcatccaccccccggtgcatgaaagagcaggaattttcttccatctgatcactttgttgtgcttgagacctcacttttgcttcttcggaggagtgaccttctattttgaaaaccagcggtcaccattcacaacaggctttgattgaactgttgcaacttttacctctttcatcaattgaatctgagtcttccacctttgcttagaaatgaaattttcctggacatgcactagtccctacacttggaaattcgtctttattgtcacgttgcaaatgtttgcacctttttgggtttttgccaatttagtgtagaaatcgtgtttgtattcgagtcatatatggataagttttagtgaaggaagaaaacctgcttagcttgctctcaaaatgggattaactctttaccccaatgtctctgttcttaaggatgtcattatcacacctctgaattaaagagaaaatctccttcaagttgtttcagggaatgaaaactcttatttctgttgttttggcacctgagatgtctataaagtagcaaatatgtcaactgctttgttgccatctagattcatttattgggttcatggagtatgccccttaactattccattgagattctgtgtatctgcttctttggaactttcatctaggcaaacttgcctgttttctaggacttacaaaagtgccctctgtcctggcttgttgagagtttctaccatgccatgtttacatcattgacatataaatggtgttctggatggaacgggataagtgctgattgtcttttctatgtgtaggtttca

SEQ ID NO: 94487 - DNA, 562 bp, Eucalyptus grandis
  Intron number 2 from transcript Egrandis_v1_0.004921m (loc us Egrandis_v1_0.004921m.g) derived from phytozome v7.0 (c hr-ID scaffold_1; pos 38794612 to 38795173)
gagctcagatattcagaagagtgttgatccagaaggtaaatgcagccattgccttctcgattgagatgccgaatatcacatatgtgattgcagtatcgatttcttcttcctttcgctataatgcattactgtctaataataaaatggacacgttatcgttttaggtactttgtttttaactaagtttaaatcaatgtgatggaaaacattcaaaaaaaaaaaaaatacaagaaaaaatcctccgccttaagagccttctcttttattctcaaacccagaaatcttgcttcaggaaacttttgtgtggcacattttgtttcttcaacgaagccaaaaaagttgtgactaggagagtatcagtcaatgaaagcaataagagggaagcatccggttagatgaaggggagaacttttagggcaatccaaattagtgtttttttctgtatctctgttttacatcactggttaactttctgagactgtgccatcaccgtagactcttgacatgttactgttgcttctctgcaggtggaattctttgatcgctacaaggtgtgctaact

SEQ ID NO: 94488 - DNA, 919 bp, Eucalyptus grandis
  Intron number 1 from transcript Egrandis_v1_0.006215m (loc us Egrandis_v1_0.006215m.g) derived from phytozome v7.0 (c hr-ID scaffold_1; pos 18266990 to 18267908)
tctcgacgcctcccggtcaagacctcgtttctcaggtcccgtctctcgtcctgcttctcgattcgtcgccgatcgcttgattccagtggtctgttaccggcgaatgagccgtcctttcatctgtttcggccgaccaggaaatggtcgaccgaagacgttaggatctgcgaactcctgttttgctcggtttggcggtttggcatggatcgagttgttatatcattggccacctttcgatgatgccgcatgcaaaattctggtgttcttcggtcgaggctcacgggatttttcttcactggatcacacttgtgaatgtgaattgggaatgcatgtttttgctgggttctgatggcataagttaatggtgtgctgggcatgggattatcggatgttaatttggaactagcggttttagactaaattactgtgaacttactcgtatcacgtaattggtggagaagaagtagaacaattgcaggctatgggagtaggaggaggagaaaagtagttcttactctctttttatgcctattctgtggagaaagtccatgctttgctcccagtaagtcatttaatacgttttggttgacgtgtttgcaattctcaattggtatctaagcctcaatgtttgactctagatatgggtcgctcccattggtcgcatgaaggttgagtttccagagaaagagttttgaacaagtatatcactgatatacattcttagtttgctttctagaagtgggttactccacatacactattctaccaaataatgttattttgtgatccttccatattttcttaaatgatatgaagtccactttagcctcattcaactagtctagtacctagccttgaatttgactatcctaaagtgtgacactagcattcaaatccatccaacaggtgagggacgata

SEQ ID NO: 94489 - DNA, 1004 bp, Eucalyptus grandis
  Intron number 1 from transcript Egrandis_v1_0.006419m (loc us Egrandis_v1_0.006419m.g) derived from phytozome v7.0 (c hr-ID scaffold_10; pos 36795884 to 36796887 reverse strand )
gtaccctggtttgtcccagtctcgctttgcctcaagtaagtggcttttcggattgctttctgggtttgtttgtttgtttgtttgttcgtagaatttgaattgaaaagaaaaaaagaaaagaggagattgggtttctggggacgtttggtgtttgatgaattgagaaagccagtatgacgtttcatgttgcatgttcaagtgatactatctttcgttttgtggcgcactgggggctgcaatgtaatagattcaattatgcgttgatatgaagatgcgtgaaaatcacagtggccggtgttggtgaatgaatttgtcaccttttgatgaggtggcggtaatcacgattcgtgggaaaacgtctctgttgcttcatctggtaccttaagatcagtgttgacgagtgaaatcgaggggagtcgggatgaaaagaagttttttcttttgttttttttcacttttgttgatgtcttggccattagtccctttttattacatcaatcgcattgcttgacctattgaagccttgattccgttgcctgctgtagtttttctatttagattcctcgataccttattggacctttaaatccttcgtatccaatttatttatgacatgaagaccataatctactcattaggaatttgaattatctctgaaagttaggtacttggatagaagttattgggtatgttgagaaatttgatttgtattttttgccagttattcacctctgtcaagactggaaaattcgacatgtattgttgttggtataagggctcatatttctcagcatcagtaattttagaactatgcatgcgttcttaattattatagtgtcaagagtggccaatataatcttatgtcatttccaggaataatattacgtatccatggcaaataaattgattatttttttttctttgctttctctattccatccttcctggttttattgaacagtttcgcttgtttttgctgtccagcatcacattcccgttcattt

SEQ ID NO: 94490 - DNA, 921 bp, Eucalyptus grandis
  Intron number 1 from transcript Egrandis_v1_0.046305m (loc us Egrandis_v1_0.046305m.g) derived from phytozome v7.0 (c hr-ID scaffold_8; pos 53301996 to 53302916)
cctccaaggtctattcaagacaagccaaagcaaagtcgtaaccaagcagcaatgcgtcactccaatttgcaggaagagatgaatcttcctttcattcatggtgaagtcaatgccttccaaggggctgggcacggcaatatagaactcagagccagatcattcgtcacgacatcagaaccttaggcacaggttcctctgacaaagtcaacatcgtctcaaattgtcctctcttttgtacaaggtttcttcaaggcaagccaaagcaaagtcgtaaccaagcagcaagagattaatgttcatttcattgatattgtagtcaatgcctcgcaaggagctgtgcatggtaatatagaactcagagccaggtcactcattacggcatcagaacctcaggcacatactcctctgagagactcaacattgtctcaatttgtcctctcttttgtacaaggtttcttcaaggcaagacaaagcaaagtcgtaatcaagcagcaacgtgtcacttcaatatgttgaaagagagtacaagatcttcatcgggcaatcaagaaagctccttaatggaactttagaagtaaacaagcggaggatctaggaattttgtccaagcgcaagaaaactcccaggaaagttggtgatagaagctgctataaccttaccttatccgctgctggattattttccccacctttcatacaggcatagctgctcactttcatcccaatccaggctgttcatgggcagaaattttagaattcaaatctaggttccatcaaaccattagaagttcttctcagctgatttgctgtgcaaagaattgtctgtttttaagcttctccagactggcaaaaatgaaggtcaagaacagtgctgaaggtcaaagcggcattcatctggatattcctcaacttcaggacaaaa

SEQ ID NO: 94491 - DNA, 661 bp, Eucalyptus grandis
  Intron number 3 from transcript Egrandis_v1_0.026464m (loc us Egrandis_v1_0.026464m.g) derived from phytozome v7.0 (c hr-ID scaffold_8; pos 20286897 to 20287557 reverse strand)
tctccaatctcccgttcatctccctggcctctctggtgcttcgctccccctaagtctgttttgattttcggctaaaaatccgggcttgatatcattgctcagctaaaattccgggcttgatgtcattgctctgtcatattccgagttggtcgatccatgattgtcacgaacttgtagatctaactcaggaaatctttagtccacttgattggaactttaatgttctaccttagtgaattttgctagcaaatccatgtcttctactttagcggaacttatatctctaaagccatatgtcagcttctagaatcatgttatcaagtcatcttatgattgcttaaattatgaatctttagttcctcacatcctctacgggacattacaactagaccacagtatttatttgcgaaaagggaaaaaagattcaactataggatttgttatcatcaacattgtccactcaatgacatcctaacatggtttccttgtcagttgaaaacttctcaggaagcatcttgaaccttgagagattagaaactcacgatttgtaattgtttgtctttctacactgtaattaattgctgatgagccaaagtgttgctgtccatctcttttccttctaccagtacagtgacctggctgaagcagatcgtgctcttgt

SEQ ID NO: 94492 - DNA, 946 bp, Eucalyptus grandis
  Intron number 2 from transcript Egrandis_v1_0.022392m (loc us Egrandis_v1_0.022392m.g) derived from phytozome v7.0 (c hr-ID scaffold_1; pos 13390385 to 13391330 reverse strand)
tagccggctactgaatcaaggttgctttctctctctctccctccctgggttggatcttgttttctgttctcgatgtgttttggtgtctgttttttctgttcttgatgccaaatccttttgccgctgggcgtgtgaatctgttccttctagcgtttttgatatgtcggtgttgtttctgcgtctccacagattgattctcacattacttttgcatctatgtccgcttttcttgaccatctttctctgtggatcgttttgagctattggcagttctgtcggtggtggtggtggtactaccacttgtggttgactgctgatgtaatgggcatatgataataataattctaggaatagataggtcatacatttacagccgccttggcagtgtacagcatttggactttgtgtgcctatttggaaggagaagggggcaatgacaaagctgggtttgggttaaatttctgcgggacaacatcttagcgggttgattcgccaccatggtaattcaaattagcttagcactctttagatcgaatgactcatgtgatgttatccgatgtgtatggcaaaagtcctactagcaccgttgaactcttaagaatatatgttattgaatgtcacctcgagggatatgttatccaatgtttataagaaatcctcttgcatcgacatggttggactggcgttttgaattatctttttaaaacttattgagtgacattgcatcctagaatttttgtgcgatcacttttgtctaattgacctgatatattttgcccgtcatttcgccaagaaaaggcttacatatgagtcactgatctcttgaaacaaatgaatcattctattattcttggagtcaaattcgttcattgcactttggatttgtttattgccatttcatttctcatagtgccttctgtatgcagagatactgcgggtatctgga

SEQ ID NO: 94493 - DNA, 624 bp, Eucalyptus grandis
  Intron number 2 from transcript Egrandis_v1_0.018190m (loc us Egrandis_v1_0.018190m.g) derived from phytozome v7.0 (c hr-ID scaffold_8; pos 6319235 to 6319858)
accgtgttgacactcgggtccccattgaagtcactgtatggatcctcattaaacctttccctctcttgagactttctctgcgccatgtgatcagttgtaaactagattagtattgatgatgcatcgtcatggtgttagaagtttgtttgattttgtggaagagattgactactttcttttgcctttgacttgtaagataattgtcaactgagacttaaagaggttgtggaattcagaaatttttgtggctgagtttttgtcttcatggcatctcttgcaagttaaaggtcaacgggcacgaaaattatttgaaatgttcccttgagatgaaagtgctatggggttcatcctaatctacatgcgagaattacattgaaagttgttcctgggctttgtgtggagacatttgattcctgacgtaccattgtgaaatgtgaaaaatacatggaatacttcttttgtttgccccctttagtgatatcttagagaaatctacctccgttaactcaatgcctagcaactttttttgtgctttgagatgcataaagattgactaatctttgttctgttatcatgtgaatattcaaagattggagagctaaagaaactcattgaagagggtaa

SEQ ID NO: 94494 - DNA, 923 bp, Eucalyptus grandis
  Intron number 1 from transcript Egrandis_v1_0.032183m (loc us Egrandis_v1_0.032183m.g) derived from phytozome v7.0 (c hr-ID scaffold_1; pos 22592989 to 22593911 reverse strand)
tcgcgctcgtcaccccttcctccgccgttttccaggtctcccgcggcgcttgcactcgattggttcattcgtcatgttcgaaactgctgcgtttttctcctaggaagtgtgcgtcatagtcgatctgtatttgaagtggtggcgcaagtgtcgagatagtatttggtagagactcggggattttctctttggggggaatttgtgttttgatgctcttttcgtgagtaaggtctcggattgttttgcttcttgttgttgtttcttgattgttcgtgaaggtattgcaaatctttcctttttctagtcgcctgttgttagatcctcgttgatgctctagtaattatcaaagtgattactcgtgtgtatatgcatactaaactgttgttaaggaatttcttgagcttatgttacgggtcggaagagggagtgatcttggacagaatgttaatgtactgacatgttttgtgatgaagtttgttgatgcgaagacagttcactgtggtgtcgagttggatattttacgcttcctttcttgatttggaaagaatgggaaatgcattggagatattagatgcaacatggaagtaatctttgaagaacacggttttattgtgttttgcatgtttattggggctatgagatgtctgtgaaacctatatgcaataattggctcatgaatgaaattgaatgatgtatgttggggatgctttgtcaccatgggggacgcttttctgtttctctgtttcctttgctggggacttcttatgcagtagaactttttaagtatatgttggttagaataccacaacattcatacagacatgtggtggctcatcttgtgctgaacgcatcattttcaggactgattcaaacttgttcttgcctcaggtgatcattggaggcggtggtggcggcggtttcat

SEQ ID NO: 94495 - DNA, 990 bp, Eucalyptus grandis
  Intron number 1 from transcript Egrandis_v1_0.017180m (loc us Egrandis_v1_0.017195m.g) derived from phytozome v7.0 (c hr-ID scaffold_10; pos 28428362 to 28429351 reverse strand )
agactgacgatatctgcaaagacgtttgtggccaggtaatgcttcttctttttctctctctctctctctctctctccctttttctttctctttctctttttccacgtccttgggaaagaagaagaaaaagtagaagaagaagaaagaagtgggttgttattatttccatcatcgggattgattctctcgaaatttcagggaaaatctttcctacctcttcgttgttgtttttctgagttcggggtgatggaaagtcccatttctttctctctttttttttttttttatctttgcaagtatggagaattatgggactgtgccatatgttgttcttgtgtataacttaccagttttgtttttctgtcaaaaagatgaaatttattgagccctagaaatagtattgtcgattgatgtcgtttcgcttttgcgtatgttttcttgcttcgtgctgggggagacaatgaattccccttttcaagcagaaagaaaggtgagattttgcccttctggcgtcaggtgacaatgttggggaagataatccattttctctttcttttggcccttaaaatcgggcataatcttctgtttaaaatctagattgtaaattttttttttttttgggattctggaatcctgctgcttcattgcctttttttttattattattatggattattcatggcgtgatcaatttaaatattagagaagttgctctttgaatcccatgatcatctcctgaatagccaactttcagaatgtttcgatgtcttcgaggtctactgaaccattcacggtttttcttgattttcaaaaatttgatgctcatgtcgttagcctttgatacttggatattcggattagacgccttggatcgcgatttctctttcgactggaagattggtgtctcagtttgtatttctgcccctgcattttgacttgatatcttagaaagttttgtcttctaatatgcagcaggcaactcgtgcagct

SEQ ID NO: 94496 - DNA, 809 bp, Eucalyptus grandis
  Intron number 1 from transcript Egrandis_v1_0.005145m (loc us Egrandis_v1_0.005145m.g) derived from phytozome v7.0 (c hr-ID scaffold_1; pos 30289650 to 30290458 reverse strand)
ttgtttgcatcaagtgcacagaagatccaatttcagtaagtatcaagtgctctgaagatattcatctatcgaggttcttaattatagtgattccaatagaatcaactgatcaatggttatttgctcagatgcctataagtaactcagtatttttgctctgtacattagggttgtctgatgtcaaaacataatttgctaatgatacctgtcagttgtcctgtggcattttgtttagtcctccctccaaactgctttggaattttgacatggcaatggtatttgtgctatcaactacggcaacttctaattaagcccttctcctgaggagatttgtggacggaatttttggttttctgacagaaatacagagtctgtggactcaaacttatgcagaatttatctttccccccccccccccccccctaatgcccttacatcatgcaaaattttcaaatcaagtctgttttttacatggataaattggaccttagaatttttccgttcaatgatattctgtgaccctgcaatgtgcggacttttgctgagggagagaggaattgagctgcttgtttatatgcaccatgtctattttgctcactggattaggattgagctccatttttctaatttcatctttatagcttttccactcgagggagagaggaacttatgtgcacttagacttttaactgtgagttatatccatgcatgctcctgagggttgcaaaatcctaggatggttgactttaacttaaaagtcatactaatatgctttgtgtgctttatctggttggacaggaagttaattg

SEQ ID NO: 94497 - DNA, 567 bp, Eucalyptus grandis
  Intron number 2 from transcript Egrandis_v1_0.007167m (loc us Egrandis_v1_0.007167m.g) derived from phytozome v7.0 (c hr-ID scaffold_10; pos 10287925 to 10288491 reverse strand )
aggcactcgagaagatcaaatcaggtgaatttcaattcaatcacccacttttcttttctttttttgtgggcggtcgggggggggggggggggggaacgagggaatcgtgaaaaatttatattgcccaaaaaaaaaaaaaaaaacaaaattcccaccgtacccaacctacaaattgttccctccacattatctgttcaaaatccacgaacccttggaggaaccaaacttttttttttctattttatattattttttctaacgaaatattaatctctacttacatcgacaccaacaaatatgaaatatgtaagagaaagggttaatgtcgatcgcgcatcccgatattcatcaaatttcattttgcccaacatttttcccttaggcatgcaaactatccgatccacttgcaccggatcggatggcaaactcgttcctcaattttttaattattttttattttgtttcccctctaaattaaatttaaaattaatgttaactttcaaaattttcttttgtgtgttttatttatttttatttatttttgtactttttgtggttgtagagctt

SEQ ID NO: 94498 - DNA, 630 bp, Eucalyptus grandis
  Intron number 2 from transcript Egrandis_v1_0.025120m (loc us Egrandis_v1_0.025120m.g) derived from phytozome v7.0 (c hr-ID scaffold_1; pos 19825498 to 19826127)
ctcagtattctcgcctgtaagtaccgttttgtcccatggcaccgtttgtgtttacttagagctttctcttttttggctgggtacacatagggctgtaagataatttgcttgtgtataggaacttgtgcaggtatttcttggtggttttgtgcctttttctgtctctcactgatgattacccagcttcaactctgtagactggcttgtgatgattcataagagatggattggagacaaatacttagttctttgactattctgttgctgtcagcatattaagattggatcttttagtatgtcatttgatgcacatgcatgtctatctgcaatgcttgggcatatagctgtttctttgacctggttatggtgaaattggagggatactactgcagcgaaattaaatgagctttataccaggaactgtggtaaatcttataatgggttttttttttttgggtcgaacttataatgggttggatggtataaaattgcagccagacttttatccagtcccccaaatatcttctctgataaatcattaatttttcatgctcagatgtttctaatcttaatccccgtgtatcacttttttcaggctcctctagagctaatatctgcctttaaaggtag

SEQ ID NO: 94499 - DNA, 799 bp, Eucalyptus grandis
  Intron number 1 from transcript Egrandis_v1_0.029519m (loc us Egrandis_v1_0.029519m.g) derived from phytozome v7.0 (c hr-ID scaffold_8; pos 69740145 to 69740943 reverse strand)
aggtaaatgacctagtttcagttcatgagactctccctattttcgcttttgtcgccttttcgctttccttcgaatttagattttgattcttgcaaatacatcattcctagtctcgctatactcagaagagtttcgagaagcaagatcctgctgttcttgtcttggttgagcgattggtttaggtccgaatccttccatgttcttagtctaatctcttctttaaacgggtcgatgacaaaagaagactcggggattaggccaggagaagatatttgtaatctgacgcctccacgcacatcggagatctttttgctaaggatctcccggtagcttcgaccgatgcaaggaatccaatgacattctctgcactgttcccatagctttggagagatggaacgatttcgctgtcgacggacccaccgatttagctctctcgtcgtctcttactggcctgcacgtcgcgatttcactgtcatgtcttgtttctttccctcggatgatgtccctatcatgcgttgggagacaaaagtagcaacgcgtttctcggtccttgtcctctcttttggagcgttgctcgtcttgctgtcatcgctcttgggggaaatgatttgttttaaacgagagagagaagtcgaatcctgatcttgttattgtaaacgtcgaccccatgataacgaagaggtgactaatacttttgacaaggacgtgttctcatgatttgtcaatggattgaggagataaccccatctgctcatccttcgcaggacgatcaaaaggccaaagcaggaagcgaagtgac

SEQ ID NO: 94500 - DNA, 404 bp, Eucalyptus grandis
  Intron number 2 from transcript Egrandis_v1_0.048449m (loc us Egrandis_v1_0.048449m.g) derived from phytozome v7.0 (c hr-ID scaffold_1; pos 15230743 to 15231146 reverse strand)
ctcggaggctcttaaaattgcagccactgtcccaggtaataaataatcaaaaactaaaataacattagaggtgtacttagggttgtccacaagaaagataaaaaaaaagttcctgaagacagaaaattagttgtaatacctgttaaggatatgaagcaggcgctggagaggtccttgtccaaaaagaaacttgttgctcgaaggaatgaattggttttcaggattgacagaagcaaagtttttacaacaaaaaagagaacctttctttgccatatgtaatggagtaggcagagaagcaagcataaaacctaaactatttccatttccttggaagctaatttctcttctttgctcgatcaaagcatgtagggttctcatcgttgagtttgaaaggaacggaccga

SEQ ID NO: 94501 - DNA, 639 bp, Eucalyptus grandis
  Intron number 1 from transcript Egrandis_v1_0.033588m (loc us Egrandis_v1_0.033588m.g) derived from phytozome v7.0 (c hr-ID scaffold_8; pos 22540615 to 22541253)
agcagcttcttcctgataaattagtgtatgtaatattcctgcggaatcttctttttggcttcatatattatgtaaaaaagttctggcgaagctcatgactcatcctgagcatagcattcctatttctaatcctgctctttattgtcaagctttcaaagtttactttatggaataatattgactctgcagttgttaacttaaaagttgattcgagtcaagcattctcactagttcttttgactggatttttatgctaaaaagattgttgattcgaaagtcaaacctggacagtggacttaccaagaatatgatcttccagtgcatatggcattgattggttgttataaggctgtcggaccgttacttgtttatttatttaagttcatagagtattagtgggaaacaataattcttggagctgtttttccatcacaaacacatctctccttttattaaaagatcggtggccctctctacttcagctgcaatgtagcttacatagacacttttcttaatagcctctgctgtgacttccagaagtagcacccatgtgtgcacatagacatgcgttttgactttcttacatctgtttttgttgctatagtgtgaccagaaactactttgacaacctcctgagag

SEQ ID NO: 94502 - DNA, 820 bp, Eucalyptus grandis
  Intron number 1 from transcript Egrandis_v1_0.011641m (loc us Egrandis_v1_0.011641m.g) derived from phytozome v7.0 (c hr-ID scaffold_1; pos 16383015 to 16383834)
ttgggaagcagcttataatccaatgttcgttgattgttcattttgattgtctaaccactcagtttatccttatttgccagtactagttcactacttaggataagatattggttttgcagtttcaggaaactcgacgccgattttgcacagatcttttagtactcctttttccattatcctgtcgctaatgggttcttctactgggattgctctattttgcatttcttgaacctgaatacgttcttcgcggacctcgaatttagagacctccggcgaatacaattgcctcataggaccatgtactatccgggtgaggaacgagatattaagtcaggcgatgttgctcaagctcgaactatgttcgctttaaggattcaaactagaagaaatctggagaggtagagccattgaaagtcaggcaacacttctgaaaaattgaagaggatagttcatttcacgggtcattcctcagttcactgaggaggataacaaccctgagagtttatcggactattgacgggaatttcatggcccttgctcatctctttatcgtccatttgcaaactattcttatgcttggccttatttagttcaaatcaatcttcaacatccataatgtgagagactagccaataatagtatctccaagtcaagccacaggaattgaacccttcacaatggagtggctaattatagttcaaacttcatgttgtttcgagctgccgcactcgattataaaaggggcatttgtgcaagttatgaatatctcaactgttcttagcgagggatctataacgaggaagccgaggaaaggagacag

SEQ ID NO: 94503 - DNA, 679 bp, Eucalyptus grandis
  Intron number 1 from transcript Egrandis_v1_0.024930m (loc us Egrandis_v1_0.024966m.g) derived from phytozome v7.0 (c hr-ID scaffold_10; pos 2792314 to 2792992 reverse strand)
cacgaagcaagcaagctctccgcgaagatcccttcgtattctctctctctctctctctctacatgtcaagttttgatctttttctctgaatccgattggcctcgatttccgctgccttggaaagttccgtcaagatgatagattttttttggaaatttagcgaatttcgtgcccaattgcttcggtgtttaggggaatctatgtgcgattgggtggatagggctctcgtgtgtactgcggaattcttgccattttttttttcttggtcatcaaaacatgacctggggtttgcgtaaaagtgttagtcttgatgctttcttttgttgggttgggttcctgatgatggcggcgtcgtcgtcgtcgtcattcttgtcggtgttacgatcgcatgcgttaggcgagctcgtaggcctggacggaagagatttgtgtgtaaggtggtgatgggaagttgatagtgcgatgtgagagtttattagccgtgttattattggatacgcattgcccatgctaattgagtttattgctgcccgactagtttgttaaattgtcctttgtttttccattagggaagagagcagaagttttattggtgttctgttcgattggttgtactaattttgagaagttatctacttccacagcttgttgttaccaaattggttgaagcttcttgtgg

SEQ ID NO: 94504 - DNA, 714 bp, Eucalyptus grandis
  Intron number 3 from transcript Egrandis_v1_0.054664m (loc us Egrandis_v1_0.054664m.g) derived from phytozome v7.0 (c hr-ID scaffold_8; pos 48601140 to 48601853 reverse strand)
gtcaccaaagtaagcaaattaaaaagatcaaaggagtacttgaatagtcgcggacactttagtatcgagttggtttttcttattgcctgtagtaaaaattgtatcatacttccgttgaccctggtgagttttgttagtcctctaggagtatcttttgttttcgcactccgagaccaatcataaccatcaattagaaaacaaaaaacaatgagagtaatggtggttacggttaatgattattcctgattttactgtacctaaagcacctgttagatgagctctagcaatagttttcgcatgaattctttgaaagaaagcaatagtgcagtttggataccctacatatttaatctgatttctcttccttatgaatgtattcgacaaaatcagagtacgcgagaaaaattattaggtattttaattaagtgcacactcgttccctattaggcatggtgtaaaaaatggaatgcacaattacatactaggaaacaacaaatatcagcaatatgcaatagttgcaaagccaattacataaacaagtacctacagcttttcttttttctttttttttggtcaaagtaactatgacttttattaggatattacagtgacaacttattgcaattgtttcttatattctgtagaaagatctaacatactaagtctgtcgctgatgtagggaatcatagaagaagagaaactcgactccttcaa

SEQ ID NO: 94505 - DNA, 568 bp, Eucalyptus grandis
  Intron number 1 from transcript Egrandis_v1_0.016331m (loc us Egrandis_v1_0.016331m.g) derived from phytozome v7.0 (c hr-ID scaffold_10; pos 37750103 to 37750670)
ttctgttgcgggaagggactggatcggtgagttcgcctcgctctctttttcctgtactagattgttgttatgctggttccggaactggctggtcgtgtgatttctgggtcgtttgcttcatctgttgggtgggttttgaagtggatgagtcgtggtccgtctggattttcctttttgcccgagtcaaatgtgatctggggagggttcggattcttgatccgattcggatttcgcggatttttacatgggcgtttgagaaaagttctgttttgatgctctctctagtgtctagttactggtataaggtggagatggcaaattttttttctttttgattggagaggaccatggacagagacaaattgagctcaacagccattggttgacttgattgaaacaaaaaggaactcgtgtaccgatgtcccattttcatgttgatgtctttatttttctggagaggtgcctttctgtactttttcttctgggtttctatagtagcgtaatgatggtatgatgtgcgagttgaatcgcagaaatcaacggcgcaagaagcagccggcttggagga

SEQ ID NO: 94506 - DNA, 629 bp, Eucalyptus grandis
  Intron number 2 from transcript Egrandis_v1_0.001966m (loc us Egrandis_v1_0.001966m.g) derived from phytozome v7.0 (c hr-ID scaffold_10; pos 30963937 to 30964565)
ctactatttgccagctctcgacgaccctcgaataggtcgagtccctcttttttcttctgtttaatgcatgttttagtagctgatgatttgtatagtatcgatgtttgtatgaagatcaaaatgactgtctttcaacttttctgtcataagcaaacaggagcaacaattttctgtcgtttttgttgggcatcgttattattcttcacgtcccgagtcttgtcttttcattctttatgtaaataatctaattattagaagaaattatgaggaatcgagctaggtgaaaggtaggccaagcgagccaactggtgcagattttggttaatcactttcctattcattgcaaaaactcttatttgtgtttgtcaatgtcaatgcctattgtattacatggagaacagaatcatctgcttagctctgttgattagcactcttaaatagtaatagatcagaaccaagggaagttctgacacctgttgttgtctcctttttgggctttgtacagtttacgatattctgaaatagtacccttcagaacgaagacagatgtatgctaagttatgttttgatggagagtgagttttgacaatgcagataggctcccaatatctattaaggtcctccttgaa

SEQ ID NO: 94507 - DNA, 550 bp, Eucalyptus grandis
  Intron number 2 from transcript Egrandis_v1_0.026355m (loc us Egrandis_v1_0.026355m.g) derived from phytozome v7.0 (c hr-ID scaffold_1; pos 34246273 to 34246822)
tttatatcatcttcatttccaacgacaagaagcaggcatgtacttctttttcgttgaaactttcctgccattttgcttctctatttctttccatattccttgggtggttcttcgcgattttagcccttctgtttctgtccatacaaaataattataggtctagtagagactttgaaggaagagaacaatggtgacgcactaaaaatactatcctgagcaattcaaatgccctgcgttcacttttattcctgagatggaatatgggctatccttctcacaagctgatgagagctaactgtatgctgggcttgttcttataaaagatactagacttcgaaactgaattccttgctaacataaaaattgcaaagtttgaatagcgtgatctccgtattggcttgataccatagagttttttctcttctttgaagtcaatcttaaatgaaattgggatctttaaaatctttgtatggtgatgcctggggcatgttattgttgcttcctgatttctgcagattgcactgtggcatcagaaggccagcaaattcac

SEQ ID NO: 94508 - DNA, 995 bp, Eucalyptus grandis
  Intron number 1 from transcript Egrandis_v1_0.042483m (loc us Egrandis_v1_0.042483m.g) derived from phytozome v7.0 (c hr-ID scaffold_10; pos 20564971 to 20565965 reverse strand )
tggtcgcaattgcctcggaaagtgctgtttgcctggtaagtcccctgtgatcacactcttcctttccttttccttttggcctatgaaaattagaacattctcgctgattgtttgcggtttagtcatatatttgaagatgaatagattgtttttgttgggtttggatggtttacctttctcatgatctgcagatatcaaatgtttatcactttgtgtgcatattagaagatggttcgatttggatgtttcttttatgccacaaagagtcttacatagagacgattgggtacattagctttgataaattcatattattttaattagttacgtgcttcgtccctatttctttgatgttctgattgttctaaggccagtgtagttttcttgccagaaaagatttccatttaagttcttgggctttgcagactatttaccagcaattacgcattgtatttggctttctttgttttgcgcctaagttatgaccatgaggtttcaaacttttgattgctggtgtataaagctaattgtgaaattggaataaaatgaggtggaccatcttctttttttaccatattatatgctggaaggtgaactcttgattgagcttcaagttctacgggggttttctgatccttatttaattggagggatgcaaattttttatagcaatggtcagcagcttttcttgatcttcaatcgttctccactgcctgcagaacgacaatataggaatcaagaatcaaagattagagaaaaataaaggctgtcgtcataccctagaggataaaaaagcagcagtatattcaattaaagacatatgtgtatatataaaattcattatatgtggtgagagagagagagagagagagagagagagatagaggggatgcggatgtttggttcattactttctctatgttggcactggcttgtgcctgatttaattgctaattgcagcatcagaccttcctctgtacacgttcaagggagaa

SEQ ID NO: 94509 - DNA, 788 bp, Eucalyptus grandis
  Intron number 2 from transcript Egrandis_v1_0.051454m (loc us Egrandis_v1_0.051454m.g) derived from phytozome v7.0 (c hr-ID scaffold_1; pos 39387425 to 39388212)
atcctgtttccgctctcaagcgaactctccagtaagcaatcattatatcatttgccttctgcaccttcgtttacaaaatccaagaatattaatttgggcagagaagcggaataacgggagtaatactaagtcatatatcataggagggcgtatatcaactgtcatggttcgacttcccattgtctcggttaaatatcacgttagacttccgacttctgaaaaaactttcgatttgggcaaaaactcgtgggggcaagcaacatatactcatcaagtatattgcataagataaagcttcattactttgcatgcctaccgattcaagctaatcggttgacctgcaatgaatgatagcgaaaatggccgcattaaattgcaccacgcgattagcaaattgaattattgtccctttgagaacgggtagcgtttcgtattttcagggatagagaatccacgccagatctcttctcaaatctcacccccacactgtagaggcctaggataactcagccagatcttggaattgggttgatcgatcccactgaaggaatgattcgtacaagatcaaaattcacgtacttccctttaaattaaacgcgcgaccacaatatctgctagatctactaaaaaacatttgaacgtgatgcttacaatggagctcatgaaagatatagggaactgccaagtaaaatagtcagctctagcctctattcatcacgtctctcatataacataagggggttgagcccaaatgatgtttatgatgctttatctttaggaacctcggg

SEQ ID NO: 94510 - DNA, 462 bp, Eucalyptus grandis
  Intron number 2 from transcript Egrandis_v1_0.014710m (loc us Egrandis_v1_0.014710m.g) derived from phytozome v7.0 (c hr-ID scaffold_1; pos 22930120 to 22930581)
aggatatcagcacttcgaatctcaagtacattttggtgagcaatttgcctttctcagctttttattttattttattttgttttatttttgctgtttgttttcgtggaggaatgatgcctttacagaagtaatggtgctactggtgatcttgatcgacaatttttatcctaaatcttgctaaaaagaagtaaacttgacatttcatttacgaattaccgcataagcatgtatggagctggcgatgaataggggatattcacattttgttagagacaagcaccaattttgcgactgtggtcgtcatctatcatgcttaggaggtgattatgcattcatttgcgtgctgagttatcgcagggggcggcggccgcggtgctgttgttttgggctgcgagtagaaatgtttgagtgagattttccttgttttcttctttgcaggtccctttttatctggctgaattg

SEQ ID NO: 94511 - DNA, 829 bp, Eucalyptus grandis
  Intron number 1 from transcript Egrandis_v1_0.026465m (loc us Egrandis_v1_0.026462m.g) derived from phytozome v7.0 (c hr-ID scaffold_8; pos 5395673 to 5396501)
cagccccatcgccagctggaagatctctagccctggtgagcactacgtccaatcattttgattatagagtagcttccgagattgctttctgtgtgtgtgattagatctgttgacgtcgatctgactttgagatcttgatcgagttgaggctacggcgtcgactgtttaatttcctcaagaattcattttgccttgcttctgctttgatatgcggcggtactttaggagatgcaattatagcgagctgtggctttgatggttttgttttgtctgctcgagttaggtcctgaattcctggttttatggggtcgtaggatatttctcctggcagtttgtgaaaattggaattgattggattttgcaaatcgtagttgttctccagatggtgtctcggttgtcttcataaaacagtttacagggcttcaacattgaatgaattcaagtatttctatggtctatggttgtcagatctgtgttgtttccaagctaactcattgtgggtgaagtagcaagttttgatgtgaataattgtcgaattttgtccaatcggttctcattttattctttagtttcttgatgtttgatatgtatgtggaatgaagattgagagtaaatgcatatctagccctcatcacccagctctaaaatccatgtcactgtggcacgtggagactctgattctctggtgcttaaatggtcttacgactctatggtctatgtcttaccttctattaccggcacttgaatatttcttcactttcagttttggggtgtcagtgttctgattttccattgctgtgattctgttgatcaggtgatcatcctgaag

SEQ ID NO: 94512 - DNA, 947 bp, Eucalyptus grandis
  Intron number 1 from transcript Egrandis_v1_0.055198m (loc us Egrandis_v1_0.055198m.g) derived from phytozome v7.0 (c hr-ID scaffold_1; pos 248211 to 249157 reverse strand)
gccccttcagtatatggaaaagtgattattttttttaggaaaaattctaaataagggtgtgaagtatcatcattttctcaaataatgacataaagtaaacattgtttcaaaatgagggcccaacgtgccattattttatcagtagcaatgttagttttaaaaaaaaaaggcttgaacctactggctggtgaatggcaattttatctttttatttgttccctttcttttttcgtttttttttttactttccatagaaaaacaaactcaaaaaaaaaagaaaaaaagaaacacacaagcccttcgcctatggtcgccgctccattgctggtggggtggcagcgatggtcggcaagcatactcataaatgggagaggacggtgaccctctcctagacttgcggatgatgcgagggttgcaaacttgggtgaaggtcgacagcttttgcccaaattgggagagggtggtgctctcctgtttctaaggcccttgtctttggtcaacgagggtcttgcccaagctccggtgccctgtcggtcattgttgccaccccatcgtcgatggagcggcggccacaaatgggagggtgccctatctctagcatgtatttttatttttaaattttttacatttaatttaattaagatttaaataaaaattatgtttggacgaaaatatttttgattgactgaaatattttaccggttggcaagatgagggctttatttgaaaggtttataactaattcaggttgttatttaaagaaatcaagacactttaggtttttttcagtgaattggctccttccgcgtcacttccttcgcgccggtcgaaacgtcttcgtgtgtcttttcccgtgtatggcgcgcgctctgtctctctctctcgttctttcgtgtatgaatcttgtgtcgaccgtgacctcaattcgagttcttgatgggtgaaag

SEQ ID NO: 94513 - DNA, 616 bp, Eucalyptus grandis
  Intron number 1 from transcript Egrandis_v1_0.041727m (loc us Egrandis_v1_0.041727m.g) derived from phytozome v7.0 (c hr-ID scaffold_8; pos 67820043 to 67820658 reverse strand)
tccatctgcccaccttcaggttcaacttcttaaaattaaattaaaaatccttcctttctttgcttctttccttgttgtcttctttggaacttgcctttcttttcacaagattcacaagcactagcaatgcttagttttgcataaagcgagagacccatgtgacacatgctctcctggtcctcctcatacatgcaccttttcaactgcatcgatctctcgcggaatatcaattattccatcgaaaaccagaatttctgtcctttttcttttcttttcagacaagagaacaacaaaaaaggaagcgagaaaaagaccaattttgattcaattccaagaacttcacgcccctccttttctgggttttttcaatctcagcttattctcttgatttgaactgattcgggggaactgccgcacagtcccaaaaaccagcattttctccctcctttcctgacccaaaaaaaagaagcaagaagaaagaacagttccgatccaatttccaacgtgcttgccaattcatttctgggtttcgatctcgagcctaacccaccaatctttttctgtgttctatctcgatccagaggaattgcagcacagtccgagaaacggcaacccc

SEQ ID NO: 94514 - DNA, 753 bp, Eucalyptus grandis
  Intron number 1 from transcript Egrandis_v1_0.047202m (loc us Egrandis_v1_0.047202m.g) derived from phytozome v7.0 (c hr-ID scaffold_8; pos 22715838 to 22716590)
tgcgcgaggaagattacaggaagtagacgacagggcaaaaaagaagaacaaggaggagagaagagaataaataggaaaatgggcctcttaatggacaatgaatttattctgggcttagcatgaaagagttgggttagtgccgttatgttcaatatcagttttactgttgattgggctatagacctcgtttttttttatagcgaatttgggtttgactagtttcaagagggaatggggctcaatcctatgatttgagcccagtttgagtttttgattgaaccctcttaaggcaataagcccggtgaatcgtgcccatagatttgatatgtgtcagcccgtgtccgtgctgggtctgaaggcccagcctagaccccttttttcgaaatatataatacgaataataataataataaatgaataaaatttaatgatataaaaatataaaaaatataaaaaaaattaaaatgttgttagaaacatagaccttgattaggtcggtaagccacagtgttcttgaaaaataaggacaacatgtaaaagctctaataaacttgctggaggaggaggataccgtggaaagaagtgagaattttggaggaaaattgaagcaaagcaactgaatagttgaagttcctctctaattttctgcaaatccttgtctcatctcattgcagaccatgtaaaactcccctcaaagccaagtaagctcggtagagagagcccccaccaacggatcaccttcattttcagccc

SEQ ID NO: 94515 - DNA, 787 bp, Eucalyptus grandis
  Intron number 3 from transcript Egrandis_v1_0.041927m (loc us Egrandis_v1_0.041927m.g) derived from phytozome v7.0 (c hr-ID scaffold_1; pos 21166206 to 21166992 reverse strand)
caagtgactgtcaccctgagtgagttaccagccaagtattatggaatctcttgcttgttgttggccgtgaaagacccttatgtcatttttcctaggatagttgtttctaaaagattttctaatcttaattttttgtggtttgttgcttctttgccgactaacattctttcgacattgtcggtagagtagcgtaaatccaacaactgtacattaaattagatatcatcttgccaatggagtgctcagttttatgctgaattgggattgtcattgtggtcgctaatgcggtgtatgttggatatatctgcccattgttggggggtatagaatgagaatgtttgattaaggattggcattgcctgctccaggatttacagccaaaaagcattttcttgtgactttcaagtagtcaaaaactccctttttttggcaaatcgataacttgtgaatggtatgggcttaatagtttttaaagaatttgagtttctcatattgagattgagacatttctgaagtcctctcatggagtgagaaaacatgaagaggatgtcttatcatgaacagaaatgaggattttaggattatcatgattgtaacttttgcgagtggtgatgaatggttcatttttcttcatttggtttagcagctctcttttttcattgttttttgaagtgttaagaggggatgctcattaaaattctgttggcattaacactctagcaagtttcctatgttctacttcttatgtgcaggggcgtcgctgccatctcattttctgaaaaagggt

SEQ ID NO: 94516 - DNA, 921 bp, Eucalyptus grandis
  Intron number 1 from transcript Egrandis_v1_0.005175m (loc us Egrandis_v1_0.005175m.g) derived from phytozome v7.0 (c hr-ID scaffold_10; pos 26579386 to 26580306)
tccggttcgggagcgaggggagcaagatttacgtttgtacgtggcttttttttttcttcttcttcttcttcttcttgtttccgctccgatgctgcgcggcaatcaatgcgggagtgcttttgtcgttgcgcgtgctttccttagtaagttctcggagtcgtttctgttgatttttactcgatttggaatcgaagcgagcgctgaatctggcgatgctgtagctggcgctagtgcttgcagctagattcaggcatctgctgatttacttgtcgagagcctgcgagcaactgaatcgcgtcgctcgtggtcccgatttcgaagcaatctcgtgactgcaggcaaccgatggaaatacttgcagttgatccaaatttctggctctcctccttcttttgcgagctgtggagctgtacagaatggattttctgatttccgatttctgagcattcatttcaagtaatataaatcggggactaaaggtttgctgaccgttttcaaactgagggagactggattgctttcttcgaatcatcatctatcatcaagtattttacgttggaaaggtttctgagagaggaaaggggaaatttacgtactggaaattgaaccaactgctttgatcaacacactccgcctctataaacttcggtctccaagcttgagctggaattttgtactcctgaccctcgatccatttaatattgttttgttgacaaagtctacatctgatttcattgctgcgaccttgttcttgaatctgtcggtccggttatagcataatcattcctatttacagtgttctatgattatcgtgagctctcggtctttcattacggccctactgagctctgctcattgggttgttgctgttattcagctttgatctttcgtattttacaggtcctagagagggagcaacta

SEQ ID NO: 94517 - DNA, 832 bp, Eucalyptus grandis
  Intron number 1 from transcript Egrandis_v1_0.020639m (loc us Egrandis_v1_0.020640m.g) derived from phytozome v7.0 (c hr-ID scaffold_1; pos 35361383 to 35362214)
actctgctgaaggaattaaccccacgtaagctctcggcatatccggtccgactgttgttttgctgaaaatgggcaacttgggctggaatttcgatttgatttggtttagtttcattcgagcgaattgcagcgccacccacggtgaaaaattagatttttcttcttttaaatattgcattttttttgctttctcagtggttctccgaaaatagaaatcgccctttgcggatgattttgcagtacaaggcatgttttatcttggtataaagtgtgaaagtgtcattttcagttggaatctgttgttgctgggtaatttaagtggaatactttctgctttagtgtccgattcctgctggtttgctcggatcacagcgaaagaacgctatgtcgacctgttcatcatcctagttttgctccatttgctgacaactgctaatttatatgaattaggatccctcctcctctgatggtgcttcttggtttaagttaggtctgttgattttgccattttgaactgttatataaagtcttcacaggggttatgtctcgtctgttgacttgcttcttcactaaaattgttgattcatgacggcgttcagtggaaaacgttagtgaagttgtaatacatccttctcggagagtgaaatatcaacatggtctagtttgatttctgataaataggtttcttggtgaatggatcgaattgcaaaaatgtaacaaaaccttttccttaggatggagattaattctgaaaggttgttgagaaaatagctttccccatctttaggactgatgggcttacgtgctgttgattttattgcagaagaaggta

SEQ ID NO: 94518 - DNA, 371 bp, Eucalyptus grandis
  Intron number 2 from transcript Egrandis_v1_0.020639m (loc us Egrandis_v1_0.020640m.g) derived from phytozome v7.0 (c hr-ID scaffold_1; pos 35362497 to 35362867)
tattctccaatttaccaggtatctttgccgttggtgtttccagcgtttttcttatgattgttatatagggattcaaacattagacagccttaacttatcaggagatgtgaagatgtccttctctcctcccaatcccattattggataagctgttagtgttttgttgagaggaaacttgattggtgtccttggattgagatgcatgcgtaatttatatttcactcacttgaaaactcgcatagcatttttcacatgtaatattttcttcaactagtaattttgacttttgaatatgaaagcatgccacttccattgtttgttgactctcctttcttgctgctccaacttcagtgcctaaacggccacacttt

SEQ ID NO: 94519 - DNA, 707 bp, Eucalyptus grandis
  Intron number 3 from transcript Egrandis_v1_0.020639m (loc us Egrandis_v1_0.020640m.g) derived from phytozome v7.0 (c hr-ID scaffold_1; pos 35363229 to 35363935)
ttaacagtaagttcttttatgcattagcccatgatttttttggccaagaaacttgtcactgcctttgatgtgcctagcctttacgtgcatgttcttttatcgtagttgatttccaccctgcagtagttccaagttattgctttgagttccttgatgacctctctgcagatggtacatccccaaatcatttatttctgtttgctgaaatagaatatcgttgcaaaatatcagtgagtaccctacggactattgtgattagtaagttacattaatatatcaaccaagtgcttatgctgttgagtaagcttctctgatgaaggcagttttcttctatattattatagtgcgtattcatccaatgtccaaggtgcactcctcgtcttgcaaaaattttagtttttataatatcttaatcggtgacttgagggcacttgtgaacagaaccccttgtccaaggtgcactctgcgtcttgcaaaccttttagtttctataacatctcaatcagtgacctgagggcacttgtcaacagaaccccttctattgtttagcagactcgataatacagctagcgatcaagaggacacgatatgatgctttcattagcctcggtgcttgtttagacttttcttgcacgcatttacctggaattacactcttttttttccatgcaggtgtttaattgttttgggaggcagttctgtttaca

SEQ ID NO: 94520 - DNA, 701 bp, Eucalyptus grandis
  Intron number 1 from transcript Egrandis_v1_0.015489m (loc us Egrandis_v1_0.015489m.g) derived from phytozome v7.0 (c hr-ID scaffold_1; pos 7908370 to 7909070)
caggtgcactgttttctttttattttttattttttttattattattttctgcttctgttggttttggcgggcttcgaattcagtggcatttcctttggttcgggaggatgaattttggtttggcctcgtgtgttttgattcgaggaaagtgatgtgactaccgattatttgaattttggattgttgtaggggaataagctacgttaactatgaaaattgaaaaactataatcttcaaatgttgttcttgtttttcggttactgatttacgttcttgatatctccgggctatagtgcaaccgatcggttgtggcaaaattcagctactgttatgccgcggccttgagaaatgatgtgtttggacagtatgttgctggactgcaaatgggaatgatcctcttcctcgggatatatttctgacggaacaggttgtgaggaataatgtgacaaatgcagggccgaggtcgtttggatttttggattgattgccttgctttttcagtttagggtcatcttcatgagtgcatgttcctttggagtggagaatggatgtttcttctggttatatcaaatgctttgactggaagtgttgaaattgtctctttgctgtgcctgctttttggtatcacttattcctaagggtagttttcttgagctcggggctcactagactctagtgaatttgctgcctttgacagactc

SEQ ID NO: 94521 - DNA, 774 bp, Eucalyptus grandis
  Intron number 1 from transcript Egrandis_v1_0.028915m (loc us Egrandis_v1_0.028890m.g) derived from phytozome v7.0 (c hr-ID scaffold_8; pos 6113740 to 6114513 reverse strand)
gaagccggagtcactcgacgtcgccgccgtagcaagtaagacttctctctctctctctctctctctctctccctctctcacgcacagacaaatggttggtcgactcggttctgtgattaattaatctgcaatggtctataaatgaagattggttttaggtacttcctttctcatgtctcctgcattttcttattcatcattccttcgtggtgggttgggctatcaatcaatctttcaagcgcttgcgtcttccctgtttttttcttgttttagccttccccaattagagttaacttccccaattagagttaactttggcaagcgaagtcctgtttaatgcacctgggcggtgcgatttgagtcggaatttgggacatgtcacgttataaagaaaaataatttagtgtccaaagaatgtagaattccaggtcagattcttacgtaccgtgcataatgcattagtaaacattagtaatgtcaacgacaatcgtgtagcccgacttgctttgatcaaattttggaggtattgatctagtcttgaaagccgattcaagatatttaacttgataacaaccccatattaaaaaaagatatcacaaaacaaacatatggtcttgccgtgtttacaaaatgaacaatatcttttcaattaagtaatcgcatcttgtgatggatgtgtttagcaattgtcgtgttgtatcacgggcagttgcgattgatattttactaggaaacttgtcattggttcttgcttttgtgtagaaggaagacaaa

SEQ ID NO: 94522 - DNA, 882 bp, Eucalyptus grandis
  Intron number 1 from transcript Egrandis_v1_0.023055m (loc us Egrandis_v1_0.023055m.g) derived from phytozome v7.0 (c hr-ID scaffold_10; pos 20864542 to 20865423)
tgtactctccgctcgcgcctcttctcttcccacaggttggtctgctcgcgtctgacacttcttccttcgccatctccacttcatcttgttagctttacaggattagcaccgttgcgcagagccccagagaatcatctttccgtgagttgcccacttctctcatgatgacactgattactgggtcgtgtcgaaatgtggatgggttcgcgttggaacgttgttgtttattcgtttcttccatagttgaattgggtctttttctttcttaaagatcgtctctttatttttgtttttctgcaatgtatattgttcgcgtagattgaactcggtggtacaattgtgttgtcgtagcttagtcatggaagctgttatcgcccacctaaaacgggaataaaggagaaaaaaagaaaagggaagaaatgccattcgattcctgggctttaagtgtgagcggaaggtgaattggataaatccctcgggccccttgtctttcacaatgtgctttatccaaaatggagttgatagttagtagagaagtaattacttcatctagctagaattaagttgataaaaggaaaaaaaaaaatggaaggggaatgtaaaactgtcgattttaattatgagggaatgcttatgttggggaaaaaatctttgaaaggagaggaatgtgaagagattaaggttacgttgaatggaaatggagagagagagagagagggagagagagagtcacttttttctacctcttagatgaaggggaatggacactatgcttcctacagtgtagaaatgattataccgtttgattttgtgcttttgattgttacagatttgcataaattgacaggtggctgcagaaattctcatctcttggacgcaacc

SEQ ID NO: 94523 - DNA, 814 bp, Eucalyptus grandis
  Intron number 5 from transcript Egrandis_v1_0.012845m (loc us Egrandis_v1_0.012845m.g) derived from phytozome v7.0 (c hr-ID scaffold_10; pos 36159067 to 36159880)
cattatttggttgattaaaccgaaacaaatagcaggtaagttttcttacttgtcatgttctcacaatttacactacattttacgactatcttgactttgatattcctttggtacagttctatctgcaacaatgtcttttttaggataatttagttgagaatacacaactcagcaactttcttctcttctcacccaccgtaggactatcactttacaatctcatcaacattgcaatcaggaatgaatgaaagttggctttaatcaaacttttctaatgcagtcagtagtaagagtccatagtgatcacaagaaaatgaagagaagagagacactgggatcaccacagcatggtcgcattagcatcgcaaacagaatgtgttttattcagcttaacttattgacaataaagtctctgtttttttccttcaaaagaaatcttgctatgtaggagggcttataacaacttgagagtacaactttgtccttaatattctgatggtccctgaaagaaagcttgattgtgcaatctcaaacttatctatatgtactgagcaaagaaaacttgtctatatgtaagcatatcagaagcaggtgacagagaatgcctgcccaaatcttttaatttttgtcctcttctccaccaatttagctcataaaatgggattagaaaaacctttcctatgccttttgattgttgaaacgcaattggagttatttgcattgaaagtccaatatccaaagtggtagtcacaatactcataggaaccttgttggtacagaatctagtcaaaggacactgaggtcaaagaatcga

SEQ ID NO: 94524 - DNA, 713 bp, Eucalyptus grandis
  Intron number 1 from transcript Egrandis_v1_0.026604m (loc us Egrandis_v1_0.022666m.g) derived from phytozome v7.0 (c hr-ID scaffold_10; pos 7230229 to 7230941 reverse strand)
tgagggtgcgaactgggttagaacgttttgaattggtaaagccccaattgcccacaatctatctgccgtctgaaaagctttggtggtggcacttgcgatgtttttattgttctgtagttcgtcgtttaagatttcaaagcaacttgacttgaggtttatgcaatttaaacttgcccttattggaacctttgggatcggctgcgtgatgggttctattgagttggcaacgcgcctaatctaatctacaatgggcatcgaagttaggtggaagtgtgtttacatgtgtaaatcccttttgttggtgacctgtgttgttcccggtaatagatagacggtgagactcagccatgtgcatagattcatgctaattttattatcttttggctgttgggaactgaggattccattggcagattgactagttatacaggcttagctctgtgcaaagtcaaaagctgcctctttggaaccttcaggagccaaatactgaagaaaatgatatcctactggatactttgaaaacttgtggtctatgtacctcctgtgatatcattagccgccaggaattttttttgtgtgtttctcctgcattattgttgctgttagaggctttttttttttggttgaaactgttagaggatttgataagccattctcatgctcattcacctcctccacattatacttcaggtgtagaattcctctttctggta

SEQ ID NO: 94525 - DNA, 699 bp, Eucalyptus grandis
  Intron number 1 from transcript Egrandis_v1_0.031101m (loc us Egrandis_v1_0.031101m.g) derived from phytozome v7.0 (c hr-ID scaffold_8; pos 51785201 to 51785899)
gccatactcgggccaagctctaagtctgacccgaggtcagactccaacccggactgctagggtctgggtcagactattggttggcaccgagttagccgaagtccattttctagaattaaaaaataaaaaatggaattttttttaaagaagaattctttttaaaaattagatactgagaagttgtttcactgaaagtattttaccggaaagtgttttttagattttcagccgtttgatttgctaaaaaagatttggtcaacggaaagcactttctggtcaacacaaatgttatgttttattttaggaaaacgaattcctctgtctcaaaaggtgaaaacactttccattttcattttttccctctgacctttcacttttcctctccgtacgccactctctcccttcgcttctttcgctcgtcttttttcttcagctcttcttcaacgacgcgcgtcttcttcgccattgaaggtccagatcttcttcttcatcattgaaggtctggctcttcttcaacgacgctcaacacgattctaggttctctctcctctctgatttgagaataatctcagaatttttttgatcaatgctttacatcgttgagttgatgttgattctctgcgttttagttgtttgattcacgtttcctttcatcttcttcaagcaattgaagtaaaacgcccctcaaagcctctctct

SEQ ID NO: 94526 - DNA, 875 bp, Eucalyptus grandis
  Intron number 1 from transcript Egrandis_v1_0.047167m (loc us Egrandis_v1_0.047167m.g) derived from phytozome v7.0 (c hr-ID scaffold_8; pos 51827755 to 51828629)
atccactaggggtgttaacagtttggttcggttcggttttttggaaaaccaaactgaaccgaaccgaactgttagaaaaaacttccaaaccgaaccaaatgagacctaaaccgaataggaaccgaaccgaaattttgatttgcttcggttcggatttttgattttcagcttttggttttcatttttttttttcgttttttgtttcttttttcattttttttttctgttcaactcaaaataatctaaattcaatatgttaacttcaagcttaaaggattttgcaatttagatcatatacttcattctattttttaagcattgaccaagtagtgatatccaatttaaataattgcttaacataatcaattgagacttgattgaggcttttttgaaacagtgcgagtggccccgcaaagaacctacttgggagatcatacacaacaacggatttcaagaaggaaagaaaagaaagtgagaacatggcatttgaaagtcgtgaaaaatcacaattttgagaagatcaccaaaaaaaaaaaaaagcgaaaagtgagcttcaattggacacatggcaattaactaatgacctagaatattagctaagaggcacaactaaagcctgcataattttaatgtacgcattagtattacgatcatatagctaatagattggttggggtaaatgctcgcctatttattattcgcaactaaatattctaacaagtttaagttagtgaactaccgtgtcatttttttaacatgatatgatctgagcactttttaacacatttaatattaagcttcaaaagactttttcattcactgtttcttgtaccctactagaaccaggtctcttttccttttctttcaaattagag

SEQ ID NO: 94527 - DNA, 631 bp, Eucalyptus grandis
  Intron number 1 from transcript Egrandis_v1_0.049928m (loc us Egrandis_v1_0.049928m.g) derived from phytozome v7.0 (c hr-ID scaffold_10; pos 12129084 to 12129714)
gtaaagtaggaaccagaaaaagaaaaatcttgaagacctcgaggctttttgttgaagccctgtcaaatttctggcttttgtgtatagtttcttagcatgattgttgtggaaaacgagtctacgtggagctcatgatctactggagatctttgtgcgtgacttacacaatgacttttatcttctttccatgagaaatttcttgcacgatgcaaaaactgcatggtggaatgcttgaggcaatatttagcttcttaaagctgtgcattagagactttgttggtgcaacaaatgctcatcggaatgaacttttctgactgaagatacatatctcatgagtaccgggtgccctaaatttcaagcatggttttcctctgctgtgatcatctcatcgtctgtcaattttgcatgctcttctttgttgatttctttacaaaaggtaggacataagctggatttttgtttttgaatcaaactatattggctctttataaatgaaagcaaaggccaacattgcgtacaaatacagccgcatattttgatctctttctacaagttccgtttgagatttaattccttatattggtggcgtgttgtagattcactttgtacttataatcaatcgtcaaaggaa

SEQ ID NO: 94528 - DNA, 593 bp, Eucalyptus grandis; identical to SEQ ID NO: 93565
  Intron number 1 from transcript Egrandis_v1_0.045228m (loc us Egrandis_v1_0.045228m.g) derived from phytozome v7.0 (c hr-ID scaffold_8; pos 41109737 to 41110329)

SEQ ID NO: 94529 - DNA, 646 bp, Eucalyptus grandis
  Intron number 1 from transcript Egrandis_v1_0.043266m (loc us Egrandis_v1_0.043266m.g) derived from phytozome v7.0 (c hr-ID scaffold_8; pos 49052338 to 49052983 reverse strand)
ctaacaactcattgcttcaggtacatctctcattgtcctgttgtgggcacatatcatctcgaattcgtttgcattaaaagattgattacacactcctttgtgattatgtaccacaatttgatttcttcatttaatatcaaactaaggttcttttatttaccaagatttttaattctatatacaaaagacgatattttaccatgcctttcaagacaatgtaacttatctttcaagcattcaaattgtgaccccaattcgtatatatactattaatcaacaaaatttctcttaaaaagaacgtacgataaagggtataacaaaatattagatcttgcatgatcattgcaatcttaaacaaacacaatcctgtgatattctcattggattaacatggaaaatgcatggaatttgcaatactcgctcattatatatgaaccgctcgcatattcaatcaagaatacatcattggatatattcgtcaatataagcaatacatagcatttatgatttatttctctgtatagatataaccgaagacagaagccttttttcttgatattgagtcaatgctttctgcttttttctcttttctcttttttttttttttttttgatagaggaaggtgctattgacgacaaagcccata

SEQ ID NO: 94530 - DNA, 533 bp, Eucalyptus grandis
  Intron number 1 from transcript Egrandis_v1_0.018847m (loc us Egrandis_v1_0.018847m.g) derived from phytozome v7.0 (c hr-ID scaffold_8; pos 52135761 to 52136293)
gtgctttgccctcaacaggtaacatatgcattccttgtttgttttttgtttttttttttttttgttaactcatggttaatatgttggtttgactcaagagtatctaagtactagaatataagcctaaacgtcttgttcaagctcttctttcaaatgtccctttcgataacccttcgtcaatccaaccattgtggccgacatagagggacaaaactatctgtcttttcttggaacgaagctcattttcatttgacttttagaactttgtgataatttgacaaaatggtacgagtaaaaaaacgacccttttcttcttatccggagaaaagaggagctaatcttcggtgacaaagtttatggtactctctgattcgaaaaaacaaagataatggtcaggctaaaggcagacaagcgacggtatcttaattgccccacttcaggaccgctttaattaaaaactaatgtgtcgtctgtcctttgctcgtctcatgattgcagcatattgcatacgggagcttctcagttccaggata

SEQ ID NO: 94531 - DNA, 721 bp, Eucalyptus grandis
  Intron number 2 from transcript Egrandis_v1_0.017333m (loc us Egrandis_v1_0.016870m.g) derived from phytozome v7.0 (c hr-ID scaffold_8; pos 60469112 to 60469832 reverse strand)
ccaggagatcaagtagcatttttgactcaaagcaggtatgatcatgaaaactttcacacgcaatcagacatgcggagtttaatctttggaattgtttcgatggcttgtgtggaattgagcatgaatatgggtgaagtggcgtctttttaggacgtttttctaaagaagatcgactgttcggagcaagagttcgttcttgcgttcgatgggtatttttgaagcagagattatctttgcggggagcttctgatcatgtcacatcgttctgtgtctttcgcataattcttagcatctgtttatttctggaagtatgtcgcagcacgtctgtttgtggaaatttctctttttactctccctcttgaattgatctttcgagtttctctgctcgaaccagactatgagagttacacgtttccatcttcttttgatatgaatccatggtgactccaaaaattgaaacttttggctgaagcagataatatatgattctgagaaggtgataatggtgtaagtttcaggattctttgctccccttttcgttattgcttatgttgattaattcacagaacaagatagggtaattacgactgcttatggcgtataattgcgatagctgtagaaagtgaaatccttggatgaccagatgctgacgagtttctgtatatttataccttcaatcccatttgaatttcccccatcgtcggttaattccaggaaaaaa

SEQ ID NO: 94532 - DNA, 531 bp, Eucalyptus grandis
  Intron number 1 from transcript Egrandis_v1_0.015124m (loc us Egrandis_v1_0.015124m.g) derived from phytozome v7.0 (c hr-ID scaffold_8; pos 60207339 to 60207869 reverse strand)
ccaagaagctcctcaaggttctccctatgtgtatgcatgtataatttgtggaaagaagggaaaaaaagaagagttttgcttctgaaatagtcagctgtggagttggtttctcagaaagttgaggtggcttctaaggaattctaattttgtgcttagtgctatgttttgtgtgtgtttcctgatttaagtacataatttgcaaagttgaaatgggtttttaaaagatgaggactttgaggtctgcttgttacgtagttgattgatcagtgtgattggtattgaaaaagttctacttgaactgcgtaatttggatcttgagaaaattgaggcaatataaggtgctggaaaactccagctttgtggttagtgctgttatgttctgtcgctatctgtggtaggaaattaattgggttaattgttgttctatgttctcccttgttgtgtcatgaagtatgactaaggaaccagtttagattgaattagatgttttatggtctttgagtttgaaaagtttgatgcttgtgcaggctg

SEQ ID NO: 94533 - DNA, 673 bp, Eucalyptus grandis
  Intron number 1 from transcript Egrandis_v1_0.016768m (loc us Egrandis_v1_0.016487m.g) derived from phytozome v7.0 (c hr-ID scaffold_8; pos 9968530 to 9969202)
cggccaccgtcgagaccatcgccaatctgttgcaggtttctgtgctcgtgcctcgacttgattttcttttgatgggttttgggcaagatgagattttgagtgtgattggggagaatttgagggactttctagctcttgaggtccttgtgagggttgtggatgttgcgtgtttgagtaatttgaaactgaacttataaaagcctgtgaagaaaagtgtcttttgtgttggagtggggaattgggtctatgtcctacatgcaaacaagcatgcatcttggtttttgctgtagcaaatcttttattactgctgcgaattgcttataacatctggattttgagaaatatagtgatagagcaggtggtctttgtttaagtctcttctctacctactcttggttcagagttttcacacaattgcttgtcactgggtttaggatttggttgaatgatattgactccccctcatggtttcgctaatcctcattttgatcttcgtaacttctttcaatgaaatgtgttgatccaatatctggatagatcgataagctcatttatggcagtaagaaaattttgtttctctctatttggaaagagttgtctcaagttgcattttgcagcagggatttctggccaaactgaacgatatctgcattgcaggaggttgggtgtaatc

SEQ ID NO: 94534 - DNA, 622 bp, Eucalyptus grandis
  Intron number 1 from transcript Egrandis_v1_0.016560m (loc us Egrandis_v1_0.016488m.g) derived from phytozome v7.0 (c hr-ID scaffold_8; pos 48994466 to 48995087 reverse strand)
ctaacaactcattgcttcaggtacatctctcattgtcctgttgtgggcacatatcatctcgaattcgtttgcattaaaagattgattacacgctcctttgtgattatgcaccacaatttgatttttttcgtttaatatcaaactagggttctttttgtttaccaagattttttatttctatatgcaaaagacgatattttaccatgcctttcaggacaatgtaacttgtctttcaagcattcaaattttgaccccattcgtatatatcccccttaatcaacaagattatcttaagaagaatgtataataaagtattagatcttgcatgatcattgcaatctcaaagaaacacaatcctgtgatattcgcattggattaacatagaaaatgcatggaatttgcattacttgctcattatatatgaaccattcgcatattcaatcaagaatacatcattggatatattcatcaatataagcaaaatatagcatgtatggtttatttctctgtatagatataactgaagacagaagccttttttcttgatattgagtcaatgctttccccctttatttatttttattttttttattttttttaacgatagaggaagttgctattg

SEQ ID NO: 94535 - DNA, 804 bp, Eucalyptus grandis
  Intron number 2 from transcript Egrandis_v1_0.044479m (loc us Egrandis_v1_0.044479m.g) derived from phytozome v7.0 (c hr-ID scaffold_8; pos 7977183 to 7977986)
tcttgcacgccaccatccctcctgctgttaatcaggcaattagaagaacatactatgtctaatctcttcattattggtacaactaggagtatgcaaaaggactgaaaatcgcccggacttttcgaaatcggaccagactggattggaactagcggttcttaagggaactggtggatatcggtccgatactcggttttcagtgtggaactacctacctacttagaccaaactggtaatataaaacatatattatatttataaaaaaaattccaacaaaaaaaattaagaaaaataaaaaccttaaaatctctaatttgaagctcaatacccattaatcaagtgctcgtcttgtctcactctcacctcatctaagttgtctctatatctcacattcatggcttcaactctcaagctccacgtcaatcaactcacggcctcaactttcaacttctaatatgagtccaatctttttacctatcttgcaattgagaatagggaagttctttgttttttgctttaaacattgcattgatgtatgaagtttgatgggattggttccatggacccacccgcaaactagaccagactggtggtccgattcccgagtgtatccatagaaccaacggatagttcctgattccaatttttcgaagtcagtccttagtgggcgatttctgattccagggtgggaaccacccactcgaaccatactcacccttagatgtaaccatggatatatttttttaggaaagacagataaagtaatattttttattttatgggttaactatgatttaggtggag

SEQ ID NO: 94536 - DNA, 585 bp, Eucalyptus grandis
  Intron number 3 from transcript Egrandis_v1_0.016022m (loc us Egrandis_v1_0.004460m.g) derived from phytozome v7.0 (c hr-ID scaffold_8; pos 64146903 to 64147487 reverse strand)
cagaatcggcattgatcctgtaattttttctatggctttcatagttccaaggaccatatcttgtccagatacatttttcttcaaatagatctggaaatttgccaaattcatatgtccctccctataagtaggtcttcagccattatgtggcataggggttacatcacgtcaaggccacttttgacatctcttcatctgcaaagagttcttaatttgataaatggtagttgatagtatctttcattatagttctatgattcatagtattggctataaattctacaagaatattagggtgtccataatagtttgtaattcttgtaatagtaatgttcagtttttgggtttacgtttttgatgtaattctgttgtgctttggcgtgaaaatttttatcttatattgaccttattcagactcttgattgtttttccgcatctttcaccattgttagtctcttatctttttgtcctgtatttgctggttcatacacaaacagagacacatttgctttagactttttaatctcattctctgatgccacctgtctttcatggtgtgaagtgaacagtttctcttctcttctg

SEQ ID NO: 94537 - DNA, 699 bp, Eucalyptus grandis
  Intron number 1 from transcript Egrandis_v1_0.013841m (loc us Egrandis_v1_0.013841m.g) derived from phytozome v7.0 (c hr-ID scaffold_8; pos 44375655 to 44376353 reverse strand)
ccgacctcgtcgtcagcgaaatcacgctcggcacggtacgggaaacggttccgtcgttctggcgcttgattgctagaccgattgtgttgtgtttgatcacgcgccttttggcttggaaattccgtcgtggcgttgttcctcgagttgcgagtgcggcggtgtcggaagtgttgttccctggaactcggctggacagattttttttgttcattggagttattgagttgacttagatgctcggtgggcgtagtacgattacaaatgctctttgatgcggactaagttttaggacgttgcagttttacagaagctaggattgtgaatcaagaaaaaaggaagtagtaagattcataatttgattgtgaagaactggctaatcttctgcggtaatggagatttttatcaacatggatgattgctttcttgtttattgctggttgactttacggtttcatctcccaatgcaaagtctgcaaaagttatgaatggaaaaagcacatatgtctattcaagtttcacgtagctcgtctctctgccacgcctttatgaaaaggccttatctttatacttcttgtgtttcggaattttgattttattctcaatttgtggggatatggatttgctgtagtaagtggatctataaataatgggtgtttattatgttttatcctagataatgagtggtctgctacatttcag

SEQ ID NO: 94538 - DNA, 985 bp, Eucalyptus grandis
  Intron number 1 from transcript Egrandis_v1_0.052723m (loc us Egrandis_v1_0.052723m.g) derived from phytozome v7.0 (c hr-ID scaffold_8; pos 47076550 to 47077534 reverse strand)
tcattactggtatggatggaatcactctcctcttccgtattttgatcagaaactaattgaactagggttatgatgttaatgagcctgtcatctcggtagataaaggtctgcaaatccccaccttctcaggggatggggtggggacgcgtaagtttcaggagtgggtttcgactcccacgccctgcaagaggcagggcaaaagtctgagagtgagtgtagagtaggaatagagaatggctgacaaaaaaaaatgaagtgaatgaattaatcatttgtttcatgccttcaaaagttgttttattaatttatgtctattttaatattgaggctcaacgcgtgcaattagcgaattcgctcttctgatcttttcttctttctgtctaaaaactatgtacttggagtgttatatcaaaaagttgacttttactgtattttaactcacgttatctaccgaagatacctggaaataagggccaaaaactaattgggttggccggataagtcaacggggttaaagtaatacgtccagattaatctctgaagaacggccattgcgttttttttttttctaatctattggacaaaaaaaaaattgataaacttcgaactctagccgactaccgaattttctagttgatgcatgtatctacacatggaaaaaggcagtgatgtcctcagggaaaaaagcacctcatatgtactatatatgatgccttcatatcggactaccattataaacaaaaattaatgtgttacaatatagtaacgaatttaatattacgtttcaaaatatagagaccggaataagtgatgactatattttgatgactttgttttggtacataagattcttttctcgttctaagcatcgaattacacaccatatatatcatttcttcataattgcttgattgttgacgagagaatttttttgttctttcttttggtaggaaccgggcactttttgacttgctctccccacgaa

SEQ ID NO: 94539 - DNA, 881 bp, Eucalyptus grandis
  Intron number 3 from transcript Egrandis_v1_0.012046m (loc us Egrandis_v1_0.012046m.g) derived from phytozome v7.0 (c hr-ID scaffold_8; pos 436956 to 437836)
aaccctgtaagtaaaaggcagtgttctcgatgctctgtatgtggcttttgatgcagtttcccttctatgattaggaatatcatggctaccttctgtaacaataacggtagactctgaagtgaagttccaatatgctgttaccagtggaaagtcattattttgtttaaccgactttggatgttgacaagaggcggcggattaagttaaactaatcctgggaacttaggcatggggtggttcattgaggtacaacctttaatgtgcggggcctgaattttcattctaattctctggtttgtctggcgcttctgagagggggacttccaaaagtatgttggttttagccaataaacccttgatgatatgatgggaatttctccataaagttgattcttctctttcctaattacccaccagactttcaccttgctgagttttgattacgttttagctggtaaaatatgctaaacttctccatttctcacctttggttctgataatatacaatatactacaagaagaacgagttagagaatctctaacataatttcaatgcaattattttccgatttggtattttctgggtctcagtcttaatatggttgtaatagaagtaaattacatacaagttatctttaacacttctttctaattgccaatttccacgtgttacggtatcatggcaattcttggggcctagttttgtcaattcgtttttgtcagatcttgacttagatgaaacatgctgaaatgtgaagctcactgcatcttattattgactttgccttttgcatcttactttttgctattaagttacatacttatgaacttcttgtggttagttagtcagaaatcacgagaaggttggataaatccacaag

SEQ ID NO: 94540 - DNA, 1023 bp, Eucalyptus grandis
  Intron number 2 from transcript Egrandis_v1_0.018438m (loc us Egrandis_v1_0.015563m.g) derived from phytozome v7.0 (c hr-ID scaffold_8; pos 11294058 to 11295080)
cagattattttgtcgccatcaacgtcaaattcgaggtaactgctcgactatgctgccatcatatatcatatcgagttcagatttcatttacttagtttttcagtccaagcagtggcaccgtaccttatattcatcacaaacaggccgaatatatactcctgcagtcgatctgcttagccgagcattcgtacagtttgatacacagaacttttgcgcatcgaagagactgaaacgtttaaactttgtgtcacctaatttcatggtttgaaattattctctgagcaaaaactgagttgcctcttttttttctttttcattttttccctcttcaactccttttgggaactcgacagacagatatcgcacttaggcctcgaactctcagtccttgggatgaagaacctgtggatgaaaacagaagatgaagccaacgaattgtctgtatccacaataaaagaacaaaaagaacagaactgaggcacccgtacctcgagcatagagattccatccgtttgctaaggaacaacccaaaaatccaaaacatctctcaatattttttaaccatttgagtggatcaaaatcgcactgagttcacgggttgtcacaagaaatgcaagcattaatttacacttcctagagatcaaatggaatgactgctctgctttcagcattttcactaaaaaaattcaactgtcttccatggctttcaagctttgggaccacatgatgacatccaatcctactaagataagaacgtgcgttccgtttttcttcccttgtccttttggtttagtactgagaattcagatgaagaacatgtcgtcctacttacacatagtgatgctgttcatttgataaaaggtagtctgatacttttccagagagacccacactgaagacctacttgttattaaaaaaataaaaaaattagactctaggaaatctattatcatcctagttttgaggttgaaccatgaaatattctcagcgaaaccgctcatggtgtacagaacacagctccac

SEQ ID NO: 94541 - DNA, 684 bp, Eucalyptus grandis
  Intron number 4 from transcript Egrandis_v1_0.028445m (loc us Egrandis_v1_0.024849m.g) derived from phytozome v7.0 (c hr-ID scaffold_8; pos 36388581 to 36389264)
ctaaatacgtatgtgcagttacctttttttttaatgcaaattacttagtccttcaaggaaatgtcacgtggcttccctcctttacgtgattgagtggttctattggttatagcattattgttgtgtcacttatgtggtatatggatgttttaatctcttttatgtctgttatttggtagtggacttggaatatccattgcagtattctaaaaatttctgatttgctgctagtcttgtttctgctttagcttagaattggaaaatgattgacttgaccatttgtttaagcaagccagattattgtttttcttcaataaatgtttcataacttaaattaagctactgttgactcatccaccacgctttggtgaatgtttaaatcagccttcaacttaagacgcatgagatttatcttttcccgtgtcggctttgctaccatattaatgtctactgctcagggttacctcattttgctttgccttttgaaaaatcatcctaagataaaacttatagctgactcttgtggtatttgtgtataattagcgagccgagagaatttataagatgtgacagctttggaatttttgatcgttggagggatatcgcaatactttatagcaggtctgctccttgaggagatacaggagatactgacatttcttttatcgatctgtccaggcttac

SEQ ID NO: 94542 - DNA, 825 bp, Eucalyptus grandis
  Intron number 2 from transcript Egrandis_v1_0.015153m (loc us Egrandis_v1_0.015153m.g) derived from phytozome v7.0 (c hr-ID scaffold_8; pos 2384370 to 2385194 reverse strand)
tgcagcatatcaaggcaattatcactgccgaagaggttagtgcgtagcggcttgtgtctttcttagcggttaatgtctgcttattgagcagagcggtacttgtgtgatgtttggaagccccgtgtatcgtcacttacgttttggaagaacttactttggtttagcttgggatgttttccggtttctttgactaattcagttgagtttttccttcttgcatttgatgaagtttttatttatttttatttttatttttatttttattgcaatgagttctagtaccgttgactggaattctgaggttgctaaatgtttagtcgccgggccttaattagccgagcactaattttctccctggttcagcataacttgtctttcagttgcaagctcgaatggcaactgttcaacacagtgaaagccttcaattctggaattatcatgtgccttttccttttatttccagccaattatgactgaacacagctttctcgttatcctcaagtccttagatatttccttttggctgttcggctacgcagaccttttgcatgagcaggtgtctctgttttttatgtgagactacttaactagctaggtacttatattcatgctctttcccagagataaattacaacctttcttatgaaatacttaaatggttctgcaagaatggaatttgatgtcttctagtgggaaatttctttctcccttatgtaagaactaagttagttccgggtctgtttattttcatgttttatatcataagtagcgatggcacttgcattattggcttgtaggtgttgcttcgagacccatcagatataa

SEQ ID NO: 94543 - DNA, 657 bp, Eucalyptus grandis
  Intron number 1 from transcript Egrandis_v1_0.025957m (loc us Egrandis_v1_0.025957m.g) derived from phytozome v7.0 (c hr-ID scaffold_8; pos 73840245 to 73840901)
cccagaggcgcaagctcggcctatatcagcaacaggttccccttctcttcttctccctttctcgttcttgagctttttggggtgtcccccgattggttttgtcgttgctttctggttcgtggtttcctgtttcgctggttcttgcatttgaatttgcgattctggttctttttgtttcacttgattgacgaattgggcaacgggtttacggctctgtagtgtttggaatgaggtgaatgggattggttgcgtttctctttgagttgcggctgatgcttagatgatttaatgatttgggtttcgagaattagttccaatgagggattgtgcatgcctgtttgaagttctgtttccgtccttcgttcaattcgggctgcgcagttttctttgtaatgcacattggactcggtttggtccaattgagcggtaaaataaataatgtggtcgaattgcttgatgggtgcttagtagttagtatccatttttggataaggattagaaaatttgtgttgcttccagtattgtgaaattggaattatgggtgttgcaaagtacataagtgagatcattcaccgtggcaatggtgacttgtcaactccttttgctgtcacgctgtttccagctcgaggctgttattgaagctgaaaagcaagctgc

SEQ ID NO: 94544 - DNA, 323 bp, Eucalyptus grandis
  Intron number 3 from transcript Egrandis_v1_0.002208m (loc us Egrandis_v1_0.002208m.g) derived from phytozome v7.0 (c hr-ID scaffold_8; pos 5679554 to 5679876 reverse strand)
agaaagtgcttaaagttcctggaatagaacagaaggtaatgattgttttgtttttgttcagttaataagttgataattaatctttaagtatttttctgttaattaatgtttgagtgcgagtattgtctcgattgttacttattcttggaagagatttaaagcataaatgattcgtgtcatagatccatggtatggtggttgataggagctctcagatttgaggtggtttggggcatatatcaatttgtgttgcttctaattctgcagtaataggactttccacatatcttaaatgatttctcttttggttttccaggttcttg

SEQ ID NO: 94545 - DNA, 882 bp, Eucalyptus grandis
  Intron number 1 from transcript Egrandis_v1_0.002208m (loc us Egrandis_v1_0.002208m.g) derived from phytozome v7.0 (c hr-ID scaffold_8; pos 5680207 to 5681088 reverse strand)
cgtcagcagtcgccggcacacccccgatcgccgaggtaacgacacgatcctccccccctccctctgttctctcttccctcccctctcgcccggggtgggtggatctgggtttctggcgagctactccgtcgtgggtcgtcctcaaaatcgtccctttccccctcgattcagctcggtcccgttgcattgccgtcgatgcctaggctggctggatcttcccttgctccggcatgcgtttcgtcgatctcgcttctcgatctgatggcgaattctctgttttgtggattcctaaatttgggcatcttgcgcgggtggttgttatgagcgggaaatgattgtaaagtttggggctttgggattgtcggtgatctgttgcggtcgtgtgaatggggaatgattggaaagttttgcgcttttgggtggtgatggatctgttagaattacggaggagattgagatgttgagctcgcgtcgggaatttgatgttttgtaggagctgatctaatgttgtttgcaaggaaaatgagggtagagttgagcttttcgtacctttgaggaccagtgctgggggagtcaatgagttgtaatctgcggatcgataacacactactcggtagttgccaatctgtgtttcaataagtctatggcatttgggaattgggaattttttttttttttgattcaattgattcgtgctgcattgcagagagtatttcaattcggcatcaagacataacccttttttgatcttgtgttttcaattgcctatgttggaactagtgaagtttctatgcttgtttgaatttcttggccatgctctttgacttgcacttttcactatcatcaggctttggagaattactctaatcttttgaagcagtc

SEQ ID NO: 94546 - DNA, 498 bp, Eucalyptus grandis
  Intron number 1 from transcript Egrandis_v1_0.054475m (loc us Egrandis_v1_0.054475m.g) derived from phytozome v7.0 (c hr-ID scaffold_8; pos 17236890 to 17237387)
ggtgagtaagtaattgatgggacgcattgctttgccactgttagctggtgattgtttgttaattgttatatttcaaaccgcatgcaataaactaccactgaaagctgattggtattgtcaagtcggtcttttgaaatttgattgaagatacaaagcggagatataccaaacagcagactcaaaattcgaataaccaaaacttcaagctagcagattctttgaattcgattcttgctgtgtggataatgataaatttttgtcttcgatgaaagtgtggtttaacagttccttagtcattattatcttcaggcgcaggttcttcgtaattttcccttgggcagatgctgggcaggttcaccagatgtgctaatttcttttcatcttattatttactaaccttcttatgtcattttgctcatgactttagaggttgaattcctaccatggcttggaaatgttaaaacatgtttctctttttctgttgagtatttatcagag

SEQ ID NO: 94547 - DNA, 611 bp, Eucalyptus grandis
  Intron number 2 from transcript Egrandis_v1_0.000746m (loc us Egrandis_v1_0.000746m.g) derived from phytozome v7.0 (c hr-ID scaffold_8; pos 72325060 to 72325670)
cttcgtccagtatagcagggtaagtggttagttttatgatctcatggggacactgaatttggaaaatcgttgagttacttagtgttaccgacagctcgggataacattcaattgcttcttttgtgatatgagtaatgtaattcgactgtgcaaatccttatttagtcactcagcgctgaccgtagctttctgtggatggacacttgtatgtatatttgcctttacactggatgtctttttcttcctttcttcttctttgtttgtttttgattttctcttgagagagcatttgatttttttaaaggagagaaaattaatttggagctgaaaataaacacacatgaggacctgttatttgtcttcatgcacttttgcggtcgcacataccattgtagggcaattatgtgcatacacatgcgttgaaggtaaattgagggggggctggaatgctgtctagcttataaggagctttccaacttcttggaacttaagttgggtttcacatgatcagtgctcttttctggttgaaaatttgggtttcagttgcctttggtatgtgttttggactgattgattttgttattggtgattctttcgatgtctgcaggtaa

SEQ ID NO: 94548 - DNA, 1031 bp, Eucalyptus grandis
  Intron number 3 from transcript Egrandis_v1_0.024496m (loc us Egrandis_v1_0.024496m.g) derived from phytozome v7.0 (c hr-ID scaffold_8; pos 14124655 to 14125685 reverse strand)
gaaaggtaatgaccatgatgcttttggcggattccaacacttgagggccactgcaaaacaccaacttgagtcaaattcaaaatgataaagaattgggtcttcccaccaggattggctcgtgtagttgtagtctatgctacttctgcaaaatgtcctttcatacttttcgctaatttgcgcatattgcctgtttaccttccgtttcttccaggcaaattgacttcctcatgttctataaaccttcaccttccataggtccatccaagcatttagtgaatccatgttttacagcttgttctccttcaacaaaaggtcctttcagatttagacacagttttctgtacaatagcttgttccctttccataaagccactccctttccatgctttagatgtcctgctgttaatcctatttgcaaatggctcatgcctttgttctacgcattcaaaaaaattagtaacctttattattttgccaccttccaaacaccacatggtttttctaaaaaatatcagcatgcctgataggcattaaggatatataggatcacaataattacgcatgggaaataatcctctgcattcaatgttcattggattcgtgtgtgcatatgttaccattgtgtataagtagagatgttggatatttgttcctttatgctagcagaaccagtctttggtgccagtgagttttgtttgactaggttgtccatatgacaagccatttagtaatgtgacttcgttcctattagcctttggggtgcaataaatcttctcagctttagcaacaagctaatagttttctatcagttttcctcccttaattgattcaatccgtggataacagcccttgtgaagagataaaatgcagtaacgttttatacatacttttcttaggggcatcctttcgttctgcttcatctggttttcgccatgattctattacaaccagacactcgatacttcaaagaatttaaaaccttcccctcctttccaggtgcttgtagtccaagtgaagagtggaaagcgcgt

SEQ ID NO: 94549 - DNA, 688 bp, Eucalyptus grandis
  Intron number 1 from transcript Egrandis_v1_0.051023m (loc us Egrandis_v1_0.051023m.g) derived from phytozome v7.0 (c hr-ID scaffold_8; pos 63688226 to 63688913)
tagtgagcctccggcgagctcaccggtgattagtggtagtgggcggtgaacggtggcgaacggcgcgaggggggggggtggcagcacttgaagaaagagagagggaagaagaacaagaaataagaagaggaaaaagaaaaaataggttgacttgattctagaattgttcaagggaacaaagaatcaatttttctacttcttgattctattccatatctacttccgggaacaaaaattttaccaaacgcttttctgttccaaatttattcctgggaacaaaagaacagaaacaaacactatttggcaagttgccaaacaggccctaagcagctcgatgactttaaagtccaaccgtctttaaaataatagtgctgtcctcgcttttagtgcgtggaaattttgtgtcttttcttgagtcgaacgtccgagagaaaattctagagatgtgctggtgctgcagcacatttcatttctatctaacgtgccgaacaaaagattaggaattcattcagatttctagtccaaaatcggcctaccaatccagttaaagaaagaagcttgtgaatattcatagtacattccggcctttacgtcaaaaaattgtccctctagaatttcttttctttgttttccattttgaactaaatttgattctttaatgatttacatgtactaattacaggaattt

SEQ ID NO: 94550 - DNA, 767 bp, Eucalyptus grandis
  Intron number 1 from transcript Egrandis_v1_0.026152m (loc us Egrandis_v1_0.026152m.g) derived from phytozome v7.0 (c hr-ID scaffold_8; pos 5001041 to 5001807)
gagttgcttcccaagtgaggccaaaaggtaaaagaggaatataaatgtgtgaaatggcttttatcttttggctctttgtgatgataggcatgaaaaaagctttggtatattgtacctgttgttgttatgttggttatagcagaaagttatgcatagtatttctaatcattctgtattaaatctgctggcctttcattgacatttagatgactgatccatttgtttgtctaaaatctttaggtggttttttatttgtcatgaatatgctcagatcatgcatcatttcaattaaggcattagttgctattctatttttctgttttgtaacttcctttctgctggtttgtgatgaaccaaagatgagcttcatcaaatgctaatctagcagttaagcatgatggtatcaggatgatcagatggactgaagggaactttgatagaggacacttttctgatattggaaacttatcttcctccttattttgataaataatgaaaccttgttgaaaataaaacatggtaaagtcaaagtacaccagagctgtacatattaatgtagctcaggttcaaccatgaaacaaaacagagggaagaagaaattggaagaagaagactcttcaagacagtcctgcctgaaacaaacttatgacattttcttaaaaacaaaaaacgtgaagctcttttgtcttaccttccgtgttataatttggagagattgatgcaaattgacaggtgcaccaccttcaaactgggaaaaagttcttgaa

SEQ ID NO: 94551 - DNA, 937 bp, Eucalyptus grandis
  Intron number 1 from transcript Egrandis_v1_0.025444m (loc us Egrandis_v1_0.025444m.g) derived from phytozome v7.0 (c hr-ID scaffold_8; pos 8991674 to 8992610)
aacagttggtaaacagtaacaatcatccatgttgaactaaataatgataattttagatggaagattaatgaagacagattttagactagtctaaaaaatttatgatagagcatggatggtagaaattatcaaaaactcatccttcactaatagatttgtaattggattcaaataaagaatcattggtcaatcaccgaatcacacaacaacatcagtaataaacacatgccaagatctttatctatagttatggctttgtctttgggggatgtgcgcctaagttcggcattcctaacactatcactgtataaaggcaacataaacattttggaaaaactcaaatttgacacctgtgagaacaagccccgtagctaatgtgaagtgccaaaactttgagtgaaaaaacgttgaatgggtatagatttgacacacaaactgttgcaaatatcattgaaattggaaggcgaaacacttatttattaaaacttcaaaatttagaattagatcggagagaaaagcttctaaatattagatcgggagagcaaagttttcagatctaaaactagattgagagaattaggtaataaacaaaaggatttaaaaggaaaaggaacagggaggggaggggagggatccctccgaaagtggaagagacgaaaaaagatgtagagagagactaaaatctaattagctcaccttgaataatttaatttcgatcatcatcacatggattaatccttttaggtagtcgacgataaattgaaacgagattcaaaatcgaaaaaattggcgacccaatcgagactcaaagcgccatatctcacttcttccccattttcttcatcttcaccgtggcctcgtctctgtcccatttccaactccggcgaaccctcgccgcgaagcgccactccatcaccttccgatcgccgggcctcta

SEQ ID NO: 94552 - DNA, 696 bp, Eucalyptus grandis
  Intron number 2 from transcript Egrandis_v1_0.045902m (loc us Egrandis_v1_0.045902m.g) derived from phytozome v7.0 (c hr-ID scaffold_8; pos 48716165 to 48716860 reverse strand)
gccaccgaggtaagcaaattaaaaagatcaaaggagtacttgaatagtcgtggacattttagtattgagttggtttttcttattgcctgtagtaaaatttttatcatacttccgttgaccctggtgagttttgttagccctctaggaatatcttttgttttcgcactccgagaccaatcttaaccatgaattagacaacaaaaaacaatgagagtaatggttacggttaatgattattcctcattttactgtacctaaagcactcgttagatgagctctagcaatagttttcacataaattctttgaaagaaagcaatagtgcaattgggatatcctacatattccgatttctcttccttatgaatgtattcaacaagatcagagtacgagagaaaaaattattaggtattttaattaagtgcacactcgttccctattaggcatggtgtaaaaaatggaatgcgcatttacatactaggaaacgacaaatatcagcaatatacaatagttgcacagccaattacataaacaagtagctacgacttttttctttgtcaaagtaactatgacttttattaggatattatactaacaacttattgcaattgtttcttattttcggtagaaagatctaacatactaagtctatcgctgatgtagggactcatagaaaaagagaaactggactccttcaa

SEQ ID NO: 94553 - DNA, 457 bp, Eucalyptus grandis
  Intron number 1 from transcript Egrandis_v1_0.020095m (loc us Egrandis_v1_0.020095m.g) derived from phytozome v7.0 (c hr-ID scaffold_8; pos 40057231 to 40057687 reverse strand)
ccgggctcttacgtacaaagggtatgcaataaaacactttattttgaagattatgaaataaaagaaagtagctgtagaaaatatttttgagaaacattagttatatacagaaattattgatctaagagtgcgtcatgagatccaagcttttggattgcgtataaataatattttctcaactcgttttattgacacaagctgatcatagaaagggggagatttattcactaagtctattactatgtagggtttataccttgtaattgcctctatcatcgtatatcttatttaagaagcacagttaatagattgataaatctttcaattccattccatgcaaatttcagttttgcagtccaaaagaaaaaagacaaaaaaattcaaagaaataatttgaggggtcttgcttaatctttccatagggagatcaagcttccatcattggaggtgccatcga

SEQ ID NO: 94554 - DNA, 906 bp, Eucalyptus grandis
  Intron number 1 from transcript Egrandis_v1_0.038950m (loc us Egrandis_v1_0.038950m.g) derived from phytozome v7.0 (c hr-ID scaffold_8; pos 66737002 to 66737907)
gttggttacgtccacccttcttcctttgagaattcatctcgagaatatcctttttgagcatcgtccgttgcctgtttgagcctccgcaggtgaagtactccagagagcccgacaatcccaccaagtgtaagcttcagctcgatcacccccttttcctttttctttagctcatggaaattcagattttgttgagttgcttgatgaatttgaatgcgtacgtgctgtgaacacttagggaattaccttaatgaatttaactcagtatacaaagatgtattgatctgattgtttatatatttgcacaatgtgactttccgtgcacatgagagagtgaaagggcagtacagagttttttcattttgcctcgatgggaggtgtctcttgagcctggtgtgagcatccagtgattgtacaaaggttagccgccaccagagaattcctcaacattctcgagctgagttgagcgtgagttgcttaatgaattcaaaattttctttcaacatctataaaatccatcttttggcagcttaatgaatttaactctgcacacagagatgtatagatctaattagtcatgtaattgcgcaatgtgacttttcgtggacatgagagagtgaacagttgtgcagagagatgtctctcaagtgtcgtgtgagattttctaattcagcatcaagtgattgtacaaagttttgccgccaccagaaaattttgcagcattctagagtttgagttgaagttgcttaatgaacttaaatgcttctgtttatgcctataaaatccgtcttttggtagctacgcactcgagcaagttatgccttagtgctgcactagtgttgaatctatatttgtgatttttatcatttttcagaacacaagagagacggcctttgcaatcagaaagct

SEQ ID NO: 94555 - DNA, 821 bp, Eucalyptus grandis
  Intron number 1 from transcript Egrandis_v1_0.006573m (loc us Egrandis_v1_0.006573m.g) derived from phytozome v7.0 (c hr-ID scaffold_8; pos 23851562 to 23852382 reverse strand)
tgatcgatcgcttccggtggcgaccagccgaatcggtgagtgcgtttcatcgcttcttctcagccgtttctctctctctatctctctctctctctctgtctgtttcggtagcaatcgatggggcatggcggcgcggtcggttctgcatttgaattcgcgatgagtgattggtgttgggttcttcttcgttccatcccggttggttttgggtcgcgtgccggtcggcgggctcgagctgttgattgatgcgccgtgtcgatgagctcatcatcttcatctgctcgcttgcggcggccgcggagtattaattttgatttttctttcttgattatcgcaaagttgtgttctttcttgttttgttttttgtttgcgtttttacccgttttttggaaaaaggattttaatgatacccttgaattttgatttcatatgtatgtgtatctccctcctgcggattctgttcctatcgcgcgttgttgtcgtcgtcttgtctctggttcgacgtgtttagtgtgtttgcaaatccaatggggcgggaattttcggcgttagagaaatgcgtcgggcgtcgttttcgcatgagtaggttcagaggatttccctttctgggatgtgactgtctttcttgtctgtggttttttctgtgtgtgagatgttactgttaagtagactaaatgtcttcgtacttatggtgtactgaattgttgacatagccctccttcttactgttccgtccgcggttctaattattcatggttatagcgtgccgggattggtaagccatccttctgattattccctccatggttgttgttctcagc

SEQ ID NO: 94556 - DNA, 434 bp, Eucalyptus grandis
  Intron number 2 from transcript Egrandis_v1_0.021754m (loc us Egrandis_v1_0.010817m.g) derived from phytozome v7.0 (c hr-ID scaffold_8; pos 46364627 to 46365060)
ctgggagccatagaggccattaacgtactaagaaggttcgcgactggctcattttttagattcagttctctaatgcatggttttcagtataggagcaacaattgaccaccttaggcttgaggattctgtgcttattataaaaacaaatgctggactctgcttgctgtttgtgaattgtgaaataaattgatcagcaagaacaagatttgttaggagtagcatcttgccccaggaactgaatgatttaaacaacaatgttctcaagtttgttccttgactaagtatgctatacattggattctgtgtatctttggatttcttcacttgtctgtgtttcatcttgttaagatttgattgaatcaattatttttttcttctcaaactagctaatgttcccaggttaggcttcaagccgaaaagatcactggagatta

SEQ ID NO: 94557 - DNA, 786 bp, Eucalyptus grandis
  Intron number 2 from transcript Egrandis_v1_0.023969m (loc us Egrandis_v1_0.018465m.g) derived from phytozome v7.0 (c hr-ID scaffold_8; pos 36225155 to 36225940)
gaacgtgagtaaaaaccaaactcatgagtcttgatagtagtagtgaaataatctcacgtagggaaaaaaaaaaaagtcaaatgaaagctttttcaacttgaactttgcctagtgactaaattgcttattttgcagtctttaacatgctaaaccacaactggatttcggagttagttcatgagtttcaagtgatttaattttattattcttaattagatgatctaaataaaagaatagatgatctaaataaaacgattatatcaagataaaactcttatctgtggttgtcaataatagcctttcaaatttgaggatgcaagatgtaatcatcaaggtggaatctgacccttttttgttaagaatctttcagataagttcgatctgagtgcgaggcatgagttctataaatcatatcatgtgactgactgcaagcaactatctatgttagcatatgtagcatttttcatatgatttttctttgattgaggtggttggctagtttgggaaaaatcatggacaataaatcgttttttcataccgaaaatcccctctcttaggctataggatcgagaggtggcttgaaaatagaagaagatcggaatcgtatccatcgtcaaaggttgcatcgctgcacgtacggtggacgtgcatgcaacctttcccgcatgcaggacctcttgctattgaaatcttatatcccctcaaaacgacgatgcgccgggcgatccaattcagcgattttgatccgtttcgtccgcatatctgcagttcttagactacagcaag

SEQ ID NO: 94558 - DNA, 898 bp, Eucalyptus grandis
  Intron number 1 from transcript Egrandis_v1_0.012542m (loc us Egrandis_v1_0.012542m.g) derived from phytozome v7.0 (c hr-ID scaffold_8; pos 46843230 to 46844127 reverse strand)
ccgcctgcgggaccccggctttcactgctcctgaggtttgtttgtggtctctgatgaatctgttaagtacgatgcctggtcaactttacggtagttaaggattggctagttgttgaatgtccagtatgtggctgtgaatatgcttcgaataatgtggttggagttcgatgacgccaacggacattacgaggacgtaattacgtaagattaacacatataaacttctctgatctaaagaaaaatcagtcactctagtctataagaacggatgaatttatcttgtcgagttgttctatatgaactcctgttcttcttctatctgttttgctttttcgctggtgacaagttcgatttcaaaacacggtatataaagtttaggacacttccaatcttgttacgggttgtctatacagtgcaatacaccctattgacttgcgaaatgaattcatggtatgattgaacacttctgatcgtcttcaagactcattttgggtgtggaaagtatcgatgagttacagttatagcaagtagtttttttcccatttcttttgagtgtggaaagtgtcagactctatttggcttgaatcgagttgaagtattgcatacttaatatactctgcttggtttcatgggagatcattccttgccacataattgaacctagaaagtatcaaaatgagaaatatctatcccggagcccaccatatataaagttgatcaagatgcctcatactatcaactaatagataaattatgttttgctctattatgaactaggtgctatgtcgatatcgacatcttgctgtactatgaactaattcgttcaacggtttacatctctcctcgtttccattctacttcaggttatttgccggcgtggctacgagggatccaaggc

SEQ ID NO: 94559 - DNA, 713 bp, Eucalyptus grandis
  Intron number 2 from transcript Egrandis_v1_0.018017m (loc us Egrandis_v1_0.018017m.g) derived from phytozome v7.0 (c hr-ID scaffold_8; pos 6144553 to 6145265)
atcgcatcgacactcgcgtccccatcgaagtcactgtatggatccctcatcaaacctttacctctcttaagacattctccgagtgatcagttgctaaattagattggtgttgatgatgcatcatcatcaagatatcgttaaatgagacttgagttcagatgatagcagagttcaagatgcggcacggtgttgttcaagggattgtggaatttagtagtttatatggcttgagtttttgttttatgggtcaacaagcatgaaaattatttgaattctttatttgagatgaaagtgctccagggttcatcctgatttatatctgagaatcacatttgaagttgttcctggactttctgcggagacatttggttcttgacatgtcattgtgaattatgacaagtacttggaatacttctttaatttgccttcttctgtaatagattagagagatccacctccgttaacgcaataccttgcgactttcttgttgcattgagatgcacaaagattgactattttttgctgggagctacctagtcaaattgtaatgtttgagaagtcagggaacacaaactattcaggcatcaggacacaagaaaaactaatgatgttcaataatttctggacttaacatgtaagatcttgacgattgttgttttttcatgtgaatatgcacagattggagagctaaagaagctcgttgaagagggtaa

SEQ ID NO: 94560 - DNA, 1041 bp, Eucalyptus grandis
  Intron number 1 from transcript Egrandis_v1_0.007122m (loc us Egrandis_v1_0.007122m.g) derived from phytozome v7.0 (c hr-ID scaffold_8; pos 41906553 to 41907593 reverse strand)
caccagtgcggtggaaacgttggtgactcttgctcgtaagttatctcgcttccttgttcatcatgagcgattgtaattgcttttttaatctaatttagcttgctctgctttggaatatcggaattggggtaatatctggatgtgatgcttgggtaggttgcaaattgcttttgcgtaaggatttggtatacttggactagatataggtcgtatttgtgcaattttttttttttcgaaaccttttttagatgtaaaaatcgttttggaagggatgggatcatgttgaaacagatattgaggatgctgatacgttgatgatataatataaagctgctttcttgatttcatctctccaattgagaggattctgggatgtcttcgacgttgacatgataacagtggcatgctgattgttgctgtgcaaaactacactgtctgtattatctgcttggtggggcatggtccaggagagggcgatctccccggtcctaattatagatgaagtgtgtcaacacacaaacttaaagagtttacgattattggatgagatgcaatcccgtttgttccaacaaccaccacattcctgaggattagatccttagagagctatacagattcccctgcttggaacatattggattgcacgcataaatccttggtttctaaattgggacccaattttctggaccaaaagaaaattggggatttggtcttggtgtggttcttgcgtgtagttattcttattgggatctaacttttatttatgtacttaggacccagtgatataagttgaatgcctgtgttgcaaattaacgtggcttgacattgctcaggatgactatgagtggcactattattctgtcagtaagctttaagaatgagggcttttcgtatgtttcgagtcactgtctgacatttgaactggtgtgcattaggaattgtttgtctttttatccatctgtggtgtttgatttttgttgtgactgggctgtttttcttctttcagcatccctctaccaaagtgggctgtggaagaagttg

SEQ ID NO: 94561 - DNA, 395 bp, Eucalyptus grandis
  Intron number 1 from transcript Egrandis_v1_0.000821m (loc us Egrandis_v1_0.000821m.g) derived from phytozome v7.0 (c hr-ID scaffold_8; pos 54642354 to 54642748 reverse strand)
ggacttgcaaagcatccccaacaggtgattgcctctatcattcctttgatgtgccttgtaccattaaaacttgatgtggttcaattgctttcttttctagatttgtgttagccttgctgaaattgaattttatgctattgaaattatactgtaaaaatcacaaccaaacaacttttttttttttccaatttaggtcattcattaatcatgtgtaccaatgctaattcatctacattggagtaaatccttacataacgcatttcacttaggtcttcagttttcactttgttcttatcgaaacatagtttgattcaagacaattttctaactcattgccatttgacctccaacaaacattagggaagaaggtgagatcgcaaaaacaattacccagg

SEQ ID NO: 94562 - DNA, 495 bp, Eucalyptus grandis
  Intron number 1 from transcript Egrandis_v1_0.021382m (loc us Egrandis_v1_0.020502m.g) derived from phytozome v7.0 (c hr-ID scaffold_8; pos 42301788 to 42302282 reverse strand)
tacgcggtcaagaggtaaagattgtagtttaaattaatctaaatagacgttcgatcttgattcttcataaggatatatgatgcagaaaattcaacactctactaaaatttacattttcaaaaaaaatacctccaacgaggaatgtccaccttacttttatcgagttggaactaatgacaagatcaaaagcactatcttctccttcaaaaagatttgcaccccgactacatagacaacatgtataggcgtgattcgcgtaagttggtccggaagataattgtatggtttgtaaagcgattttcgaaagctgaatgagttttaaaaaacccagacatgatattcgcctctgccataccccaaaaaaagaaaagaaaagaaaacctaattctttattagcaggaaaaaaaggtaatcgctcgagttcaagtatatatttacctatgaacactatgtcatgcaggcgagtattgcccctgggacggtgcgaggagctaa

SEQ ID NO: 94563 - DNA, 461 bp, Eucalyptus grandis
  Intron number 1 from transcript Egrandis_v1_0.025563m (loc us Egrandis_v1_0.025563m.g) derived from phytozome v7.0 (c hr-ID scaffold_8; pos 11090769 to 11091229)
gcaggactgcacgtgagtcgtgtccgccaattcttcttcggtgtaattgctgagtacccatcttcgttaatcaattgtttgtgccattaaagaggtgaaattgacaagctctctggtgttcctctcactcctcatctttaaagtgggacccctttctgaaatcatattagtcagcggcaaattgctgtagcatactttcgttgattcatcatttgtaccgcctggataatttacttggtatggcatggggtttgttgggttttactcaggtcaattttctggcccttttttatcccaacccattttgaaatgggcatttttctggttgattggatgtccatttgttttctggtatcttcaggtgaagatgggctaaccattctacttttgcttttgaggtttgaatgttaaatgcgactttcgtgggctaactgggcactctgttcgtgtgcagggtcaag

SEQ ID NO: 94564 - DNA, 1040 bp, Eucalyptus grandis
  Intron number 2 from transcript Egrandis_v1_0.025563m (loc us Egrandis_v1_0.025563m.g) derived from phytozome v7.0 (c hr-ID scaffold_8; pos 11091302 to 11092341)
ccttttatttcttctgtaaaggtttgcaaggagaggccttttctcagtagaattcttttagctgcgcgttatgtggttcagggttatcaatctgttgccttagtacaactaaaatgttaaaagaaatagcttgtttgattcattatttccttttattctttcttttgatgtcaaattgagggatggcgatcttagtgttcttcaacttcatagtttgtggtttcacaccaccaccaccacttgttgaagccctgacagattagaatgttgcggataatggatgctaagctgcggctatataatgatcttgtatctagggatgccctgatttctggttttggttgatgttccactactctcataaatacttgctcatacctgtcttggatattgatgggttcctgatatgaggattgacgagcatggacttgggtatatcatgttgggaagttttatcttcatttttggccatcaaaatgttggaggagtgaactgttaactctggatggtatgtgctaaggtgccatacatagctcccttctgcatctaattcggtttggtaattgtggaagcatgctgtgttctactgtaagcttcaaaaagtatgtatgttcctcttgctcaataagaaaaagcacctgcctttgaattggccaaaaaactgtcggatccactacaggttgagttttattgtcctcccttaattgtgtggggtgggcttatgagcgtccaatttggctctgctgccattagagagacatgctgagtgaatccccagtagtttgccttactatatttctaactttaagaaagctacatgaatatataaaatgtggatgtaagcttccatacagagtatcatggccactggagtcactaatttttattgcttggtaaaatacttgtggtatctattccactttccaaactgaccgaggaaactgttatagttaattggcttgcttctttgcttttgaaactttggtggttgatttcaatatacagatcttggaggataaacctgatttatcaaggtggtc

SEQ ID NO: 94565 - DNA, 603 bp, Eucalyptus grandis
  Intron number 1 from transcript Egrandis_v1_0.012642m (loc us Egrandis_v1_0.012642m.g) derived from phytozome v7.0 (c hr-ID scaffold_8; pos 68732401 to 68733003 reverse strand)
ccgaagctaccgaatcctgttcaccttcaacccaggcaagagctttttcttctgtttatttattgcatctcctgcttgaatttatagtatacacatattgaagtggtgattcagaccatgggggaagttcattgaggcaatggatactttaaccttgtagtgatctccaagtctaaaattgtcgcactctttggtacaacaatctctatttaattaaattgtagtgattttgaatgtattgtaatcatttttggtccaacagtttctaacaaggtgttagaaatttgtaaaataaaatatagggagttgcttgtggttattggtaaaacatgcaggatgtgtcattgtgcttcatctgaaactgagagggttagtctaaaatatttagtggtgtaaaagttgttttgtcttttttcgtagcttatatcactgttgggaaggacataagagttttattcttcttttgctttgtctataccttgaaattctgcgatttttgaacggttaattataaggactatcctgtactgtaaaggtttcctgatgatgtgcacttctctcttctcagcaatccaggtcttggtggatcccggagcctgtggt

SEQ ID NO: 94566 - DNA, 466 bp, Eucalyptus grandis
  Intron number 2 from transcript Egrandis_v1_0.052019m (loc us Egrandis_v1_0.052019m.g) derived from phytozome v7.0 (c hr-ID scaffold_8; pos 25292838 to 25293303 reverse strand)
tgaggatcattttgatcggccactccgaatccaaagtacagagctgccttcattaacattattatctccaccttcgaagaagaaaaaaacaaacgagtgcttgtataagcaggcagttggaggtagctcatgactttgcactttttatttgaacattatgaagcaattttaacatttttgtagtaacaaaagttttatcttaatgcacgggatttacctactaaatgatctgctagatgattagtcagcgtttaagcaagtggaacatacacagcgtatgttgtcttatagaagtctgtcaaaggtcaaagggtgacacagatagttctagttataacaggatttcagggtgacaaagcaattcctgcaaccaaaaggtgctatatctaactcacctctaaccgatccttaatatgttgtattcatatgtttgaaattgcaggtggtgcaagcaatatcgtctgcg

SEQ ID NO: 94567 - DNA, 774 bp, Eucalyptus grandis
  Intron number 2 from transcript Egrandis_v1_0.017123m (loc us Egrandis_v1_0.017123m.g) derived from phytozome v7.0 (c hr-ID scaffold_8; pos 45898137 to 45898910)
ttaccaggtcagcgaaagttaacattatttcatttctgtatcgatcgaatgtagaagtatgcatggagacaatgtttagagcacaagccctgtgcactttggtgaatggttccaccaattatatactagatgggtagacctatttattgaaatttaagctataaaatgatcttgcaatctgctttgttagaactgttgagaagtttgtgctgaaagacaggatattcttgttcttccttcgcccatctctgtccattccgtaatttctagaacttgaggtttgtgctatgtaagtgttgtcattagtcatattttaggtccgattcataagggttattaagtcaaagaggaataagttttcaaaatacttgcaccaaatacagattgtagatgtctatatatcctatgtaggtatgtgctatgtcatcatctcaactaaaggtgatcatttccataattggtttgaaatggatgtcctttcatataagatggatcttggaagcatgcaaaatatctggtccactgaatcacgaaggaagatattaacctgaatttattaagttgaattatcgtgaaatgttttatgttcagtcttgaagtagtttatatatgtttctagctgaagtaattataagacaaatagtgatgactagtgccttctgatcagctgaaggtgaacaaaagaattattcccccatcccttcatttgctcttctggtgtttttacccttcatttcagctgccaacaactcttaaaccaggtgtcacagttgt

SEQ ID NO: 94568 - DNA, 958 bp, Eucalyptus grandis
  Intron number 1 from transcript Egrandis_v1_0.017687m (loc us Egrandis_v1_0.017687m.g) derived from phytozome v7.0 (c hr-ID scaffold_8; pos 41721964 to 41722921 reverse strand)
tgcgacgtcgcccacagttcaaacctcgtattctcgtgagttttccctcttttctcgtacctcgtctttccttggtcttcagtcgtttatagtgtctgcaaaaatgttatgggaacataactgcgggtgcgaaaagataacatccggatgcaatcgattcttcgtaggacggctaaattggggtcaagtttttgtagaaaaaggaagactttgagttgagagattcatagtttgatgcttacccttttgcagtcaagcttctgtggtgagaactgagcgaagtttcggcatctttgtccttatgattggtgttgtccgatttatatggagcttattgctgatgagatgatagatctttccccttttatagttaatattttaagccgattaagcgatgggtgtacaatcactggggtttatcgaagccagtgtttctagaaactattttttgtaatatttcctcgagctgcagagatttttgaacgatatatgaagtacaggaaagaaacggatgagtaagtatgaaaagaagatggcagcttttttagcatatgcaatttcatgagatctttgttatattctggaccctgaaaactgtatgattcttctcctcccctccaaatcgctgaatgaccacaataacgttatactgaaaattttaagcttcctgaaaattatcttcatggatattgcaactgaggttgaaaggcactccttgtgggccaaaaagagttacaaaagattttggtacttttccatgtaaggggagaaatataatcatgaaacacttgtttcaggagattgcatacttttcctaattgttgtggactttgggctgcactaattttgacaaattagcgtgagttttgttatttttatttcgggctcatttggttgggttggcttagtgagaatcagactataatgattaacctaatctttcttttattttagctag

SEQ ID NO: 94569 - DNA, 839 bp, Eucalyptus grandis
  Intron number 5 from transcript Egrandis_v1_0.024989m (loc us Egrandis_v1_0.024989m.g) derived from phytozome v7.0 (c hr-ID scaffold_8; pos 40635227 to 40636065 reverse strand)
taggtagaggtctggtttcagaacaggcgtgctaggtaattgatagttttgagttctttttgcccaaatacatggctttacatctgcgtctcatctgcatcattctgatcattgtggaagaaaaatgtcaggagtgggagagaggcgggtaggggtgggggtggttggttctctcttaatcatttgatggtagttcgacagcgaagttgtttttctttatagtgagtgcatgtaatctttgggtccacatgtatcccagttgggccatcttgcacacgaggtgtgtgagcgtgtagcgggagtccggtgatgtgacttgtcacttaatctaggagtacacttctcgttctcactttagtatggagcaccgatatgtgggatccataaattctaagccgccaggggaagaagtgaagttattagggagtactcaaatacctaaaattttgttatgcgagggccccagtttagattcatgcactcatgatttacaatgcagctctggaaagctctgtttctagttaggataatgacgttgggtcttttgcatcaaagaattggtttgatgaagcagcttctctatgttaagtttgagcaaatgtgcaattcttttgtctaatagctgccatcttgattttcttaatcacatggaaatgggctgaagattgttattcataccttactagattgagctgataatgtgttattatcatgctgtagtttggcaccaacaatctgtgtggggtagctctgtataaggatgtaccgtaacatctttttttcttttttaccaatttagtgtaggactaagacgaagcaaactgaggtggactgtgagt

SEQ ID NO: 94570 - DNA, 483 bp, Eucalyptus grandis
  Intron number 2 from transcript Egrandis_v1_0.024989m (loc us Egrandis_v1_0.024989m.g) derived from phytozome v7.0 (c hr-ID scaffold_8; pos 40637138 to 40637620 reverse strand)
cactcgaaatagtacaaacaaggtacaaccaacatattttgccagcaggctatcattgttttaattaattctcttgaggttcttatggtacctctgacccctagtactatgatcacagtgttatctgtgggtttgttgcctggctatgctattgatttgttgatcattgtgttaagattttcctttggagttagctggtcaaaagacccttacataaacagactgaaaagttagcggctttcttgttctttcagcaatttaatttgaacatgggacatgtttttcttgtgaattactaaatcccattgctttttgtttagagctttttctgccatcaaattttaccttttcggaagaactgattagaccttggtcctcattgatgcagtaataaaccaaagcctgcatatctttcaaagattttgattgcacttttaagctatggcggggttcctaatgaatttcttttggacatggtagaga

SEQ ID NO: 94571 - DNA, 776 bp, Eucalyptus grandis
  Intron number 1 from transcript Egrandis_v1_0.006767m (loc us Egrandis_v1_0.006767m.g) derived from phytozome v7.0 (c hr-ID scaffold_8; pos 66219112 to 66219887 reverse strand)
aaggtaccctcgtcgaaattggcgttttcctcttgataatacacgttcggttcgcaatgcccaccacccgtaatgtagtttttgaatatggtactgcaattgtttttctttggcatgtgtaccaaaagttttccttttccttttccattcctgtactgttgctatccgggttattactagtttgctgtgcgattaatgttttttccctctcttttttgcctcccgtgaaggttgtttctttcaaattgaggcactgtagcgtagtggctcctttttcttttgttgtgttgatattactttttccaacccagtgaagcttggattggttttgatgggataattatgatgcaggaataaagattcaaaagatctttttgacgtaagatgatgcatatttctctctgtttcaaagggtcaaaagggaatgtgaattgaatttgataggagtagatgccacagaaaagattttgatatttgcaaacagaatcagctgtagcttattttcattgacccttttgatttatacgagattagattttcgttgaagttggttcgagaggggtaggataaaaaaaaacaagaagaaatttcgtcgagctgaacaggagcattatgaaatatgagagtttcttgcacatcttcttctgcctaatgaatgtatctctaccttgcaacttcagtttttctccactgatgaggaacttgattcttaacttattattcggctcttgttaatcataggttcagtggctacaacaatcattccagttgaaaat

SEQ ID NO: 94572 - DNA, 720 bp, Eucalyptus grandis
  Intron number 2 from transcript Egrandis_v1_0.021436m (loc us Egrandis_v1_0.021436m.g) derived from phytozome v7.0 (c hr-ID scaffold_8; pos 48019759 to 48020478 reverse strand)
agcttggagggtgatttcttaggacctgtttcatagtaagtttgtcacataaccagcatgtctctatgacgcttcttcctctgtaaatgaatcacttttagaggggttcttctattttgtagtagtcctgctggttgtgacacagggagggagttgcatactgcaacctgttcaattagctaagctaattgatcttttaagcattgcggttggatgccaccagatctgtcaattaactcggtttataaactggctttagcaagttgaatagtgatgtttgtacgatatgtgatggttaagattccccttcttgatgttctgtatgctctaactagtgatccaccaatggtttccatgagtttttctttctgaggtcctttgatgatgatgcatctgctgcggactaaggggtggacctttttataagagtttggtgtagagagctgacctgttttttggccattattacctgttctggcaaactgccggttcctagagattagtgcatcaattgtctctcacctgttgaaccagatttgcacctcaagtgggaatacatgcatgaatatcaaggatttatacttacggctattcatttgattctccaagtccatttcctaactttttctcctcgttacctcaactttctcgatcctgtttcttttgaagtagaatttaccatacttacttctgtcgggtctgagcttgtggagcagagat

SEQ ID NO: 94573 - DNA, 981 bp, Eucalyptus grandis
  Intron number 1 from transcript Egrandis_v1_0.013281m (loc us Egrandis_v1_0.013281m.g) derived from phytozome v7.0 (c hr-ID scaffold_8; pos 9156660 to 9157640 reverse strand)
ctttggccggtaccatctcggtcaaggtaattttttttttgttgaaatttttgtggttttgatcatctttgtgcatttcttgtcatcggattggagggttgttcatcttcggtggttcttgtaattagattatctgggttgagtttgttgtgctcggccatgaggatgtgaccacaccaccgaattgtgctgaaaatgttgagccgctttagaaatattcgaattgaaatgaaagcttcgttgctagctggttttgttgaatccatgctttgattgaatcgggaaatataaatttgcttctgctaatgtgaggcttgtgattgtggttcattgctgatgctcctagtgtcatgaatattcgatgtttaccgtgttgttgagcaagagatgggccctttaaaacaccttgactgttgttcacggcttcctcccaaggagatgcatcatccccagcctagacattgttgtgtcactgtgacttctcaagatattattggatcttgctctggctccttatgaggaaatggcacttgtttcaattggcagattggggaatcaatagaactgtttgattattgggtgaccatgctttatcagaagcattcaaagctgagtggataagttatatcgatgagccaatagcatgacaaaacatgttgtagtctcaaggttgtcttttgtttcactttggccttcttcttttaattttataagttgttttcgcgtgttctaagtaaaagacggcctgattaactttccctgacaatggctcttttcagaagatagtctgaattcatgtaaatgtattcaaccttgaaatccaatagtttctgtgacctcaatgatgttttcaattcgtcaggtcaaatgatgaagtgagctgataatgtgccaaagtcagtgttacaatccctttcccttgtaactaaatgttctctcatttactaatcaaaccatcgttttgattttagcactgttgtg

SEQ ID NO: 94574 - DNA, 243 bp, Eucalyptus grandis
  Intron number 3 from transcript Egrandis_v1_0.016890m (loc us Egrandis_v1_0.016890m.g) derived from phytozome v7.0 (c hr-ID scaffold_8; pos 1101734 to 1101976)
tctaagatcgaagtaagttgttctgttttccgatatatcatctccgtttcttttcttttgtccaaaagaaaaatgacagagttcttgggtcgagattagtaggcgcttgtattctgtgaaattttgattgataaggtcctttttctgttagctagatcctgtacatccatctccttttggatttcctaaagtgctgagcttgattaattgttgatcgaatctaggaactcgagcctcgtgttc

SEQ ID NO: 94575 - DNA, 731 bp, Eucalyptus grandis
  Intron number 1 from transcript Egrandis_v1_0.052694m (loc us Egrandis_v1_0.052694m.g) derived from phytozome v7.0 (c hr-ID scaffold_8; pos 16487316 to 16488046 reverse strand)
cttttcaccagttgagtttgagcccattctctcccagtttacatttgtttttctgtttcacacaaacatatgcatatgtttcagtcacctatagaatggtacttctgcaaatcatcttctacgtaccgaatctttaactggacctgataaaaccttctttccttttttcttttgatgagacatataacatgctgggtgaaggagtgtggactatagttgactagttttgggataaagtatggacaattattagttgattgcaatatccattctcgtgttcaattgcattgacagctgggattgcccatctcaccaagtcaagcatgaagagtttgaggttttcctcaaggacaagcacaattaatgggaagcctatattgggttgcctacgttatcgacaaaattttaatatcgagatttcagattattgaaatatgagtagattgcaccgacatagaaaaatcatcgattgtttatcgatgatactagctaatgtggcttgctcgagccattgtcattcgtcttcgcaacaaggaatttaagtaaaatgaataagaactttgtattatcaaaaccgatacgaaaccgataaatctgatgcatttattagacataataatatgaaacctactgttactttacaaaattgccatcccttgtcactacacgagaccggtttataattataacacacaatctgctgaatgatgatgatcaggagtcatattgag

SEQ ID NO: 94576 - DNA, 535 bp, Eucalyptus grandis
  Intron number 3 from transcript Egrandis_v1_0.020976m (loc us Egrandis_v1_0.016861m.g) derived from phytozome v7.0 (c hr-ID scaffold_8; pos 3956677 to 3957211 reverse strand)
acaacactccaaaatatcgcttcgtggtccgatttgtatcctgaatttcatctgtcccaaatggtgtttttcatatgacatttgccaatttgtcatctttttcttccatatttctgatattttacatttggaccagaagaaattactcgtacttttattctagtcgttactagagaggtgaaagagataaaaagagaatgggggtttcccatcagtttttaaattttcttctacaaataagaaaaattcattgtggagcagtaagggatgaactcttggtgctttcatgttactttgatatggtacgttttattttgtgaaaggattattgaaatagcttaatgacctattggagtagacctcttatttgattttttgtcgaggtacctctccatgaatttgggctattagggctttggtttggacttgtgaattgatgagatgttaagttttattcatcttaaagtggtcagtctttgtaccttgacccttgtttttagaccaataaagatatcactgcccaaatcatatcagc

SEQ ID NO: 94577 - DNA, 643 bp, Eucalyptus grandis
  Intron number 2 from transcript Egrandis_v1_0.017632m (loc us Egrandis_v1_0.017632m.g) derived from phytozome v7.0 (c hr-ID scaffold_8; pos 56733571 to 56734213 reverse strand)
cgacgaaggacatcttcagggaggaaggtttgccggtatgataccttgaggtgctaaattttccctttatcagtggaaaatttgtatctttactctgcgctgattaagttattgccatagttattgccattgaatgccgcttcccttgatatataaattagtgaataagaccattcagtaattgggtactcgcaggctattaagggctattaagtttcgttttgatggagtgaaaagtagcacctgagctaattgaccaatatgaagattgagtgcaagcttgtgaagacagtaggagattgattttggccttgttatttttatggtcaagttttgtccatgtctatgagtgccatggaattgtccagatgaattaaatcaatcacagtagcagattgccctactgttatcacagatatgatatgctttcagtttaagaaagtactcaaagcaaatgcatataggtttgtagaaaaagtaggtagattgtgaagctctcacattctccagtcttctgactttatgttaagttcatgaagaggctacatgccctctgaaatgacttactagagtgatgtgtggaacatttttttttcgtttttcctcatctaatagcctgtgtaatagggtttctggcgtggca

SEQ ID NO: 94578 - DNA, 454 bp, Eucalyptus grandis
  Intron number 2 from transcript Egrandis_v1_0.042326m (loc us Egrandis_v1_0.042326m.g) derived from phytozome v7.0 (c hr-ID scaffold_8; pos 69303760 to 69304213)
tttgtaaaaggctgtcagtatccttgctcaccagtgtaagtttctgaacagccatatgggtctctgatgctatatttgccattcactctaggttttttttttttttttttttttttttttttgaggagaaagaatacatgttcctcttaattcttatgattcagtaggatgacagtttctttttcagaacatcatctgactgaaaacttgagttccaattgtaggtcattaactgtttactctcttagagcttcttctagatgatcaatttcctaatctgctcttgctgatttaactactggcatagcatagacgcacttgagttctgttaacgcttcaaaaccagcaaaacaggtccttatacttttcaagttcgattgagtcagttgaataaggtgtcatcacactgaagcaaatgaaaaaaacaaattcttgctcctgtagggagcttgtc

SEQ ID NO: 94579 - DNA, 769 bp, Eucalyptus grandis
  Intron number 1 from transcript Egrandis_v1_0.009871m (loc us Egrandis_v1_0.009871m.g) derived from phytozome v7.0 (c hr-ID scaffold_8; pos 50388649 to 50389417 reverse strand)
cctgttcgaattctggagagattgatccgtttcaggtatcgagctaatgtgtgggaagttggaggaaaggaatgatttttcgaagacccatttgtctgttgtttcgatttaagatttggatttcggttgcttgtctcgatccggggactgcgtacatttgggtgatggaacgaaatcgcgtttgaaacttttgtttgttggggttgatgttgatgttgattttgatattgatattgctccagaacgtgaccgatttgatgctaatggcaagtccaccttaggatagagtgtcaaatgctcttgggttcttattgactgttggagtaggaagcccggctccgctgttattagcttgccgaattagcccggttcgggatatcgtgccggtgtgtcttactcgcgattttggcaatgagattttggcgggccttttgttagagtatgtccatactaggaaacttcagtctggcggtataaactgtatctttgttgtcatttgtttagaactatatgatcttcttgaatctttctgttgctgggactctttttagatatgctgtttattcgagaaaagaaaaatgggtgtgggatgtactttgtgaaagctttgtgatacttaagatgcgtatgttgacttgtttaggacattacttaggagaagcatgtgatgtttgggatcctaaagagttagtttgtacatttgatatttgtagtgcttgtgcttttcagagttgcttgtcataattgacttgtttttacgacttttcag

SEQ ID NO: 94580 - DNA, 915 bp, Eucalyptus grandis
  Intron number 1 from transcript Egrandis_v1_0.014772m (loc us Egrandis_v1_0.014547m.g) derived from phytozome v7.0 (c hr-ID scaffold_8; pos 687840 to 688754)
caggtctgcttgcaacccctaatttacaaatgttgctcgaaaggcgagttttttgcaattatagatttcctctttgttcttacatttgattgtttgggagtgctgaataaggattatgagttagactgaagattatacgtgagaagtgtattgtcttacccgtagatgatgtaaactacttgcgactccataggtcattaatctttgggcgattagcgaattgattaccgagggttgatctgcaatctttggattatgtccgcaaggatcaccaagtcactgatccggtgacgtcccagaatatgaaaagtttgatgtgggaatgggtcggtgcagtttttcagatttatcgattctgagtgaaatgaactgatagttagtaccaccagttaagcggatggaagttatggcagttctaaggtactcgtaggttgaatgacttttcgagtggtgtgtctgctaggaaaacgagtttagcttttgccgtttcacgtgcaagtcaaaaagattcgttaacatgccaagtagaacatgttacattaggggacattaacgtgaattgaaatgctatggaattgggtagatgcaattttctttgggagattcatttttgagccgaaaaactgaatgtaaccctgctagtttgattcagactcaatttaaagcttatggttggttatctaaaagaaaaccaataccagaagaacaggtaacatggtctatattcgacaaggaggggtaagtgaggaccatggccatggaattcttcttctcttccattgtcagactctccatttctgtgctgtatctttccactgaattgccagcctgtcttcttctgatagtaatgattctctcaaaaaatgcttcgttctgacaggaagcacttcagaggttgggattttactctggtga

SEQ ID NO: 94581 - DNA, 727 bp, Eucalyptus grandis
  Intron number 3 from transcript Egrandis_v1_0.020036m (loc us Egrandis_v1_0.020036m.g) derived from phytozome v7.0 (c hr-ID scaffold_8; pos 10758209 to 10758935)
ataaaagagaggtaactttctgccttgccattgtcccgtttcttgcacttgcccttttaagactctaatagtaagatgcaaagagatggaaatgtaacatttgatttgctcattcagttgttcttagaagttcagagttggactctagcaccagacttctcttgcggtagtatgtaagacaggatatttgcagtgtgtaaaatcagcctgctcgataggcatagaatcctttagaacgataggtaggatcactgtaactttgcctgggaagaaaacctgtgcattcaatattcatttgatttttatgcgtgtatgttgccattgtaagcagagatatgggatttgttttctttttcataacagaaccagtctttggtgccaatgcctcgctataatcttttggtctgactaggttatatctacgacaagccatttcataatgtgacttcaggccatattaccatttggagtgcaataaatcttctcatcttagcaacaatcacataatcttctattagttttcctccggattcagcccgtaaataatagccttactttgtgaagagatacaatgcagtgaagttttataccaacttttgtttggcgcatgcttttgcactgctttatcttgttttcagcgtaattcttttgcaattactctaaagaatttaaaacctttcccttctttctaggtgcttgtagtccaagaacatagtggaaggttcca

SEQ ID NO: 94582 - DNA, 1011 bp, Eucalyptus grandis
  Intron number 3 from transcript Egrandis_v1_0.045392m (loc us Egrandis_v1_0.045392m.g) derived from phytozome v7.0 (c hr-ID scaffold_1639; pos 2996 to 4006 reverse strand)
tgagtggcttcgggcaggaaggtttgggtaagtccgatgactgctgagatgctcttggttatcgaatttattgtctacttttgtcaacctgttgaaaggaattttgcaaaatttcaggcttttaggagatcatttgatttttctcttggataaaggttgagttcatggtatggcaactgttggttgagggtttaacatccacacgagagttgaagagcagtattaggaaattcacgagtaggggctacacaatagtactgtttttcctgttatatggctcggttgttcccattcccaggttatgtactttgggatgatatagttttggacggttctttcgctatatggactagttcaattttgtaacatttgtagtgacatgccacgtaggaacaaggggctgtacttcgtgtgtagttccaatcacttctctgctttcatcttgtgtctaattaagatggcggttaaagcatccagcttgattgatatgttatacttgagtcatggtttaatggtccttacctatcaaataatgtatttatattgtatttcatggtgatactatcttctgataggttcacaataaataatgccaccttattgtatccttcctctcaaccctagccacccgatttgaaattttataattgatagtccaaactatatgaaatggctcacaaaccttttgtctttactttaattttgatactcatgcagaaaagaaattcttgcgatatcttttggctagaaattgcaagttgtatttgaatttggagtttatcttccactgattattgataataattgatgcatctttctttgaaatgtatttactgaacttataattgttcaagctagaaaactaattctgggcgcttcatcatagatatcaatttgatatgcatattcatgattgatgaacttatggttttgattcattgtctctggattttacaacaaacaaagttgattgtgtagatgcattcttaggacagttgaagaaggagctgg

SEQ ID NO: 94583 - DNA, 972 bp, Eucalyptus grandis
  Intron number 4 from transcript Egrandis_v1_0.029691m (loc us Egrandis_v1_0.029668m.g) derived from phytozome v7.0 (c hr-ID scaffold_8; pos 70201942 to 70202913)
gtacagtttggtaaagaggtaggatcatgtcattattcttatattattgcctttgatgatgatagatttacagttacccctgaaggacatggtttttaggttgtagccaataatattgttggtcaatgccttgagatgttatgggagctttattaatcaatgttggactttgcttcattctcatcttacactccaaagtggggttaggttagccttttgccatcacagttctactgcttaagcacttgctggtggctggttcaatctggatactgaagatgttagctttgctgcttctagatgttaggttgttgaaaacaaaattttttcagaacttgaacatctggtattgtagtgctcaacttatctgaaagtatactagttgaaatactttacattgatcggtacgaaacttgtaatatgggacattagggccaaagggcatgacgtttctcaattgtgagccctcgtcttttgacattgtttcatttttacgattttgtttattatcattaagatcacatattgaaactctgacgggagacattttctgggacatgattgtaatggctcagctcttgcattgattcaatttcaacatttaatttttgagattggtactacaattttactgttcaaactttgacaagtaggatgttcatgtgatatttctgtttttatcttgactagatattgttggagtgataaaattgaaagaatattgaaagttgagtgttttgctaattcaaagtgaagttccatggtaaaaatgaaatactactgaaagtttaacaattgacgaagagttttaccttagtgtcttgggtatgcatcttcatacacttgatagtattgtcctatcctatttgattatctctaccgccagtcaagtgaaattttgtgctgagtttattttagtttgactgattggcgcttttgcgatacttgttatattttgccagggtacccttc

SEQ ID NO: 94584 - DNA, 912 bp, Eucalyptus grandis
  Intron number 1 from transcript Egrandis_v1_0.006222m (loc us Egrandis_v1_0.006222m.g) derived from phytozome v7.0 (c hr-ID scaffold_8; pos 1508909 to 1509820)
gggcgcgacaagagtggtctttaatcatctttgtaaagctctggctccctagctccgaaattcagctcaatctttgggtacttagatttctcagtgcaacttatggttttcggcttcgaatatttgaaattcatttgcagagttgataagctggttgatactagcaccactgtagtcctttcaaggagctctatttgattacttgtaccacatgttatattatatgtacaacaaaatgttagatggtctcagtattacacagaaggttagatgttgaaattgcaaacaacacaaataagagagcgcatggaatttgggtgtttatactctctttgtgcactgcttcttctcaatcataaatctacattggtgtgattgagatggtgtcctctgctctatagcatctctcgtaataaacaagaaagaggacaaactggaccgaggtgttttatcgtttaatgacccactgtgaatgtgatcaagtcaatttgcaagtctcatccgatcaagctgagctcggccagactttatatctttgcaccctgttaaaaaggaaactgcttaggagttgcgctgaatagcgcaactagcttcactatcattagaattacttcaaaaaagttgcatctgctgattgagtttgacacttttgaaaactttgacatcaaatagtagatgataatttcactgcatatatcgactgttaagcctgttatggtaagttatgtagtgtgacttcctcagtcagcataagatgaactttacatggtgcctgaaaggagcgtttgttgtcatgtgtgctcttcttgtaatttggtgtgctgaagcttttggcaattttaacgtgggcttcttacttgtcatcgttttatcctagatcctgtttcactggttcgtgatcatcacatcaag

SEQ ID NO: 94585 - DNA, 395 bp, Eucalyptus grandis
  Intron number 3 from transcript Egrandis_v1_0.034499m (loc us Egrandis_v1_0.034499m.g) derived from phytozome v7.0 (c hr-ID scaffold_25; pos 359766 to 360160 reverse strand)
gcatctttcaacttaaaagttggtacgattttgtgatctttgttaccaatagcaaatatcttatggctcacacctttcataatgctttgtttgcaattaagtagttattttagtgtggtgttcttaaatacttctttttcaaacttagaatcttatttcacagtccaacagctttagtatgggtttgtggaagattttttggatgcgtatgtttggcgtcatctgtaacttgttgatttgttttgactctttagctctgatctcatttttttcacctttttattttccaactggaaagtaattattcatttgttttatagaatgcttctagtaactctttggcatttgaagatcgcactactcaattcttccctccagctccaggagttcctcga

SEQ ID NO: 94586 - DNA, 994 bp, Eucalyptus grandis
  Intron number 1 from transcript Egrandis_v1_0.023510m (loc us Egrandis_v1_0.023510m.g) derived from phytozome v7.0 (c hr-ID scaffold_8; pos 61209088 to 61210081 reverse strand)
tatcgagggcaggtcttggcctgccccaattcgaggttcggtttagggactctctttcgtacttctaagttcgcgccgaagttccgacttttttgttttttgccgtctgaaacgagaaaggagtgaatttgttcatggagccctttgatctactaatttgatctgttccccatgttttcctatctgggttcttgaagtttcggtgattgtttagttttctattaccaagttctgttgtggattgtggggttcaaaggatgcagtgaatggtgagagaacctgcagagactggaagggagaaaaggtttaactactgaaattgaacgatgtttgctcacagcacttgcgaaagagcgaatggccttttgtttggcgcaaaatctgtgtttgacttttgctgaccattttgtgcggcgccgatgttttcatgcttcacaagtttatagaaaactccctgattggtttgctgagaaacaacagcaagaacaaattgaaaaccgatatgtggactgatacaaacgaggttgggtgtttattttttaaatattggaacataaaagttttcatcacaagcaagtgcaaatcaactgtgttaggaattgatgagagatgacttactgttgctggaggtttgtgtaactgacaatggaatgatggggcacaactttaatacctagcacatactgtccagggcagtgaaaggtgtgaggtacaaacatcttgctcatgcattaagatagccttgagaaagttaggttgctactctcagctcatatgatcaattctttgttgacaaacattatgttacactttgagtgttcaaaaagtctttgtgcaaaggtgggatctagctagtactgttgacgtcttgttgaagaagttttgaatatccttttccctttccttttcttttttcctttttgaggagctctgactgtattaacacatcattcatgaaggccgcctttggatccacgccgccagcaaagttcca

SEQ ID NO: 94587 - DNA, 1007 bp, Eucalyptus grandis
  Intron number 2 from transcript Egrandis_v1_0.013847m (loc us Egrandis_v1_0.011024m.g) derived from phytozome v7.0 (c hr-ID scaffold_8; pos 19650240 to 19651246 reverse strand)
gccaaccttccgaaactgggtccgctctcttctttcggcttctctcttgtgttcatacatggagcttgtctagttctcagggtctccaatcttgctttcctttcggttgcttcttgttaatccatttgatctgctgtgcgcctttttcttggcattgtttggatcggacccacctgaatttcttgcccgggcttgtcaatcttcatatgggtttctgctagaatagatttcttcctggtgcattctctcctgcattcaaggcacattctaaaggccgtgttttgcggcgattaatgttggcattaagtttctgtcttcttaatttggaaagaagaacacgcgatatggctaagtggctgggtaatcttgtgcttaagtttatctgctaattctgatacctggattttctattcctgttcttcctttagccactttttggtagagcactagttcctttggtccttcttcataattgaatttccactctgttcaaagccatttttcgttttattgtttttcactccatgtttaatcagggtaactgctctaacctcaatgggtagttctttaaattattttgactgcagagtagctttccatttttattgcccttcttctggcttctattttattttattttattttttctgtggaatgctcaaggccatctacttagtttttcattgaaagacaaaatgttaaatatgatgtttgtggttattttactttcaatagtgctaaggtatatatatgcttattggcagctcattttcattcaagtccaccaatttgttctcctccaatacaaagcagcacttgaattttactttgtctcatggtgcttttctgtctttgatgaaatgtggattgaggatttaaatttctagccatagccttcccatggagctaactgagtgattcagtcgtctggcatagtcaatttaaagtcgcgtgacctcttgcctcctgcaggctgtacttcgctaagattgggattggaactccct

SEQ ID NO: 94588 - DNA, 845 bp, Eucalyptus grandis
  Intron number 1 from transcript Egrandis_v1_0.022956m (loc us Egrandis_v1_0.022956m.g) derived from phytozome v7.0 (c hr-ID scaffold_8; pos 9123628 to 9124472 reverse strand)
cgccattgctgcgcctccaacgcctgttgccgcgggtaattttcgcagctgccatccgcttcgttgactctggatgcttggcctctgcaatcgctggctcgcgtcgcgtgctccgtgcgtttgatgttcgatcgctgcaatcttgcttttgattggggtttcgtttgcgcggtctgcgactcgtattctccgcgtgtttgattgttatgctggcgtggtgatcgaatttgaaattgcgggtaaatttcagctatggcttcgtgttggcagcctacgagctcataacgatacgactgtaccgatgcgttagatgccgaacaagtcatgtcaaacctgcctgaaatacctcaaaatgttgctatgtctagctcctcgaagcctggaaaaaaatcacatgcgcaaaatgagaatcttcggatcaatttattgtgcagtgcattatacgtgtttctagtgatgcgccgctggtactgctaatgacgatcgtgtagtatttatcgcatttattctgtagggtgctaagttaataatcgagaaaacagaattataagttcactaagatgtcgttgctctatggtatggtctgtcatctggtatagcgtggttggactcgattagctcatggccaagtatttgttgatgtcaagaatatagaaagggtacaagtcaaattatttgtttagtgtcggggttgattttatgtggcaaataactttgagaaattagagatgattttgaacatgctgattgttgcatccaatttatttatttccttattttctttagtaccatctgtcatatagttcctaaaacctcacttcttctattctcttgttacagctcaa

SEQ ID NO: 94589 - DNA, 725 bp, Eucalyptus grandis
  Intron number 2 from transcript Egrandis_v1_0.018005m (loc us Egrandis_v1_0.018005m.g) derived from phytozome v7.0 (c hr-ID scaffold_8; pos 6297961 to 6298685)
accgtgtcgacactcgagtccccatcgaagtcactgtatggatcctccttaaacctttacctctctctcgagactttctcggagccatatgatcagttgctaaactagattggtgttaattatgcatcgtcatgttgttacaagtttgttggattttgtggcagttgcttgtaaatattgttaaatgagatttaagatcgggtgatagcagagttcaagatgcggcacgatgctgttaaaggggttgtggaatttagtggtttagtggcttgagtttttgttttatgggcatcttttacaagttgagggtcaacaatcaagaaaatcattcgaaatcttcctttgagatgaaagtgctccggggttcatcctcatttatatacaagaatcacatttgaagttgttccttgactttctatggaatggagacatttggttcttgacatatcatcgtgaaatgtgacaagtacttggaacacttctttaatttgctctcttctgtgatcgattagagaaatccacctccgttaacgcaatacctagcgacttttttgtcacattgacatgcataataattgactaaactattgagggatcgggaaacataaaaagctaacgatgtgcataattttctggatcttaacacgtaggatcttgacggttgttgttttgtcttgtgaatatgcacagattggagagctaaagaagctcgttgaagagggtaa

SEQ ID NO: 94590 - DNA, 612 bp, Eucalyptus grandis
  Intron number 2 from transcript Egrandis_v1_0.041850m (loc us Egrandis_v1_0.041850m.g) derived from phytozome v7.0 (c hr-ID scaffold_8; pos 27266657 to 27267268)
gtaattgctttttcaggtctgtgttccttgttagaaaaagatcacctgaaaattgttcatgattttgttgaatgtttccagggtttgatttgttttgttagatgacagtattcctctgtgttgtggaagatttttggtatgctcatcgcattaccgctctgtcgtcagaacacaaatcacagtgcattttatggtacactggttctggaacactatcaacgatgtactagaaattcctctgttggaaaaactattgcattttcgtatgatgtatcattctgcctgagacactgcatctggaaacatatcttgaagaagagctctctttgttggagaacatagctctcttaccttagtctcgagattagattgactcttctgagatccaattaagttactttgtaaaatttcatatctattgtacaacgtcctagacgaacaaaccatgttccttatttccatttccattccatttatttgaatgatccatcctccaggtgatattgctgccttgtatggagcttttgctaatagaaatgcctttgccatggttggaatttttgtagttgtccaccttgttaatcagggcccttgcagatcagttaaaaggca

SEQ ID NO: 94591 - DNA, 1008 bp, Eucalyptus grandis
  Intron number 2 from transcript Egrandis_v1_0.037792m (loc us Egrandis_v1_0.037792m.g) derived from phytozome v7.0 (c hr-ID scaffold_8; pos 60660790 to 60661797)
catcgagggcaggtcttggcctgccccaattcgaggttcggtttagggactctctttcgtacttctaatttcgcgccgaagttccaactttttttgttttttgccgtctgaaacgagaaaggagtgaatttgttcatggagccctttgatctactaatttgatctgttccccatgttttcctatctgggttcttgaagttttcagtgattgtttagttttcttttgccaagttctgttatggattgtggagttcaaaggatgaagtgaatggtgagagaagagaactacagagactggaatggagaaaaggtttaactactgaaattgaacaatgtttgctcacagcacttgtgaaagagagaatggctttttgttcggcgcaaaatctgtgtttgacttttgctgaccattttgtgctgcgggatgttttcatgcttcacaagtttatagaaaactgcctgattggtttgctgagaaacaatagcaagaacaaattgaaaaccaatatgtggactgatacaaacaaggttgggtgtttattttttaaatattggaacataaaagttctcatcacaagcaagtgcaaatcaactgtgttagaaattgatgagagtgacttactgttgctggaggtttgtgtaactgagaatggaatgatggggcgcaactttaatgcctagcacatactatccagggcagtgaaagatgtgaagtacaaacatcttgctcatgcattaagatagccttgagaaagttagattgctactctcagctcatatgatcaattctttgttgacaaacattatgttacactttgagtgttcaaaaagtctttgtgcaaaggtgggatctagctagtgctgttgacgtcttgttgaagaagttttgaataccttttccctttccttttccttttccttttccttttcctttttgaggagctctgactgtattaacacatcattcatgaaggccgcctttggatccacgccgccagcaaagttcca

SEQ ID NO: 94592 - DNA, 810 bp, Eucalyptus grandis
  Intron number 1 from transcript Egrandis_v1_0.001699m (loc us Egrandis_v1_0.001661m.g) derived from phytozome v7.0 (c hr-ID scaffold_8; pos 12407801 to 12408610 reverse strand)
ggacgattccggtctcggctattacgaggacgaaggtagccgacgtgtccccgtccgtttgctttgttttgctgtgttcgggtgggttgtgtgctctggcgatcgattgttctcggagtaggtgcgtgcgatgagagtgaatcgcaggtggactagagtcttgtaggttttgacggcggagatttatgcggaggggagttagccaagatggaaagaaaataggggcgttcggcgattaacttttctggagcaggttcaagcgaggcttccgatgtcttgtctctcggatggatactgatcagtacggcgtagacagtttttcttgtgtgctagcttatcaccagttgcggttctcatttccagtcgtttcatagagtttgagttttacgctgtctctgtctgagaggttaaaatagttaattccagtcgctcctgttaaatattgaattacgagtaggtcacttatactgaaaaagtgttgcctcatagtctgttgagcttgtttgtttgcattcatcaatgagaagtacttaaaaaaaaaaaactctctgtcgaagggtggaccaatgcttgcttcaactctctgattttccgttggcagactgaagttttcccgtgaaactaattgtttgcgttttagccctatgtgttcaatatttggaagacacaactttccccagcatacactcgaccgatcttggatttaattttttgggattgttgttgttgcacaatttccagtagcagaatactcattatgaattactgaatgcaggttcagctctgggtggtgcatatcgtcttcctcca

SEQ ID NO: 94593 - DNA, 911 bp, Eucalyptus grandis
  Intron number 2 from transcript Egrandis_v1_0.018387m (loc us Egrandis_v1_0.018387m.g) derived from phytozome v7.0 (c hr-ID scaffold_8; pos 53607276 to 53608186)
tcccgaaggtaaacgactgatgctcgatcttgttcttgatggtttggaactgattccgatacgctgtttttccgcgcgattctgtgggaacgggaatatgatttgtgcttgctccgagaattcgattttctattcgagcgtgtcggtctcgtgagtgaagaatgacggcgaacggcgaggagttctgttttttggtgcctgcaggaatcgtctcagacaatcttgcggtcatccttacaagtgaacgttagctcctaagaagtttaaatggaaatgaacgacgtccgtgtcgccgttaggattttcaatttttcacagcttgatcgttgtgtatgaaggatttcagaacaaaaggaatggatcggctgacatgatgtgtgatgaccatgtggcatgtgaaattccgatgctagtgtgctgttactaatccccagcccttgaattcccgccagggccgccactaagcacactaacggcgtattcttaggtcgaactatttccgggatggtttgtttgattgtgtctgctttcgatggtgacagataatcctggttggtgtaagactttttgaatgaggcgcttcatggaagtagtgcttggttgtttgtgcagttttccgtaatgtagtcctttggttctcagagacatatgactgacagttgattgctctataagttgtatggggattataggatattagttcttgggaggtgagcaaaatgttactctactcggtcttcttccgcatagtagtcatctaaagcgagggatagagttcagaaagtgtataattgcagagacatgcttcgttagggtgaaacttcgtttagcaattcctaatggttgggggaatgtgcttgattaaatttaacttttggtttatgtagttggaggtaatccagaggacgctt

SEQ ID NO: 94594 - DNA, 409 bp, Eucalyptus grandis
  Intron number 2 from transcript Egrandis_v1_0.024306m (loc us Egrandis_v1_0.024306m.g) derived from phytozome v7.0 (c hr-ID scaffold_8; pos 8368365 to 8368773)
tataaagacaggttggtacgtcaattcctgtcatctgaggttgagacagtttctgcatcttgctacattgcatggtgaactttctaaatttgtcaccactatgtaatgagtattccaagatgagattttacccccttttctgtagtcgacaaggtgtttgcttttgattctgctggtgatgtgaatgagtttgcaccaaatgtggcgcctttgtggatgaattcgaatttttgttaacattttattttgattatgctgctgaaaaggtgggaatgtgcaactatacatgggctcttgaagatttatgaattagaggtttattttttgttaagatctgttatgaggttgggtcttgaagatttatgaattagaggtttgtgttttgttcagatctgttgcgaggttggga

SEQ ID NO: 94595 - DNA, 965 bp, Eucalyptus grandis
  Intron number 2 from transcript Egrandis_v1_0.003368m (loc us Egrandis_v1_0.003368m.g) derived from phytozome v7.0 (c hr-ID scaffold_8; pos 72395558 to 72396522 reverse strand)
tttgccccatcgagagccttgactacgagtatgccgtttctccttttactattcaagtcgcactggcatgtctgctgtgttcgttcatgtcctttttcgggtcattcgtgttaccgccaatcacttggtttgaattacgataggtggctcgcctctagggatgtaaacaagatgggtcgagttgacagagtttgctacttgaactcgagtcaactcgggagttccatgctcgagatttgactcgagcttcatcgaaccttgtattttgtgctcaagcttgactgagacatactctatatacgccagaccaaatcggatcaattcacttgtaatggtgtgatagtaagatttagagaacgaggctcagactctatgaaaactttaatctagagaaatcttcatgagaagaacatttctaaatctacgtcatgcacttgcgagcaatcgaattttcgaatggacaatgtcaaaacctatcgctttgcattcgagcgatgtccaattgtaggaggctttgacaaaaataataaaaaattcagacttcaagcctccaagaaattgacttgcatctctttccttacaaattagatgcacagataaaattttgaatatgagaaaggcaggaattttaaaaagtagcatatgcatgcaccagtattcttgtgttccaagaacttttgaggtccccatgttgttcctctacttaccgcaattgcaattattgattataaactgtacacgaaactccattcttgtgtgagggagataacagaagctgcattcatcttgtggttcccacaatgaatgttggaaattaggatgcgaaactgtaaatggcgaaagtttaggtttgatttctcttcgatgatctttttggaaatgtggttggcagagattccaaaatactgaaatccactcctcagctatattgcttctcttttttcctaatgacaggattgttgaaa

SEQ ID NO: 94596 - DNA, 964 bp, Eucalyptus grandis
  Intron number 1 from transcript Egrandis_v1_0.003362m (loc us Egrandis_v1_0.003362m.g) derived from phytozome v7.0 (c hr-ID scaffold_8; pos 8986143 to 8987106 reverse strand)
aagagcaatcgctcagttcccttcgccgcaagcaggtacttgcgcgcttcggactacctgcggatttctttcgcgagattcgtgaattgtgtgctgtctttcattgttctttcgtttccgcgttatggttgtttgattaggtgatggaagagattgcctggtcgtcctaatttggaggaggattgggtgatgcatgtagaatcaggaggttgagtcgctcggtgcgcggggcacgggttcgaagaatcactcgtgctgaattcactttcgtttgcatatgtcgtattggcatccgttttcatgttctttagatgagtggagagaagagtctcgagagcccgtaatgggagctgtgcagtcgctgaatataacgacagcatgtcttgtgcaaatgttggtttccccatggttttgacaagacatgacaaaatctgactgtagatgctcaatatgttgcgcattcctgctacatctataggtgaagaagaagaagaaggggttctcttttggagagaaatttaatcctactagctttttttgtttgccagtagattattctaattatgttacagatgcatacactacaatatgactggtggctggcgccatatcgtgtgtctcaaaacacgccctatagagcttgggtgtaataccccatatcgctttttgttgtatctaatcttgtctaagattcatctctctttgttttgaactatagggacatggactaaaatagataatgatcttctcatgcttgagtttttcctcttggagattatgcgtcaactcaacccatttgattgttttagctgctaattgatctttctttagtttatacttggcattttgagagatagacaactcttgtaacggtatagtaaaagggggacactttttgtccaggttggagtctctgctagcttgtttatttaccttgttaactcactatctgtgttgcaggggg

SEQ ID NO: 94597 - DNA, 992 bp, Eucalyptus grandis
  Intron number 2 from transcript Egrandis_v1_0.003841m (loc us Egrandis_v1_0.003841m.g) derived from phytozome v7.0 (c hr-ID scaffold_8; pos 9703347 to 9704338 reverse strand)
tcaaattgttctgcttgttccacttcttctcaagggtaatgttcctttctttcttaactgtatcagtttttttttttaaaaataaaatccaagttggacttttcggggttaattaatgctgtggtggtgactggtgagaattttagacaaatccatgtgcttggtggtgtttgaatattgtgtccaggtgatgttaggttatgatgtttgctaaagtcatggaagttagctttgtcttggtggagattctacaatgatgatgacatgaggaatgactttagactgtattgaattaagtatactagggtaactgtaatagaaaccaagcccattggaagattttgacagcggtggctggccccacttttgttgaaactacgagtcttgctggggcaagtcttcttttagttgtttctcctctcaagcaatgccaagcatccattactaagattggtttagggagttggtatgctgtcagcataccatttattaaactagagtactgcagcttttttctttcatcttaataaaggatgcactcgtgtaaattgatgtttgattaaaaaactggcgatgagctttattgattaagcaaggctcatagaacccgaaataaatgctttccacgcagactctggatacagttctccatagatttgtcaaagatgatgataacactgatataaactttctgtttcgatgtcctaccgaaacagtgatcttacttgatcagattgtccagaaaggagagagttaggtgacttccatctgtttctatatcttcacctgatactatgtcgatgacaattctttgttttctcaggaaatttatgtttcttcttcgtgctgaagttctatttattataattcattataactgctattgttctgtgttctactgctatctgcttttaggttgctaaacatttgtgcggcccttgagctttaaggcttttagaaattgatctctttatttctctttttgcagacgg

SEQ ID NO: 94598 - DNA, 492 bp, Eucalyptus grandis
  Intron number 1 from transcript Egrandis_v1_0.003841m (loc us Egrandis_v1_0.003841m.g) derived from phytozome v7.0 (c hr-ID scaffold_8; pos 9704542 to 9705033 reverse strand)
aggtcgaaaggctcccctttttgctttcttttcttttcttttcttttctggttgcttctgttagtgatttagagcagtttgatgcatacttctgcaagtagaattataacccatgcccggccatggtaaagtttctttcttttttgggtgtgggccgatcattgtgttgtcttctttgctgggcaatgttccttttttaggtagttctttgaaacgtagctgctactcatcttcaagtcaattagaaacggaaagtcaaaggctttctggcgtggttgcaataatttcatctctgttcaggactttgatttttttttttccttcccgaaagggtatcttcttcttgatcgatttgagcattgagtctctcacgctagcttctttttccaagaaaaaattattcccgaattgggaccagaagctgatttctttcctttgcttctgtaatggagggcagattgcagagcgtctggcgaagaggggtcagcgcag

SEQ ID NO: 94599 - DNA, 606 bp, Eucalyptus grandis
  Intron number 3 from transcript Egrandis_v1_0.018646m (loc us Egrandis_v1_0.018646m.g) derived from phytozome v7.0 (c hr-ID scaffold_8; pos 63393983 to 63394588 reverse strand)
caagttcagtatgccatcctttcgacatttactatgaaaccggtgcatatgtctggtcatcttgttgagatgcctgagttttaggtaaggatgggtatattggtatctgactgaagcacacacaagaagttattaggagtttccaagtttacgattttaattgttgaaatgtggagaacgaataatcaaatgtttactatttgaaacatttgatctatgattaaaagatgtggggttctctcctcctatagaaattgtgagttggacgttagagaggattgagtattaaaatcacagatatatcaacaggattttcatgggtgctaatttttatttcacctgtttcttttcacattgcttagaaattcaaatcgtccatacaaagattttgcatcctcgtggaacagaaatgagcggaatatgttagtgatattgcatatcggacatgttcagttctttggcttctttttgttttggtgaggattatcatgcggtactggtcagtaaataaaaccaagaccctattagaccactaagattgatatttggcatttcagtggtaatgctgagtttcttaccatgtatgtcgtgtcaattgtagttaaa

SEQ ID NO: 94600 - DNA, 906 bp, Eucalyptus grandis
  Intron number 2 from transcript Egrandis_v1_0.044529m (loc us Egrandis_v1_0.044529m.g) derived from phytozome v7.0 (c hr-ID scaffold_8; pos 42910164 to 42911069 reverse strand)
tatttggaaactcttgtctctccctatcttcgcggtgagccatcaagaatctagagcgtttaagagtcgttatggtgctttgaattttacctttttttttttctagcttaatgatccggccatcttgagctgttgtatgattttgtggattttgtagaagaaacaaagagtgttgaaagtctattataagacctggtcattctttattaacttcattgtgctttaagtaccctgtccactctagatgtagggtcaaatctctgcttgatgaatggccatttgatcatctttgttttgctggaatactcacttcacttgctaatttgtccaatctgatttggtgtaatttcaccaacaatttaccggtcttgttatgtagtgaacattcaactataatcatgtgagtcattcatgcataagtagtagtatttattggcatgtaatgaagaaaacgaggtcaattttcaccacgctcgacttgggcaggcccggcgtgcccgccccagtacccgcacagggcgtgccacacgtacacgtagtccacgctcccgaatgaatggctctttcgtcttacgtgattacgactctttgtttttcttttcgaattttgcccttcttgaacgctaaaagtcgtgcatactatattgttgcagaagatttcgtgaataacccatcctctgttcgggctactctcgcacgccaagcacgtggacgcggatcccgctgcctctcccaatatatgaaggccggctactagccatcgctgacctactcgacctcaatcctggtggtaaaatatgcttcgaaattaggtagtacaatgaaatcggatcaagtaaaacaacttggactttgaggcgtgatatcactttttttaagaatttatttgccccacaacgttgctaa

SEQ ID NO: 94601 - DNA, 807 bp, Eucalyptus grandis
  Intron number 2 from transcript Egrandis_v1_0.046852m (loc us Egrandis_v1_0.046852m.g) derived from phytozome v7.0 (c hr-ID scaffold_8; pos 43858117 to 43858923)
attgccttcgagaagcttgtttgtcatctaaatgatactcggcacactcatattggtattcaaagctagtttgcaaagtgtgaccaactgcaagtggatcatcttattcaacaagtggatgatattgtcacataagttaataaatcattgcggagtttggtttttaatatttagcgtaatctgtcagaattctaagtatactttgtgtcttctcatattgtttcagctgtcatcatccaagaccaatttaataaaatatgatctttttgcttgtcgtgaaacttcaatttcccttttcatacgtaagtttttgaaggcgctattaagccctttcattagacacttttcctcttttttatttttatttttatttttttatcaagcaagatagaaatgataatttcatattgcgatcatgcaagagagagcttttcaatatgcatcacaataatttatctagctacttaattgacactaattgacaaatccaagtctaccgacatggatgaagttatgaaacgatcttaatttatgcataaattgccatatgggcaaatagataattattaatacctaaattttttctatttatttagaagttaattgcataaaaagtcagggattagcttttgaaaaaaataaataattttcattaaaatgcatcgaatgttgacattagggacggttgcattattagtgttactatatgtatatatacatataaaaagggaagagaggaccaaggacaggcaaagaagagtagttggtcaggggcagactggcagcaacagctggcgtggcagaggc

SEQ ID NO: 94602 - DNA, 835 bp, Eucalyptus grandis
  Intron number 2 from transcript Egrandis_v1_0.006004m (loc us Egrandis_v1_0.006004m.g) derived from phytozome v7.0 (c hr-ID scaffold_8; pos 12804430 to 12805264)
ctgggcaagaactgcgacaaggaagggcagtggaggtaatttcctggtttctattgagatttgctgcctttaattattttttaatttcttttttgttggtttttttttctcctttttattattgttcttcggtaatcattatgaaggaatgggtctttttattttttatttttgggaaaagagagggggggggggggttttctacttttgatgactttgagtttgatgatgagttggtgttggtgaaaaacatcattttcattctcactctctttttcatggctttgcgtaaatccggtaattaaggatctaatttctccttaatttgacccaaaaacaaatatctaggggccctattatgttcttttttgggatttctctctctctcgagttgcccattggagcatcaatcctgtaaattgccttttgcttgtgttactgtgctttcaaaagtggtaaaaatcccataatgactccctacttttcttcattattaaaacccttttttctcctagagaaactattataagttaaagcaggtgcataaaaaaaatgatttgcataagaaccgaggcttataatacctgtcctttgtttaataattcttgtttattatattgaagctttgtcagtgggtagaacatggacttctagtagagatgttggcaatagaatagtgcaaagtcttgcagtgcaagttggaacgtttgcatcagatgcacagcttgttccctctctacacttctagaagggtttgaaatttcgattttgactgatcttttttcgccttgaattttcaggtacacggtcctgggccaggcgtgctgccacctgg

SEQ ID NO: 94603 - DNA, 668 bp, Eucalyptus grandis
  Intron number 2 from transcript Egrandis_v1_0.015694m (loc us Egrandis_v1_0.014582m.g) derived from phytozome v7.0 (c hr-ID scaffold_8; pos 52587479 to 52588146 reverse strand)
ctcaggttggtctcttatttgccattgatttcagttttctgttaagaacaaaacgataaaatgagtacgctggaagtaggcagcaaatgcaaccaagtccgatgccggagccttttaatttgtacggtgcagtcttagtctctttatgagaatttgaaaagacttaccattattagtgagattttgtgggatataccatgggaaattttgtggacccctaccaactattttaaagctattaaatgaagatgtggtttaatatctaattaatctatcacatcagtttccggtttcctgcaaagtttcccacgtcggcaatttggtagaaaacaccaatggaagaactagtgtgcaacttttcaaaagggctaaagattgctctgtactaggcagtcatgaagtatcccgctatattggtcaattcacagttgtgtttattgagttatgaggagatgtttgcgaaaagagtggtctaatatgtgtctgatgtgatatgatctatcctgttaatgttcaggcttccaactcaattggaattactttttgactctgcatatgaactcaactagggaagaaaacgtaaaaggatcctgcattgacatggccagtgcactcatgcttttggccctccagacaggttctgggaagacactgacgtaccttctgag

SEQ ID NO: 94604 - DNA, 725 bp, Eucalyptus grandis
  Intron number 2 from transcript Egrandis_v1_0.000569m (loc us Egrandis_v1_0.000569m.g) derived from phytozome v7.0 (c hr-ID scaffold_8; pos 66782979 to 66783703 reverse strand)
agtctttagaccctccgagagaaaatcgttgttaggtaagatgagtttcatggcgaatttaagaattaatgactcttgtccactgtcatgagctgatatgttgctgcgactactaattatttcctgttctatcgtaactgaactaggctatttatgtgtgtattatattgcgcaatccataatgctgagacattatcactcatgactgctattggtgaatcattttgaaattcagtcaagtattctgcacatgtccgaagaggtggttagtaaacgtttgtttgtgagactcaatgtaactgagtaagaaccgtggccaaattgtgtgtttttaggaagagaaggaaaaggattctcttgcttgcaaagccagagattatctcacaagaaccaactgtactctgcatggtcatccccattaaatgtgatgctaagctgcaactgattatgaagggcttattcgatgtttgcttaggtgtgtctatgtaatacttgatgtgattctgtagaggaagctgcctagatcgaacagttagttcagcaatgtcattttttgtcatgcgtttgttttgattattaaaattatgttttagtggtttgtctccttcatttggtgtagctatggcatcttttgtgccctgtcctgtatgtcagtggttaccagctttgaatgtcgatatttacttgtgaagtcactgtacaacttcatgtatggatagggttgg

SEQ ID NO: 94605 - DNA, 699 bp, Eucalyptus grandis
  Intron number 1 from transcript Egrandis_v1_0.023024m (loc us Egrandis_v1_0.019825m.g) derived from phytozome v7.0 (c hr-ID scaffold_8; pos 30282636 to 30283334 reverse strand)
ggctggagatcgcggtcccgttcgagcaaaggccggtgagtttagatcagttgatacttgattagcttgttaaaagttggggagatatgttgttaaaccgagtatttaaccgtcataaatatgacaaatggaacacgagacttcctggctctcgtaccagcgaaagtaatgaaagcaatcgatcaatttactgtaaagagttcaagctattagaaagccttgcgccttgtcacttaaagttttaaaccttagcaattatcgctccgatttatgcagcgagagtggcatgttatgagaatagtcgagactgctgtagcaatatgatacacgtgacgcttgctagatgaagtggtggtaatttgattgtgcagatcttctgcatgtgttcaaagaagtttgctctgggaaaggcttgcttagatgcgaatgcatagatctcctgaatcagcaagattttagtgttttggcatgcacccctttctaacttggacagaataaaagaactaggttcgattaatcgcattctgtaatttactgggttgctcatgtattagaaacagaattctctgttctagtggcatggatgtgttgcagcataaaaaacagttgtaaaaggcatcttgtgtcacttggttatgtggaagtggaatgaaaattttacaggagattgtcatcacattgattttggttatcaggtga

SEQ ID NO: 94606 - DNA, 896 bp, Eucalyptus grandis
  Intron number 2 from transcript Egrandis_v1_0.020902m (loc us Egrandis_v1_0.020902m.g) derived from phytozome v7.0 (c hr-ID scaffold_8; pos 51120196 to 51121091)
ggacatcgaaggagcaactgcatttgcagtcgcaggtttgtttatacttcctgttcgttcctatttcgtgatcatgtttggtttgcaatatgttgttacaagattaagattgttgctttgtttgtttctgtgccttagtcttactttaggatttgagatgcgtgtggctttttaggcaatgtacgtgtacatggaagaggcaatttgccgtgagaggcctaaatatgtaacattgtaataaaaaggaataagaatgatgtacatgcacatagtcctggcagagatcgtatatttgtagaaagtgaggataattagtttagaaggagcaagagagtttgttttgtgaagggtactattctttccaaattggaggacttgaaccttattcctacttttccaaatttactattactagttcatgtagttgatctttgaagcttgcaggaagctttgtgtctcaatacagaagaagtaatttttttactatatattgcaaaagtgctagtttatttgtttctgacaaaggatggagagttatgcttctggggttagcacctagatgaattgctgatgttgcatggcaagtctggcatacttttctttttcttaacttcatatatatgcattgtttttatctcgaggtaagacattttatttgtgaataaactagcacttttgcaatttacatagttcagacgatattagatgatgctcttcctactgaacctcttgtttagaattttttcagcattaaagagaactactcaatagcttttaatcttcaacaaacactcccaacaacgttggagaggccctatggtggattctatgttctcctagtaatggcttcgcattttgcaggcacaccagcagattctgcttcattgggaatctct

SEQ ID NO: 94607 - DNA, 417 bp, Eucalyptus grandis
  Intron number 1 from transcript Egrandis_v1_0.026130m (loc us Egrandis_v1_0.026130m.g) derived from phytozome v7.0 (c hr-ID scaffold_8; pos 20721876 to 20722292 reverse strand)
tcaaggtctggcttatcagttgaggtctctctctctctctctctccagcccccgagtatacgcgcggattcataagtgcatgtgttgatttgttgttggagtgtacgtcaggcgcactgtgtttgtataacgcagaaactgaaaattctatacaaataagcaaatctaacgtagagtgattctgcaccatgtgctatgacatactcgcaagtgaagtgattgatttcatgagtattacatataaggcaaggaaagatcgatatgtttaattattacaaaaactctagctttggttaaattaccagaaaaattctctaatcaaactcttctattttaactaattatcaactttagtacgtctaacaatttactggtataacaggagttgcgctattctgacattgctccttactacat

SEQ ID NO: 94608 - DNA, 420 bp, Eucalyptus grandis
  Intron number 2 from transcript Egrandis_v1_0.033225m (loc us Egrandis_v1_0.033225m.g) derived from phytozome v7.0 (c hr-ID scaffold_8; pos 60619521 to 60619940)
tgttcgcaggaggatttccgcagcgcaggccctgagtgactgcttccaactttttggccgatcgttttcttcatccatttgatttcgttatcatgaaaacgttcaagcacaattgtcgtagattaaatggtgcagaaaggtctttgcagctaaaccatttttaatctttattgctagacaataagaattggagaaaagttctttcatgaatagacaaaaagtaaatttgtaatcttcccattcaacacagatcagaggaatgtcagttgcgttaacgtgttatcctaatttaggaaatgacactttttctatccttttgtgcctccctttgtggttttcctcttgctctgttttttttcttctttcttttctttttttggagcaggacattctttgatcctgagtggaggagagactctg

SEQ ID NO: 94609 - DNA, 684 bp, Eucalyptus grandis
  Intron number 3 from transcript Egrandis_v1_0.025756m (loc us Egrandis_v1_0.025756m.g) derived from phytozome v7.0 (c hr-ID scaffold_8; pos 56836486 to 56837169 reverse strand)
aataacatcgaccaggtacattagctaagcttgaacatatgttcgataatgtttgtattttcacaatcttatgtggacctgaaatcattaccaattctccgggcagtacttgagaaagccgtgatctccacttgtttttgtactgcaattgttttcgtcctaccatgtagcatggctttttgaaatttcgcatagtgtagaattgcttcatgagaactgcaaatgagcgttaccgatgcagtaactggaaagccatttaagctccagtaaaattacctcctgacaaatctggggttacaggttaagatatgaataatttcaatcatgaatttaacaaatatagatagattgcgagatttaggcatggccaatgtcctttacttatatatcatggtattcttttcttgatttgtactctagattgtaccttcacatgaagaatcttgtaaatgtctcataatgagtgatcataacaacagccctcatcttgaacttctgtgtgcctttctgtcttgttttttttttttcttatgacccaatcataaatttatggtttgactcatgaagaagtcgatggttttttgagatcaaagtcttactattgcttacctcttgaactgggagaatgattcacacagtaccatctgctaattgtgtttttaaggcattggataggggagtaaa

SEQ ID NO: 94610 - DNA, 902 bp, Eucalyptus grandis
  Intron number 1 from transcript Egrandis_v1_0.016847m (loc us Egrandis_v1_0.016534m.g) derived from phytozome v7.0 (c hr-ID scaffold_8; pos 1897928 to 1898829)
cgcagtgtaatgtggtttcgaactcttgtccatttgcccaatttgatctgtgtgtggagcttctctcgcccgttccccagttggtagttgttgttctttgtttgatctggactgggttttttttttctttttccccttttctcttttctcttgccgtgttgttctgtgtctatggcgttgggtttggttttctcgtgcttctgttgctggatcaacggatcaaagttggatgttcttggttgctgtcgaaatgtgaggcgtctgtgttcatgagccgatggaatgtgggatggttcggggtagatttcgacgggactcttgacgatgaaatgcgcctcgattaagtgtgtctagttggtagattctctttgacctctcttattggagcttacccttttactcgtctgggtctgtgacgttaaggagcaatgtcgattcattcatgaggaatgtggagaagatgagaaggattactgtatacttgtcttctccgttttttcatgaacatgtcgtttagtgacctgttggactagtttagagctttatgatgaacttttgatttttgcgacgactcttaaatggtgggcttaatagcctgcaaatcatgctcgattatgtgattatatcttttagtctcggtgtgattcagttctcttgaaagctatcgatctcgttgttggtagcagaaattgcttcctgtgcttagcctttccccactctctctcaaattttcctaaatggactgatctcgttcctgacaacagtggattcctctattcatgcttgtgcataattcacaactgcctcaagtatcaccctgattagttaaggggaataaaagaatgtatcatcttgacttatcttaaataacttctgataatgtgttttcttgatttttcagt

SEQ ID NO: 94611 - DNA, 1051 bp, Eucalyptus grandis
  Intron number 1 from transcript Egrandis_v1_0.041624m (loc us Egrandis_v1_0.041624m.g) derived from phytozome v7.0 (c hr-ID scaffold_8; pos 65961603 to 65962653)
ggtatcctaggtaaagaaggaagaaaccagaagctgttcgcccttcatctccatttgcttcttcttcttcgcaataatgctgcttgcttgcgccatttcctttcatcccgctttcctccatccatcttcatacggtctacatgcatttattttttccgcttgatgaattgttcgtatttagtatctttagcatgatggttagcaggtcattctcttcttttcttcttcttttcgtttggcaactctttcttccaaaacctcattctttctctttctatcaattgcaaaacacacgtaaagcaaaaacaaaaatcacaaagaaaatgagaaattttttcccggtgcactaatcttgacaccactcttcacatagtgttgttctctcttttgatgatacaaaccccgctcaaaatcaaacctccggcaaccctttcagtctcttggacttttgccaactttttcacaacccttttggtcatttcctccaatgatttttgttttcactctagcacacttttagaattagctttcaatattgaagccggtaccctagcgtctgtggtaaataggttcgtcttgaagttgtggcaactaacgtaggatttatattgtctcgagtcggtttgcatttcgtgggaattcattcttttcatcttttggcatattgtgtatacaaaggttaaacagtgacatgtaacatgatttagttcgagttctgttcaaccatgccgtatgtgctcaacacttagattagtaaatgactgaggttgtttttcttcttctttaattttaaccctagcaaaaagagcattttcatctgcaccgcgcttgcacagaataatctaacatttgtgcttttcctttgcattcgatgataggaaacattgtctcgttcttcgtcttcttggctccagcgtaagtaatcatgtttttctttgaagttcttttccttcacttcttattttatttgatcccgatacaataactatgattctttttctcttctcatgttgcaggctgacattttacagaatctataggaacaaatcga

SEQ ID NO: 94612 - DNA, 933 bp, Eucalyptus grandis
  Intron number 1 from transcript Egrandis_v1_0.004879m (loc us Egrandis_v1_0.004879m.g) derived from phytozome v7.0 (c hr-ID scaffold_8; pos 8709669 to 8710601 reverse strand)
ctgtgttgtcgcctcctccgggatcgcctttagcggtaacggccccttaaatcccatcttagccttaaaaaaaatgatttttctgtctatttttttttttctgtgacttgtatcatgttgtcttatttgattagagaaagaaagattggtttttggtatgatttgtggcctgggaatctgctgttcttggagagtttgctgaggaacaatctcagctactctgtgatctgtccgttagtgtagtagatttggttcttgctgcttttccctttttttcttcgctccatttgcatgtctcaataaaaaccaatttttttctacataataattaccgaactgagtctataattttcatttttgtttcaattttttctcgttttttctctgcttaatcgtgggttgtttgatcattttttatctttctcaagcaatatttttgagtaaatgttgatttcagacgcttataatgtttcattctaacccatttcatgtctcataaaaattgcggttggactttatctggcttcaccaggataaattccgagttgaaattggactgaatcttgttcagctgaaactataccgttgacattatatcataggagtgctttgcgagagcttgcagagtggacctgatcctagtttctttacaaggctccttcgccagccagtttgttttatttgtttatagtttcacggctacacggatcaattgtaatcttaccgaaaggctacgattttgctcatctgcctaaccaaattgatgtttatggaaactaggttctcgcgacgtgacagagtcgctgctcgtgcattgctcttatattcactgatatgcacttgcttgtagtaattgcctgagtattctccgtgtcgttctttcttttttccaatctcgattgagcaggaggttttggaagctacttgtttgca

SEQ ID NO: 94613 - DNA, 743 bp, Eucalyptus grandis
  Intron number 1 from transcript Egrandis_v1_0.025896m (loc us Egrandis_v1_0.025896m.g) derived from phytozome v7.0 (c hr-ID scaffold_8; pos 16242588 to 16243330)
ccttcaagacgtctgcgttgctgattacgcctcaggtaatcagcgttgcccgtctgttcttctttttctcctttaaatgatgggacggattcttgaatctggcacgggtgtgcacgaacgacagagggttttctttgtttgatttacaggagaagaacaactcaaagaaaaaaaaaaaaaaaaagaccgaacaagaccctccctttttcgtttttttcttggttgcttgagaatgatgtgttgacttgcttttactgctcagtcatctaatttcctcacctaattgaattattaaagtgatattagaatcaaaccatcccatcatttgggtcatgatttttcttgcgctgtgtatttccattgccaattatttggagccttccacagttcttgtcagctatcattgctttcctttcaccttctaaggcatcattcgttcattaccctccaaatcatctcatctctcctcctttttttcccatcgagatcataatgtacctccaaaaatctatttcgtacttaggaaatttcattcagaaaatttcaaatgattattggagaaaacagaacatgggttaaaacatcttatcgtaaattaagagattggcattctgaagttatggaccaattgtttagactctaactagttccattacattgctgaccttgatgttgaaaatgtgattgaactgaccaaaaaacaatattttgctattgatttggatgggcagaggtgaaggtca

SEQ ID NO: 94614 - DNA, 720 bp, Eucalyptus grandis
  Intron number 2 from transcript Egrandis_v1_0.011248m (loc us Egrandis_v1_0.011248m.g) derived from phytozome v7.0 (c hr-ID scaffold_8; pos 27540690 to 27541409 reverse strand)
gctgaaatctgctcttcttttccggtttgttcctgttttgtctccttataattttttatgtcatctgtctttaagttttagtataatctttgtagtgttcggtgataacttatgatagtttgtttgcgcgtttaatacctttcgaaacttaagaacttgtttgaaaagtcaaaaagctatgcaagggtaaggattgtttatctgagcatcttgatttagctcctgtaaaaggaatctgttttgggtctaaagtatactcctccagtcattacgtcttacatgaatttataaacaaacagaagggatacaggaagtaatcctggtgtaattccaaactgcaaagctattttcttagctgaaatgtttggcaaatttgaaccttaaggagatttctttttacttctctttcatgagaagctagcagaactgacccaaaaagactaacaagaacactttcaagatgggaaagtggtgcttgtaaaacctttttgtcaaaacttaagttgccgttctgttttccaacagaatttaaagaagttataaagaagttagaaacaaagtcctccgaagtactaaaaatgcttcattttaggttttacttatgctattttcagggtctatttcgaaaagaagttgatacttttccaaaatatttaatgatcttaactttttgaacttttgacagacgaccggttccctttatttttgggctgcccatct

SEQ ID NO: 94615 - DNA, 571 bp, Eucalyptus grandis
  Intron number 1 from transcript Egrandis_v1_0.025973m (loc us Egrandis_v1_0.025973m.g) derived from phytozome v7.0 (c hr-ID scaffold_8; pos 35993636 to 35994206)
gcagaaaaggtgagtcttagtatgcaacttttgcatcttcagcagtagatcttcaagtaattgattagaagaagaaacctagtaaaccattatcattgcagatattgcattgattttgtttttcatgctataaccaaaaatctgtcgtttttcaagttaatggagttatatctttaatcatagatgtccccaagcatacttaatccaaatggtctgctgcccaagaaaaaaaaattattgctcccgttcgtttccctttttgtgttgaaaaattgttggattttcttcttgccgccttccgatttcagcactgttctcctttttctctgggaaccttctactctatttaacctgtgaatatccaagaacttcatcttctcgcacaatctgacctgcaaaaactgattccctctttaattactctacccaaacgttagtccacttaatcaagatgccaaatatctacataattgcaatgatcctgtgagaatagctaacatcagtattttctttccttttttgtttttctttttcattcttgtagggtcttaccttttccaagttcttgaat

SEQ ID NO: 94616 - DNA, 990 bp, Eucalyptus grandis
  Intron number 3 from transcript Egrandis_v1_0.024192m (loc us Egrandis_v1_0.024192m.g) derived from phytozome v7.0 (c hr-ID scaffold_8; pos 17322972 to 17323961 reverse strand)
acatttagctccttccccatcattaagcccccgaggtaaacttccgagacatacgtacgtacatacatacgtatgtacaaacatatatatggaaactttatccttttaccaaaacaaaatgccaaataccaagaaaaaaagaacctcatttttaacccaatgatgacttgtatatgtctatctttgcagatatcattgacataaccctaagaaaaatcacacattaaaaaggccagattgccccagttagcaaactcattttagcatcttgtttttgaatgatttggtgtttagttggtaaatcgggggatcggtattcttaaagaaaaaatgggcatttttataaatgaagatacaaggcgatataattatcacgaatgtgtaaagtagcaaaaataaacctcaagtatacttttggtattgtcaaaagtagaagtttgtgaaagttgacgtaagtcttgatatttcccccaaaaaaaattccatgaatagcccatgcacacaccgcaaatatgctataattgcaagaactatagacggaaagaattgctaatttgcaataatcaaaatgatagtcgagtaacccatgaatctatcccattcaatattcgaattcaaaatagatcataaaatattcatgaatccctcgtctttctaactttatgaaaatttaaattgacatcccgaaaataaatcatatccattatttttactcatcaagacgcaacaccttccaaccacctaaagaatcgggaaatcatgtatttcaagtaattccactttgtgttcacctacccatctaaaattcaacgctagaaggggaatgatattgtaagcatttaaaaagccaaatttataaaaccaattttggaatgaaaacattgacatatattgtggaatggatcgagctggttgatcgtctcacctaattgaacctcttcactccttcacgcagcttccaaagcagtaatagcatccccgccagcaccc

SEQ ID NO: 94617 - DNA, 416 bp, Eucalyptus grandis
  Intron number 1 from transcript Egrandis_v1_0.044639m (loc us Egrandis_v1_0.044639m.g) derived from phytozome v7.0 (c hr-ID scaffold_8; pos 54194059 to 54194474 reverse strand)
cccaacaggtgactacttttagcattccatctcatgtgccttgtatcgttaaactcgatgcatttaaattggtttcttttctaaatttgtgttagtcttgttgaaattgaattgtatgcaattgaaattatgcagcaaaatcacgctaaataatatcacaatgccaatttttgtcccatttcattcccagcaagaaacatttttcgttagttcaggtcattcatttaccctaagttccagtgctagtttatcaaaatggtataaatcattgaggaacgcatttagaataggtctgtagttttcaatttggtcttgtcagagcatagtttggcttaactcaattttctaactcgttgccttttgactttcaacaaacaataggcaagaaggtcagtttgcaaaaacaatcacgcaga

SEQ ID NO: 94618 - DNA, 610 bp, Eucalyptus grandis
  Intron number 1 from transcript Egrandis_v1_0.008243m (loc us Egrandis_v1_0.008243m.g) derived from phytozome v7.0 (c hr-ID scaffold_8; pos 39747686 to 39748295)
gagctacgactccgtctggatttcctggatcacaggtccgttcgcctctgcttgtgctttgtccattgttgccaaattcgctccgacttctgataacatccatctgtttgtctgttgggttttgttcattggattgtgttcgagataagtgtgagatggaaactgatgcgtaagagagattaaatggagcttgacttttagacttggatgagacaaatttgacttggccgtgaaaagtcggatatttatgtgacatttagtcatgttcgggtgggggtagtgtgagtgattagtgttttctgtttttagataaaggcggtgttggtgggtcggagttggatttattctagtaagcaatgctgtgtgtttcgatttgattggactttgaaatcgtaagctcataaaatggactaccctctctgttcttgaggcgaagattgtacatataacgtggagcatggaatcgattctgactgtaatttgttcaatggttgggtagagattatgatacagtgctaaggagcagtacagtggttgtgattgttacttacttggttgtgtctgcgagcgatgtttctcaaaatgtttgcaggagagtaccagataggtg

SEQ ID NO: 94619 - DNA, 666 bp, Eucalyptus grandis
  Intron number 3 from transcript Egrandis_v1_0.023109m (loc us Egrandis_v1_0.023081m.g) derived from phytozome v7.0 (c hr-ID scaffold_8; pos 16477489 to 16478154 reverse strand)
gaaggccttttgatttggaaggttggtgactagcttgattagtcaatagcatctttcttgtggcattggatattgtgcagggtatgatcatgacgcctgcaaaagtatgggagtttgtaaagtagtgtcttatgtaaaattttacagtggagtagaaaagaatctgcctctaatactattttatttgtttttttcgtaatatcaattgttctgtgttttcggtcttaaatttggattcaaagctaatacaaaaaagaagaaagtggattatctagcttccctttcctagacaaattcagtaccagtaatgagattcctattgattacgaagcagttacatattgttcttttgtgcttgaaaaaaatcttactacaaagataagcaaagtgattaagcaattcaacagacaaagcagagtgtgacaattgtcttacctgcatctttcctgcttttttattgtcatttgtcataggctcatgtcaatgagaatttcactgtggatacacattgcatctgccacacttgtgatcaattttaaattagatcactgcgataagtagaaccagtttctgtcaatttctttgctttaatttggttctgaatgctctcttatcgatcattgagaacctgctaatcccactcactctttttgtaggccttaaaac

SEQ ID NO: 94620 - DNA, 569 bp, Eucalyptus grandis
  Intron number 1 from transcript Egrandis_v1_0.038212m (loc us Egrandis_v1_0.038212m.g) derived from phytozome v7.0 (c hr-ID scaffold_8; pos 48765383 to 48765951 reverse strand)
tggctggtggtttggaatcgaaccttaatcatctcgttggtgccttctccgtttggtcttttacgtttcaaaaatatgctcattttgttgccttttcttgcaaaatttacagtttgagacaacgtgtgctgtgttaggaatttaggaacaagactttcgatcgttacagtttctgggttctcttaagccaagctagttgcactagttaggtggttaatcttgtgcttccccgtttcgtgtctctgtttgcttgaaattttctggtgattgtactgccttattggagttgaattgtcagccaaagctctcatcaatcaaagccggttaaagttgaaaatgaaaatacagtgtagaagagcaaagctctccacatgctttgcaatacgttggacggctattttcttttttgtaaaagaacagcttcttatggcatgattggctcatctactcagaaaagctaagaatgccataggcagttgtatacctatcgcccctgtgttaacttccaagaaaatcttttgctgatgtatgcagagcaagtggctcgttgctggcgtttttggtgccat

SEQ ID NO: 94621 - DNA, 904 bp, Eucalyptus grandis
  Intron number 2 from transcript Egrandis_v1_0.012971m (loc us Egrandis_v1_0.012971m.g) derived from phytozome v7.0 (c hr-ID scaffold_8; pos 63997686 to 63998589 reverse strand)
aaggcaagcaaggagagcgtgccttcaggattgaggtcattcaaattccccttcattcattaccacttttgacttcttgtctctatttgcctgccctctctctctctctctctctcaaccgatttaatgcggatcgtgaatctactcacaatttactgaaaaaatctgtcccggaccgagtgttcacgtcacagtttggttggttccctcacaccaagggcaaactttagatctccctcacacgatccataaggttaggaggtacatagttctagacttctgtttgctctctctctctctctctctctctctctctctctctttctctcctgctgtaaatggtacaagaatgtatctaaagttccttcttctctatcactgttagttccctgttacggaaagcgctaagcaacttgcaagttcgtcaatttcacagaacttcagcatctgtccaaattaacctagctggttcctccttaagacaaaaagttctttaaatgcatgtacttggaagtcaaagaagagatatctcttatcttcaccccaaaaaaaaaaaaagaagaagagctgagtgaaatttaagtattcttgaaaggcatgatcaagaagggtatatccaagtgttgactttagcacctcctggcttcctttctttacttcaggcacaatgctcatattctacgcataaattcctgggcaatgcctgctccactactgtgcctgcacctataagtattgctttgtgaaacaaccttccgcgtatggccaatggcataatggtcaacattgcacatggatgaaaattaaactgcaaattttttccttagttatccgttcattttatttttcttaaaattttggtactgcaggtcgatctcttgagcaggttgcactcaccatactt

SEQ ID NO: 94622 - DNA, 571 bp, Eucalyptus grandis
  Intron number 1 from transcript Egrandis_v1_0.031310m (loc us Egrandis_v1_0.031310m.g) derived from phytozome v7.0 (c hr-ID scaffold_8; pos 23656360 to 23656930 reverse strand)
taactcagtccacggaaggtatcatatgaaacagtacttccaatcgatgacagtatgctacttcctcccctcaagttgatgattgctttattggcttatgggacgagaatatacatttccatctgctgccactaagcagttgcaggagcaaggagccacattactcctgatcctgaaggatggtgtcattttgttggctgtgccttaaatgtgtgtttattctttgcaaaccttatttactcttgcatgttttctttactctactcataaaaactatggagaagtttgcgaatttgctagccatttaccattctcctattaccaaaaaataataaaaaaatcaaacccatcctaacaacagaaaagcctgctaatcaacatcctctccaagaaatattggtagtttgtcaaggttttcgacgtgttgttcaagcacaattctcagatgtaaaatcttcaagaagttatcctttccatgatagagtctcattactgatccattatgctgtttaccttaaactggtaactttctgcagatatccggcattcctcagattcagttgcacttact

SEQ ID NO: 94623 - DNA, 988 bp, Eucalyptus grandis
  Intron number 2 from transcript Egrandis_v1_0.021085m (loc us Egrandis_v1_0.021085m.g) derived from phytozome v7.0 (c hr-ID scaffold_8; pos 37954080 to 37955067)
ctttgacattgagtataggcccacatttcaaaaaggtttggttagctttgctttcgtgttatgttcaatgattttttgaggtcggcttatagtagtgctttggttccatgtttagattgaatgctggttctgtgtttagatcaaatttgcatctttgtgattgtttgttgatttctgttcagcagcaagacttgattttcttgcaactactttactgaaatggtataaattcctgcacttgagtggtctgttgacagttctttcctttcaggaaattgttattgcgatttgttctttcattgtataacaacaagatgccaacaaattttgtttctttttacaaattgatgaatttttcccctggtcttctgaaatattagcttgatttcttccaattgtgctgtggtttcttagttctggtcacatgtacaaatctatatttcactttgtagatctacatagatctatttttaacttgatgttttttagtattgtgcttgtttattgttccttgcttctgtgtttggtaaacaaggtcttttggagtaactattactttttgccatgtcattttcttttaatgaaatttgatctttagcttatgtcggatgcctaacaccattatattgtcaatgaagagtcgtttatctctttttcctgaatttttttaggaatgtgcattattttgcattttcaaaagtttaaagggaaagctaaaaggatttttttttttttttaaagtttcaaataggcaattaatatttttgagtggtataaacaaagtttctttatcttcctcatcttctttcttttcttctactttgatatatatatatatatatatatggtcttgggtgcatgctctggagttaaacttgcatttgaagaaaaaggaagtagaaatagagattaaaatcactacattttattgcttagtcattatcttgatccaagacatgcaggtgttcaacctcggaagacggcagta

SEQ ID NO: 94624 - DNA, 946 bp, Eucalyptus grandis
  Intron number 3 from transcript Egrandis_v1_0.011444m (loc us Egrandis_v1_0.011444m.g) derived from phytozome v7.0 (c hr-ID scaffold_8; pos 66179322 to 66180267)
cttgggctgttcgaactgccgaggattgtgtgcaggttgctgaactgaacgagtgctatcaatcagtaatgcgttaaggaagtgtatgtctagacaaagtcagtgtcttttggggctaaattggacttaacagtagtagttcagtgcgacagttcggcgctatagctgtggttttggctttgacgatggtagttttctgtctttttttggcatacatgcacggacaatgcactcaataaacagaggatagatagaaggtttaaatcaacaatggactccttgaagaatgtgaccatagagacagatatcaaacttgtattggagattcctaaaaggacatgcctagtgtccctgagaagaatctacatggacatggatagaggcttagttgctgtacagtattgttgtccttagcagttgtctttaaaatgataatcagcctgtgatgaaataagcaaatttttaacttctaaactattgatttattgaacaagccttaaaaaaataatagagagagctttgacttgggaaatagtagtacccaagttcttttttgatttacttactgcggaaactcctgctttccataattcatagaatcacagagattacatcacagtatagaggacatgatttcttttctatatccttctgctttggtcattaccttttctgcagggttgaatctagatgcctctcaatgtctccctggactctggtagatatagatatcacaaatctcgttatttgtctggacagatattgccattgagttggatagaaaattttcttgttttagttatatccgaatgaaattgcatgataggcttcactttttcctcacatgcctagctctagtttcaactgcattcaaatgagtcatagctgctgtcgacaaaatattcatggcaattggcttaaaggatgcagtcacagaaggagctct

SEQ ID NO: 94625 - DNA, 687 bp, Eucalyptus grandis
  Intron number 2 from transcript Egrandis_v1_0.031198m (loc us Egrandis_v1_0.030580m.g) derived from phytozome v7.0 (c hr-ID scaffold_8; pos 65107195 to 65107881)
ggccgggtccaccccgccggtatcccccttcgccggtaagcaccgttgatatgcattattttcagacgagcgtcgccaaaactctctagaaatatccgaaataatcaactgcaaagtggggcccattggtcttgtccttgccggctgcgctgccagtctataatggatgatgataacgccgttgtaggtggaggaaaaaacagcttttaatattatgaaattcgtatttttgaaaatgacattcgtgtccctgtcatttgaatgttgacttccctcctttcatgcattatctttctcttatatttttttctctggaacagatgggtcaagcatcaggaatttacattgggtatgttcaattcctcagtgagtcgatagtgctaatttctctaatcgaagtagctgaagaattcctaatcttgccttcggttggcatgcataagatctactaatttcgtgttttcgacgatgctagtgaggcttcttatcttaagctcgcacgcccggagatgcattgatccggtagatcgaattatacgggcgatggcgatgtgttgtttgctttgttttgagtatggataggctgatatgatgatgataataatgagtatggtgccacttctaatgttgacatgaacgtacatgtacgcaggaggtggaggtggaagagggcggtctctattccga

SEQ ID NO: 94626 - DNA, 560 bp, Eucalyptus grandis
  Intron number 1 from transcript Egrandis_v1_0.032488m (loc us Egrandis_v1_0.032488m.g) derived from phytozome v7.0 (c hr-ID scaffold_8; pos 65479999 to 65480558 reverse strand)
agtgtcgcaacctgtttcacactccaagccgccaggtaatatgaatatattttgcttgatgccgatcgtgatgaatgctcatagtttgctgtgagagtgcattgactataaagacctaccgatgatttgtcacttgacgactgaaccattagacagttttttagtccaaaatgctatcttctgtttgaaaaattcatttcaaatcattatatttgtttccagtatctgtaatgtccagtgagtatgcgatcttcaatagtaactagaatattatagaatgagttgctgttctggataattggttctgaatcacatgaatatgtgtgtgtgtgtgagggccagttacagtgtattcaagttaagaggtcgtggtggtaatcatcttttggtcctttaacgtcgaaggattgttgttagaaatgagattttactgcaattaataactctcttgcattttgattttgattaatgctatttgctgccgatacatccggcaggcttaagtattttaattttgattctcagtgacgagtttgaggccaaagagtgcagtgaaagtc

SEQ ID NO: 94627 - DNA, 286 bp, Eucalyptus grandis
  Intron number 3 from transcript Egrandis_v1_0.048944m (loc us Egrandis_v1_0.048944m.g) derived from phytozome v7.0 (c hr-ID scaffold_8; pos 17865365 to 17865650 reverse strand)
gaaggtagggtcggcattacatgcttgaataccctgactgtgagcaggactttctgaatttacatagaaaatttggtcgacctgcttggtgctgactgtgagcaggttttcctggaaaagaaaaaagtaatttaattgccttgcattatttatttatttattttttgtggaaagcacaaagtttcttaatcaaaccttgccttaatgaactgcatattgattttggcattaatttattcctacctgctgataagctgaaagctctgtactctctttttgacaggaa

SEQ ID NO: 94628 - DNA, 404 bp, Eucalyptus grandis
  Intron number 1 from transcript Egrandis_v1_0.047416m (loc us Egrandis_v1_0.047416m.g) derived from phytozome v7.0 (c hr-ID scaffold_8; pos 54531886 to 54532289 reverse strand)
cccaacaggtgactacttttagcattccatctcatgtgccttgtatcgttaaactcgatgcatttaaatttgtttcttttctaaatttgtgttagtcttgttgaaattgtatgcaattgaaattatgcagcaaaatcaggctaaataatatcaccatgtcaatttttgtcccatttcattcccaacaagcaacatttttcgttagttcaggtcattcatttaccctaagttccagtgctagtttatcaaaatggtataaatcgttgaggaacgcatttagaataggtctgtagttttcaatttggtcttgttagagcatagtttggcttaactcaattttctaactcattgccttttgactttcaacgaataataggcaagaaggtcagtttgcaaaaacaatc

SEQ ID NO: 94629 - DNA, 495 bp, Eucalyptus grandis
  Intron number 1 from transcript Egrandis_v1_0.005341m (loc us Egrandis_v1_0.005341m.g) derived from phytozome v7.0 (c hr-ID scaffold_8; pos 16904761 to 16905255)
caagctcgccaacctgccccccatcctcggcctatgtgagtgcttttctgcttctgaatttgagtatttccggttcttcgcatgagaagaagctcatttctagtaaaaatgatttcattaataccaacatatccaccataggatgctatattttttttttatatgaacaggaaaggttatttatatgactcgtgaatagttctaggcatgtgcgcaacttttcaaacttatgccgaatgcttatcaggctaccatccagcaatgagcgagctaaactctatcacaagtcaagatcagcctttttattaccttaatctcatcattgaagtatcaaattagctgtcggctgaaagctgatgtccttttgctccctctttgttcccctcatttttggtcattatctgtccccgatctaacccgaaaaagaaaacaaaaaaaaaacaacataaaacaaccggtgcagattcgagctttgtgccgccgttggtgtacgcg

SEQ ID NO: 94630 - DNA, 603 bp, Eucalyptus grandis
  Intron number 3 from transcript Egrandis_v1_0.015975m (loc us Egrandis_v1_0.015975m.g) derived from phytozome v7.0 (c hr-ID scaffold_8; pos 49512579 to 49513181 reverse strand)
ccactgcggcgaaggaggtaatgcgcagctttactttgtcgcgtcttccctaatttcgattgtgtctgataatctttgcctaattgctcatgttcctgggcgtacttctgcttctcttcaactgcgttttaggattttggatggtgcatgtttcttttccggattggttgtacatctttgaatctttaatctggcgggttttgatatcaacttcagcagctgcagcatcttcgcttattgttcaagactgcacgctacgctagtgcacgatggcgggcagttatgtattggaaaaaagaatacattttgagaggattgtaatggttatttaatgaagttgatgtggtggtcgtgggtagtttttagatactccatagataatctcttaaccatctcatgagataagtggaaatgggtggttactcgatgaaatgagcttacggagtaaggagggtaatattggattgtccgaaaagtgagattgtttgcttaatgatatagatactgatttaggcttgttttaatttctctcctgtacaaattcatcatgtcttttagaaagaggtctttactatattaataagtgcgttatcatctgcatag

SEQ ID NO: 94631 - DNA, 431 bp, Eucalyptus grandis
  Intron number 1 from transcript Egrandis_v1_0.027954m (loc us Egrandis_v1_0.027954m.g) derived from phytozome v7.0 (c hr-ID scaffold_8; pos 26786272 to 26786702 reverse strand)
gtctgacttatcagttgaggtctctctctctctctctctctctctctctctctctctctccggcccccgaggacgtgcggattcataagtgcatgtgttgatttgttgttggagtgtacatcaggcgcactgtgtttgtataacgcaaaaactaaaaattctatacaaataagcaaatctaacgtagagtgattctacaccatgtgctacgacaatactcgcaagtgaagtgaatgatttcatgagtgttacatataaggcgaggaaagattgatatgtttaattattacaaaaactctagctttggttaaattactagaaaatttctcaaatcaaactcttctattttaactaattatcgactttagtatgtctaacaatttaccattataacagaagtatcgctattctacaatttctcctttctacat

SEQ ID NO: 94632 - DNA, 926 bp, Eucalyptus grandis
  Intron number 2 from transcript Egrandis_v1_0.047889m (loc us Egrandis_v1_0.047889m.g) derived from phytozome v7.0 (c hr-ID scaffold_8; pos 25458029 to 25458954 reverse strand)
accaacccattcaaaagtatcacttcggtgccaattatgtgaacggacaagccactcagccaagtaatgctatcgagccaaacaacatttctcctctcgtattattgcaaccaacataacgttatctcaacaagctacacaaggatggcccatggactctgaagcatctcatcatatcagttcaagtctagaaaatctctccttgcattctattacgaaggcacgaacaaaatcgttattggtgatggctcaagtttgcaattaacacacagaagttcaactgaactttcctccccatcatttcatatttattgtcaaatgttttgtgtgttcacgatattaataaagacttaatatatgttccaaaattttgcaagactaaccaaatgtttgtgagattttttttttttttttttttaccattttttgtgagggatccacgcacgaggccattctcacacaaggcctgataacaatgatgtctcttaacttccatcttcacttcatgtgactcgcacaccaccctccactaagattggtgtcagtgcatcctccagtgattcacatcaatgtcttggtcatctctcacatcaaatcttagagtttcttttaacattgaagtaaattccatctctttccaagttatgttctagattttgtgcgagttcagtcaatgtaaaagtcatagacttttgtttggagcttctacattgtttagccaacaacctcttgaactcatttgtagtgatatttgaggccccgctccgataaaatcaatatatggcttttcatgtgtatatataattttttttttttttgtggagcactataccagatacatctggttctaatgaattaaacaaaaatctgacattttctctctatatctagaattcaagaaattggtggaaaattactttccaaat

SEQ ID NO: 94633 - DNA, 949 bp, Eucalyptus grandis
  Intron number 1 from transcript Egrandis_v1_0.014228m (loc us Egrandis_v1_0.014245m.g) derived from phytozome v7.0 (c hr-ID scaffold_8; pos 9499543 to 9500491 reverse strand)
atcaccctcgtaagttcggttccgattcacgggcgagaattgcggtgaattggctggttgaggcatttggccgaacgcatagatgatgtgctggttccggtttgttctgtttgtctgattttgtattttttttaataatgcaattttgcgcatggttcagttattggaggcgtctagctttcgataatgaagttgaagggtccccgcatcgcccatttttcattggcttccttgcgtttgaatttgctgcagacagcttcttgtaatagaacaggaacaaagttcgcaaaccaattagtgagtagatgttgagctagtgacatcggtcctggttatatttcaacggacattgctaactgggttgtgagaattcacttctatagttcatcgggatgcttatgcttatgcagattaaggacccgatttctggttggggcgtttggggatggtggggagaggagcgagataagaaagtttgcttgaatttttatttgaaccaaaagcatgttcttatgtttgacttggaaactttgtcaagcatgtggtggcgagagcagctgcgacaattcgggggcttgtgggtctgtctgccaatgcaaatcttatttctctttttcaatttgttcttccttttgcagattttgttggtaatatgtatcttctccaacatttagtatgtctgtggtgatactcttttttcttctcatggtcactcgtggaccaaaagggcctgctgggaacagctgccctcagcgttcaggtgtttgataaagtttctgtgctattcttgacatatattgcgccttggaggttcatgtacagtttcttgtgccatatttcaatccaataattgtggttcttccatatttgaatattgtcctcattaaagattagggtgctttgcttgaatctggtctctgatgtctgctggtgggtgcagttggaagat

SEQ ID NO: 94634 - DNA, 481 bp, Eucalyptus grandis
  Intron number 3 from transcript Egrandis_v1_0.055152m (loc us Egrandis_v1_0.055152m.g) derived from phytozome v7.0 (c hr-ID scaffold_8; pos 59485185 to 59485665)
cctccaccaaagagaaggtctctcttactggtttcgtgctttagacactagcagactagtgtccctttgtcatcttacccaggtgttgttcattagcttgcgaattttgagtgcttaagcaaattatgacaggttctcaaagctggatttaaagggaaaattcttgtgcaaatttgttctctcttttgtttttacaagcaagattgagattgtctttattcacacgtctttggcgcgaagtttgtgttttcacttactcgccggataactaaatctttctgacagcctcacatgttagcccttcttcaaaattttaggtgactcctgcatttaagaagatatgcaaaaagaaaaaggaaaacaattcttaagaaaattcatgcgaaaaggaatataataaaataattttataagaatataacttctccccaatcgactgtgaaatctgaaggaaatttgtataattcaccaatctccccag

SEQ ID NO: 94635 - DNA, 418 bp, Eucalyptus grandis
  Intron number 2 from transcript Egrandis_v1_0.038628m (loc us Egrandis_v1_0.038628m.g) derived from phytozome v7.0 (c hr-ID scaffold_8; pos 72528690 to 72529107)
tatcaccataccttcaaggacaggctttctcagaggtgggctctctctctctctctctctctctctctcactaaaatgtccgttggcttgatggaagaagcttacacttttcaagcttaaaaagtctcgaacagcttgttgtgatattttgtgctaatcacgaataacttgataattttttctaaggatacagtcttcgaaaatgttgaaatttttggtatggttaagttttgggcttgatctcataataccatcatggcacgcaaaaactgatcctagacactatttatccttgaaaaggggagaagaatagaaagtcttcttttgaagtcattgcataagatttgaatttgatcgctcttgtaagattgtttgcatgaactcttttaggtacggcaaggtttttccgggagtagac

SEQ ID NO: 94636 - DNA, 610 bp, Eucalyptus grandis
  Intron number 2 from transcript Egrandis_v1_0.010922m (loc us Egrandis_v1_0.010922m.g) derived from phytozome v7.0 (c hr-ID scaffold_8; pos 18584090 to 18584699 reverse strand)
ctatagtggaggaacttagtctctctacagctgaggtatgtcgaatttacctgcgagtgttgagaagcacatgtcatgttgtctttgtccgttgcttctatcggacttgtcactgaaggcgcccatatacaagaaatcaaagtaacgatctgctcatattatggctccataatatggacgagttatatgatcaaaaactttgtaaacaagactctctcaaaaataaggatgttggctttgaggtagagatacttctttctctagacatcttattctttctgcattgtaacgagtgaaatgcataccgaattttcacatcgagttccattgttggacacctcaggacaacaaaaccaaaaaatgaagagatttagattgggtatcgtcagctgaaaattgcgactgcatatcattcaggtttctgatcgaagtaataggtttgttcagaatagctttccactgagattctcggacattcggtgacttatagcatcgttagctagatggtaactgaagttcttaatctcactgaactcaagctgatttgcagttactctttatgtgtctttcaacagtattcagtctttggatccatactgacattcggtgc

SEQ ID NO: 94637 - DNA, 847 bp, Eucalyptus grandis
  Intron number 1 from transcript Egrandis_v1_0.002302m (loc us Egrandis_v1_0.002302m.g) derived from phytozome v7.0 (c hr-ID scaffold_8; pos 37663215 to 37664061 reverse strand)
aagtaattacttaatctggctttttctttatcattcttcaattattagaggatggttcctctataaagagaagtattttactgactgatcaattatttgttatgtatggaatgcttttctcaacatttgtaactagatctctcagacttgttacatgtacttttcgctattttaagtcttttgttcattaaagtagggattttcaattttcctgaattatgaagtgaagctggaacatattgcccattcttttgcatttctctttcttaattatctctctttgcatgccattgaacgaaaacattttgaaagtgctctcacttttgtgttattgcggcatatgatcatgcattgagaatctttaggagttttgggttatcctacatcggttgtggaaggggaagggttgtggaagaaggtggtcagttataagtgtgaggaaaaatctcacctttttagctagcttttggggtgagataagtctatgaccaaccaacaatgataaaattttagttttgaggtttctagatacccttaactttcatgatgttaacctaatgaaataattgaggattgaaaggattacaagcaagtccgatggagagaaaaatgagcaagagggcctaggttgtcgatttgtgttcgcttgtcttaattgtgtttgttactatgtcagtttatcatgactcctattagacatgtcaaaccattgaattggatgagagcatgtaaatatctcgtcaaccaactggttaaacatatggtgatgtgtcatattggattgtgtctgtgtttttcatgtttgatattttcatgtaaacagtcagtgtcaatattggcaatatta

SEQ ID NO: 94638 - DNA, 1008 bp, Eucalyptus grandis
  Intron number 1 from transcript Egrandis_v1_0.041272m (loc us Egrandis_v1_0.041272m.g) derived from phytozome v7.0 (c hr-ID scaffold_8; pos 52811802 to 52812809)
tagggttaaccttgtttctggaccggaaaaacagggtgagtcgggaacaaggtctaatgcaaatagggttggatacagggtccaaaaaaagaaaaccggttataacagggtcgggtatagggtccaggtttagaccctacccaccctggacccgatcacccctagtgcaaatgtccattcaattttaaacattttagtttgatcaatttaatcctaaacttttttatggtttgccaatgtagtccttctggctaattttgattagaaatcagtaatgtggataatggtcatcttatgtggcacaattggcctcaacgtggataatttttttgatttttaaattttatgaattatatatttatttgtttatttatgtcctttttcgttttcattttttccactatgacccatgagggttttcggggctcattggctattgggcgagggtcacaaagccctcggaggctacaagcaaggctaccttacccaaatttgagcaaggcattcatggccctcacccctagtcggtgagctctagcggtcctcactagccacaatgaaaacaaaggaaaaaaaaaaaaggaaaaagaagagaaataaataaataaataaactaatataaaatttagaattaattttagaaaattgtctatgttaaaaccggccatgccacgtaggatggtatatgtttatgttagtgattttgaatgaaaattggctggaataactatattgacaaattgtaaaagttttagaactaaattggcaaaattaaaagatttgggattgaattggcaaatacacaataggtttaagacttttttggtaatatttttggaaaaactagatagaatgacacacgacatcaatgaagtattattcaaaattgaatatgtttcatcaattcttttagttcatgagagtattcaaaacttcaatttagcatgacatctacttcattctaattcgttaggccacatcatagtagacttgaagcagtggtttgcg

SEQ ID NO: 94639 - DNA, 1015 bp, Eucalyptus grandis
  Intron number 2 from transcript Egrandis_v1_0.019910m (loc us Egrandis_v1_0.011087m.g) derived from phytozome v7.0 (c hr-ID scaffold_8; pos 11568922 to 11569936)
tggctgcaccagcacttcacaactcaggatttgcggtgaggacaattttataatttgaacaacatgaacttttccactgagttttatctgtgattctctcaacatctttgttttggttttttcctttcagcatttggcctacagtaaaaatagttttcctatatgcaagatacttgaatgtgatacaaaatgaatttggactcccaaccaaacacaggcatgtaaatagacaggaaatgagaacattaaaaagtgcttgctgctctttctgatggttacctatcggttggactcttgcccttgaactgaaaggcagctgtgattcaaaagtaatacttgttaatcttttcaattcatttgtgaagatatgcgtcagcattacttttgcgaaggcttgaataaatgtgcttactatattacttacctttgctttattgttgcaatgcctgtattctcttttgagaattagctgtatttgtgggctttcctttgtttcacataatgttgatataatatcaattttagggtttcttccaccccggaatctcatgatactatatgtctcaacttgaaatggaaattggagttgtgtttctttaatagtgcaatactatattctgtcatgaaccattccaaaattttttcactgatatcttattaaaaaatggatgactatgtctcttaattaagaatagactctctttgttgaatgattgatatttgtcccttctgttgtaatgttgatttaatatcaattttagggtttcttccacccctggatctcatgaggctatatgtcttgacttggaatggaaattggagttgtttttctttaatagtgcaatattatatttcattattaaatgttccaaacattttcactcacatcgtatttaaaaaaaaaggatgattctatgtctcttaattaagaataaactctttatgttgattgactgatatttttcccctttgtataatagggttcttgctctcgaatttggcaacgagattctta

SEQ ID NO: 94640 - DNA, 450 bp, Eucalyptus grandis
  Intron number 2 from transcript Egrandis_v1_0.043095m (loc us Egrandis_v1_0.043095m.g) derived from phytozome v7.0 (c hr-ID scaffold_8; pos 62080559 to 62081008 reverse strand)
gggttattatttatccttcttgtaatgattatggtcctgtatcacaaaattcatatgaaatctattatcattctagtcaaattctttggagtaggataatgataacgttgatatgcctcgtatctccctttgaagacttgatattttgtcctttaaccaggagaaaagagtcatttatcattcttagcgagcggagatcctatgtttgcctttgctcaactgatggacgggttatagtcgattgcaaatttatcattcttagatttgatgttaagttgaccccgagacaagacccttaaccagtccccagttgcttttagatatttccattttgttttttgctagatttactagagtttgcaattgatatttaggctggaaaccgagtctaatccactgtccggttcttctgcagtcttacacggccaaactctcggactttggattggt

SEQ ID NO: 94641 - DNA, 804 bp, Eucalyptus grandis
  Intron number 1 from transcript Egrandis_v1_0.046540m (loc us Egrandis_v1_0.046540m.g) derived from phytozome v7.0 (c hr-ID scaffold_8; pos 6288410 to 6289213)
ggagggtttatttggcctaattaaatgggaggctatatcaatgggaggtttttcattgtaacattcccttgtgcttggtatttgtattttagtaaaggattttgttagcataatagtctttggattattatgagaataacagtttgttataagtcataaacttttaaagtcgtgaaccccatgataatttcaattatttgttatttgattttttgtagtctagaataaaaattatcatcaaattatttatttttaacaaatatattgctctaactgttgtttcaattaagtttgcatcggagaatagattattttgttttggtgcgctagtcgagggcagaagaacaccacaagtgccataacttggcacgccgggacacttaagtgccataacttccaaacggtacacttaagtgccactttttttttcaagtgggacacttaagtgccacctccggcgacccttgccggaaatcatacgtggcactattttattactatttttgccaacgtggctcgccggagagctgagtcggcgctcagtcaccagaaacgacgtcgtctccataataaaagccccaaatcttccaaaaacgacgttgtctccccaaatgccccaaatctaaaaccctaaatcggccaaaatccctattgaagtgctcgaattgaagtctcgaaccctaattttcatttgcccaaaattccttcgtcgaatcttggaaatggagagcaggactcgcagcagcgcctcaatttcctctcatcgaagcgaaggagaaggccagcgtttctgtttttgtgggt

SEQ ID NO: 94642 - DNA, 727 bp, Eucalyptus grandis
  Intron number 1 from transcript Egrandis_v1_0.009618m (loc us Egrandis_v1_0.009618m.g) derived from phytozome v7.0 (c hr-ID scaffold_8; pos 18575892 to 18576618 reverse strand)
tattaaccgaagggggcattgcggctatcgtgctcgtaagcgacgttcccttaagctgttctttctttttctctccctcctcctcctccttgccataaatgctagcttcactaagagatctgatcaaaatttacttaccaagtgacgtggcaggttttaattgggtatttttaataaaatccacacattaagacactagtttctttaaaaacataatagaaaaattgccacatcacttaagtagaaaagtttaaatagatttcttagtagggtcggcatgcactgctctcgtttattttacgagtcttggagcttttctggatttgacattgttacttcatttttgtttggggaaaaatggttgatttaattgttgttcgtgtcccttgcacggctgttattgttatgcggctgaaaaaactgcacgcgtattgaatgacgtttgaaaattagaattacgcgcaacgagacgtgaacttatgaatcatttggtacatataggtgaacaaaagcaaaatcgcttttcttcaagagaaaatgtcatgctacgatgacatggattcgctaggtgacttgaattaactgtgatctaagcgctgtcaaggagagtaaattatatttaggtttaactgctaaaatgataaatttaattcttcattgattgatcaccgactctaattaatctgttgcagacacccctagttctacgtggaccaagcatcggtac

SEQ ID NO: 94643 - DNA, 855 bp, Eucalyptus grandis
  Intron number 1 from transcript Egrandis_v1_0.049498m (loc us Egrandis_v1_0.049498m.g) derived from phytozome v7.0 (c hr-ID scaffold_8; pos 73764641 to 73765495 reverse strand)
ccaagcccagtgagctcatgctgttgctggctagccagtagaattggccacttccttgtgcttccatctcgtctccttcataaaaagtgtttctccaattctagagaaaacaacagaagttctttgatataatagataaagagattgggtatttcttttcagactaatgaaatgaaaaaaagagagatatataccgagaaagtgagcttcaaaataggggggacgaaaaatatataagttgctataaaagcaatgataaagaagatactagtgtttattttctatatatataagtttattttcattagaaaccataaaaaggaaaataaccaagtcaaagggcgctgtgcaactatggaaaccatcgacgcaataagtggatttgtcatctatgagagagaagtatctctaccctaatctattttttttttttttttagaatcacaatagttcgactatagcgagtgtcattaaaactctcttcttgatttagatattgagagaattttcatctaaacttctcaacgatggtaacatagttatgttaccatcatccgaatgggtattacatatagggggtggccgccatgtaatacatatcttacatctactttgtaagcttgatgaaagagccttacctgcaatgtgacgacggcggatgcacctacccagcatgctatgttgcacgtaagcctaacttaattttacggttccctttcttcatgatatgagcaaatttcaaatggtttgtgattcaagcatcgacggtgaggcatcccatcaatggtgtacattgacattattgtgcttttgggattttcaaagacgataaataaatccagttggccggagttg

SEQ ID NO: 94644 - DNA, 659 bp, Eucalyptus grandis
  Intron number 1 from transcript Egrandis_v1_0.021375m (loc us Egrandis_v1_0.020502m.g) derived from phytozome v7.0 (c hr-ID scaffold_8; pos 42301624 to 42302282 reverse strand)
tacgcggtcaagaggtaaagattgtagtttaaattaatctaaatagacgttcgatcttgattcttcataaggatatatgatgcagaaaattcaacactctactaaaatttacattttcaaaaaaaatacctccaacgaggaatgtccaccttacttttatcgagttggaactaatgacaagatcaaaagcactatcttctccttcaaaaagatttgcaccccgactacatagacaacatgtataggcgtgattcgcgtaagttggtccggaagataattgtatggtttgtaaagcgattttcgaaagctgaatgagttttaaaaaacccagacatgatattcgcctctgccataccccaaaaaaagaaaagaaaagaaaacctaattctttattagcaggaaaaaaaggtaatcgctcgagttcaagtatatatttacctatgaacactatgtcatgcaggcgagtattgcccctgggacggtgcgaggagctaatgacaaagtaagatccctctctctcacaaccgcacgaaatcaccacctcaagtagacagaatcaccgtgacataatccgattcaattgtctttaagtatatatttacctatgaacactatgtcatgcaggtgagaatcgcccctgggacggcacgaagagctaa

SEQ ID NO: 94645 - DNA, 663 bp, Eucalyptus grandis
  Intron number 1 from transcript Egrandis_v1_0.015920m (loc us Egrandis_v1_0.015920m.g) derived from phytozome v7.0 (c hr-ID scaffold_8; pos 70290489 to 70291151 reverse strand)
gtcgaccactgtcgggaaagtcattcgttgcaaaggtgcgagcttctgcaatgaaaagcatttgcgaatcatgcttcttcttttatttttatttttatttttatttttatttttattttggttcagcacctgttgagtcagattcgcatggttccttgcggtggtctaattcatggttttaagtggaacttcctcgttgatcatatgcccctcagtgcgtgtttttgacgatcatcaggttgattatgcagctgggatttaggattttgtgactaattgttggtcctgctagttgaattgtgccggctgcatataacgatgttgcttgagttgctaattccactgcttgaagtggtccccattatgccggcgtcaaatggacgtacagtccgctgattctgataatttccagctttgttgtgttcaaatgaagcttcaattaaagaatctgaatatggtggtaacctaattcgggtttccgccaatgctaatttgcccagttttggtcttccgcccccgttcatcgtaatatcaaaatcccttttctttagaatacactatgatgtcctgctttatcgcagttttttaccttctcttcaaaacattaaatcactgcattctgcttgcattaaccgaatgattttggatatcagctgcggtggc

SEQ ID NO: 94646 - DNA, 742 bp, Eucalyptus grandis
  Intron number 3 from transcript Egrandis_v1_0.004002m (loc us Egrandis_v1_0.004002m.g) derived from phytozome v7.0 (c hr-ID scaffold_8; pos 3437064 to 3437805 reverse strand)
cgaaggtatatgaagctatgactccaattgcaatatccttctactgttaaaatggagattggaatttgcatcatagactatgtacgtggcatattttttgtcttgcatctgtgacgtcatctatggtgagtggtcttgccagaaccaagctggtgataaccactcctcacactgagaggtgcgaagctcatatagccatggctggtggttgcttaggtggcgacgtccctacacaagcacactctctcagcatagtcaattgtgttaatgcaaagggaatttgttgtgaaatcatacaaagtagaagagttgattgcaccaaaaacagttcaaagaacaagctgcacaaatagcacaagtaagagaataaaagagaactgtcccttcatgttacatgaaagtctcttttattctatagaaatagtagcggtttgacttaagcgaactttggctggatttgacttttgaaattgtttcaatttacatgagccagagatgagttgagctcaagtatgctgagtttctcttgattgaatctctaattcaaaaagatgccttggtttgagctcaaaccttactttaagcattgacttatttaactcaactcaaattcagttactaaactatgccaccaaaaaatttcagaggacgccgacccttattgtgccttcttcttgctttctatggtctggttagcttgccatacttggttttctgaaaatagttaatttctgctgcaggc

SEQ ID NO: 94647 - DNA, 966 bp, Eucalyptus grandis
  Intron number 1 from transcript Egrandis_v1_0.002401m (loc us Egrandis_v1_0.002401m.g) derived from phytozome v7.0 (c hr-ID scaffold_8; pos 50281433 to 50282398)
cgttcttcttgacggcgactccgcaattcgggccggtcgtcttcaatgtcatcagtttctccttttttctttaacgtgatgatcgctactgcctgtgctgcattacattgcctcttcgcttcgtttggcgcttgcacgcttctgggttttctcgtttttcgcctttcttgactgaaaatcggtgtgagattcacgggtattgagtggactaagtgggctatgtgaacatgttggtttgcttggagagcgaccctcgattgggtgaggtttttgacgatacggaaaggatggtagtgcgaattctctgtgcttgtgtgaagggtctttcattcggtgtagtgcatttttcgctttcgctgttgcgggagctattaatgcttgagctttgttgtctgcttctgtggtgcgaaagctattaatgctagcgttgctaatttattagagagtgttgactatttttgtggctggttcttggttctgatgttagaggtagagttacagaggcgggcattggatgacagtgtgtgtggggggctaccttggttacttgtttcttgtgcaccatatgtagtagcagtgacaggactcggatgataattcctgccgaacggatgagatgcaatgtaggtgtaaaacgcctatgtttcttccttttgacttttgcaattggcaaggagtcttcccgatccatgaattcattggaaattttctggagggcaaagtcaaagatataggctgtttgatttttttttttttttaaactttcgtgcatgccattgcagacgctcttctagatgaaagtctctacgcgatgatcattcttgctttgtgtacgccagaaaaggcacctgcttttgtttatttacttttctttggacatggaaatgctggctattttaaaatatttcttacttttaggtgaaactgatagttaaattttcacatcgcagagccttctataaaact

SEQ ID NO: 94648 - DNA, 372 bp, Eucalyptus grandis
  Intron number 1 from transcript Egrandis_v1_0.013750m (loc us Egrandis_v1_0.013750m.g) derived from phytozome v7.0 (c hr-ID scaffold_8; pos 39702638 to 39703009)
tctgggtacgtgagaatgataaatgaaagaaattgaatatacgtttgattttcttttccaatttcataatattctaaaaaaacctaatatcaacaaaattaaaaggaaaagccattaatttaaaacagaggaagatatatatatatatatatatatatatatatatatacatacatatatataaaggccgggttgggcctggcacgtggttagggctctttaacgggctcgaggcccagttcgccatccttcttcttcatcctccaccacggccaccgcgtcctcgcgtctcgaaatctctgcgcacaggcagcagagactccgcgctaggctgcagcttctccttctttcttctgctgctgccgcttctgc

SEQ ID NO: 94649 - DNA, 596 bp, Eucalyptus grandis
  Intron number 3 from transcript Egrandis_v1_0.013750m (loc us Egrandis_v1_0.013750m.g) derived from phytozome v7.0 (c hr-ID scaffold_8; pos 39703382 to 39703977)
gctctgggagctgtttgttcaagccggtcctgttggtaagttcggctcctctttcttgtgtcgatgcctggtttcgacgaaatgctagagtatgccgtggaagcgatcgcttgtagctgcagttttcatagctttgtgttgctggtgtatttgatcacgatatcctttaagctgcccctttgtcgtgcttgcagaacaaaaaaaaaaaaaacagggaacattttcttaaattctctctgctaacttactttggaattactctgaagcggaacagtaagtttgaaccggtcatgtgaagagtcagttgttatctttttcttggtgttgcgaggaacattgttttcttctctcccagatgggtttctttaattcagtgattgagttcggagaatataaatgatgggtttgcctctgtgcattgtcatgtagtggagttgattaacccagcagaattctctattctttccttttgagctcattgttgtaatttatatttccttttgtgtgaataaagcccccgcacctttccttgctttgtttgaggtttcagactatcgaggatgaatattcaccattattgtaactcgtttcagtta

SEQ ID NO: 94650 - DNA, 957 bp, Eucalyptus grandis
  Intron number 1 from transcript Egrandis_v1_0.004501m (loc us Egrandis_v1_0.004503m.g) derived from phytozome v7.0 (c hr-ID scaffold_8; pos 64348191 to 64349147 reverse strand)
tccgggtttccgccggtcggctccgcaggaacgaggtaaatgcgctcgcggagcgaaccgaacggatcgtccgagcttactttgtcgctcgatgaagacgccggtcttttaggtggccggttcgtagttgagacgggcgttcctggtttgattgtcgtagtagaaggaaacgaacgattccgttggggcgcgcgtggctcgatcgaacgtagcgtcctctcttgcgtttttccttctcgtggaagaatcagcgaaggacgcccaattgtgaggaggcagtatgcgcgttgtgttgatgttttggagagtgattttgttctttaggaggaaggaagataagaattttgctggttggatgggcttaatttaatcagggcattgctgtgtggttgagtcagttctgtttaatgtgtttttagtgtaaattttcatgtgagagaggaacacagcccaaatgccaaaagcataggcctgccatttgttatttctgctcttgttcgtttcacttttgttggaattgggacttgcctggttgcggatttcgagggtttttgatgcgaaagctgagatgatcaagtccctcaccatgatataattcctaattttaagaatcgaatgactgtcttttcctttcttttgggttccgtcactgttcggcaggcaaatagaaattaattctcctgttgttgctgataaggcatgattcttctatcccgtgtacacccgttatttctgtgagtccagcttacttacatgatctccgttttacgacttggaggacttgcaggctttcttgaacgtaaaattcttttgcaacatgtgcacgtgggaccaatatcttgttataccgatgacatacagagagattccatttattcttacaccattatgtgacattctttattcctttcttttattgtagtctccagtccatcctaaaaattcagaatctatatc

SEQ ID NO: 94651 - DNA, 977 bp, Eucalyptus grandis
  Intron number 5 from transcript Egrandis_v1_0.002312m (loc us Egrandis_v1_0.002312m.g) derived from phytozome v7.0 (c hr-ID scaffold_8; pos 19325826 to 19326802)
acggtaagtgttttcaattgtttttggtttttcttgaagatatgctactagaagtgatcaacttgtcatttatactggtaaccactgcaaatttaggggagatgctttatgatcattgctctttgcttctctttgattagatgagatggctataagacatgctttgtgctgaatctatttgcttctctagttttgtttgaaaaagatttctaactttaaagtagatgtgtaatatactgtgagcaaaatgctgcagctagtttcaaatgtgttgggcttgaaccattatggtgttattcatcctcagcaactcgtttgaatggttattgcgatgctattttgatgatgcatcgaaatgttcttttttatttcctttttagagtatgttcatgatgatattatacaagtatcctacatggcttgtctttaaaattttttggggacctcatatacttgtagtctccatcaacataatggctttagcattaggagtgaactttctaacatggtatcatggcctagttttgcattcttcactgaactaataggtcatttcccatgtggttcttgtttatgttgtcatgtgcttcgtacagtttctttcttaaattgcacttgagaggaggtgtgaagtgattcgtattgtttgtttagggatttatttggattatatatgcatggagtctccattgccattatagctttggatcgaactttctaaaggatattatctggcaaagtatccttttcaattgtggacacgtggtgcttgctcatttattatgacaccttatattgcctttgcaatacaatgcaatgctttttgctttcttcattttatttctagaattgtcggtcggtcaagccattattcttgcttttaggtctttttgtatttttgatgaaggcattgttggaaggctaatgataacgtgaccatgggaaatattcttttataggaaaaagagttctttcag

SEQ ID NO: 94652 - DNA, 491 bp, Eucalyptus grandis
  Intron number 1 from transcript Egrandis_v1_0.032800m (loc us Egrandis_v1_0.032800m.g) derived from phytozome v7.0 (c hr-ID scaffold_8; pos 58334061 to 58334551 reverse strand)
aggatcgccagctcgattccactcgcgttcaagaggtctcctcctttttcactcctccctcttctctctcttccatcgcttgtgctctgcatccgggaaaaaacgaaaaggaaaaaggaaaaaaggaaaaattgaaggagaaatgtgtcggtgaagttacgagatgtttttctgtggatgaattttgatacgagaggctgctggagataaatgtttctgtgtcgtttttatcgtatgtgtaacaagaatcgatctttgtgcgggtgggcagatcatttctttccggcgtttttgttccgaattttgtcgatattaatcctttttttgtgtcctaagattaattcgagcgcctgttttttggaaattgaagtgcgcaagttggcataagtgacgatttcgcggaattttggagcgattcggttgagtggatgctgtagttctttcgcaaaatctcaatgcgatatctgactgactgtttgatgtggcaggca

SEQ ID NO: 94653 - DNA, 1032 bp, Eucalyptus grandis
  Intron number 1 from transcript Egrandis_v1_0.039943m (loc us Egrandis_v1_0.039943m.g) derived from phytozome v7.0 (c hr-ID scaffold_8; pos 49601397 to 49602428)
ggtatcctaggtaaagaaggaagaaaccagaagctgttcgcccttcattgcgccatttcctttcatcccgccttcctccatccatcttcttatggtctacatgcgtttattttttccgcttgatgaatcgttggtatttagtatctttagcatgatggttagcaggtcattctcttcttttcttcatcttttcgtttggcaactctttcttccaaaatctcattctttctctttctatcaattgcaacacacacgtaaagcaaccgcaagaatcataaagaaaatgagaaaattttcccccttgcactaatcttgacaccactcttcacatagagtttttctctcttttgatgatacaaacctcgctcaaaatcaaacctccaacaaccttttgagtctctcggacttttgccaactttttcacaacccttttgaccatttttccaacggatattgttttcactctagcacacttttagaattaactttaaatgctgaagtcggtatgctagcgtctatcacaaacttatgggtccatcttcaagttgttgcaacttaagtaggatttatattgtctcgagtcggtttgcatttcgtgggaattcattcttttcatcttttggctatatcgtgtgtatacaaaggctatacaaagacatgcaacatgatttagttcaagttctattcaaccatgctatatgtgcttagcacttagattagcaaatgactctggttgtttttcttcttctttaattataaccctagcaaaaagagcattttcatttgcacacacttgcacaaaataatctaacgtttgttgttttcttctacaatcgatgataggaaacattgtcacgttcttcgtcttcgtggctccagtgtaagtgatcattttttttttctttgaagttcttttctttcactaggatgaagatagtgtcattttatttgatcccaatacaataactacaattctttttcttttctcttgttgcaggccaacattttatagaatttataggaaccaatcga

SEQ ID NO: 94654 - DNA, 1017 bp, Eucalyptus grandis
  Intron number 1 from transcript Egrandis_v1_0.008523m (loc us Egrandis_v1_0.008529m.g) derived from phytozome v7.0 (c hr-ID scaffold_8; pos 50382017 to 50383033 reverse strand)
ccgaggacgtttgggttttagttcttggcgttcaggttgaagttctacaacccattcttgacgttcttgtttttctttttcgctgctctgtagttggttatttttcttgtgggggtgaagtagatcttgcatgcgagtcaagaaacgaatcggaagaaactgattccttcgttagccccagaaattatcgggacaaagaaaaaagatttgttcaagaatttcgcgacaaagtcatttgctgagtatattttcttgatctgttgctgagtcatgggtatggcctagagaaagctctgtgggacttcaatagtagactggattttagtgtgttacgaaagctttcctgggtcggtaggagtatccatttgggtgctttttatgatatgttttcccgcagttttcttgtatatttgggccaacatagcaaatgcagcagaaattgttgctttgcgttactttacaatagttggtatccattggaattcggagcagtaatttccctgttcgactatccttggtgtcccaagtaaattgctcgtcgatggttggtctggtcagttatagtttttgccaatattgcaaagattggaaatggtgtttcggcagctctgtcctgagatattgttgtataactgtgcgatttgatttaatacctgaagtttagaagtctggctatgggcttgggcgattcaatgcgcactcatggaaaaagttgtgatctttcaacattgtgatttagaaatgaggtgaaacctgtcgcttaggaaatgtctttggggtatatgcatgttagattctctgtttaagttcatgggagccatataaggatccaaagtttgagatgcaattatgaaaggttttgtcatgttttatttagagcactattttctctttattctgcaaaataagctaaaattgtttggactgtttagagtttgctcttggtgatcttcccacactgggtgtgctagatgcttatgttcttcgaatgatgcttcttgcagttgaatcatctga

SEQ ID NO: 94655 - DNA, 714 bp, Eucalyptus grandis
  Intron number 1 from transcript Egrandis_v1_0.034928m (loc us Egrandis_v1_0.034928m.g) derived from phytozome v7.0 (c hr-ID scaffold_8; pos 54900824 to 54901537)
tcctcctccgctgctcagtccctcggtttttgcaggtagcgtgcttgttgtcgtccgttaggcttttcttttttcgctgctgaggaatctcgacgtggattgttgatgccagactgatgggttcttggtcagtagggggccttctttaagttgagtttgatgtctagatatggggcggcgggtggagaatttgatgattgatgaggaagtctgaataacttattcaagggatgtgtacctggtggtgcagtcgagttgaagcggagggatgattatgctgtcgggatcgtgcttgttgatagagacgccgtaattttcatcgtgtttgcttcgtatatttgatattcgagacatgattctgtaatagaatgaatcgcgtcgaattgtttcttctagtctagcgcttcatgttcttcagtgtcggttctgggttgaactagtttgttgatacaaaacggagctgcgtttctcttggcagtaaaaggttttgatgcgaccgtcgttggaattcacagggccgactcgtggcaatagattgtctgcttccccttgttcgataatttctagtttaccgtattcttctgaagcaagtgctgaaatggaggaacccacaggattttttgcctttttccatctaatgtgtgtcttgacacattgtggagttctttttccgatatttggttcttgtaatatcatgcagagaccgtgaaggag

SEQ ID NO: 94656 - DNA, 419 bp, Eucalyptus grandis
  Intron number 1 from transcript Egrandis_v1_0.010269m (loc us Egrandis_v1_0.010269m.g) derived from phytozome v7.0 (c hr-ID scaffold_8; pos 15153432 to 15153850)
gagctggcttggggattagagctgagccgacaaaggtacggtctaaaaattttcatgcaagcatgctccacgaggcattagttggactggagcacgttgcacgctttaagaaaaagaaaaacatattttgtttgttttatgttttttttttcttttttatcaaatgcagtgcccgttctttattagcatttgatacgtgaaagaagccgttatacagcactgactcggggtagatatataattcaacgacgaataagtaatttcttttcaaacttgcggaaaacctaataataataataataataaaatttataaaaaaaaagtgtggcatgtataaattaagcttcgttttagtgttctttgactctatattttataaatttctttcatcttacaaatatatacttttgtaggtttat

SEQ ID NO: 94657 - DNA, 736 bp, Eucalyptus grandis
  Intron number 1 from transcript Egrandis_v1_0.002919m (loc us Egrandis_v1_0.002919m.g) derived from phytozome v7.0 (c hr-ID scaffold_8; pos 63153619 to 63154354 reverse strand)
tcccttcttgaggcctccattttgtctgatcaaaggtgggttctcgttgttttcttgttttgtccattaaagtttgattttttatacggatttcttaggtttagtttgcgtttcaacgttggacatgcagttctggttgattctttgtaatttgccttttgaatgtaccgaacaacatagtagctggagggcacaaaccatcacttagatggctttaaagggtcctttttggagcgtggacttacagtgattctgggctttctttgtgtcaagggagcagtcgattagcaaatacataaccccacattcgaatgcttggaaggtctaaatccaaatggttttgatgttggtgtttgaattctgatttggtactgtggagtgtgggcatggcactagattaggcgcatgcgtgccggcattaaagattcatttagttgatcttgttcattgagtaaacgacttatcgtttattagttgtgtttctgtaatctttggcatctgcatttatgaactgatcacgctggatatgtttctatccgtcatgaaaagtagtttctgaagctcgaaatcgtgggcatacctgtttaattgttatatctttccggggttgaatataaaattttaatttgaaagggcaaaaaagttgtagctggagctgccgtacttggtaaaatgctcgcttaccattcttggcgtgtgatcagaatctcttgtagggtcaaaagtttggtcgcca

SEQ ID NO: 94658 - DNA, 494 bp, Eucalyptus grandis
  Intron number 1 from transcript Egrandis_v1_0.021286m (loc us Egrandis_v1_0.021286m.g) derived from phytozome v7.0 (c hr-ID scaffold_8; pos 48595917 to 48596410 reverse strand)
cggctggcggtttggaatcgactcttaatcgtctggttggtgcccttctccgtttggtcgttcttgtttcgaaagtataatgatttcgttgccttttcttgcaaaaattacagtttgcgatagcgtgtcttgtgtgttaggtatataagaagaggcttttgatcgttgcagtttctaggttcttcttttaagccaagctggtcgcactagttaggtggttaatcttgtgcttccctgtttcgtgtctctgtttgcctgaaattctctggtgattgtactgccttcttggagttgaattgttaggccaagcactcaccaatcgaagcctgattaaaattggaaaagaaaatatagcactattggctcatctactcaaagaagctcagaatgccatgggcagttgtatacttattgcccctgtgtgttaacttccaagaaaatctctactgttgattgcagagcaagtggctcgttgctggtgtttttggtgccat

SEQ ID NO: 94659 - DNA, 957 bp, Eucalyptus grandis
  Intron number 2 from transcript Egrandis_v1_0.023498m (loc us Egrandis_v1_0.023498m.g) derived from phytozome v7.0 (c hr-ID scaffold_8; pos 59254122 to 59255078 reverse strand)
cccagttcgtaagcaggtatattccagaatctaaatatggacagatggatgaagaatatgccaaaattaacaaaaatggagttcttattctttttctggacctattttatggaaaccctaacatcacgccaacgaaaaaggtgaccttctgcatgttgactttgaatgagctgaccgtaaagttccaattagggataaagtaacagactaggccataatcacgaagacatttcatgaaaagaaggatggaaacctttaaggaaactgacttgcgttttctgagaattgaaggttgtcggaaagaagttctgaggaactttctttctcttttcgctcgatagatagtcccggtactattgcattctatttattgaatattttcgtgtaactttctcggccaaactctgagcatttaacctcctaccccatatgttgaattctcctgattctgatagataaacacatgttgcacgtcaagcatagaataatactatgcgtagttacacttcgatgaccaagaaaattgacttctagaggtgcttgacttgtcgataaggtttggcctcatctgctcatcatcttcattttgatttcgtccacttcttcagtttcttctctttcaaatttgattttgctttccttgaatggctgaatcttcaaatgataataagggaattaagtgcataaaaaatgataccgtgaaacttcattttatttatgacacgatagacagaaccaatcacagtttacaaagtgtacgatgatatttactttttgcaagattctctataagtttcaagattttattttatgcgatcaattttattaagtaaaatgagccggacttacacttgctagttgctatgacacgacacccaaaaaaaaaaggtactctcttttgcttcttaatttctccatttatcatattgaattattctatttgacgcagatccaaag

SEQ ID NO: 94660 - DNA, 736 bp, Eucalyptus grandis
  Intron number 2 from transcript Egrandis_v1_0.019875m (loc us Egrandis_v1_0.019875m.g) derived from phytozome v7.0 (c hr-ID scaffold_8; pos 66922189 to 66922924)
ccgttgcattaacactgggtaaagcaggttgcaaggtgggtgtgatcttgtcaatccacaggctttgactatttgcaacttagtattttgcccgctttatgagtgttctgctctgcaaatgaatgaatattcttccatgcacatctgttgttttctcttggcaaagtgactacggtgatatgagtaaatgcacttccttattcagtgagccattctgaaatcgttcaagtaattgcatacgttggttctcaagatacagtatatctttgtaacaggccatgattgtgatgcttctgtgtgtgggcatgcacatgtgattcttccttgcgttcatttgtaaatgcagtcctgtcttgcattttggttcagaatatccacatcctaatttttcgttcaatttccacaagttgagagaaaagatatttccaagaaatgtaaaaaactttgacgtggttgatagtattatatagttttcaaattgatgtgatttacttaaacttagaaactcaaaacgttgcatcatgaaataaattaaagaaactctgccacttgcattttgcacaaaaggtaagacatttattacttattaatttttttgagttttctaaaacttcacatgtattaagccatgaataattctgacagatttatttgaactgtattttattcatcctcactaagccatccatcatgccattgttgttcttccttgtgccatcgcaggtcctagtaaatt

SEQ ID NO: 94661 - DNA, 423 bp, Eucalyptus grandis
  Intron number 2 from transcript Egrandis_v1_0.014257m (loc us Egrandis_v1_0.014257m.g) derived from phytozome v7.0 (c hr-ID scaffold_8; pos 51978307 to 51978729)
agcctgtctctcttggagagatagcataggcattggtatttctcattatcaatctctcctacttctttcttgtcttattttcattttctttttaatcttaggaaaaatgtttggtggacttatctttgtgcatcacatcgtcctagcttagcttctttaccttttgtctttggttaaggttgaaccggagtccctctctctactttatttgagacttcgaattgagcgttaaagggagcttaatcattaaagtcacgcaccctcttcaaaaacgaacaaaagagagaagagaatcttgatgggttttttcccccttatgttttgaatttgtcttgatcttagcttatagtacttttttgttttgcttttggtggtgtttcatatgcagagcacttgatagccgacgagttctcagctgaactt

SEQ ID NO: 94662 - DNA, 877 bp, Eucalyptus grandis
  Intron number 4 from transcript Egrandis_v1_0.007034m (loc us Egrandis_v1_0.007034m.g) derived from phytozome v7.0 (c hr-ID scaffold_8; pos 694641 to 695517)
aggtttggtacatgaattacaagttgttgatgttgaggcttttgtgtgctgatcaacttcctctagaatgagttcccccactggaaatatgtgctttgattgcatcaggtgttgcttagtttatgctttttttgcccttgcaaaactgagtcacaggcatgagcttctagtttctttcctttgccatttttcattgcttttataagggaaattcaatagattctataaaaacaataatgccattctgccaatgattgtggttttgtaatgtgatcattctgtatacgtgtctgttacagagaatatgaggcatccttgtgtaggggtaaaaaggtccttaactttctaggaccatatatgatcaggtttagcagagaaaaaagatatataggtaattgtgtgtgcgacatcatgaatgggtgagtcctttgaatctctcttcattcatctctgaatctgcccgcttcaaggttgatttataagttggtttcctatgtttattgtggacatcatttgtttcctagaatttgatgactcagttgttatgagttacaatggacgatgcttctcctgtctcaatgtatcactttgtaagcatgtcaatgtgcttgtcattgtatactgacaagaaatgtccatttaaggaaggttgggtattgtattggtaattgtgagttcttagcgatgtttagctttgtctgatctgatattcaaattattgatgattatcatgctgaatatatctatttgggctactgcagtcaatggacttctgtcaggtcgttgtagtcagtgatataattcctttcacactattttttttttaataatgattttctttctcgaaatttgcagggagagcacagacgtggcaggc

SEQ ID NO: 94663 - DNA, 647 bp, Eucalyptus grandis
  Intron number 3 from transcript Egrandis_v1_0.008033m (loc us Egrandis_v1_0.008033m.g) derived from phytozome v7.0 (c hr-ID scaffold_8; pos 72547359 to 72548005 reverse strand)
gtccaaggtaactctttaagtgtggtttttatatgtcctgatggtactactgattttagtgcttaccaataagaagaatgttcctgatagatggagaactaacttttctactgaatttgaatcttttgcacttctatccatggtgttttttatttaacagttaaatattgacgctgcctgatcaaggttaatgatgagagggatgttatggactgtaacacaatgatagatagggaaaacagtgactttcgataaagttactggaaaactttagggaacattgtttcaagtcttaactctgtttctgcattatgtgttattgcacattgtagcatttgcatccataatttatttctaaggccaccattgaattagaacttgtagagcttcttcattctgatatgtcttggcattatcatttcatattttcctttgcatgtccagctgaaatttgaggttgacaaaactcagttggagatctatgttgtctattttacccaaaagaaaagaaaagaaaagaaaagaaaagaaaaaaaaaaaacggttcatggaacctagtttaccctttcgctatttacttatcttgatgaagtgctttttcccattccaatgaacaggtaaatttaggcaccttccagttgtggaaa

SEQ ID NO: 94664 - DNA, 385 bp, Eucalyptus grandis
  Intron number 2 from transcript Egrandis_v1_0.041116m (loc us Egrandis_v1_0.041116m.g) derived from phytozome v7.0 (c hr-ID scaffold_8; pos 71020578 to 71020962)
cggtatgtcatttcaatttctcattgattgatcaattttgtgaaattataatgcaaacactagtttgatagcccatttgattgattagagtgaacacataatattgctatgatgtttattttacttcaattttaatttgttaattcgtcaacttttttctttgtatacaattcttgcattttgagttcttcaaattttctcgcttttgagaggtgaatagtactttcttttgactccttggattaatatgtcatgtttccattgtttccaattgatcaagatattatgcatgatgtttttcatggcatctcttgatagcatcttttcccatgctccattttgctgtacagaaatcttcaacaagttcaaggacaacgaagggaac

SEQ ID NO: 94665 - DNA, 610 bp, Eucalyptus grandis
  Intron number 1 from transcript Egrandis_v1_0.051442m (loc us Egrandis_v1_0.051442m.g) derived from phytozome v7.0 (c hr-ID scaffold_8; pos 933045 to 933654 reverse strand)
ccgttctactggcctgtctcttctctttcggtaatttgcccgactacttacttttcttgcgctttttacctaatgacataaataattcagcatcttccgaactcgcacatcctctccttaggttatttggactttggaaatacaaacgaatgaaagtcagtttggaaatgagaatgaaaatgaaaattaagaatgcttcgtttcattgaaaatttatgatggaggaaaaaaaatttcacgggaatcatttttcaagaaaattctcaatttttatttgtttgattggttcggaaaagtgtcttattttttactacatggagaagtcatttgctctcaatctagatttgttgttttcactccatggaaaacatttttcagttagatcgatttgttttacatcatttaaacagaaagttggaaaataatttttctccaaacaaatggatcctgaaatattaaaggattttccattaattaactatttttgtccaattatattttggactctacagagaatatatatgcccataattgcaccccatcaaatatctttaataggatcacgataatcttccttcttttctctttttgctttttcggtttgaagggg

SEQ ID NO: 94666 - DNA, 823 bp, Eucalyptus grandis
  Intron number 2 from transcript Egrandis_v1_0.008957m (loc us Egrandis_v1_0.008957m.g) derived from phytozome v7.0 (c hr-ID scaffold_8; pos 42942501 to 42943323 reverse strand)
tcttcgagaggcgcctaatcgagcgatacgtttcggtctgggtcccgccactctagggtttatgctctttgtttcgttctgtttcgttcgttcgttccttttgttgttgtggagagacgtgtggatgtgaaggggagagggagatgagcatttgggtagggtatagtttgttcgagctgtgaggcgacataagcctgcgacctagcaatcagtagtagcttgcttttttcagttgttgaataagttcttggtgatgtggaatttctgagtgaatggccgtgcttcttggcacttcctgattggtgagggtgcggggaagagaaggaaataacaaatcttggttttgtcgaactttccccccttagtctttttcttctgctctttcccttgaattgaaaagaaaaacggatgtaggcagaattgagctaggggaactgtagaagtggtttctctgatggttgtctagttcctttgcatgtgccatgggaaacagtgcacaggttaagcttttaagagtaaggtatgatagtagttccagtcaaaattaattggatttataaaatgtaagatgaatgagctctgcgtacttgtattaatataaagaaggattgttcctttttgttcggcggatttatcgtgttacaatccttcatgaaaatgataaggactcaggcatcttttgactatttgacctgtgtgaacggtaatgtttagggatttatgctttgttctatatgatgtatatggtcttcacacctaaaattcttacatggatgtcttcatgtgagaatgatcaatttttcttgttcatttgggtaggatt

SEQ ID NO: 94667 - DNA, 914 bp, Eucalyptus grandis
  Intron number 1 from transcript Egrandis_v1_0.013652m (loc us Egrandis_v1_0.013652m.g) derived from phytozome v7.0 (c hr-ID scaffold_3; pos 77279586 to 77280499)
gagcgcttcagattatcccctggtgacccaagacggtatccaaagagacttcaacttcgttttcttgatgttcttccatgatatgaatgcctctgtttctgcaaccgccctgatttttcggatttccccttcgtgtttaaccgatcctttaaggtcgttggtctgctctgctgggcttagataagcattttatcagtgagcctcgaagccgagctggtagttctggaaaactagtctttgtacagggtccagactatattaatttactaacatagtaacatgatcatgtaaattgtctgctgtgatcggtcgaacgtttctttttccgggctatgactatgttcgtggggatatcaagttgatacatttcggaactactgacgacttggtgtcgccattcttaactacctctagccgtttggaagggggatggtattgtctacttcatcaatagtttcttgaagtaggtagaagccgttatttcttcttctgttccttgacctttggggcttttcctttttttatctttccttcttaggcaacttgaggagagtgagtctatgctttgatctgctttcacaatcaggagtaggatattatttaattactcctttggcagaaaccaacagacttgctcatttttactagtcaatccgctgactaaccaccctgcacctaggcttttggtctcgaaaggttcaaagtggtttattcactcaacgccttctgcggtgggttatcaaaacattcttagtagtgaaatgggtttttttgtcgccaaaaattcgatgtaaatgagcatggaatcgatatctgtagcatatgcctactggtcacttactgaaggtactaatcatgtttgtcttttcattgctacagatttgcttagcactctgttgactatacccagaaac

SEQ ID NO: 94668 - DNA, 659 bp, Eucalyptus grandis
  Intron number 1 from transcript Egrandis_v1_0.025117m (loc us Egrandis_v1_0.025024m.g) derived from phytozome v7.0 (c hr-ID scaffold_4; pos 36525051 to 36525709)
acgagagaacccaattcatcggttaggatttttaggtataaaagacgactcttttgttatcaagttgtggacttttcaggatcacttgctgcattaatctctggtttgttttagtcagcccagctgatacatgtctttaggttggtggtttgtattctaatcattttcttttcatggtattacgttcattgtaaaagcaggatataacgttgattctaaatctttgaattcctcatgtattgtgatagtcttcttggttgcatgagtccatttaatttcgttggttttgcctaatgttcatacagttaaacaggccctgaatcattacaaagtccgcttgatggataatcatctgtttgtttagattttggttaagtggatgaatgattctaagcacagaaagattgatgaagctctgaagaaactgtgtccttatctttaagaagcatttcctctccgttgtctgctaaatggaagttttgtttttgctttttatagatgccttttgaattatatcagttcttttgctttttcttttatccaagacatatatggcctatccgaactgaactttttcaaaaggaaaaagaaaaggaattttggtatgttgacatgattaaccacagtacttttctcttacggatagattggtctataag

SEQ ID NO: 94669 - DNA, 1028 bp, Eucalyptus grandis
  Intron number 2 from transcript Egrandis_v1_0.005775m (loc us Egrandis_v1_0.005775m.g) derived from phytozome v7.0 (c hr-ID scaffold_1; pos 35924220 to 35925247)
ctgggtatgaggctttctcgtcgatttgggtttcgatgttcgtcctgtttttggtgaaagtgttgggattaagtgctgaaattgagtgcgagctttgtgcacgggcagttattgatggtgctccatgtccagataaaaagatggaagaacagaagtgaaaatgacatttggaaaagtagaatctttaaacttaatggcaggagaatcttcccttcaacttatatctttatgaaaataaacaaggattttcactgttgatgacataaagcaaaaagtttttgctctgtcgagactttgttgaatcattgacaattgcggttcttccgaatgatgtgtgtcatgttacattccctgctacaatcttgcttttttttttttttttttggtgatacttttgatttggaagttgctgggctcattctgcgagtggacgatgaatgatcaatatcgtcatacaaaacaatcgattgtttaggtagtcaaaaatcccactgcaggaattaatatctggcaaattcccatgattctccagaaacttttagtacctgctcgagtccgggttatttgttctttgctgtcaattatttgcgacttcaatttattgaatgctttggctacagtccaagactcagcttctgttcccctgtaagaaggtggcaacttttgaataagaagaaagtaattgagctacctatggttactttaagtctctaaaattttatattgtggacatatattctctctctctttttttttttttttggtcgaatgtgtacatatatttgtcttccataagtttatgctgaaagttttggagtcaaacttattctggtgttcccgatgtttctcagcaattaagcaaagaacagtgggatgatgagttttcagtgctggatcttttgttttctagtgcttatggaagtttcttcccattcaacttttaatgagcttgcaaggatcttgatttggtggcgactattcttttgatgtcagaggtgtcaagctcgggggcaaaggcagcacggcat

SEQ ID NO: 94670 - DNA, 578 bp, Eucalyptus grandis
  Intron number 1 from transcript Egrandis_v1_0.042770m (loc us Egrandis_v1_0.042770m.g) derived from phytozome v7.0 (c hr-ID scaffold_9; pos 1198547 to 1199124)
gagcaccggtcctgccactagtattgtgatttttagttagttatatagttatgattatgatagatacatgtacagaacaagatctgtttggtcctgggatgagaaaaggaggacattgatttgaccgtatggattcaaaattcaatgaggatatgaaatgatgctttctctaagatgaggacttcgaggtcgttatgatctgcttagtgtttgatttctgcctgcgcagatctgtttccgaaacagaagccttgccttgtgcggtttgcgttatctaatgcaaattgtagatagttctctcttcggaagatctgaagatcttttggcttcaaaagcatgcacatcacgaatatggttcactgagtaacatgtttgaaagatgtccgtgtaagttgtctgcagtcttaatccaagtcggagctctaaatctctatgcatgatctgcaaaaacgactgaacttttcatgtttattcgtatatcttaatgaagtaaagacaatcatatcgtcttggacatgatgggatggcccctcatccgctcaaatttcaaagctaatagggtgctgaatactttgtag

SEQ ID NO: 94671 - DNA, 715 bp, Eucalyptus grandis
  Intron number 1 from transcript Egrandis_v1_0.039232m (loc us Egrandis_v1_0.039232m.g) derived from phytozome v7.0 (c hr-ID scaffold_2; pos 6731719 to 6732433 reverse strand)
tggcgattacgagtacgccattgcttttcaggtatgttttggtggtggttcgtgcaaagcttgaaactttgagcttgatctgttgggaatctctgttttgaggtgctctgtttttggatggtgcattcatagctttatagatcgttcgcaggactcgtgaattatggtgatgattatgaacgctgttaggtatttgtctgttctattatgctgatagatgctgctgacttttagaagaacgaattgttataggtttttcttgtggtgcatgtgtcggtctctctcgtattttggagctcgatgattgaagttcactagacttgattcagctctaggggaagcaaaaatctattttaagcacaatgacaaacaaacaagttaagattcctgcaataagtaagcttgggaactattctgctggttacaatgttagcggactgcgtaaatgaataaagattgcaaattcttcatctgctaaatgattttttcgccaagactcgtgttttccttcgaatgacatatcggggagttatgatgatgggttcctgttgcttaaatggctgtgtgtttcttcattatggatagtttgtggacttgttgcaagttctctgtagaccaaagtatagtttctcataaattatggtgatgtctgactcctgcatattcaatttgctctgttttataccaggaaagaatcaaaatccccgacgataag

SEQ ID NO: 94672 - DNA, 482 bp, Eucalyptus grandis
  Intron number 2 from transcript Egrandis_v1_0.001216m (loc us Egrandis_v1_0.001216m.g) derived from phytozome v7.0 (c hr-ID scaffold_3; pos 54580508 to 54580989)
ggtactgcattcgaaaccttagtacatacatgttatgcaaaatggcttcaatcaatatgcttggtgactaggctgctactcagaactagagacgtggtttggatggatgagagttcacttaatggcatctttgagatgtgatgtggtattattattttttacctttgcaaggaaaaaagcttatgaagaagaattctgattttttttctcatcattccctgctgcagttctgctgagtgtgaaatcaggcaaaggctatcaatttattaaatcggttgttgcagtttcttatggctattagtgtgctcaagtgctcagttagtgttcatgatttaattactttgatgctcaccctccacagattgcgttactttataattatttatagaaggttcaactgcgtaccataatgctaagctctcattgtacggtgcttttgttttttaggaggactagtgggccaactagacgttcaacaaagg

SEQ ID NO: 94673 - DNA, 524 bp, Eucalyptus grandis
  Intron number 2 from transcript Egrandis_v1_0.012544m (loc us Egrandis_v1_0.012544m.g) derived from phytozome v7.0 (c hr-ID scaffold_6; pos 52380577 to 52381100)
agcttctcaagactaagttctgtcatcctcttctggtaacgtgccttcgtatcctctgcaaaatgattagttcttattctgcctgtttgtgtcgtttgtttgaattagccggctctgattttcagtgattttggaagatatatactttaatcgcggcacgagatgatgctgaatgaacgaaattgctcttgctattgtaatgtgtttagcctactgcacagattcatctatcccctgaagaaagcatatctatttttggaatgaacccttagttgagaaaatacacctctgagatgctatggataatttaagcacctgagattttgaaacttcattacattgttcccatccatttagctagctgacaacagagaactgtaaatcctgaagtggctaatcaccatgttcccactcgtctatgcaatctactaggtctgacagtctctgcattacatgtgttttgtaggaaaaggaaatagaatttgccgttaatgacatatgagtactttacaggttcggttggg

SEQ ID NO: 94674 - DNA, 964 bp, Eucalyptus grandis
  Intron number 1 from transcript Egrandis_v1_0.040808m (loc us Egrandis_v1_0.040808m.g) derived from phytozome v7.0 (c hr-ID scaffold_5; pos 16575804 to 16576767)
gtgccgtagatgtggcggttgcggtaaaagtgctactaggagcatgtatagagcttatcttggtaagctttaaagctacactggtagaagatggattggtccaagttgaccaaaagtgcaacagcttggtgtttctaggaccagccgtactttcgaatgccatgtctcttgccttaaaaccatccccaaagacagctgtatggattttaagagattagttcaagagctaatacattgatgagctagttattgaccgacattttgaaagcttaatatcaaatgtagttgaagtcatagtggtggaaccatccataacatttctactaccggtgatgatggtccgatcgatgctgtcgttaaggaaaattatgttcttcatatcctttccaatattgactttcttgttataggctctagattttatgtagaataccactcagtcaggccgtttcttacccattctagctagcgtagctacagtctcattgattgtctcgtgagagccacaattttcctttatcacaatgaaatcggccttagatgttgttgcattctaccatgctaaaagatcacgatttgggtcggcctcaaacctcggcagtgttcttgtaagcaaatgagtgtaataagcatgtgatttgagtacaaaaatgaattttttggacacaataagaaatttaaaaaatgaatttgactagtgatgataataataccaagtataatctaccaatgaaaatgagtgtatatgcatgtgggttattgaaaagcaaaaaagtccatgcgtgccaatggcgtgcggcctgcgtggcctgagctctttaaattactatttttgttgttatttatttatttattatttattatccaaaaaaaaggaaaatacataaatatagaaaataaggcctaattaaaaacctaatcaaaatttatgtgtcaacaataagcaacattttgtctgcaaacc

SEQ ID NO: 94675 - DNA, 690 bp, Eucalyptus grandis
  Intron number 1 from transcript Egrandis_v1_0.024158m (loc us Egrandis_v1_0.019694m.g) derived from phytozome v7.0 (c hr-ID scaffold_1; pos 6147034 to 6147723)
cgttttcaggtactgtgtgtgtctttgttctgggacttgttgcgtgcaacatatgtgatgggtttccaaggatagaagaggtttgcaggtcctctcgttttattttttgagtgtgggtagctctcatttgtcatggctcactatagcaaggaatctcttgttgtcaccatagcgagtgttgacactagcacatgtcagggaccctggattttgtatgcgttttcagttactgtgtgtgtctttgtcctgggacttgttgcatgcaacatatgtgatgggtttccaaggatagaagaggtttgcaggtcctctcgttttattttttaagtgtgggcagctctcatttgtcatggctcactatagcaaggaatctcttgttgtcaccatagcaagtttattttataaagcaagaaaactctgtaaggccacctcttggttcttaataattatcactggaactcgtaattgctgtgcatcaaatttgtgatgttcttaaactgtaactttgtagatctcatacctaagtttggtaaattgtgatggcgttctgactgtgagctgattctcatgcactcttctaaaagacttaaaagccaattctttattctaaagaaacattatcagttgtttgattttatcattgtttctcctaaagaaaggtacaaagcttcgaattgcggattttgtcca

SEQ ID NO: 94676 - DNA, 543 bp, Eucalyptus grandis
  Intron number 2 from transcript Egrandis_v1_0.003283m (loc us Egrandis_v1_0.003283m.g) derived from phytozome v7.0 (c hr-ID scaffold_2; pos 55673856 to 55674398)
tttccatttcatctcacatctcctgtggtatctaatctttagcctttggctttttttaagtcataacagaaccttgaaacaggactggctcttcttggaaaccattactctaggccattgcgactattcccatgctctgtttttcctcattaaagaaaccaatttcactaacatctaggacagatcagtgacacttttcaaaatatacttttatggcatgcttgtgctaagtatgttcggcacagtggtgcatccgtaaatatgatcactatgtatttcgtagggatttattgtagatgattgtaaataatatcggattttctctatgactttgaattaaaaaaaaatgtgaaggggtgaaaagaacagaattttagtaaatttggaaggagaaaaacatagggttcaggatcatggcgcttagttttgacatctttttgggaaagacaattgtaaagcaagctacaaggagatgatcgctcaagtttttgcttttatcttgaaacagaggaggactcagttaaggacagagcagaacaagag

SEQ ID NO: 94677 - DNA, 387 bp, Eucalyptus grandis
  Intron number 2 from transcript Egrandis_v1_0.014360m (loc us Egrandis_v1_0.014360m.g) derived from phytozome v7.0 (c hr-ID scaffold_1; pos 22083894 to 22084280 reverse strand)
acaagctctttttggacgaagtttttgtgctttgggtaacctctcttcttcagttttgagttgctttaagtttcccttttcctctttgacattatttctaagtaaaggcatcttggagtttttgttgctcttaagcttgaaatttgggggtttctatcatctttataaagctcattttttttttttgttgcatttcttgtgtgttttttgccgagcaaactactgctttgggaatagtatcgcgagaatttcttggttgagattacttcttctttacttggcctggacaacggctcaaagcttgatctcctgaagctacatccaagtgactaatattctatcttgatgacaggaaggaaactgtgtgactgaggattaagaggggcg

SEQ ID NO: 94678 - DNA, 372 bp, Eucalyptus grandis
  Intron number 2 from transcript Egrandis_v1_0.023142m (loc us Egrandis_v1_0.023142m.g) derived from phytozome v7.0 (c hr-ID scaffold_5; pos 2236594 to 2236965 reverse strand)
cacaaagtagcaaaagaacttgcagttggtcttgggtattattacattgtttcatcctttcttgggttctggaaaattattcaccaagtttcctccactctgatttcaccattatcaccaaacctcgaaccaaaagaaagaaagaaatcccacaagatcctaatgaagactgaaatgagaaagattaaaacatgttcacgtgttaagagctttggaatcaattattcactcatgagctttaggatcaatcactacctgtgccttttcaatgtcatgatatttcgtttgtttttacactgatgtgctgcttgctgaagctcaaatgtgtcatctgcaggtacacgcctcttgagaccaaggagttgcttgaaa

SEQ ID NO: 94679 - DNA, 920 bp, Eucalyptus grandis
  Intron number 2 from transcript Egrandis_v1_0.011029m (loc us Egrandis_v1_0.011029m.g) derived from phytozome v7.0 (c hr-ID scaffold_6; pos 20318129 to 20319048 reverse strand)
gagtgcaggtaaatttttagctcatgttattgcttggtagtttgttctttcgtcagtaaatattattcattgctcattggactaggattgtgtaaaagcatcagaagaatatttgatatacttggggtataggaaattgtaaaggtcactagcttcaatttgatgaggaattggtagcattttgagaaatgttttgcacaatgatatgcaattctctggttaatttggaattctacaagtatctatggtctatctgtagtgtcaattgagtcaaagcagcgagtgtctggtcggttgcagcacaaattagcatttcccgtgggttgcaatactagcaaattctttgaatgttcgtcattgaagacaaaattgtcaatggattacaaatgaatccatgaagtggctgtaaaacccttgatggggcctgtacaagcgatgcttgacaggccacgttcaccctcattaatttaaatcagattggtgagcttgaagacttaacaaaaccttcttaagtaactcctgctaagaagcctcttagttaaacacgagaaagaaatttcactgggaaaataggcctgggtgcttttctattgtgctaactgctaacttcactctgaggggcacgggttttgttggaaaagtgtagatgatccttcttgcatgggccagggagacagaaacctcctcaagaatgagtagtatggtgtttcctcagtgaaattgcaacaaggcgtgacatcatcactgacatcctacaagcctagctgatatagagtcacaccagaaggctattgaagtgtattttgattagttttataatacatatgaaatgaataaattacatcatattgcttttgtctgagtacgttctgttcatacaaataggttctctctgcaaaaggacagaaagccattgatat

SEQ ID NO: 94680 - DNA, 393 bp, Eucalyptus grandis
  Intron number 1 from transcript Egrandis_v1_0.048491m (loc us Egrandis_v1_0.048491m.g) derived from phytozome v7.0 (c hr-ID scaffold_1026; pos 12735 to 13127)
cttccctttcttgcatcaatcctcccaaacatgtatgcacttcttcatagtatcactccgtgtggcacttatattttccttttaattaacactcgcttggtttcgtcctttggtcgaagctgttgctgatggagtttcagaacatttgaatatactattctttatcttggaaattcatacttccccgttttgcgtttttgcgaccaaagatgttaatgcatctcaattcctttaaataattgcttattttgatatgcacacaataaggacatcttaccttacaaaagcgacattaaataaaacttgcatgtgaccgtgtcgtgtgacagcagaccatgtatttcatttggcgccgtggctcttaccaagtgcattgcaggcaaagactcgttc

SEQ ID NO: 94681 - DNA, 1017 bp, Eucalyptus grandis
  Intron number 1 from transcript Egrandis_v1_0.031703m (loc us Egrandis_v1_0.031703m.g) derived from phytozome v7.0 (c hr-ID scaffold_1289; pos 8864 to 9880 reverse strand)
tggtacagagattgtacacgtgcatatatgtttatatgtattttgtgggtgcattcagttgccttagacgattttctagcactaaggcctagtgttacttccaaggtatatctgtagatgccttgagattcttagatgctggatacgaaatagtttctgcttctcaacatgactgctaaacagcaatttactcttactttgatagaccttgaaatattattgagccgtgtgttagatcctaacaacacgttctagttgaaattagacaatcatgccatgatttcgaatgaattcaactgaacaaaacaaaaggctaaaaaatgaacagttattttgccaaatagcaggttcgcatgtgactctattgagtggtaacgttatggaaaagaacctggcttagtttgacaattattcattttttatggcctcctatatgatcctaagacagcaaaatagtagactttgttcattttttcttaagagttgctatcagcctgactgacgatgcatgtgatatgctcaccatgtggggtgctttattcgcgtgatgggagtgcggttcactcattttatagaaagcattgtattattgtaggttgcctctgttatgactatggaaccaagtgcaaccagcctatgctgcgaacatatggaatgaagcactcaacaagtgactaggcacaaaggtaccgtcccattcaatttgcaattgtctgtgtgacgttatgcatcttgttttgcacactgaggtgcaactgaaagctaatgtctcttgaatgacattctgttaacaaatgttatatggttgtaattacacttactttactttttggctaccttacgattgtgttgcatacagggcttggatcttcctaatctaatacatgaaactgaaatgagggggtcatcttttgctgaactgctgacactccagagcaagaccattgggtatacagtgacgggaagtccgcctcttgtgtagcttttgttcttgaaacgtgcaaggcagcagactct

SEQ ID NO: 94682 - DNA, 450 bp, Eucalyptus grandis
  Intron number 2 from transcript Egrandis_v1_0.002715m (loc us Egrandis_v1_0.002715m.g) derived from phytozome v7.0 (c hr-ID scaffold_2; pos 47152756 to 47153205)
cgtcagcaactccatactgtatgttcttacttcgtgtttgctgtgtacttggtcttctttgtagttagatctctttctttgatcaaagatcacggtgaaggttagagaaacagatcttgaaaactgactagcttgcactagagatgattcctctgtattatatgacatctctggaaaataagacgctggaattggaatcaaatctcgagagttttgcgtttagttttgcccagcccgtgctagttatcatatgatcgttgagagtggctttttccccctttgaattataaatgtagctagagaaagatcttttggtctccaaacacccatttcggtttgatttgcttctttccttgctgaataaactattttatattttcctttacacaatttgacactgctattgcgaatgtgtttggaattatttgcagacatcggctactactaccg

SEQ ID NO: 94683 - DNA, 387 bp, Eucalyptus grandis
  Intron number 1 from transcript Egrandis_v1_0.008898m (loc us Egrandis_v1_0.008898m.g) derived from phytozome v7.0 (c hr-ID scaffold_4; pos 32684353 to 32684739 reverse strand)
ctcttgctttcaactccactttgaagattgacacggtgatttctcattccttctgttggtgtttctagttgcctcgtatcgcttctagctactttatataatttgatcttaaacttttttggtgtcttttgcgctacaatttatcactttcttttctcactctttctttatcgaaattctgattctaggcttgttgaggaagtcatggttaatttcaaaaaaaaaaaaattggcgagcaagcggattagtacatctatattaattgtacatactgtaaatgttggaacgtcaaactccatacatgtctgtttttgctggacaattgtctaatgaaattttcctttgtttcagtctacaatctctgcgggtaatccaagtaatcaaag

SEQ ID NO: 94684 - DNA, 1004 bp, Eucalyptus grandis
  Intron number 1 from transcript Egrandis_v1_0.021719m (loc us Egrandis_v1_0.021719m.g) derived from phytozome v7.0 (c hr-ID scaffold_7; pos 49232176 to 49233179 reverse strand)
gcgtcgagtctcccgaagacctggaaaggctcacggtaacaaaatttgtttttctctgctagctgcttgattaaagcttggaactttctttatgccgggaccgttaatcaatttataatcatgttcaaagggagcaactgtgggatgagaatgatttaaatcggttttattggtgtcttttcaatggtattgattgggctttattgaagttgctggatactctttttattcagctaaatatggaattattttcaggatgtcatcttttttttttttttttggtgaaccaggatgtcatcttttagtttgattaggatttgtgtttttctcctgaacgcctggaaaggcttactgtaacgaaatttgtttttctctgcaagctgcttgattaaagcttggaactttctttaggccgggactcataatttatggatgattatgtggaggaaattgcgggatgaaaataatttaaaccggttttgttgatgtagtttcaatggtattgcttaggcttgattgacgttgctggatactcttttattcagctaaatatggaatcattttcaggatgccatctttttgtttgattgggatttgtgtttttctttgaaaatctattgatgctttctgtattcaagagtgtgtgtgagtgtgttagtgtgtgtgtgtgtgagagagagagagagagagagatgaattgaatagtcatgttatttttttgggtcaataatatttaagctttactgatttgttgacattttcacatgtgtattaactgtggtaaataaagattttagtgaatttatatctacaagcaggcagagaaaagaatgaaatcaattgaaaaaaagtgaaaatgaatctgttctgtctctttcaggtatacaacttgggtgggcttgaacgtgttctgtttctttcagggttacacattagtcttttagcatcctatgtgagattcgatactatttaaccacatgcaatgcaggtggtgcttgatttag

SEQ ID NO: 94685 - DNA, 760 bp, Eucalyptus grandis
  Intron number 1 from transcript Egrandis_v1_0.007958m (loc us Egrandis_v1_0.007958m.g) derived from phytozome v7.0 (c hr-ID scaffold_6; pos 35479558 to 35480317 reverse strand)
cgctctcctcccccgccggcgacgtctacttcgaggttcgggtcccccgtctttcggttttcctggagtctcgtgtgcggcggggccgccgccgccgccgccgccgccgccgtcgatttcgctttgggtctctgcttgattgaatgcgcgttagcggggcgcagatctgggccttttcctaattagattcgcccgctgctcaaagcatgcgaatttcagctcgatcctttcggcactggacgcctctgtcttcatttcattgaggcggatcttgctttccgacgccgcgcgtgttgccgttgttttgcttggattgtttgtttgtttttttttttttttttttcctgcgttttcagcaatcgccattgagaatgtcgcgcgtctttccgcgacgtttggtgatgtcttggtatgtagaggggtaggaggatacaagaatgcgcatgtgggttcttgctgatgggctctgtttgggagacctctgctgtcgaaaatgatcctaaatagtaaaaagaacgtggctgattggtttggaaagcgggaacaccagctaattgtggttaaaaataggctttgctattgtcttgcgccccgaaaatatagactttaccaggcatcctccagttttgaactggttttctcctctgatcttattccgtttggctgtgtactaatctcttttgaccgccgagtgaccctgtgaattttttgttatttatcggaaggcagggtcctcctccactttgcgtggattgcaggg

SEQ ID NO: 94686 - DNA, 775 bp, Eucalyptus grandis
  Intron number 2 from transcript Egrandis_v1_0.006029m (loc us Egrandis_v1_0.006029m.g) derived from phytozome v7.0 (c hr-ID scaffold_33; pos 86935 to 87709 reverse strand)
atatcgtccggggaggtgcagttactataactccagtaagcgactttccctagagcttttctttctctctctctttcttcttcttccttctcctttctttctttctttttttcgtcggtaattccccctcctttcttaaatgctagctctattaagagatttttccaaaatttaatcatccagttacatagcaagtttcaattggatactgtaatacgtaggacccacacattaggtcattaaaatctttaaatgacccacgtgaaaaattgccacatcacttaagtaaaatagtttgataaaatttgagtagattgagcctgcactgctcttttatcgttcctcaacccatggaggttttctggatttggttactttaaatttgactgaggaaaaatgtttgatttgatagtagctcttgtctcttgcgttggtttgtaaatcagaattacgagaccggtggacttaatcatctgatacatctaggagaacaggagcaaaatcgtccttctttgataagaaagatcatgctatggtgacatgatttcccccggcgaatagaaatagaactggatctaggcgctatataggagagtgaaagtcgattactcttctttactctagacttctccacttgcgacttttaatgaataaaagcctgtctttacacttatacaatgattgtatcgatttatctttgacttgatttatggcttaacctgaattatttgtatatcataccactaaaattctcttgccttttacagatagttcc

SEQ ID NO: 94687 - DNA, 857 bp, Eucalyptus grandis
  Intron number 2 from transcript Egrandis_v1_0.033618m (loc us Egrandis_v1_0.033607m.g) derived from phytozome v7.0 (c hr-ID scaffold_10; pos 7205912 to 7206768 reverse strand)
aggtgcccccggcgagtctagcgcttagcttcagggtaatgatttctagaaatagaatgtccatgcttaatgttatctagctttctgtttgatgcttactctccgcatgtagggattagttttctttcatttacatctttctttggcagtcacacttgatctcgcctatggtacactctcatgtcagaaacgtgggtcgtatgcagttttaaacttccaaggttaccattttcatcctacgtttaatttcttaggatggaatatcagcgttaatttgatgattagatattgacatgcgggtgacaaactttgcctgattgctttgtttatacatgtgatcagagttttcactgaaacagacacttttttgtcaaggggatactttggtaggtttaatccgtagtctcatggctcaaggcttgccaatttgctttttacgctaaaagatcaatctaggaccagtagacagtcactttctgcattgttgataggttattggcctatcggttgaatgtttgaatctagatggtattgttctccttacaactcatggaaaaattgattctcatgcttagtggaagaatcgagcttcttgatttggtttttgtagcttatttgattttaccttaacgagctctctaggtatcatcactgtatagtcgttgcatgattcaatgaaataaggtagagcaattatatttcaatcatgttaaaatcacgctcacccaacagcatgtcatgctttaggtaaccgagtttgtttagcagcagttttgctcgtacggttgtaatcatcgacctaaatggatctctttctttcagtttcagggcgactgaagatatacatctaggcctgc

SEQ ID NO: 94688 - DNA, 460 bp, Eucalyptus grandis
  Intron number 1 from transcript Egrandis_v1_0.025676m (loc us Egrandis_v1_0.025676m.g) derived from phytozome v7.0 (c hr-ID scaffold_11; pos 38413586 to 38414045 reverse strand )
aaaaggtaatcgtcttgtcttaaaattgagcttgatgctctcctccacttactcatttgggttgtgttaacacgtaatagtgcaatggttctaatctaattaagatgagatgtaactccaagtcctcctagcaaaggcttccttgacttctcttgaaaggaccacatcgcatcttcataagatttgagattatactaaacaaaagagaaaagattgaggatttgttacattctgtgtacaaaaaagccatttagagcttgaatttccgatgtaatcttcatttcaataataatagtcttagactttgatcaccaccaaagtctaagtttttgagttggaattggtgaccacgtctctagttagatctaattcatgatcacaagatctgttgaccaagcaaagtttattctttatactgtaaacagtgcgtgccagctatctggaaatcccttacgagcgt

SEQ ID NO: 94689 - DNA, 587 bp, Eucalyptus grandis
  Intron number 2 from transcript Egrandis_v1_0.017063m (loc us Egrandis_v1_0.017063m.g) derived from phytozome v7.0 (c hr-ID scaffold_10; pos 38329273 to 38329859 reverse strand )
cagttaattttctttctatgttgctcgatgttgtttccattttattatgctctaaattaatctgcatattgctagctgatgtccgttttcttgctttgcctaattatactatctaatccatgaaaaccagcgttcatgtttttaaattagtttggtgactcttggtagttggttatttgtagtcaaaattttctaaatttatttcaaatgctgcgaccaaggtgtgactttgttttggttaatacaagtattgaaactgcttgtgagtgctcttaacgggagaatttgcaattatgaggtgaggtgactaaaatttgtcaataccacatgcgaagtagtttctccaacgattggcttattttttgtttcggttgcctgtggtttgtagctgtggccttaattttccgcttttgaagtaacttttgctcgcaccttttctgccagaagccatggttgggctttttttagggcccccaactcccaagaaggagcttactttaagttattcttgaactcattatgttatgcactctcaagcttgctcaatcttggcactcaacaatgcattgatatgtagtcttctcagc

SEQ ID NO: 94690 - DNA, 928 bp, Eucalyptus grandis
  Intron number 1 from transcript Egrandis_v1_0.024403m (loc us Egrandis_v1_0.024403m.g) derived from phytozome v7.0 (c hr-ID scaffold_6; pos 9999380 to 10000307)
cttccttgccgctttcacctgcgcttttgctttaggtgagttctaatttccacttcccccagcgcttttgcagcttctctctaagcttttgtccgtccaagtcatgcacaatttagctagcagtgaattctcagttcagagaggccgcagagcaagctcaactcactagtcattctgtggccatcaaccaacctgcaaacaccataatgcaaacgctagagaaaaggggttcattgtgttgagccttgagctttgaacttatggaactgttgtcgtgcaactgcttgcatgtgccgggccaaaaacaaagtacaacggagtcgtcattgcatatatccaatttaatgcaagttcctggtacagagaagcaccatcgcattattacatcctcataagtctgtctcctttcccaatattgttagccagggtaggtggtaccttttttcccaaatgcttcgcagttttatcatcacccgtaactaattcattgcttcactgggtgtcgtctgccttcaccagtaaaaaaaaaaagatgaattaaagtcagttatggggaatttacagtcttactcagggatgacaggacaatgagaggctcaaactttattctcaacttgtaactagaaaagagtcaaatgcatataaactcggtccatcacaattaaagaaacataccaaatcacaaatttcacacacgatagtctccttgtgaccggcctgcttcccttccgagtattagaaggagtctatgagataattcttctgtaggtcagcacgaaaccttggcaatatggccaagttattgcttacacaactaagactttgatgtagatatggtaatgcactagtatgatgatatcacatatttatgaggaatgtgctaatttctgtaggtggagcaattgtgggaataatttcaggagcgcta

SEQ ID NO: 94691 - DNA, 632 bp, Eucalyptus grandis
  Intron number 1 from transcript Egrandis_v1_0.048402m (loc us Egrandis_v1_0.048402m.g) derived from phytozome v7.0 (c hr-ID scaffold_7; pos 5203066 to 5203697)
aaggtgcaacatatgttatcctaatttataattgctattttgatgtggccaacactattcattccagtaaagatcaggctgttggtattgaatggttttctcatcaattcatttcgttgacgttcaggtgattttggagtttattgcggaggcatttttgaagttatctcaggcatccaggcaatattacttttaggccctgtccatacttgagattgttgcacgggtcaaagcatgccttctaatgcttgaccttaaatgtgatgcactagttctccatatgtttcaaactttctgggaaatcattacgtaaaaggcttaccagtttcatttattttctaacttacattcttctttcaaaataatatgtggaattgttttgaaagactgaaagctcttctattgatgagactcttatttgataggacttgtgcattaagtagtgatcctattcatctcggagaaagacgttactttctagtgtcaatatcaacattatttgataggagactctattgttgctcccatttgatggtttctttgataaaattgtagctcttgacgttgttctatcttttctcctatttcttgttttttgatgatctcctcttggtcaaggttgaatccctcag

SEQ ID NO: 94692 - DNA, 887 bp, Eucalyptus grandis
  Intron number 2 from transcript Egrandis_v1_0.041403m (loc us Egrandis_v1_0.041403m.g) derived from phytozome v7.0 (c hr-ID scaffold_10; pos 11074404 to 11075290 reverse strand )
caaagtgcgcaaggaggtcgtgcaggtgttgcgtggccaacttcccgatgccaatacgattcggaagatgaaaacggtcagtgaacacatacctaatatgaattcttttacgatgccatgtattgaatgagtttctcgattggaaaaaagaatgacaacgaaaaccttagactagtcatgatgaaataagcttttcctattgtcaacaaccattgactcctagttaagtctgtactcatgatatcgattgcagttgacgatggtaatcaacaagtcgctacgtctctacccacgggctatgtaacacagacactcttcaaaagccttcgtgtcgtatctgacactccgacacgctccgacacgcgatcaacaagtgttgaaaaatccgacatgtggtcaacttgctccgacacgcaagtccagaattccgacacgcgattccgacatgcacagggtcaattttaaaaatttctaatacttgaggggtcaaaatataaatatacacaaaataagtaataaaagaagtaataaaattactataaatatacacgcacggggtcaatttttttttttcagttttgtttttttagaattgttttattttttttaagtcttttactatgaaagaagtaataaaaaaaatgctatatatgataactaaataaatttaaaaatatcatttcagcatttttctttaaaaaatatttttttcctctaagttttgtgtataattgtaacaaattaaaataatgaattatattatttaatatttttcgtgtaaattaattctaggctatttttattattatttatttatgtatttatatataaaaatatatttaatatataacgtatcggaacatgtcgaaattctctacttttaagaa

SEQ ID NO: 94693 - DNA, 788 bp, Eucalyptus grandis
  Intron number 2 from transcript Egrandis_v1_0.005529m (loc us Egrandis_v1_0.005529m.g) derived from phytozome v7.0 (c hr-ID scaffold_5; pos 71923118 to 71923905)
ctctctttgcagcaatttcggagattaaaattactgttttttgcttgggaaatagtcaattttcttttacaagaggtgtttgatcgcagctgaatttccatcgtcatattatgatattgtcgtcaatttaatttcatttaataggacaaaagtaaaagatagacttaatctacctaaacgaacacaataataatcattgatcatataaatcttatcataatatccacacatttaattgttacgatgatcattatatgaattctctattattttttaccaaaaaaaatgccatcttaaagtcaagtcgtcagcgagtggatgcatacatttcccggtaaatacgggcacgagtggaccacaagggactgacagcaatttgccattggtggattccactcaaagtcaagtgaccgactaagaagagccctttcaaggtggcttctatatatatatatatatatatattttccgaacaatgcacgggaaaccaaatctcccttataaattgatttacaaagtaatttatcggacaatttctctttgtaacttgttacagataccgatactaataatgaagaaattacatatatagtacttgtaatctccatttcctaattttgaaatggtgttccacataagaatttgtctttgatttcttctcttttatgttacgcattcactttcatctaaaaagcttttcagattagtttgttaattatctcatgcacgtaatgatactcgcgcaggaaaaagtaacaaatctactacgataactatcgccattagtg

SEQ ID NO: 94694 - DNA, 806 bp, Eucalyptus grandis
  Intron number 1 from transcript Egrandis_v1_0.039080m (loc us Egrandis_v1_0.039080m.g) derived from phytozome v7.0 (c hr-ID scaffold_833; pos 5548 to 6353)
gttttacgcccctgaaaggtccgcactccatgttatatttgtcaaagaaggatttagttattttagtttttttttttttaaacttttttcatcaaaaaatatttgccgctacatattttggaatttggacttttctcagatccctacgtacttctcttgcttagctttttgtttcttcccgtccttcgtttacatttcgaaggaagactaattttatttcatacatggcatgagtataaaagagaaaaatatttcattttagttaatttagtcattaacctcttaataatttattaatttagttcttcatgtcaattttgattgagagaaatgcaaagacactaaatcttttagtaagatgtttactataaatgatccggcaagaccacgttggggggggggggatataggtcgatcactttggtttaggtcatcggatgcgatactgcatatactaatgggcagattttaataagaaattatagtatatttaatgtagtgctaggatacaagttacatacaaatactagtttacagcgtcactatttttgtgtccgaacaacgaaaaaacatagctcatataatccccccccccccctcccaagacataagaacacttcgcgattttgtatacaaatcttacctacggtgtggacccctagcatgattgccagggaaattgaaaggtgattctgtgataaactgcagatctatatttgaacagtattcttgatagttctatctaccctttgttcgtggcgtaactctttgttttatgatgatgacagacccaacctacttgtcga

SEQ ID NO: 94695 - DNA, 787 bp, Eucalyptus grandis
  Intron number 1 from transcript Egrandis_v1_0.022563m (loc us Egrandis_v1_0.022563m.g) derived from phytozome v7.0 (c hr-ID scaffold_1; pos 32044951 to 32045737 reverse strand)
accaatagacacgaaagggaaaaagagattcaaaggtgatattgcttttccaaatcttagtatttctcatctcttggcacttcctatatgatattatccacaatcctgtaaaactaaggtgagctttacgttagctcattgcactccagaattttgttcggcttctaagagcaatatatgccatataagctgtgtataacttgatgaccaagagaagttttgcctcaatagaagatgatatatggaattctcatttgttgcaattgacatctaaggctgttacattgatattgattgtgagtaaggggcttttaatcatgttgtttgtctttgatgagtttatggcttcttaaaggagctgaaaaaagagacttttcagttccaatctaggaatgagtagtttaatgatgtctggcattattcgagtgttttgagttgaacaacataaaattgactatataaaatttagtttgatcgaaatataaagcaaacataactttcaagaagtttttctctgatggattatggggaattctcgaagtctctggtattttttagtatcatatgggacatagtgttttcctctattggcacgacttgatatctttcttttaaatgtttgtactttcagaaacttatggaattctagttccaatatttgttcccttgggtataatcatatatctgatgaccttgttctttttggagattaacatgctctataaggatgaactgaaacctaaattataagatataattttttatcgtgtggcagttctggtgctta

SEQ ID NO: 94696 - DNA, 727 bp, Eucalyptus grandis
  Intron number 1 from transcript Egrandis_v1_0.048160m (loc us Egrandis_v1_0.048160m.g) derived from phytozome v7.0 (c hr-ID scaffold_3; pos 53631268 to 53631994)
tcaagattagtgtgttatcattatttattatcgtggctattgaaataaaacaaaaaatcattttttaagctaatggactttagaatcttagatctgatttataatgatatttctgcgcgtgattagtgaccctattaggacgtgaaatttgtcaacgacccaattatcgtctacttattaacttccggactctggaattaaactttctgcaactatagtctaaatcagcaatctaaagtcacaaaaccaaatgagacaaaacacttaaaagccttggacagcctctaaaaggtaaaaaatcaaaatcagtacagtgcagaatcttctaaagatcagcatcgaaagataacatatcgagtagattatttggaggtctttttcaattcgttttttattcaatttccatatagatcaaatcattatcctacatctttaattttcatcataattataattgatgatatctctagctatatgatacgatggatcagtgtaaagtaaattcaatcatcttatggtatcaaagcataggaggtcctcatttcaaatcttttcgagccccatttttcttaacttcatttttcttaatcccatttctcttcatctttatcagatagaaacacagagcaagtcttggagaagatacgacagaagccatgaatcacagtcatgatctttttcatcaaaacaagctgaagccgaaggccgtgatcgtaggagggagcat

SEQ ID NO: 94697 - DNA, 634 bp, Eucalyptus grandis
  Intron number 2 from transcript Egrandis_v1_0.002463m (loc us Egrandis_v1_0.002463m.g) derived from phytozome v7.0 (c hr-ID scaffold_7; pos 20615452 to 20616085 reverse strand)
gttcgcgtagaaaatcaaaaaaggttgggtttatcactggaattgacattgaattagtgaaaatttaaatctaattcatgtaaaagcaaatgcacactggagcttatttaaatttagatgaaatgggatcaataataggtagaagaattttcagtgaattttgagagtggggagatattatgctagcatccagttggtgcttaatctttggggaggtcctatatgtgtagtctaacactgatgcaattgtggtgtttctgattattgagtttatcgttgtttttttggtgaaatagggattgtgtgttttgacttagtccataatggaatgtatctttgaggaattgcatattgtatcttgttttttgagggacatgatagatggtattatcattattgtagtcaatattgatgttcttatgctggaatggttgcatttgcctctagtggctacttctcatatggctgcaaccaaatgatgtatcttgctgaagctctagtaagaatgttcaactacccagagttgagggccatcgaggcaatactactgtggataataaagagattggtgtatgtaatttgtttttattgtcatgcagactaagaagaggggtaggagaaaagggtcaagaaa

SEQ ID NO: 94698 - DNA, 994 bp, Eucalyptus grandis
  Intron number 2 from transcript Egrandis_v1_0.052784m (loc us Egrandis_v1_0.052784m.g) derived from phytozome v7.0 (c hr-ID scaffold_9; pos 7937867 to 7938860)
aacccgtagctcctgaaaaattagcagagcccaaggtggtcgaaaccgatgatgtcttgacagaattgggtgagtacatttcgcctggagaaaggagggaaatgaagtcgccatcgtgcttggcttcttctgataagctgatgacgaaatccgatcctgttagccaagatcgaaataagtcctgtgcccgtttgccaatgccatattatgaagctagaggctcttattcaggagatagaaggacttcgaagctcaaggagtacttgcgcccgtatcgttcatcactagactacagtggtatgatttatttcccttaattataactcctatcctctttcaatcgctcaaatgattgaacaggtctcttggttagcatttttcaggcaaggtcaaagagtctgaaaaaagagctaccccttttgagcagattcatcttagatctagatgtacaaacccttctgatgctctcaaaaaggccaggaatccttctttcctcatccttgtgcggcactactacctcgagcactctaacgtggtaagaacttattcattacacaaaacagagttcacaacgttttgatgttgaccgcacagcaagaatttctaacaatattagaatttggtgttagtttttggtatagttttaaatgtgaaagtccgcgcatgcgtctatcgagcttctgggcaaaggagcaacaatgggacaagattgtggtgtatcacaagtggtgatatgcataaaattttctagtagatctatgtacatcaaaaagggtacagtgaggcctactcatagactttgctcaccaacttaagacacatttacagccacatgtctttcgttttttccgtgagctttcatccttatcttgatttttctctttgcccaagtacttcgtcgagaagcaagggaaaaacagcactcctttatcatgtccctaagattagtttcattgtgttcaaagtggtttttacaagcatgtacttgatcagc

SEQ ID NO: 94699 - DNA, 397 bp, Eucalyptus grandis
  Intron number 3 from transcript Egrandis_v1_0.039441m (loc us Egrandis_v1_0.039441m.g) derived from phytozome v7.0 (c hr-ID scaffold_4; pos 31515407 to 31515803 reverse strand)
ggaacagtaacaagcagaatctttttgcagatagggtgagtgcatatgcttgtcttcttcgtaatcttttcctttaggaacctactttccatctgtaagttcactcttcagtggatatatttgtttcgcttcttctaggcacatgacatctgaaatcaaagtggaattccttttggaatttgtcaatcaattgaaatttcagacttatcatgcatagatctgcagataagaatcctgcggcctctgtcataattagcagtatttgggcttgtcactattaatagccactgtacttattttttctagtcgcacacttgtctaaaatttcagcaagcatgcccgtttattctttaataaccttggcccgaaactgacctgcagatttttgatctattcg

SEQ ID NO: 94700 - DNA, 870 bp, Eucalyptus grandis
  Intron number 2 from transcript Egrandis_v1_0.021166m (loc us Egrandis_v1_0.021166m.g) derived from phytozome v7.0 (c hr-ID scaffold_1; pos 14025706 to 14026575)
cgcaaggtcagctttttcgtttctctcgcatttctatctctagatctagtgctcttgtttcgcctctcacattgtgctcttgtagacactttttaccatttgcttaattttcccttttgggtaatgatgaggatgatgatgatcgttggagctgaagtttttacttcgactttctgaatttgacaatgtttcttacattaattggctatgtttcttgcattaatcggctcctggttgtttctgattttgatgacccattataaacatatttggtaattctcattcgtgggtcagattttaaatgttgggcaattgggttcctttctccttggataattagcagtaagggcttcatttatcttacaattagtttgtccttttggcagtccaacaacttcaaatattatctccattgcccgttaaaaacccaccagagagaaagcatagccgctccacgtcagatctgagtgattgttcgacccccagaaactttgaggactcaagaaaaaatgctgtgctctacacccatgtgattgcgttcacactttatgaactcgagactattaccaagagtttccgctccgattacatcctgggggagggtggatttgggactgtgtacaaaggttatattgatgagaatgtgagggttggccttaaatctcttccggttgctgttaaggttctcaacaaggaaggtcttcagggccaccgggaatggcttgtatcgtctttgtccctcacttactcctcacctcttcttctgtttaaatctttgattagcagtatttttgagttgcgccagcttgtttgactgttgatgtatgtttggcagaccgaggtcaactttcttggacagcttagacatcc

SEQ ID NO: 94701 - DNA, 916 bp, Eucalyptus grandis
  Intron number 1 from transcript Egrandis_v1_0.019489m (loc us Egrandis_v1_0.019489m.g) derived from phytozome v7.0 (c hr-ID scaffold_3; pos 16444539 to 16445454 reverse strand)
gggtcttttcttggtgcggtttcgacttgatcataagcttaaatacatgtagtcttctgtctattgatgttgcaatacctgctctttttcctgcataatctctctcaaactaaaggacttattttactagtgggacagtaaaatacccgatcataggtcctccgcttgtagtcaccaccccatcgccggtggggtggtggcaatggccatagcgacccttgcccagatctgggatagggtcactgccttctctctgttctggcaagtgccggcaaccttgctggccatcacggccaccccaccaatgatggagcggtggccacaggtggaaggtttgcttttctgttcctttaaatttcatcttttaaaatttttaatctaattttattaaaatgtaggttaatatagttactgattgaagaaatagaagaaatctttttttatttatttattgtattgcgtcttaaataaaagaaagggttagtcactttttcagctttgatcgatagatatcaaaagggtagcactccgttttttgggcgaaataaaagatatgtcgatcgagcgtaaacgtaacaaatacaaagaaggggcattgttcgcctagtagcgccaccgaaaacaccacttcccaaccgacttgcacgtgttaaacatgcagtcggcatttatcgctcaaggatagcgttatgaaaaccttatattcgcgatgagctggacgagaagaaactctcatgttcggttctgagcatattttatttcataacaattaagggcaatataatccttacgtaagggccattccataaatctttactgaatgtgatattggatgggttcctttatttagagcttccatttgatttctcaaattttttgctcatgtgaatggggttgtatgtgcagttggtgaacc

SEQ ID NO: 94702 - DNA, 1065 bp, Eucalyptus grandis
  Intron number 1 from transcript Egrandis_v1_0.001903m (loc us Egrandis_v1_0.001903m.g) derived from phytozome v7.0 (c hr-ID scaffold_2; pos 62267962 to 62269026)
gccgtgttctggaagatcggccaccaaaatcccaagtgagttcgggttgttatggaaattctccggttccttttcttgcttgtcctgcgagaaagcagaggaagccaaaagccactgaaaatcctgtttcagtaatttaatgcttttttttaggaatttttgttaatgcatgtgcgtttgccggtaggtgagcccctgaaggacaagacattccattcctcgcatccttttaattgatgggatgaattgcaatttcaatctgtgttggcttagatagatcgtggatggaatggttttaggctcgtttgagaaaccctcatagactttgaaacgttgctcctttttttgttcttagccgaagtaggctctaggatgctttttgatgccatacgtgatttttcttcggcgagttttgtccggacccttgtttgttcgccattgatgtttgttgttttgtttcctgtttttcctcctatgtttgactatttcagttcatttccttttgtgccgcccccaccaaattagtctccgccctccgcacggcaacgcaattcccatgctcccattcggttagagatgaatcaactcaaagaagcgagaacgaccttgaaaagcattagaaaaatggcagcttgtgatttttggcaagaactaaatgtttcaatggatgattcctgcactgtcccttccctctgcacagatacatatcttgccaatccgacgttcaatgttagctcatacttaccctcttgagacctgctgcacctcaagagcaaccttaacacgatatttgatttcttctttcgtggctgctgctgctaagaaaaatgaagccaagttaaagtcaatcgtcctttcctttctcctttccttgttgacatagaaacggtctataatcccttcagctaaccttccacaagctgctctccactctgtttgcctcttttagcaaaaggtccctggctgtagcattacgttttggaactctttggtgtcatccatgctgtaatacataatgttgccatggcaggctgttgatttgggaagagtgttactacgagccca

SEQ ID NO: 94703 - DNA, 906 bp, Eucalyptus grandis
  Intron number 1 from transcript Egrandis_v1_0.054961m (loc us Egrandis_v1_0.054961m.g) derived from phytozome v7.0 (c hr-ID scaffold_7; pos 50138744 to 50139649 reverse strand)
tcgtatgatgtgaattctctgttcttctgcatttgtttttcgtgcgagatatgcatgttaagctttttgtttttactctggaagaatgcatgcgacgcttaatgtctatggaagttgtgatttcgtgacactgttagaaaccgactccatctcttctcgagtgttctccggtgggagaaatgatggtaaccaggaaagatgacatgggtaggaagtttcgggggaaacgattgggtaaaacaagtattcacctttgggtttgactgtttccaactggagagaacgatgcaggagcataatcctagttctagttttagtctttacccaggctattaggattaataagtgttcatgcggtagtcatttgactcttttatgagctccggtggttgagataacattagttcttgctgatttaataagtgcggtcggtttaataagcttcaatttatttctattttagcccagttttctgttcttttcgccgtcttttgctcctccaaccacaccaagttggtatcagagttcttgttagcgttttgcctatatcatttgtgccgggtgcactgcttaaagctaatgcaaatcactttacatgccaggctgtcagtgaaattccttgttgaaaattttggtgaaggcaatgattcaatttgatgtaaaaataacttgattgtatgtagaacttgcacatggaagcaagaagattgtagaactactggggcttcatttaagatgttgtgcttatttgccagtggtattttgtaacctttgagtctatctcgttggatattcacatgatggatattgcttttagtttgtttgaaatgactattgatggtttatatgcatatagttatgtaatcgtgcctcagtgcctcccaggttattccttcgcttcgagga

SEQ ID NO: 94704 - DNA, 912 bp, Eucalyptus grandis
  Intron number 2 from transcript Egrandis_v1_0.022442m (loc us Egrandis_v1_0.022442m.g) derived from phytozome v7.0 (c hr-ID scaffold_6; pos 41104255 to 41105166)
ctcattatcaggcttcatcgtcttctgggtaataggtattattgcatatacttcattcacactcctaatttttcgttatatatgtgcttttgataaatcactcattgctttttagatagcatgtccatacttcaattcattaggaagccccctatataaaagagagatttcgtaaagacaaatttaacttgtttatgttgaaccctggtttgagaaagtgtatttttaagcatggtttatgtaatttacatgcccaatatatcgccgtcttcataaccaaatgagagctttttggtcgcaactttcatttggaaaatgctagagatgcaaaatatctacaaaaagacgcacgtggaaaagtctaagtaatgtgtttgttacatagaaaattcaagatttgaaaagcattttcccaaaaaggaaaaaaaaagatttattgggtattatcccacaccgctcaataataagttctaaatgctcttcatattcatgcgatctatttccagctatcaaattaagtttttgggtttgacaatttgtcatgatatcatgagattctgctttttttcttaccaatctctctttacaaatcatttatttttttagcaccgctcttttttgtcacatatccatcattagagatattatattgacaatgttattttgctgaacttattctccgattctcttagtttacatgacccctcaaatcacaatttatgaacatgtaaattagcttatgctttccattaaaataacaggagatactatccattatgcttttccgttctcataatactttgatatgaaggtataatcgtcaaattaaattctaaattttatgccttttcccctctcattaatttgcgtcacacaggtgggctttgatagctgctaggcttccgggacgaa

SEQ ID NO: 94705 - DNA, 446 bp, Eucalyptus grandis
  Intron number 2 from transcript Egrandis_v1_0.048007m (loc us Egrandis_v1_0.048007m.g) derived from phytozome v7.0 (c hr-ID scaffold_11; pos 38556059 to 38556504 reverse strand )
gaacgagccgtggagaagcaaatccggacttccaggtttgtttggtctgccttgctcccatgtgcacttgtgtgttgccatcgagctctactcgagcgcgagatttgagtccttaatgtgtttaaagtgttgcggccggtatagatattctgagtgtgccgttgtttatttatgtcttgattctgcttcccattattgtcctccggcggttattgatcgaatttgacggcggtgcctgacatcttcctctttcgttttcttgtaaccgtcaatctgagttgtttagagaacattctacatctgcaatttatctttagatttatctctcttttatgaagatgagatgctcaaaagatacagagtagtacatttgattaatgctttcttagtaatatcccggtggatgtgtactaccaagagagtaacttaattattcgattaaccag

SEQ ID NO: 94706 - DNA, 252 bp, Eucalyptus grandis
  Intron number 1 from transcript Egrandis_v1_0.038534m (loc us Egrandis_v1_0.038534m.g) derived from phytozome v7.0 (c hr-ID scaffold_5; pos 24960839 to 24961090)
ggtgtggactcatacgcaagcattcaaagttttatagaaaatgcaggtaaatcttcattccttctttggaaagaagtttggttttcgttcctatagcattgattaattattctatagcacttactgatgtggtttatcaatcgttttgaatgttaggagaagatttaattgttttcccttgaaggacatcaacattgtaaatcatggttttttctaacttccattttttgtttttattttggcagagtggag

SEQ ID NO: 94707 - DNA, 592 bp, Eucalyptus grandis
  Intron number 1 from transcript Egrandis_v1_0.046420m (loc us Egrandis_v1_0.046420m.g) derived from phytozome v7.0 (c hr-ID scaffold_7; pos 47033430 to 47034021)
gagagccggggcgtcgtgctggggatactgaaagggtaggtttacacaaatttaatatccttacgtatggatttggcggttcacgtttgttttattcattcatgattaactcaataattggacgagtgaatccaacacaagttaacgaaaactggtttttatgtgtgcaaatgatacgtgaacaacatttcctttcgagctgctggtcaagagagaagaccagttcttgatcttgcaagataactaatcaagttacaagttttgaaattaattcactcgacgtgtcttggtttatatacgcggcgaagttttgctctttgtttcaagttgtgaattttcttgtttcgattgcatgcattttctaacttgttgcgtatactcaaccacatgatcggtagaatcatgcaatatgtattatttccttatttccaaaaaaggagaggcaaatttaaactcataccctggtcatgaaagaaatttgagaactttctgtcccctaaattgcctaataagtttctttcactgattaaaaaagaaaaaaagaataatttcgaataatcgttcaatttctctaaactttttttgggcagct
